United States Patent Application Publication US 2023/0026259 A1 - sequence listing, part 7

SEQ ID NO: 28375 - protein, 367 aa, Homo sapiens
  Payload ID: 5566
  Gene Symbol: ETV1
  Gene Name: ets variant 1
  ENSP ID: ENSP00000413836
MDGFYDQQVPYMVTNSQRGRNCNEKPTNVRKRKFINRDLAHDSEELFQDLSQLQETWLAEAQVPDNDEQFVPDYQAESLAFHGLPLKIKKEPHSPCSEISSACSQEQPFKFSYGEKCLYNVSAYDQKPQVGMRPSNPPTPSSTPVSPLHHASPNSTHTPKPDRAFPAHLPPSQSIPDSSYPMDHRFRRQLSEPCNSFPPLPTMPREGRPMYQRQMSEPNIPFPPQGFKQEYHDPVYEHNTMVGSAASQSFPPPLMIKQEPRDFAYDSEVPSCHSIYMRQEGFLAHPSRTEGCMFEKGPRQFYDDTCVVPEKFDGFSNVALSVIILRGICLSTDHRRHQTRARNVSGRTHIPTARITSALAVFGSSSG

SEQ ID NO: 28376 - protein, 155 aa, Homo sapiens
  Payload ID: 5567
  Gene Symbol: ETV2
  Gene Name: ets variant 2
  ENSP ID: ENSP00000368309
MDLWNWDEASPQEVPPGNKLAGLEGAKLGFCFPDLALQGDTPTATAETCWKGPIQLWQFLLELLHDGARSSCIRWTGNSREFQLCDPKEVARLWGERKRKPGMNYEKLSRGLRYYYRRDIVRKSGGRKYTYRFGGRVPSLAYPDCAGGGRGAETQ

SEQ ID NO: 28377 - protein, 370 aa, Homo sapiens
  Payload ID: 5567
  Gene Symbol: ETV2
  Gene Name: ets variant 2
  Uniprot ID: O00321
  ENSP ID: ENSP00000368312
MDLWNWDEASPQEVPPGNKLAGLGRLPRLPQRVWGGCPGGASADPNPLSPAEGAKLGFCFPDLALQGDTPTATAETCWKGTSSSLASFPQLDWGSALLHPEVPWGAEPDSQALPWSGDWTDMACTAWDSWSGASQTLGPAPLGPGPIPAAGSEGAAGQNCVPVAGEATSWSRAQAAGSNTSWDCSVGPDGDTYWGSGLGGEPRTDCTISWGGPAGPDCTTSWNPGLHAGGTTSLKRYQSSALTVCSEPSPQSDRASLARCPKTNHRGPIQLWQFLLELLHDGARSSCIRWTGNSREFQLCDPKEVARLWGERKRKPGMNYEKLSRGLRYYYRRDIVRKSGGRKYTYRFGGRVPSLAYPDCAGGGRGAETQ

SEQ ID NO: 28378 - protein, 342 aa, Homo sapiens
  Payload ID: 5567
  Gene Symbol: ETV2
  Gene Name: ets variant 2
  Uniprot ID: O00321
  ENSP ID: ENSP00000384524
MDLWNWDEASPQEVPPGNKLAGLEGAKLGFCFPDLALQGDTPTATAETCWKGTSSSLASFPQLDWGSALLHPEVPWGAEPDSQALPWSGDWTDMACTAWDSWSGASQTLGPAPLGPGPIPAAGSEGAAGQNCVPVAGEATSWSRAQAAGSNTSWDCSVGPDGDTYWGSGLGGEPRTDCTISWGGPAGPDCTTSWNPGLHAGGTTSLKRYQSSALTVCSEPSPQSDRASLARCPKTNHRGPIQLWQFLLELLHDGARSSCIRWTGNSREFQLCDPKEVARLWGERKRKPGMNYEKLSRGLRYYYRRDIVRKSGGRKYTYRFGGRVPSLAYPDCAGGGRGAETQ

SEQ ID NO: 28379 - protein, 342 aa, Homo sapiens; identical to SEQ ID NO: 28378
  Payload ID: 5567
  Gene Symbol: ETV2
  Gene Name: ets variant 2
  Uniprot ID: O00321
  ENSP ID: ENSP00000385369

SEQ ID NO: 28380 - protein, 249 aa, Homo sapiens
  Payload ID: 5567
  Gene Symbol: ETV2
  Gene Name: ets variant 2
  ENSP ID: ENSP00000468453
MACTAWDSWSGASQTLGPAPLGPGPIPAAGSEGAAGQNCVPVAGEATSWSRAQAAGSNTSWDCSVGPDGDTYWGSGLGGEPRTDCTISWGGPAGPDCTTSWNPGLHAGGTTSLKRYQSSALTVCSEPSPQSDRASLARCPKTNHRGPIQLWQFLLELLHDGARSSCIRWTGNSREFQLCDPKEVARLWGERKRKPGMNYEKLSRGLRYYYRRDIVRKSGGRKYTYRFGGRVPSLAYPDCAGGGRGAETQ

SEQ ID NO: 28381 - protein, 95 aa, Homo sapiens
  Payload ID: 5567
  Gene Symbol: ETV2
  Gene Name: ets variant 2
  ENSP ID: ENSP00000475089
QSSALTVCSEPSPQSDRASLARCPKTNHRGPIQLWQFLLELLHDGARSSCIRWTGNSREFQLCDPKEVGQLPCPAKSAPSLLVQFSSAQGLGSTA

SEQ ID NO: 28382 - protein, 184 aa, Homo sapiens [sequence omitted]

SEQ ID NO: 28383 - protein, 184 aa, Homo sapiens [sequence omitted]

SEQ ID NO: 28384 - protein, 143 aa, Homo sapiens
  Payload ID: 5568
  Gene Symbol: ETV3
  Gene Name: ets variant 3
  Uniprot ID: P41162
  ENSP ID: ENSP00000327316
MKAGCSIVEKPEGGGGYQFPDWAYKTESSPGSRQIQLWHFILELLQKEEFRHVIAWQQGEYGEFVIKDPDEVARLWGRRKCKPQMNYDKLSRALRYYYNKRILHKTKGKRFTYKFNFNKLVMPNYPFINIRSSGKIQTLLVGN

SEQ ID NO: 28385 - protein, 512 aa, Homo sapiens
  Payload ID: 5568
  Gene Symbol: ETV3
  Gene Name: ets variant 3
  Uniprot ID: P41162
  ENSP ID: ENSP00000357175
MKAGCSIVEKPEGGGGYQFPDWAYKTESSPGSRQIQLWHFILELLQKEEFRHVIAWQQGEYGEFVIKDPDEVARLWGRRKCKPQMNYDKLSRALRYYYNKRILHKTKGKRFTYKFNFNKLVMPNYPFINIRSSGVVPQSAPPVPTASSRFHFPPLDTHSPTNDVQPGRFSASSLTASGQESSNGTDRKTELSELEDGSAADWRRGVDPVSSRNAIGGGGIGHQKRKPDIMLPLFARPGMYPDPHSPFAVSPIPGRGGVLNVPISPALSLTPTIFSYSPSPGLSPFTSSSCFSFNPEEMKHYLHSQACSVFNYHLSPRTFPRYPGLMVPPLQCQMHPEESTQFSIKLQPPPVGRKNRERVESSEESAPVTTPTMASIPPRIKVEPASEKDPESLRQSAREKEEHTQEEGTVPSRTIEEEKGTIFARPAAPPIWPSVPISTPSGEPLEVTEDSEDRPGKEPSAPEKKEDALMPPKLRLKRRWNDDPEARELSKSGKFLWNGSGPQGLATAAADA

SEQ ID NO: 28386 - protein, 361 aa, Homo sapiens
  Payload ID: 5569
  Gene Symbol: ETV3L
  Gene Name: ets variant 3-like
  Uniprot ID: Q6ZN32
  ENSP ID: ENSP00000430271
MHCSCLAEGIPANPGNWISGLAFPDWAYKAESSPGSRQIQLWHFILELLQKEEFRHVIAWQQGEYGEFVIKDPDEVARLWGRRKCKPQMNYDKLSRALRYYYNKRILHKTKGKRFTYKFNFSKLIVVNYPLWEVRAPPSPHLLLGAPALCRPALVPVGVQSELLHSMLFAHQAMVEQLTGQQTPRGPPETSGDKKGSSSSVYRLGSAPGPCRLGLCCHLGSVQGELPGVASFTPPLPPPLPSNWTCLSGPFLPPLPSEQQLPGAFKPDILLPGPRSLPGAWHFPGLPLLAGLGQGAGERLWLLSLRPEGLEVKPAPMMEAKGGLDPREVFCPETRRLKTGEESLTSPNLENLKAVWPLDPP

SEQ ID NO: 28387 - protein, 484 aa, Homo sapiens
  Payload ID: 5570
  Gene Symbol: ETV4
  Gene Name: ets variant 4
  Uniprot ID: P43268
  ENSP ID: ENSP00000321835
MERRMKAGYLDQQVPYTFSSKSPGNGSLREALIGPLGKLMDPGSLPPLDSEDLFQDLSHFQETWLAEAQVPDSDEQFVPDFHSENLAFHSPTTRIKKEPQSPRTDPALSCSRKPPLPYHHGEQCLYSSAYDPPRQIAIKSPAPGALGQSPLQPFPRAEQRNFLRSSGTSQPHPGHGYLGEHSSVFQQPLDICHSFTSQGGGREPLPAPYQHQLSEPCPPYPQQSFKQEYHDPLYEQAGQPAVDQGGVNGHRYPGAGVVIKQEQTDFAYDSDVTGCASMYLHTEGFSGPSPGDGAMGYGYEKPLRPFPDDVCVVPEKFEGDIKQEGVGAFREGPPYQRRGALQLWQFLVALLDDPTNAHFIAWTGRGMEFKLIEPEEVARLWGIQKNRPAMNYDKLSRSLRYYYEKGIMQKVAGERYVYKFVCEPEALFSLAFPDNQRPALKAEFDRPVSEEDTVPLSHLDESPAYLPELAGPAQPFGPKGGYSY

SEQ ID NO: 28388 - protein, 484 aa, Homo sapiens; identical to SEQ ID NO: 28387
  Payload ID: 5570
  Gene Symbol: ETV4
  Gene Name: ets variant 4
  Uniprot ID: P43268
  ENSP ID: ENSP00000377273

SEQ ID NO: 28389 - protein, 445 aa, Homo sapiens
  Payload ID: 5570
  Gene Symbol: ETV4
  Gene Name: ets variant 4
  Uniprot ID: P43268
  ENSP ID: ENSP00000440023
MDPGSLPPLDSEDLFQDLSHFQETWLAEAQVPDSDEQFVPDFHSENLAFHSPTTRIKKEPQSPRTDPALSCSRKPPLPYHHGEQCLYSSAYDPPRQIAIKSPAPGALGQSPLQPFPRAEQRNFLRSSGTSQPHPGHGYLGEHSSVFQQPLDICHSFTSQGGGREPLPAPYQHQLSEPCPPYPQQSFKQEYHDPLYEQAGQPAVDQGGVNGHRYPGAGVVIKQEQTDFAYDSDVTGCASMYLHTEGFSGPSPGDGAMGYGYEKPLRPFPDDVCVVPEKFEGDIKQEGVGAFREGPPYQRRGALQLWQFLVALLDDPTNAHFIAWTGRGMEFKLIEPEEVARLWGIQKNRPAMNYDKLSRSLRYYYEKGIMQKVAGERYVYKFVCEPEALFSLAFPDNQRPALKAEFDRPVSEEDTVPLSHLDESPAYLPELAGPAQPFGPKGGYSY

SEQ ID NO: 28390 - protein, 430 aa, Homo sapiens
  Payload ID: 5570
  Gene Symbol: ETV4
  Gene Name: ets variant 4
  ENSP ID: ENSP00000441749
MERRMKAGYLDQQVPYTFSSKSPGNGSLREALIGPLGKLMDPGSLPPLDSEDLFQDLSHFQETWLAEAQVPDSDEQFVPDFHSENLAFHSPTTRIKKEPQSPRTDPALSCSRKPPLPYHHGEQCLYSSSVFQQPLDICHSFTSQGGGREPLPAPYQHQLSEPCPPYPQQSFKQEYHDPLYEQAGQPAVDQGGVNGHRYPGAGVVIKQEQTDFAYDSDVTGCASMYLHTEGFSGPSPGDGAMGYGYEKPLRPFPDDVCVVPEKFEGDIKQEGVGAFREGPPYQRRGALQLWQFLVALLDDPTNAHFIAWTGRGMEFKLIEPEEVARLWGIQKNRPAMNYDKLSRSLRYYYEKGIMQKVAGERYVYKFVCEPEALFSLAFPDNQRPALKAEFDRPVSEEDTVPLSHLDESPAYLPELAGPAQPFGPKGGYSY

SEQ ID NO: 28391 - protein, 445 aa, Homo sapiens; identical to SEQ ID NO: 28389
  Payload ID: 5570
  Gene Symbol: ETV4
  Gene Name: ets variant 4
  Uniprot ID: P43268
  ENSP ID: ENSP00000443846

SEQ ID NO: 28392 - protein, 484 aa, Homo sapiens; identical to SEQ ID NO: 28387
  Payload ID: 5570
  Gene Symbol: ETV4
  Gene Name: ets variant 4
  Uniprot ID: P43268
  ENSP ID: ENSP00000465718

SEQ ID NO: 28393 - protein, 28 aa, Homo sapiens
  Payload ID: 5570
  Gene Symbol: ETV4
  Gene Name: ets variant 4
  ENSP ID: ENSP00000466673
MDPGSLPPLDSEDLFQDLSHFQETWLAE

SEQ ID NO: 28394 - protein, 207 aa, Homo sapiens
  Payload ID: 5570
  Gene Symbol: ETV4
  Gene Name: ets variant 4
  Uniprot ID: P43268
  ENSP ID: ENSP00000468636
MYLHTEGFSGPSPGDGAMGYGYEKPLRPFPDDVCVVPEKFEGDIKQEGVGAFREGPPYQRRGALQLWQFLVALLDDPTNAHFIAWTGRGMEFKLIEPEEVARLWGIQKNRPAMNYDKLSRSLRYYYEKGIMQKVAGERYVYKFVCEPEALFSLAFPDNQRPALKAEFDRPVSEEDTVPLSHLDESPAYLPELAGPAQPFGPKGGYSY

SEQ ID NO: 28395 - protein, 510 aa, Homo sapiens
  Payload ID: 5571
  Gene Symbol: ETV5
  Gene Name: ets variant 5
  Uniprot ID: P41161
  ENSP ID: ENSP00000306894
MDGFYDQQVPFMVPGKSRSEECRGRPVIDRKRKFLDTDLAHDSEELFQDLSQLQEAWLAEAQVPDDEQFVPDFQSDNLVLHAPPPTKIKRELHSPSSELSSCSHEQALGANYGEKCLYNYCAYDRKPPSGFKPLTPPTTPLSPTHQNPLFPPPQATLPTSGHAPAAGPVQGVGPAPAPHSLPEPGPQQQTFAVPRPPHQPLQMPKMMPENQYPSEQRFQRQLSEPCHPFPPQPGVPGDNRPSYHRQMSEPIVPAAPPPPQGFKQEYHDPLYEHGVPGMPGPPAHGFQSPMGIKQEPRDYCVDSEVPNCQSSYMRGGYFSSSHEGFSYEKDPRLYFDDTCVVPERLEGKVKQEPTMYREGPPYQRRGSLQLWQFLVTLLDDPANAHFIAWTGRGMEFKLIEPEEVARRWGIQKNRPAMNYDKLSRSLRYYYEKGIMQKVAGERYVYKFVCDPDALFSMAFPDNQRPFLKAESECHLSEEDTLPLTHFEDSPAYLLDMDRCSSLPYAEGFAY

SEQ ID NO: 28396 - protein, 132 aa, Homo sapiens
  Payload ID: 5571
  Gene Symbol: ETV5
  Gene Name: ets variant 5
  ENSP ID: ENSP00000388737
MDGFYDQQVPFMVPGKSRSEECRGRPVIDRKRKFLDTDLAHDSEELFQDLSQLQEAWLAEAQVPDDEQFVPDFQSDNPFLFKLPQEFMIPFQFQFVAILYSPGSLSSFSKSAVQSGASCPTSNQDQTGAAQP

SEQ ID NO: 28397 - protein, 150 aa, Homo sapiens
  Payload ID: 5571
  Gene Symbol: ETV5
  Gene Name: ets variant 5
  ENSP ID: ENSP00000389707
MDGFYDQQVPFMVPGKSRSEECRGRPVIDRKRKFLDTDLAHDSEELFQDLSQLQEAWLAEAQVPDDEQFVPDFQSDNLVLHAPPPTKIKRELHSPSSELSSCSHEQALGANYGEKCLYNYCAYDRKPPSGFKPLTPPTTPLSPTHQNPLF

SEQ ID NO: 28398 - protein, 89 aa, Homo sapiens
  Payload ID: 5571
  Gene Symbol: ETV5
  Gene Name: ets variant 5
  ENSP ID: ENSP00000399707
  MOD_RES (1)..(1): Any amino acid
XVPAAPPPPQGFKQEYHDPLYEHGVPGMPGPPAHGFQSPMGIKQEPRDYCVDSEVPNCQSSYMRGGYFSSSHEGCSALGHPEEPASHEL

SEQ ID NO: 28399 - protein, 132 aa, Homo sapiens
  Payload ID: 5571
  Gene Symbol: ETV5
  Gene Name: ets variant 5
  ENSP ID: ENSP00000405157
MDGFYDQQVPFMVPGKSRSEECRGRPVIDRKRKFLDTDLAHDSEELFQDLSQLQEAWLAEAQVPDDEQFVPDFQSDNLVLHAPPPTKIKRELHSPSSELSSCSHEQALGANYGEKCLYNYCAYDRKPPSGFK

SEQ ID NO: 28400 - protein, 140 aa, Homo sapiens
  Payload ID: 5571
  Gene Symbol: ETV5
  Gene Name: ets variant 5
  ENSP ID: ENSP00000412171
MDGFYDQQVPFMVPGKSRSEECRGRPVIDRKRKFLDTDLAHDSEELFQDLSQLQEAWLAEAQVPDDEQFVPDFQSDNLVLHAPPPTKIKRELHSPSSELSSCSHEQALGANYGEKCLYNYCAYDRKPPSGFKPLTPPTTP

SEQ ID NO: 28401 - protein, 510 aa, Homo sapiens; identical to SEQ ID NO: 28395
  Payload ID: 5571
  Gene Symbol: ETV5
  Gene Name: ets variant 5
  Uniprot ID: P41161
  ENSP ID: ENSP00000413755

SEQ ID NO: 28402 - protein, 50 aa, Homo sapiens
  Payload ID: 5572
  Gene Symbol: ETV6
  Gene Name: ets variant 6
  ENSP ID: ENSP00000266427
  MOD_RES (1)..(1): Any amino acid
XMTYEKMSRALRHYYKLNIIRKEPGQRLLFRFLFFLPRGSGLFLLLLGLG

SEQ ID NO: 28403 - protein, 452 aa, Homo sapiens
  Payload ID: 5572
  Gene Symbol: ETV6
  Gene Name: ets variant 6
  Uniprot ID: P41212
  ENSP ID: ENSP00000379658
MSETPAQCSIKQERISYTPPESPVPSYASSTPLHVPVPRALRMEEDSIRLPAHLRLQPIYWSRDDVAQWLKWAENEFSLRPIDSNTFEMNGKALLLLTKEDFRYRSPHSGDVLYELLQHILKQRKPRILFSPFFHPGNSIHTQPEVILHQNHEEDNCVQRTPRPSVDNVHHNPPTIELLHRSRSPITTNHRPSPDPEQRPLRSPLDNMIRRLSPAERAQGPRPHQENNHQESYPLSVSPMENNHCPASSESHPKPSSPRQESTRVIQLMPSPIMHPLILNPRHSVDFKQSRLSEDGLHREGKPINLSHREDLAYMNHIMVSVSPPEEHAMPIGRIADCRLLWDYVYQLLSDSRYENFIRWEDKESKIFRIVDPNGLARLWGNHKNRTNMTYEKMSRALRHYYKLNIIRKEPGQRLLFRFMKTPDEIMSGRTDRLEHLESQELDEQIYQEDEC

SEQ ID NO: 28404 - protein, 88 aa, Homo sapiens
  Payload ID: 5572
  Gene Symbol: ETV6
  Gene Name: ets variant 6
  ENSP ID: ENSP00000441463
SSTPLHVPVPRALRMEEDSIRLPAHLRLQPIYWSRDDVAQWLKWAENEFSLRPIDSNTFEMNGKALLLLTKEDFRYRSPHSDLDSDVT

SEQ ID NO: 28405 - protein, 341 aa, Homo sapiens
  Payload ID: 5573
  Gene Symbol: ETV7
  Gene Name: ets variant 7
  Uniprot ID: Q9Y603
  ENSP ID: ENSP00000341843
MQEGELAISPISPVAAMPPLGTHVQARCEAQINLLGEGGICKLPGRLRIQPALWSREDVLHWLRWAEQEYSLPCTAEHGFEMNGRALCILTKDDFRHRAPSSGDVLYELLQYIKTQRRALVCGPFFGGIFRLKTPTQHSPVPPEEVTGPSQMDTRRGHLLQPPDPGLTSNFGHLDDPGLARWTPGKEESLNLCHCAELGCRTQGVCSFPAMPQAPIDGRIADCRLLWDYVYQLLLDTRYEPYIKWEDKDAKIFRVVDPNGLARLWGNHKNRVNMTYEKMSRALRHYYKLNIIKKEPGQKLLFRFLKTPGKMVQDKHSHLEPLESQEQDRIEFKDKRPEISP

SEQ ID NO: 28406 - protein, 317 aa, Homo sapiens
  Payload ID: 5573
  Gene Symbol: ETV7
  Gene Name: ets variant 7
  Uniprot ID: Q9Y603
  ENSP ID: ENSP00000342260
MQEGELAISPISPVAAMPPLGTHVQARCEAQINLLGEGGICKLPGRLRIQPALWSREDVLHWLRWAEQEYSLPCTAEHGFEMNGRALCILTKDDFRHRAPSSGDVLYELLQYIKTQRRALVCGPFFGGIFRLKTPTQHSPVPPEEVTGPSQMDTRRGHLLQPPDPGLTSNFGHLDDPGLARWTPGKEESLNLCHCAELGCRTQGVCSFPAMPQAPIDGRIADCRLLWDYVYQLLLDTRYEPYIKWEDKDAKIFRVVDPNGLARLWGNHKNRVNMTYEKMSRALRHYYKLNIIKKEPGQKLLFRNGLQLIFIFIWSFQ

SEQ ID NO: 28407 - protein, 264 aa, Homo sapiens
  Payload ID: 5573
  Gene Symbol: ETV7
  Gene Name: ets variant 7
  Uniprot ID: Q9Y603
  ENSP ID: ENSP00000362842
MQEGELAISPISPVAAMPPLGTHVQARCEAQINLLGEGGICKLPGRLRIQPALWSREDVLHWLRWAEQEYSLPCTAEHGFEMNGRALCILTKDDFRHRAPSSGDVLYELLQYIKTQRRALVCGPFFGGIFRLKTPTQHSPVPPEDCRLLWDYVYQLLLDTRYEPYIKWEDKDAKIFRVVDPNGLARLWGNHKNRVNMTYEKMSRALRHYYKLNIIKKEPGQKLLFRFLKTPGKMVQDKHSHLEPLESQEQDRIEFKDKRPEISP

SEQ ID NO: 28408 - protein, 286 aa, Homo sapiens
  Payload ID: 5573
  Gene Symbol: ETV7
  Gene Name: ets variant 7
  Uniprot ID: Q9Y603
  ENSP ID: ENSP00000362843
MQEGELAISPISPVAAMPPLGTHVQARCEAQINLLGEGGICKLPGRLRDVLYELLQYIKTQRRALVCGPFFGGIFRLKTPTQHSPVPPEEVTGPSQMDTRRGHLLQPPDPGLTSNFGHLDDPGLARWTPGKEESLNLCHCAELGCRTQGVCSFPAMPQAPIDGRIADCRLLWDYVYQLLLDTRYEPYIKWEDKDAKIFRVVDPNGLARLWGNHKNRVNMTYEKMSRALRHYYKLNIIKKEPGQKLLFRFLKTPGKMVQDKHSHLEPLESQEQDRIEFKDKRPEISP

SEQ ID NO: 28409 - protein, 190 aa, Homo sapiens
  Payload ID: 5573
  Gene Symbol: ETV7
  Gene Name: ets variant 7
  Uniprot ID: Q9Y603
  ENSP ID: ENSP00000440592
MDTRRGHLLQPPDPGLTSNFGHLDDPGLARWTPGKEESLNLCHCAELGCRTQGVCSFPAMPQAPIDGRIADCRLLWDYVYQLLLDTRYEPYIKWEDKDAKIFRVVDPNGLARLWGNHKNRVNMTYEKMSRALRHYYKLNIIKKEPGQKLLFRFLKTPGKMVQDKHSHLEPLESQEQDRIEFKDKRPEISP

SEQ ID NO: 28410 - protein, 282 aa, Homo sapiens
  Payload ID: 5573
  Gene Symbol: ETV7
  Gene Name: ets variant 7
  Uniprot ID: Q9Y603
  ENSP ID: ENSP00000481885
MHRGARVRDERTRPLHPHQGRLPAPCAQLRSGKRTGFPLSGNPGDVLYELLQYIKTQRRALVCGPFFGGIFRLKTPTQHSPVPPEEVTGPSQMDTRRGHLLQPPDPGLTSNFGHLDDPGLARWTPGKEESLNLCHCAELGCRTQGVCSFPAMPQAPIDGRIADCRLLWDYVYQLLLDTRYEPYIKWEDKDAKIFRVVDPNGLARLWGNHKNRVNMTYEKMSRALRHYYKLNIIKKEPGQKLLFRFLKTPGKMVQDKHSHLEPLESQEQDRIEFKDKRPEISP

SEQ ID NO: 28411 - protein, 260 aa, Homo sapiens
  Payload ID: 5573
  Gene Symbol: ETV7
  Gene Name: ets variant 7
  Uniprot ID: Q9Y603
  ENSP ID: ENSP00000484485
MNGRALCILTKDDFRHRAPSSGDVLYELLQYIKTQRRALVCGPFFGGIFRLKTPTQHSPVPPEEVTGPSQMDTRRGHLLQPPDPGLTSNFGHLDDPGLARWTPGKEESLNLCHCAELGCRTQGVCSFPAMPQAPIDGRIADCRLLWDYVYQLLLDTRYEPYIKWEDKDAKIFRVVDPNGLARLWGNHKNRVNMTYEKMSRALRHYYKLNIIKKEPGQKLLFRFLKTPGKMVQDKHSHLEPLESQEQDRIEFKDKRPEISP

SEQ ID NO: 28412 - protein, 262 aa, Homo sapiens
  Payload ID: 5573
  Gene Symbol: ETV7
  Gene Name: ets variant 7
  Uniprot ID: Q9Y603
  ENSP ID: ENSP00000486712
MQEGELAISPISPVAAMPPLGTHVQARCEAQINLLGEGGICKLPGRLRDVLYELLQYIKTQRRALVCGPFFGGIFRLKTPTQHSPVPPEEVTGPSQMDTRRGHLLQPPDPGLTSNFGHLDDPGLARWTPGKEESLNLCHCAELGCRTQGVCSFPAMPQAPIDGRIADCRLLWDYVYQLLLDTRYEPYIKWEDKDAKIFRVVDPNGLARLWGNHKNRVNMTYEKMSRALRHYYKLNIIKKEPGQKLLFRNGLQLIFIFIWSFQ

SEQ ID NO: 28413 - protein, 548 aa, Homo sapiens
  Payload ID: 5574
  Gene Symbol: ERF
  Gene Name: Ets2 repressor factor
  Uniprot ID: P50548
  ENSP ID: ENSP00000222329
MKTPADTGFAFPDWAYKPESSPGSRQIQLWHFILELLRKEEYQGVIAWQGDYGEFVIKDPDEVARLWGVRKCKPQMNYDKLSRALRYYYNKRILHKTKGKRFTYKFNFNKLVLVNYPFIDVGLAGGAVPQSAPPVPSGGSHFRFPPSTPSEVLSPTEDPRSPPACSSSSSSLFSAVVARRLGRGSVSDCSDGTSELEEPLGEDPRARPPGPPDLGAFRGPPLARLPHDPGVFRVYPRPRGGPEPLSPFPVSPLAGPGSLLPPQLSPALPMTPTHLAYTPSPTLSPMYPSGGGGPSGSGGGSHFSFSPEDMKRYLQAHTQSVYNYHLSPRAFLHYPGLVVPQPQRPDKCPLPPMAPETPPVPSSASSSSSSSSSPFKFKLQPPPLGRRQRAAGEKAVAGADKSGGSAGGLAEGAGALAPPPPPPQIKVEPISEGESEEVEVTDISDEDEEDGEVFKTPRAPPAPPKPEPGEAPGASQCMPLKLRFKRRWSEDCRLEGGGGPAGGFEDEGEDKKVRGEGPGEAGGPLTPRRVSSDLQHATAQLSLEHRDS

SEQ ID NO: 28414 - protein, 473 aa, Homo sapiens
  Payload ID: 5574
  Gene Symbol: ERF
  Gene Name: Ets2 repressor factor
  Uniprot ID: P50548
  ENSP ID: ENSP00000388173
MNYDKLSRALRYYYNKRILHKTKGKRFTYKFNFNKLVLVNYPFIDVGLAGGAVPQSAPPVPSGGSHFRFPPSTPSEVLSPTEDPRSPPACSSSSSSLFSAVVARRLGRGSVSDCSDGTSELEEPLGEDPRARPPGPPDLGAFRGPPLARLPHDPGVFRVYPRPRGGPEPLSPFPVSPLAGPGSLLPPQLSPALPMTPTHLAYTPSPTLSPMYPSGGGGPSGSGGGSHFSFSPEDMKRYLQAHTQSVYNYHLSPRAFLHYPGLVVPQPQRPDKCPLPPMAPETPPVPSSASSSSSSSSSPFKFKLQPPPLGRRQRAAGEKAVAGADKSGGSAGGLAEGAGALAPPPPPPQIKVEPISEGESEEVEVTDISDEDEEDGEVFKTPRAPPAPPKPEPGEAPGASQCMPLKLRFKRRWSEDCRLEGGGGPAGGFEDEGEDKKVRGEGPGEAGGPLTPRRVSSDLQHATAQLSLEHRDS

SEQ ID NO: 28415 - protein, 61 aa, Homo sapiens
  Payload ID: 5574
  Gene Symbol: ERF
  Gene Name: Ets2 repressor factor
  ENSP ID: ENSP00000468962
MNYDKLSRALRYYYNKRILHKTKGKRFTYKFNFNKLVLVNYPFIDVGLAGAVPHRGPPLTT

SEQ ID NO: 28416 - protein, 98 aa, Homo sapiens
  Payload ID: 5574
  Gene Symbol: ERF
  Gene Name: Ets2 repressor factor
  ENSP ID: ENSP00000469274
MNYDKLSRALRYYYNKRILHKTKGKRFTYKFNFNKLVLVNYPFIDVGLAGGAVPQSAPPVPSGGSHFRFPPSTPSEVLSPTEDPRSPPACSSSSSSLF

SEQ ID NO: 28417 - protein, 808 aa, Homo sapiens
  Payload ID: 5575
  Gene Symbol: EHMT1
  Gene Name: euchromatic histone-lysine N-methyltransferase 1
  Uniprot ID: Q9H9B1
  ENSP ID: ENSP00000417328
MAAADAEAVPARGEPQQDCCVKTELLGEETPMAADEGSAEKQAGEAHMAADGETNGSCENSDASSHANAAKHTQDSARVNPQDGTNTLTRIAENGVSERDSEAAKQNHVTADDFVQTSVIGSNGYILNKPALQAQPLRTTSTLASSLPGHAAKTLPGGAGKGRTPSAFPQTPAAPPATLGEGSADTEDRKLPAPGADVKVHRARKTMPKSVVGLHAASKDPREVREARDHKEPKEEINKNISDFGRQQLLPPFPSLHQSLPQNQCYMATTKSQTACLPFVLAAAVSRKKKRRMGTYSLVPKKKTKVLKQRTVIEMFKSITHSTVGSKGEKDLGASSLHVNGESLEMDSDEDDSEELEEDDGHGAEQAAAFPTEDSRTSKESMSEADRAQKMDGESEEEQESVDTGEEEEGGDESDLSSESSIKKKFLKRKGKTDSPWIKPARKRRRRSRKKPSGALGSESYKSSAGSAEQTAPGDSTGYMEVSLDSLDLRVKGILSSQAEGLANGPDVLETDGLQEVPLCSCRMETPKSREITTLANNQCMATESVDHELGRCTNSVVKYELMRPSNKAPLLVLCEDHRGRMVKHQCCPGCGYFCTAGNFMECQPESSISHRFHKDCASRVNNASYCPHCGEESSKAKEVTIAKADTTSTVTPVPGQEKGSALEGRADTTTGSAAGPPLSEDDKLQGAASHVPEGFDPTGPAGLGRPTPGLSQGPGKETLESALIALDSEKPKKLRFHPKQLYFSARQGELQKVLLMLVDGIDPNFKMEHQNKRSPLHAAAEAGHVDICHMLVQFCRLGSPRSRGCLW

SEQ ID NO: 28418 - protein, 1298 aa, Homo sapiens
  Payload ID: 5575
  Gene Symbol: EHMT1
  Gene Name: euchromatic histone-lysine N-methyltransferase 1
  Uniprot ID: Q9H9B1
  ENSP ID: ENSP00000417980
MAAADAEAVPARGEPQQDCCVKTELLGEETPMAADEGSAEKQAGEAHMAADGETNGSCENSDASSHANAAKHTQDSARVNPQDGTNTLTRIAENGVSERDSEAAKQNHVTADDFVQTSVIGSNGYILNKPALQAQPLRTTSTLASSLPGHAAKTLPGGAGKGRTPSAFPQTPAAPPATLGEGSADTEDRKLPAPGADVKVHRARKTMPKSVVGLHAASKDPREVREARDHKEPKEEINKNISDFGRQQLLPPFPSLHQSLPQNQCYMATTKSQTACLPFVLAAAVSRKKKRRMGTYSLVPKKKTKVLKQRTVIEMFKSITHSTVGSKGEKDLGASSLHVNGESLEMDSDEDDSEELEEDDGHGAEQAAAFPTEDSRTSKESMSEADRAQKMDGESEEEQESVDTGEEEEGGDESDLSSESSIKKKFLKRKGKTDSPWIKPARKRRRRSRKKPSGALGSESYKSSAGSAEQTAPGDSTGYMEVSLDSLDLRVKGILSSQAEGLANGPDVLETDGLQEVPLCSCRMETPKSREITTLANNQCMATESVDHELGRCTNSVVKYELMRPSNKAPLLVLCEDHRGRMVKHQCCPGCGYFCTAGNFMECQPESSISHRFHKDCASRVNNASYCPHCGEESSKAKEVTIAKADTTSTVTPVPGQEKGSALEGRADTTTGSAAGPPLSEDDKLQGAASHVPEGFDPTGPAGLGRPTPGLSQGPGKETLESALIALDSEKPKKLRFHPKQLYFSARQGELQKVLLMLVDGIDPNFKMEHQNKRSPLHAAAEAGHVDICHMLVQAGANIDTCSEDQRTPLMEAAENNHLEAVKYLIKAGALVDPKDAEGSTCLHLAAKKGHYEVVQYLLSNGQMDVNCQDDGGWTPMIWATEYKHVDLVKLLLSKGSDINIRDNEENICLHWAAFSGCVDIAEILLAAKCDLHAVNIHGDSPLHIAARENRYDCVVLFLSRDSDVTLKNKEGETPLQCASLNSQVWSALQMSKALQDSAPDRPSPVERIVSRDIARGYERIPIPCVNAVDSEPCPSNYKYVSQNCVTSPMNIDRNITHLQYCVCIDDCSSSNCMCGQLSMRCWYDKDGRLLPEFNMAEPPLIFECNHACSCWRNCRNRVVQNGLRARLQLYRTRDMGWGVRSLQDIPPGTFVCEYVGELISDSEADVREEDSYLFDLDNKDGEVYCIDARFYGNVSRFINHHCEPNLVPVRVFMAHQDLRFPRIAFFSTRLIEAGEQLGFDYGERFWDIKGKLFSCRCGSPKCRHSSAALAQRQASAAQEAQEDGLPDTSSAAAADPL

SEQ ID NO: 28419 - protein, 803 aa, Homo sapiens
  Payload ID: 5575
  Gene Symbol: EHMT1
  Gene Name: euchromatic histone-lysine N-methyltransferase 1
  ENSP ID: ENSP00000436107
MSEADRAQKMDGESEEEQESVDTGEEEEGGDESDLSSESSIKKKFLKRKGKTDSPWIKPARKRRRRSRKKPSGALGSESYKSSAGSAEQTAPGDSTGYMEVSLDSLDLRVKGILSSQAEGLANGPDVLETDGLQEVPLCSCRMETPKSREITTLANNQCMATESVDHELGRCTNSVVKYELMRPSNKAPLLVLCEDHRGRMVKHQCCPGCGYFCTAGNFMECQPESSISHRFHKDCASRVNNASYCPHCGEESSKAKEVTIAKADTTSTVTPVPGQEKGSALEGRADTTTGSAAGPPLSEDDKLQGAASHVPEGFDPTGPAGLGRPTPGLSQGPGKETLESALIALDSEKPKKLRFHPKQLYFSARQGELQKVLLMLVDGIDPNFKMEHQNKRSPLHAAAEAGHVDICHMLVQAGANIDTCSEDQRTPLMEAAENNHLEAVKYLIKAGALVDPKDAEGSTCLHLAAKKGHYEVVQYLLSNGQMDVNCQDDGGWTPMIWATEYKHVDLVKLLLSKGSDINIRDNEENICLHWAAFSGCVDIAEILLAAKCDLHAVNIHGDSPLHIAARENRYDCVVLFLSRDSDVTLKNKEGETPLQCASLNSQVWSALQMSKALQDSAPDRPSPVERIVSRDIARGYERIPIPCVNAVDSEPCPSNYKYVSQNCVTSPMNIDRNITHLQYCVCIDDCSSSNCMCGQLSMRCWYDKDGRLLPEFNMAEPPLIFECNHACSCWRNCRNRVVQNGLRARLQLYRTRDMGWGVRSLQDIPPGTFVCEYVGELISDSEADVREEDSYLFDLDNKISSA

SEQ ID NO: 28420 - protein, 106 aa, Homo sapiens
  Payload ID: 5575
  Gene Symbol: EHMT1
  Gene Name: euchromatic histone-lysine N-methyltransferase 1
  ENSP ID: ENSP00000485878
MAADEGSAEKQAGEAHMAADGETNGSCENSDASSHANAAKHTQDSARVNPQDGTNTLTRIAENGVSERDSEAAKQNHVTADDFVQTSVIGSNGYILNKPALQAQPL

SEQ ID NO: 28421 - protein, 432 aa, Homo sapiens
  Payload ID: 5575
  Gene Symbol: EHMT1
  Gene Name: euchromatic histone-lysine N-methyltransferase 1
  ENSP ID: ENSP00000485900
  MOD_RES (1)..(1): Any amino acid
XGEETPMAADEGSAEKQAGEAHMAADGETNGSCENSDASSHANAAKHTQDSARVNPQDGTNTLTRIAENGVSERDSEAAKQNHVTADDFVQTSVIGSNGYILNKPALQAQPLRTTSTLASSLPGHAAKTLPGGAGKGRTPSAFPQTPAAPPATLGEGSADTEDRKLPAPGADVKVHRARKTMPKSVVGLHAASKDPREVREARDHKEPKEEINKNISDFGRQQLLPPFPSLHQSLPQNQCYMATTKSQTAAAVSRKKKRRMGTYSLVPKKKTKVLKQRTVIEMFKSITHSTVGSKGEKDLGASSLHVNGESLEMDSDEDDSEELEEDDGHGAEQAAAFPTEDSRTSKESMSEADRAQKMDGESEEEQESVDTGEEEEGGDESDLSSESSIKKKFLKRKGKTDSPWIKPARKRRRRSRKKPSGALGSESYKSS

SEQ ID NO: 28422 - protein, 137 aa, Homo sapiens
  Payload ID: 5575
  Gene Symbol: EHMT1
  Gene Name: euchromatic histone-lysine N-methyltransferase 1
  ENSP ID: ENSP00000485933
MAADEGSAEKQAGEAHMAADGETNGSCENSDASSHANAAKHTQDSARVNPQDGTNTLTRIAENGVSERDSEAAKQNHVTADDFVQTSVIGSNGYILNKPALQAQPLRTTSTLASSLPGHAAKTLPGGAGKGRTPSAF

SEQ ID NO: 28423 - protein, 66 aa, Homo sapiens
  Payload ID: 5575
  Gene Symbol: EHMT1
  Gene Name: euchromatic histone-lysine N-methyltransferase 1
  Uniprot ID: Q9H9B1
  ENSP ID: ENSP00000485945
MAAADAERHLWLPMKAQQRNRQERPTWLRTVRPMGLVKTAMPAVMQMLQSTLRTAQGSTPRMAPTH

SEQ ID NO: 28424 - protein, 230 aa, Homo sapiens
  Payload ID: 5575
  Gene Symbol: EHMT1
  Gene Name: euchromatic histone-lysine N-methyltransferase 1
  ENSP ID: ENSP00000485947
  MOD_RES (1)..(1): Any amino acid
XPFVLAAAVSRKKKRRMGTYSLVPKKKTKVLKQRTVIEMFKSITHSTVGSKGEKDLGASSLHVNGESLEMDSDEDDSEELEEDDGHGAEQAAAFPTEDSRTSKESMSEADRAQKSSESSIKKKFLKRKGKTDSPWIKPARKRRRRSRKKPSGALGSESYKSSAGSAEQTAPGDSTGYMEVSLDSLDLRVKGILSSQAEGLANGPDVLETDGLQEVPLCSCRMETPKSREI

SEQ ID NO: 28425 - protein, 108 aa, Homo sapiens
  Payload ID: 5575
  Gene Symbol: EHMT1
  Gene Name: euchromatic histone-lysine N-methyltransferase 1
  ENSP ID: ENSP00000486127
  MOD_RES (1)..(1): Any amino acid
XPLMEAAENNHLEAVKYLIKAGALVDPKDAEGSTCLHLAAKKGHYEVVQYLLSNGQMDVNCQDDGGWTPMIWATEYKHVDLVKLLLSKGSDINIRDNVGCIYSKYTLG

SEQ ID NO: 28426 - protein, 167 aa, Homo sapiens
  Payload ID: 5575
  Gene Symbol: EHMT1
  Gene Name: euchromatic histone-lysine N-methyltransferase 1
  ENSP ID: ENSP00000486261
WIKPARKRRRRSRKKPSGALGSESYKSSAGSAEQTAPGDSTGYMEVSLDSLDLRVKGILSSQAEGLANGPDVLETDGLQEVPLCSCRMETPKSREITTLANNQCMATESVDHEGNFMECQPESSISHRFHKDCASRVNNASYCPHCGEESSKAKEVTIAKADTTSTV

SEQ ID NO: 28427 - protein, 107 aa, Homo sapiens
  Payload ID: 5575
  Gene Symbol: EHMT1
  Gene Name: euchromatic histone-lysine N-methyltransferase 1
  ENSP ID: ENSP00000486503
MEAAENNHLEAVKYLIKAGALVDPKDAEGSTCLHLAAKKGHYEVVQYLLSNGQMDVNCQDDGGWTPMIWATEYKHVDLVKLLLSKGSDINIRDNRVPEARNGKSSHK

SEQ ID NO: 28428 - protein, 139 aa, Homo sapiens
  Payload ID: 5575
  Gene Symbol: EHMT1
  Gene Name: euchromatic histone-lysine N-methyltransferase 1
  ENSP ID: ENSP00000486580
MAADEGSAEKQAGEAHMAADGETNGSCENSDASSHANAAKHTQDSARVNPQDGTNTLTRIAENGVSERDSEAAKQNHVTADDFVQTSVIGSNGYILNKPALQAQPLRTTSTLASSLPGHAAKTLPGGAGKGRTPSAFPQ

SEQ ID NO: 28429 - protein, 117 aa, Homo sapiens
  Payload ID: 5575
  Gene Symbol: EHMT1
  Gene Name: euchromatic histone-lysine N-methyltransferase 1
  ENSP ID: ENSP00000486748
MEAAENNHLEAVKYLIKAGALVDPKDAEGSTCLHLAAKKGHYEVVQYLLSNGQMDVNCQDDGGWTPMIWATEYKHVDLVKLLLSKGSDINIRDNDDGTMKRGALSRQKEEKREAEEP

SEQ ID NO: 28430 - protein, 134 aa, Homo sapiens
  Payload ID: 5575
  Gene Symbol: EHMT1
  Gene Name: euchromatic histone-lysine N-methyltransferase 1
  ENSP ID: ENSP00000486857
MAADEGSAEKQAGEAHMAADGETNGSCENSDASSHANAAKHTQDSARVNPQDGTNTLTRIAENGVSERDSEAAKQNHVTADDFVQTSVIGSNGYILNKPALQAQPLRTTSTLASSLPGHAAKTLPGGAGKGRTP

SEQ ID NO: 28431 - protein, 268 aa, Homo sapiens
  Payload ID: 5575
  Gene Symbol: EHMT1
  Gene Name: euchromatic histone-lysine N-methyltransferase 1
  ENSP ID: ENSP00000486969
MLYFSRSHFPRPCGGQVSAGSGLTLLLLLLPALWRGWLEGDGQQAVPARGEPQQDCCVKTELLGEETPMAADEGSAEKQAGEAHMAADGETNGSCENSDASSHANAAKHTQDSARVNPQDGTNTLTRIAENGVSERDSEAAKQNHVTADDFVQTSVIGSNGYILNKPALQAQPLRTTSTLASSLPGHAAKTLPGGAGKGRTPSAFPQTPAAPPATLGEGSADTEDRKLPAPGADVKVHRARKTMPKSVVGLHAASKDPREVREARDHK

SEQ ID NO: 28432 - protein, 1233 aa, Homo sapiens
  Payload ID: 5576
  Gene Symbol: EHMT2
  Gene Name: euchromatic histone-lysine N-methyltransferase 2
  ENSP ID: ENSP00000364678
MRGLPRGRGLMRARGRGRAAPPGSRGRGRGGPHRGRGRPRSLLSLPRAQASWTPQLSTGLTSPPVPCLPSQGEAPAEMGALLLEKETRGATERVHGSLGDTPRSEETLPKATPDSLEPAGPSSPASVTVTVGDEGADTPVGATPLIGDESENLEGDGDLRGGRILLGHATKSFPSSPSKGGSCPSRAKMSMTGAGKSPPSVQSLAMRLLSMPGAQGAAAAGSEPPPATTSPEGQPKVHRARKTMSKPGNGQPPVPEKRPPEIQHFRMSDDVHSLGKVTSDLAKRRKLNSGGGLSEELGSARRSGEVTLTKGDPGSLEEWETVVGDDFSLYYDSYSVDERVDSDSKSEVEALTEQLSEEEEEEEEEEEEEEEEEEEEEEEEDEESGNQSDRSGSSGRRKAKKKWRKDSPWVKPSRKRRKREPPRAKEPRGVSNDTSSLETERGFEELPLCSCRMEAPKIDRISERAGHKCMATESVDGELSGCNAAILKRETMRPSSRVALMVLCETHRARMVKHHCCPGCGYFCTAGTFLECHPDFRVAHRFHKACVSQLNGMVFCPHCGEDASEAQEVTIPRGDGVTPPAGTAAPAPPPLSQDVPGRADTSQPSARMRGHGEPRRPPCDPLADTIDSSGPSLTLPNGGCLSAVGLPLGPGREALEKALVIQESERRKKLRFHPRQLYLSVKQGELQKVILMLLDNLDPNFQSDQQSKRTPLHAAAQKGSVEICHVLLQAGANINAVDKQQRTPLMEAVVNNHLEVARYMVQRGGCVYSKEEDGSTCLHHAAKIGNLEMVSLLLSTGQVDVNAQDSGGWTPIIWAAEHKHIEVIRMLLTRGADVTLTDNEENICLHWASFTGSAAIAEVLLNARCDLHAVNYHGDTPLHIAARESYHDCVLLFLSRGANPELRNKEGDTAWDLTPERSDVWFALQLNRKLRLGVGNRAIRTEKIICRDVARGYENVPIPCVNGVDGEPCPEDYKYISENCETSTMNIDRNITHLQHCTCVDDCSSSNCLCGQLSIRCWYDKDGRLLQEFNKIEPPLIFECNQACSCWRNCKNRVVQSGIKVRLQLYRTAKMGWGVRALQTIPQGTFICEYVGELISDAEADVREDDSYLFDLDNKDGEVYCIDARYYGNISRFINHLCDPNIIPVRVFMLHQDLRFPRIAFFSSRDIRTGEELGFDYGDRFWDIKSKYFTCQCGSEKCKHSAEAIALEQSRLARLDPHPELLPELGSLPPVNT

SEQ ID NO: 28433 - protein, 1176 aa, Homo sapiens
  Payload ID: 5576
  Gene Symbol: EHMT2
  Gene Name: euchromatic histone-lysine N-methyltransferase 2
  Uniprot ID: Q96KQ7
  ENSP ID: ENSP00000364680
MAAAAGAAAAAAAEGEAPAEMGALLLEKETRGATERVHGSLGDTPRSEETLPKATPDSLEPAGPSSPASVTVTVGDEGADTPVGATPLIGDESENLEGDGDLRGGRILLGHATKSFPSSPSKGGSCPSRAKMSMTGAGKSPPSVQSLAMRLLSMPGAQGAAAAGSEPPPATTSPEGQPKVHRARKTMSKPGNGQPPVPEKRPPEIQHFRMSDDVHSLGKVTSDLAKRRKLNSGGGLSEELGSARRSGEVTLTKGDPGSLEEWETVVGDDFSLYYDSYSVDERVDSDSKSEVEALTEQLSEEEEEEEEEEEEEEEEEEEEEEEEDEESGNQSDRSGSSGRRKAKKKWRKDSPWVKPSRKRRKREPPRAKEPRGVSNDTSSLETERGFEELPLCSCRMEAPKIDRISERAGHKCMATESVDGELSGCNAAILKRETMRPSSRVALMVLCETHRARMVKHHCCPGCGYFCTAGTFLECHPDFRVAHRFHKACVSQLNGMVFCPHCGEDASEAQEVTIPRGDGVTPPAGTAAPAPPPLSQDVPGRADTSQPSARMRGHGEPRRPPCDPLADTIDSSGPSLTLPNGGCLSAVGLPLGPGREALEKALVIQESERRKKLRFHPRQLYLSVKQGELQKVILMLLDNLDPNFQSDQQSKRTPLHAAAQKGSVEICHVLLQAGANINAVDKQQRTPLMEAVVNNHLEVARYMVQRGGCVYSKEEDGSTCLHHAAKIGNLEMVSLLLSTGQVDVNAQDSGGWTPIIWAAEHKHIEVIRMLLTRGADVTLTDNEENICLHWASFTGSAAIAEVLLNARCDLHAVNYHGDTPLHIAARESYHDCVLLFLSRGANPELRNKEGDTAWDLTPERSDVWFALQLNRKLRLGVGNRAIRTEKIICRDVARGYENVPIPCVNGVDGEPCPEDYKYISENCETSTMNIDRNITHLQHCTCVDDCSSSNCLCGQLSIRCWYDKDGRLLQEFNKIEPPLIFECNQACSCWRNCKNRVVQSGIKVRLQLYRTAKMGWGVRALQTIPQGTFICEYVGELISDAEADVREDDSYLFDLDNKDGEVYCIDARYYGNISRFINHLCDPNIIPVRVFMLHQDLRFPRIAFFSSRDIRTGEELGFDYGDRFWDIKSKYFTCQCGSEKCKHSAEAIALEQSRLARLDPHPELLPELGSLPPVNT

SEQ ID NO: 28434 - protein, 1210 aa, Homo sapiens
  Payload ID: 5576
  Gene Symbol: EHMT2
  Gene Name: euchromatic histone-lysine N-methyltransferase 2
  Uniprot ID: Q96KQ7
  ENSP ID: ENSP00000364687
MAAAAGAAAAAAAEGEAPAEMGALLLEKETRGATERVHGSLGDTPRSEETLPKATPDSLEPAGPSSPASVTVTVGDEGADTPVGATPLIGDESENLEGDGDLRGGRILLGHATKSFPSSPSKGGSCPSRAKMSMTGAGKSPPSVQSLAMRLLSMPGAQGAAAAGSEPPPATTSPEGQPKVHRARKTMSKPGNGQPPVPEKRPPEIQHFRMSDDVHSLGKVTSDLAKRRKLNSGGGLSEELGSARRSGEVTLTKGDPGSLEEWETVVGDDFSLYYDSYSVDERVDSDSKSEVEALTEQLSEEEEEEEEEEEEEEEEEEEEEEEEDEESGNQSDRSGSSGRRKAKKKWRKDSPWVKPSRKRRKREPPRAKEPRGVNGVGSSGPSEYMEVPLGSLELPSEGTLSPNHAGVSNDTSSLETERGFEELPLCSCRMEAPKIDRISERAGHKCMATESVDGELSGCNAAILKRETMRPSSRVALMVLCETHRARMVKHHCCPGCGYFCTAGTFLECHPDFRVAHRFHKACVSQLNGMVFCPHCGEDASEAQEVTIPRGDGVTPPAGTAAPAPPPLSQDVPGRADTSQPSARMRGHGEPRRPPCDPLADTIDSSGPSLTLPNGGCLSAVGLPLGPGREALEKALVIQESERRKKLRFHPRQLYLSVKQGELQKVILMLLDNLDPNFQSDQQSKRTPLHAAAQKGSVEICHVLLQAGANINAVDKQQRTPLMEAVVNNHLEVARYMVQRGGCVYSKEEDGSTCLHHAAKIGNLEMVSLLLSTGQVDVNAQDSGGWTPIIWAAEHKHIEVIRMLLTRGADVTLTDNEENICLHWASFTGSAAIAEVLLNARCDLHAVNYHGDTPLHIAARESYHDCVLLFLSRGANPELRNKEGDTAWDLTPERSDVWFALQLNRKLRLGVGNRAIRTEKIICRDVARGYENVPIPCVNGVDGEPCPEDYKYISENCETSTMNIDRNITHLQHCTCVDDCSSSNCLCGQLSIRCWYDKDGRLLQEFNKIEPPLIFECNQACSCWRNCKNRVVQSGIKVRLQLYRTAKMGWGVRALQTIPQGTFICEYVGELISDAEADVREDDSYLFDLDNKDGEVYCIDARYYGNISRFINHLCDPNIIPVRVFMLHQDLRFPRIAFFSSRDIRTGEELGFDYGDRFWDIKSKYFTCQCGSEKCKHSAEAIALEQSRLARLDPHPELLPELGSLPPVNT

SEQ ID NO: 28435 - protein, 1176 aa, Homo sapiens; identical to SEQ ID NO: 28433
  Payload ID: 5576
  Gene Symbol: EHMT2
  Gene Name: euchromatic histone-lysine N-methyltransferase 2
  Uniprot ID: Q96KQ7
  ENSP ID: ENSP00000372863

SEQ ID NO: 28436 - protein, 1210 aa, Homo sapiens; identical to SEQ ID NO: 28434
  Payload ID: 5576
  Gene Symbol: EHMT2
  Gene Name: euchromatic histone-lysine N-methyltransferase 2
  Uniprot ID: Q96KQ7
  ENSP ID: ENSP00000372864

SEQ ID NO: 28437 - protein, 1267 aa, Homo sapiens
  Payload ID: 5576
  Gene Symbol: EHMT2
  Gene Name: euchromatic histone-lysine N-methyltransferase 2
  ENSP ID: ENSP00000379078
MRGLPRGRGLMRARGRGRAAPPGSRGRGRGGPHRGRGRPRSLLSLPRAQASWTPQLSTGLTSPPVPCLPSQGEAPAEMGALLLEKETRGATERVHGSLGDTPRSEETLPKATPDSLEPAGPSSPASVTVTVGDEGADTPVGATPLIGDESENLEGDGDLRGGRILLGHATKSFPSSPSKGGSCPSRAKMSMTGAGKSPPSVQSLAMRLLSMPGAQGAAAAGSEPPPATTSPEGQPKVHRARKTMSKPGNGQPPVPEKRPPEIQHFRMSDDVHSLGKVTSDLAKRRKLNSGGGLSEELGSARRSGEVTLTKGDPGSLEEWETVVGDDFSLYYDSYSVDERVDSDSKSEVEALTEQLSEEEEEEEEEEEEEEEEEEEEEEEEDEESGNQSDRSGSSGRRKAKKKWRKDSPWVKPSRKRRKREPPRAKEPRGVNGVGSSGPSEYMEVPLGSLELPSEGTLSPNHAGVSNDTSSLETERGFEELPLCSCRMEAPKIDRISERAGHKCMATESVDGELSGCNAAILKRETMRPSSRVALMVLCETHRARMVKHHCCPGCGYFCTAGTFLECHPDFRVAHRFHKACVSQLNGMVFCPHCGEDASEAQEVTIPRGDGVTPPAGTAAPAPPPLSQDVPGRADTSQPSARMRGHGEPRRPPCDPLADTIDSSGPSLTLPNGGCLSAVGLPLGPGREALEKALVIQESERRKKLRFHPRQLYLSVKQGELQKVILMLLDNLDPNFQSDQQSKRTPLHAAAQKGSVEICHVLLQAGANINAVDKQQRTPLMEAVVNNHLEVARYMVQRGGCVYSKEEDGSTCLHHAAKIGNLEMVSLLLSTGQVDVNAQDSGGWTPIIWAAEHKHIEVIRMLLTRGADVTLTDNEENICLHWASFTGSAAIAEVLLNARCDLHAVNYHGDTPLHIAARESYHDCVLLFLSRGANPELRNKEGDTAWDLTPERSDVWFALQLNRKLRLGVGNRAIRTEKIICRDVARGYENVPIPCVNGVDGEPCPEDYKYISENCETSTMNIDRNITHLQHCTCVDDCSSSNCLCGQLSIRCWYDKDGRLLQEFNKIEPPLIFECNQACSCWRNCKNRVVQSGIKVRLQLYRTAKMGWGVRALQTIPQGTFICEYVGELISDAEADVREDDSYLFDLDNKDGEVYCIDARYYGNISRFINHLCDPNIIPVRVFMLHQDLRFPRIAFFSSRDIRTGEELGFDYGDRFWDIKSKYFTCQCGSEKCKHSAEAIALEQSRLARLDPHPELLPELGSLPPVNT

SEQ ID NO: 28438 - protein, 1267 aa, Homo sapiens; identical to SEQ ID NO: 28437
  Payload ID: 5576
  Gene Symbol: EHMT2
  Gene Name: euchromatic histone-lysine N-methyltransferase 2
  ENSP ID: ENSP00000382886

SEQ ID NO: 28439 - protein, 1233 aa, Homo sapiens; identical to SEQ ID NO: 28432
  Payload ID: 5576
  Gene Symbol: EHMT2
  Gene Name: euchromatic histone-lysine N-methyltransferase 2
  ENSP ID: ENSP00000382888

SEQ ID NO: 28440 - protein, 1233 aa, Homo sapiens
  Payload ID: 5576
  Gene Symbol: EHMT2
  Gene Name: euchromatic histone-lysine N-methyltransferase 2
  ENSP ID: ENSP00000388879
MRGLPRGRGLMRARGRGRAAPPGSRGRGRGGPHRGRGRPRSLLSLPRAQASWTPQLSTGLTSPPVPCLPSQGEAPAEMGALLLEKETRGATERVHGSLGDTPRSEETLPKANPDSLEPAGPSSPASVTVTVGDEGADTPVGATPLIGDESENLEGDGDLRGGRILLGHATKSFPSSPSKGGSCPSRAKMSMTGAGKSPPSVQSLAMRLLSMPGAQGAAAAGSEPPPATTSPEGQPKVHRARKTMSKPGNGQPPVPEKRPPEIQHFRMSDDVHSLGKVTSDLAKRRKLNSGGGLSEELGSARRSGEVTLTKGDPGSLEEWETVVGDDFSLYYDSYSVDERVDSDSKSEVEALTEQLSEEEEEEEEEEEEEEEEEEEEEEEEDEESGNQSDRSGSSGRRKAKKKWRKDSPWVKPSRKRRKREPPRAKEPRGVSNDTSSLETERGFEELPLCSCRMEAPKIDRISERAGHKCMATESVDGELSGCNAAILKRETMRPSSRVALMVLCETHRARMVKHHCCPGCGYFCTAGTFLECHPDFRVAHRFHKACVSQLNGMVFCPHCGEDASEAQEVTIPRGDGVTPPAGTAAPAPPPLSQDVPGRADTSQPSARMRGHGEPRRPPCDPLADTIDSSGPSLTLPNGGCLSAVGLPLGPGREALEKALVIQESERRKKLRFHPRQLYLSVKQGELQKVILMLLDNLDPNFQSDQQSKRTPLHAAAQKGSVEICHVLLQAGANINAVDKQQRTPLMEAVVNNHLEVARYMVQRGGCVYSKEEDGSTCLHHAAKIGNLEMVSLLLSTGQVDVNAQDSGGWTPIIWAAEHKHIEVIRMLLTRGADVTLTDNEENICLHWASFTGSAAIAEVLLNARCDLHAVNYHGDTPLHIAARESYHDCVLLFLSRGANPELRNKEGDTAWDLTPERSDVWFALQLNRKLRLGVGNRAIRTEKIICRDVARGYENVPIPCVNGVDGEPCPEDYKYISENCETSTMNIDRNITHLQHCTCVDDCSSSNCLCGQLSIRCWYDKDGRLLQEFNKIEPPLIFECNQACSCWRNCKNRVVQSGIKVRLQLYRTAKMGWGVRALQTIPQGTFICEYVGELISDAEADVREDDSYLFDLDNKDGEVYCIDARYYGNISRFINHLCDPNIIPVRVFMLHQDLRFPRIAFFSSRDIRTGEELGFDYGDRFWDIKSKYFTCQCGSEKCKHSAEAIALEQSRLARLDPHPELLPELGSLPPVNT

SEQ ID NO: 28441 - protein, 1210 aa, Homo sapiens; identical to SEQ ID NO: 28434
  Payload ID: 5576
  Gene Symbol: EHMT2
  Gene Name: euchromatic histone-lysine N-methyltransferase 2
  Uniprot ID: Q96KQ7
  ENSP ID: ENSP00000392305

SEQ ID NO: 28442 - protein, 298 aa, Homo sapiens
  Payload ID: 5576
  Gene Symbol: EHMT2
  Gene Name: euchromatic histone-lysine N-methyltransferase 2
  ENSP ID: ENSP00000392520
  MOD_RES (1)..(1): Any amino acid
XSKRTPLHAAAQKGSVEICHVLLQAGANINAVDKQQRTPLMEAVVNNHLEVARYMVQRGGCVYSKEEDGSTCLHHAAKIGNLEMVSLLLSTGQVDVNAQGQLPPPSLPSHPQDSGGWTPIIWAAEHKHIEVIRMLLTRGADVTLTDNEENICLHWASFTGSAAIAEVLLNARCDLHAVNYHGDTPLHIAARESYHDCVLLFLSRGANPELRNKEGDTAWDLTPERSDVWFALQLNRKLRLGVGNRAIRTEKIICRDVARGYENVPIPCVNGVDGEPCPEDYKYISENCETSTMNIDRN

SEQ ID NO: 28443 - protein, 298 aa, Homo sapiens; identical to SEQ ID NO: 28442
  Payload ID: 5576
  Gene Symbol: EHMT2
  Gene Name: euchromatic histone-lysine N-methyltransferase 2
  ENSP ID: ENSP00000392729
  MOD_RES (1)..(1): Any amino acid

SEQ ID NO: 28444 - protein, 1210 aa, Homo sapiens
  Payload ID: 5576
  Gene Symbol: EHMT2
  Gene Name: euchromatic histone-lysine N-methyltransferase 2
  Uniprot ID: Q96KQ7
  ENSP ID: ENSP00000396119
MAAAAGAAAAAAAEGEAPAEMGALLLEKETRGATERVHGSLGDTPRSEETLPKANPDSLEPAGPSSPASVTVTVGDEGADTPVGATPLIGDESENLEGDGDLRGGRILLGHATKSFPSSPSKGGSCPSRAKMSMTGAGKSPPSVQSLAMRLLSMPGAQGAAAAGSEPPPATTSPEGQPKVHRARKTMSKPGNGQPPVPEKRPPEIQHFRMSDDVHSLGKVTSDLAKRRKLNSGGGLSEELGSARRSGEVTLTKGDPGSLEEWETVVGDDFSLYYDSYSVDERVDSDSKSEVEALTEQLSEEEEEEEEEEEEEEEEEEEEEEEEDEESGNQSDRSGSSGRRKAKKKWRKDSPWVKPSRKRRKREPPRAKEPRGVNGVGSSGPSEYMEVPLGSLELPSEGTLSPNHAGVSNDTSSLETERGFEELPLCSCRMEAPKIDRISERAGHKCMATESVDGELSGCNAAILKRETMRPSSRVALMVLCETHRARMVKHHCCPGCGYFCTAGTFLECHPDFRVAHRFHKACVSQLNGMVFCPHCGEDASEAQEVTIPRGDGVTPPAGTAAPAPPPLSQDVPGRADTSQPSARMRGHGEPRRPPCDPLADTIDSSGPSLTLPNGGCLSAVGLPLGPGREALEKALVIQESERRKKLRFHPRQLYLSVKQGELQKVILMLLDNLDPNFQSDQQSKRTPLHAAAQKGSVEICHVLLQAGANINAVDKQQRTPLMEAVVNNHLEVARYMVQRGGCVYSKEEDGSTCLHHAAKIGNLEMVSLLLSTGQVDVNAQDSGGWTPIIWAAEHKHIEVIRMLLTRGADVTLTDNEENICLHWASFTGSAAIAEVLLNARCDLHAVNYHGDTPLHIAARESYHDCVLLFLSRGANPELRNKEGDTAWDLTPERSDVWFALQLNRKLRLGVGNRAIRTEKIICRDVARGYENVPIPCVNGVDGEPCPEDYKYISENCETSTMNIDRNITHLQHCTCVDDCSSSNCLCGQLSIRCWYDKDGRLLQEFNKIEPPLIFECNQACSCWRNCKNRVVQSGIKVRLQLYRTAKMGWGVRALQTIPQGTFICEYVGELISDAEADVREDDSYLFDLDNKDGEVYCIDARYYGNISRFINHLCDPNIIPVRVFMLHQDLRFPRIAFFSSRDIRTGEELGFDYGDRFWDIKSKYFTCQCGSEKCKHSAEAIALEQSRLARLDPHPELLPELGSLPPVNT

SEQ ID NO: 28445 - protein, 1267 aa, Homo sapiens; identical to SEQ ID NO: 28437
  Payload ID: 5576
  Gene Symbol: EHMT2
  Gene Name: euchromatic histone-lysine N-methyltransferase 2
  ENSP ID: ENSP00000397323

SEQ ID NO: 28446 - protein, 1267 aa, Homo sapiens; identical to SEQ ID NO: 28437
  Payload ID: 5576
  Gene Symbol: EHMT2
  Gene Name: euchromatic histone-lysine N-methyltransferase 2
  ENSP ID: ENSP00000398286

SEQ ID NO: 28447 - protein, 922 aa, Homo sapiens
  Payload ID: 5576
  Gene Symbol: EHMT2
  Gene Name: euchromatic histone-lysine N-methyltransferase 2
  ENSP ID: ENSP00000399135
SEVEALTEQLSEEEEEEEEEEEEEEEEEEEEEEEEDEESGNQSDRSGSSGRRKAKKKWRKDSPWVKPSRKRRKREPPRAKEPRGVNGVGSSGPSEYMEVPLGSLELPSEGTLSPNHAGVSNDTSSLETERGFEELPLCSCRMEAPKIDRISERAGHKCMATESVDGELSGCNAAILKRETMRPSSRVALMVLCETHRARMVKHHCCPGCGYFCTAGTFLECHPDFRVAHRFHKACVSQLNGMVFCPHCGEDASEAQEVTIPRGDGVTPPAGTAAPAPPPLSQDVPGRADTSQPSARMRGHGEPRRPPCDPLADTIDSSGPSLTLPNGGCLSAVGLPLGPGREALEKALVIQESERRKKLRFHPRQLYLSVKQGELQKVILMLLDNLDPNFQSDQQSKRTPLHAAAQKGSVEICHVLLQAGANINAVDKQQRTPLMEAVVNNHLEVARYMVQRGGCVYSKEEDGSTCLHHAAKIGNLEMVSLLLSTGQVDVNAQDSGGWTPIIWAAEHKHIEVIRMLLTRGADVTLTDNEENICLHWASFTGSAAIAEVLLNARCDLHAVNYHGDTPLHIAARESYHDCVLLFLSRGANPELRNKEGDTAWDLTPERSDVWFALQLNRKLRLGVGNRAIRTEKIICRDVARGYENVPIPCVNGVDGEPCPEDYKYISENCETSTMNIDRNITHLQHCTCVDDCSSSNCLCGQLSIRCWYDKDGRLLQEFNKIEPPLIFECNQACSCWRNCKNRVVQSGIKVRLQLYRTAKMGWGVRALQTIPQGTFICEYVGELISDAEADVREDDSYLFDLDNKDGEVYCIDARYYGNISRFINHLCDPNIIPVRVFMLHQDLRFPRIAFFSSRDIRTGEELGFDYGDRFWDIKSKYFTCQCGSEKCKHSAEAIALEQSRLARLDPHPELLPELGSLPPVNT

SEQ ID NO: 28448 - protein, 1176 aa, Homo sapiens
  Payload ID: 5576
  Gene Symbol: EHMT2
  Gene Name: euchromatic histone-lysine N-methyltransferase 2
  ENSP ID: ENSP00000399344
MAAAAGAAAAAAAEGEAPAEMGALLLEKETRGATERVHGSLGDTPRSEETLPKANPDSLEPAGPSSPASVTVTVGDEGADTPVGATPLIGDESENLEGDGDLRGGRILLGHATKSFPSSPSKGGSCPSRAKMSMTGAGKSPPSVQSLAMRLLSMPGAQGAAAAGSEPPPATTSPEGQPKVHRARKTMSKPGNGQPPVPEKRPPEIQHFRMSDDVHSLGKVTSDLAKRRKLNSGGGLSEELGSARRSGEVTLTKGDPGSLEEWETVVGDDFSLYYDSYSVDERVDSDSKSEVEALTEQLSEEEEEEEEEEEEEEEEEEEEEEEEDEESGNQSDRSGSSGRRKAKKKWRKDSPWVKPSRKRRKREPPRAKEPRGVSNDTSSLETERGFEELPLCSCRMEAPKIDRISERAGHKCMATESVDGELSGCNAAILKRETMRPSSRVALMVLCETHRARMVKHHCCPGCGYFCTAGTFLECHPDFRVAHRFHKACVSQLNGMVFCPHCGEDASEAQEVTIPRGDGVTPPAGTAAPAPPPLSQDVPGRADTSQPSARMRGHGEPRRPPCDPLADTIDSSGPSLTLPNGGCLSAVGLPLGPGREALEKALVIQESERRKKLRFHPRQLYLSVKQGELQKVILMLLDNLDPNFQSDQQSKRTPLHAAAQKGSVEICHVLLQAGANINAVDKQQRTPLMEAVVNNHLEVARYMVQRGGCVYSKEEDGSTCLHHAAKIGNLEMVSLLLSTGQVDVNAQDSGGWTPIIWAAEHKHIEVIRMLLTRGADVTLTDNEENICLHWASFTGSAAIAEVLLNARCDLHAVNYHGDTPLHIAARESYHDCVLLFLSRGANPELRNKEGDTAWDLTPERSDVWFALQLNRKLRLGVGNRAIRTEKIICRDVARGYENVPIPCVNGVDGEPCPEDYKYISENCETSTMNIDRNITHLQHCTCVDDCSSSNCLCGQLSIRCWYDKDGRLLQEFNKIEPPLIFECNQACSCWRNCKNRVVQSGIKVRLQLYRTAKMGWGVRALQTIPQGTFICEYVGELISDAEADVREDDSYLFDLDNKDGEVYCIDARYYGNISRFINHLCDPNIIPVRVFMLHQDLRFPRIAFFSSRDIRTGEELGFDYGDRFWDIKSKYFTCQCGSEKCKHSAEAIALEQSRLARLDPHPELLPELGSLPPVNT

SEQ ID NO: 28449 - protein, 1176 aa, Homo sapiens; identical to SEQ ID NO: 28433
  Payload ID: 5576
  Gene Symbol: EHMT2
  Gene Name: euchromatic histone-lysine N-methyltransferase 2
  Uniprot ID: Q96KQ7
  ENSP ID: ENSP00000400838

SEQ ID NO: 28450 - protein, 1233 aa, Homo sapiens; identical to SEQ ID NO: 28432
  Payload ID: 5576
  Gene Symbol: EHMT2
  Gene Name: euchromatic histone-lysine N-methyltransferase 2
  ENSP ID: ENSP00000400861

SEQ ID NO: 28451 - protein, 1233 aa, Homo sapiens; identical to SEQ ID NO: 28440
  Payload ID: 5576
  Gene Symbol: EHMT2
  Gene Name: euchromatic histone-lysine N-methyltransferase 2
  ENSP ID: ENSP00000401012

SEQ ID NO: 28452 - protein, 1176 aa, Homo sapiens; identical to SEQ ID NO: 28448
  Payload ID: 5576
  Gene Symbol: EHMT2
  Gene Name: euchromatic histone-lysine N-methyltransferase 2
  ENSP ID: ENSP00000401424

SEQ ID NO: 28453 - protein, 298 aa, Homo sapiens; identical to SEQ ID NO: 28442
  Payload ID: 5576
  Gene Symbol: EHMT2
  Gene Name: euchromatic histone-lysine N-methyltransferase 2
  ENSP ID: ENSP00000401428
  MOD_RES (1)..(1): Any amino acid

SEQ ID NO: 28454 - protein, 298 aa, Homo sapiens; identical to SEQ ID NO: 28442
  Payload ID: 5576
  Gene Symbol: EHMT2
  Gene Name: euchromatic histone-lysine N-methyltransferase 2
  ENSP ID: ENSP00000401785
  MOD_RES (1)..(1): Any amino acid

SEQ ID NO: 28455 - protein, 1233 aa, Homo sapiens; identical to SEQ ID NO: 28432
  Payload ID: 5576
  Gene Symbol: EHMT2
  Gene Name: euchromatic histone-lysine N-methyltransferase 2
  ENSP ID: ENSP00000403402

SEQ ID NO: 28456 - protein, 1210 aa, Homo sapiens; identical to SEQ ID NO: 28434
  Payload ID: 5576
  Gene Symbol: EHMT2
  Gene Name: euchromatic histone-lysine N-methyltransferase 2
  Uniprot ID: Q96KQ7
  ENSP ID: ENSP00000406110

SEQ ID NO: 28457 - protein, 298 aa, Homo sapiens; identical to SEQ ID NO: 28442
  Payload ID: 5576
  Gene Symbol: EHMT2
  Gene Name: euchromatic histone-lysine N-methyltransferase 2
  ENSP ID: ENSP00000408266
  MOD_RES (1)..(1): Any amino acid

SEQ ID NO: 28458 - protein, 1267 aa, Homo sapiens
  Payload ID: 5576
  Gene Symbol: EHMT2
  Gene Name: euchromatic histone-lysine N-methyltransferase 2
  ENSP ID: ENSP00000408583
MRGLPRGRGLMRARGRGRAAPPGSRGRGRGGPHRGRGRPRSLLSLPRAQASWTPQLSTGLTSPPVPCLPSQGEAPAEMGALLLEKETRGATERVHGSLGDTPRSEETLPKANPDSLEPAGPSSPASVTVTVGDEGADTPVGATPLIGDESENLEGDGDLRGGRILLGHATKSFPSSPSKGGSCPSRAKMSMTGAGKSPPSVQSLAMRLLSMPGAQGAAAAGSEPPPATTSPEGQPKVHRARKTMSKPGNGQPPVPEKRPPEIQHFRMSDDVHSLGKVTSDLAKRRKLNSGGGLSEELGSARRSGEVTLTKGDPGSLEEWETVVGDDFSLYYDSYSVDERVDSDSKSEVEALTEQLSEEEEEEEEEEEEEEEEEEEEEEEEDEESGNQSDRSGSSGRRKAKKKWRKDSPWVKPSRKRRKREPPRAKEPRGVNGVGSSGPSEYMEVPLGSLELPSEGTLSPNHAGVSNDTSSLETERGFEELPLCSCRMEAPKIDRISERAGHKCMATESVDGELSGCNAAILKRETMRPSSRVALMVLCETHRARMVKHHCCPGCGYFCTAGTFLECHPDFRVAHRFHKACVSQLNGMVFCPHCGEDASEAQEVTIPRGDGVTPPAGTAAPAPPPLSQDVPGRADTSQPSARMRGHGEPRRPPCDPLADTIDSSGPSLTLPNGGCLSAVGLPLGPGREALEKALVIQESERRKKLRFHPRQLYLSVKQGELQKVILMLLDNLDPNFQSDQQSKRTPLHAAAQKGSVEICHVLLQAGANINAVDKQQRTPLMEAVVNNHLEVARYMVQRGGCVYSKEEDGSTCLHHAAKIGNLEMVSLLLSTGQVDVNAQDSGGWTPIIWAAEHKHIEVIRMLLTRGADVTLTDNEENICLHWASFTGSAAIAEVLLNARCDLHAVNYHGDTPLHIAARESYHDCVLLFLSRGANPELRNKEGDTAWDLTPERSDVWFALQLNRKLRLGVGNRAIRTEKIICRDVARGYENVPIPCVNGVDGEPCPEDYKYISENCETSTMNIDRNITHLQHCTCVDDCSSSNCLCGQLSIRCWYDKDGRLLQEFNKIEPPLIFECNQACSCWRNCKNRVVQSGIKVRLQLYRTAKMGWGVRALQTIPQGTFICEYVGELISDAEADVREDDSYLFDLDNKDGEVYCIDARYYGNISRFINHLCDPNIIPVRVFMLHQDLRFPRIAFFSSRDIRTGEELGFDYGDRFWDIKSKYFTCQCGSEKCKHSAEAIALEQSRLARLDPHPELLPELGSLPPVNT

SEQ ID NO: 28459 - protein, 1176 aa, Homo sapiens; identical to SEQ ID NO: 28433
  Payload ID: 5576
  Gene Symbol: EHMT2
  Gene Name: euchromatic histone-lysine N-methyltransferase 2
  Uniprot ID: Q96KQ7
  ENSP ID: ENSP00000411035

SEQ ID NO: 28460 - protein, 298 aa, Homo sapiens; identical to SEQ ID NO: 28442
  Payload ID: 5576
  Gene Symbol: EHMT2
  Gene Name: euchromatic histone-lysine N-methyltransferase 2
  ENSP ID: ENSP00000412353
  MOD_RES (1)..(1): Any amino acid

SEQ ID NO: 28461 - protein, 888 aa, Homo sapiens
  Payload ID: 5576
  Gene Symbol: EHMT2
  Gene Name: euchromatic histone-lysine N-methyltransferase 2
  ENSP ID: ENSP00000413358
SEVEALTEQLSEEEEEEEEEEEEEEEEEEEEEEEEDEESGNQSDRSGSSGRRKAKKKWRKDSPWVKPSRKRRKREPPRAKEPRGVSNDTSSLETERGFEELPLCSCRMEAPKIDRISERAGHKCMATESVDGELSGCNAAILKRETMRPSSRVALMVLCETHRARMVKHHCCPGCGYFCTAGTFLECHPDFRVAHRFHKACVSQLNGMVFCPHCGEDASEAQEVTIPRGDGVTPPAGTAAPAPPPLSQDVPGRADTSQPSARMRGHGEPRRPPCDPLADTIDSSGPSLTLPNGGCLSAVGLPLGPGREALEKALVIQESERRKKLRFHPRQLYLSVKQGELQKVILMLLDNLDPNFQSDQQSKRTPLHAAAQKGSVEICHVLLQAGANINAVDKQQRTPLMEAVVNNHLEVARYMVQRGGCVYSKEEDGSTCLHHAAKIGNLEMVSLLLSTGQVDVNAQDSGGWTPIIWAAEHKHIEVIRMLLTRGADVTLTDNEENICLHWASFTGSAAIAEVLLNARCDLHAVNYHGDTPLHIAARESYHDCVLLFLSRGANPELRNKEGDTAWDLTPERSDVWFALQLNRKLRLGVGNRAIRTEKIICRDVARGYENVPIPCVNGVDGEPCPEDYKYISENCETSTMNIDRNITHLQHCTCVDDCSSSNCLCGQLSIRCWYDKDGRLLQEFNKIEPPLIFECNQACSCWRNCKNRVVQSGIKVRLQLYRTAKMGWGVRALQTIPQGTFICEYVGELISDAEADVREDDSYLFDLDNKDGEVYCIDARYYGNISRFINHLCDPNIIPVRVFMLHQDLRFPRIAFFSSRDIRTGEELGFDYGDRFWDIKSKYFTCQCGSEKCKHSAEAIALEQSRLARLDPHPELLPELGSLPPVNT

SEQ ID NO: 28462 - protein, 1267 aa, Homo sapiens; identical to SEQ ID NO: 28458
  Payload ID: 5576
  Gene Symbol: EHMT2
  Gene Name: euchromatic histone-lysine N-methyltransferase 2
  ENSP ID: ENSP00000414377

SEQ ID NO: 28463 - protein, 298 aa, Homo sapiens; identical to SEQ ID NO: 28442
  Payload ID: 5576
  Gene Symbol: EHMT2
  Gene Name: euchromatic histone-lysine N-methyltransferase 2
  ENSP ID: ENSP00000416771
  MOD_RES (1)..(1): Any amino acid

SEQ ID NO: 28464 - protein, 1210 aa, Homo sapiens; identical to SEQ ID NO: 28444
  Payload ID: 5576
  Gene Symbol: EHMT2
  Gene Name: euchromatic histone-lysine N-methyltransferase 2
  Uniprot ID: Q96KQ7
  ENSP ID: ENSP00000416957

SEQ ID NO: 28465 - protein, 922 aa, Homo sapiens; identical to SEQ ID NO: 28447
  Payload ID: 5576
  Gene Symbol: EHMT2
  Gene Name: euchromatic histone-lysine N-methyltransferase 2
  ENSP ID: ENSP00000486948

SEQ ID NO: 28466 - protein, 888 aa, Homo sapiens; identical to SEQ ID NO: 28461
  Payload ID: 5576
  Gene Symbol: EHMT2
  Gene Name: euchromatic histone-lysine N-methyltransferase 2
  ENSP ID: ENSP00000486997

SEQ ID NO: 28467 - protein, 725 aa, Homo sapiens
  Payload ID: 5577
  Gene Symbol: EEF2K
  Gene Name: eukaryotic elongation factor 2 kinase
  Uniprot ID: O00418
  ENSP ID: ENSP00000263026
MADEDLIFRLEGVDGGQSPRAGHDGDSDGDSDDEEGYFICPITDDPSSNQNVNSKVNKYYSNLTKSERYSSSGSPANSFHFKEAWKHAIQKAKHMPDPWAEFHLEDIATERATRHRYNAVTGEWLDDEVLIKMASQPFGRGAMRECFRTKKLSNFLHAQQWKGASNYVAKRYIEPVDRDVYFEDVRLQMEAKLWGEEYNRHKPPKQVDIMQMCIIELKDRPGKPLFHLEHYIEGKYIKYNSNSGFVRDDNIRLTPQAFSHFTFERSGHQLIVVDIQGVGDLYTDPQIHTETGTDFGDGNLGVRGMALFFYSHACNRICESMGLAPFDLSPRERDAVNQNTKLLQSAKTILRGTEEKCGSPQVRTLSGSRPPLLRPLSENSGDENMSDVTFDSLPSSPSSATPHSQKLDHLHWPVFSDLDNMASRDHDHLDNHRESENSGDSGYPSEKRGELDDPEPREHGHSYSNRKYESDEDSLGSSGRVCVEKWNLLNSSRLHLPRASAVALEVQRLNALDLEKKIGKSILGKVHLAMVRYHEGGRFCEKGEEWDQESAVFHLEHAANLGELEAIVGLGLMYSQLPHHILADVSLKETEENKTKGFDYLLKAAEAGDRQSMILVARAFDSGQNLSPDRCQDWLEALHWYNTALEMTDCDEGGEYDGMQDEPRYMMLAREAEMLFTGGYGLEKDPQRSGDLYTQAAEAAMEAMKGRLANQYYQKAEEAWAQMEE

SEQ ID NO: 28468 - protein, 412 aa, Homo sapiens
  Payload ID: 5577
  Gene Symbol: EEF2K
  Gene Name: eukaryotic elongation factor 2 kinase
  ENSP ID: ENSP00000456243
MADEDLIFRLEGVDGGQSPRAGHDGDSDGDSDDEEGYFICPITDDPSSNQNVNSKVNKYYSNLTKSERYSSSGSPANSFHFKEAWKHAIQKAKHMPDPWAEFHLEDIATERATRHRYNAVTGEWLDDEVLIKMASQPFGRGAMRECFRTKKLSNFLHAQQWKGASNYVAKRYIEPVDRDVYFEDVRLQMEAKLWGEEYNRHKPPKQVDIMQMCIIELKDRPGKPLFHLEHYIEGKYIKYNSNSGFVRDDNIRLTPQAFSHFTFERSGHQLIVVDIQGVGDLYTDPQIHTETGTDFGDGNLGVRGMALFFYSHACNRICESMGLAPFDLSPRERDAVNQNTKLLQSAKTILRGTEEKCGSPQVRTLSGSRPPLLRPLSENSGDENMSDVTFDSLPSSPSSATPHSQKLDHLRE

SEQ ID NO: 28469 - protein, 296 aa, Homo sapiens
  Payload ID: 5578
  Gene Symbol: EEF2KMT
  Gene Name: eukaryotic elongation factor 2 lysine methyltransferase
  Uniprot ID: Q96G04
  ENSP ID: ENSP00000389710
MAPEENAGTELLLQSFERRFLAARTLRSFPWQSLEAKLRDSSDSELLRDILHKTVKHPVCVKHPPSVKYARCFLSELIKKPSGGSVTLSESTAIISYGTTGLVTWDAALYLAEWAIENPAVFTNRTVLELGSGAGLTGLAICKMCRPRAYIFSDCHSRVLEQLRGNVLLNGLSLEADITAKLDSPRVTVAQLDWDVATVHQLSAFQPDVVIAADVLYCPEAIMSLVGVLRRLAACREHQRAPEVYVAFTVRNPETCQLFTTELGRAGIRWEVEPRHEQKLFPYEEHLEMAMLNLTL

SEQ ID NO: 28470 - protein, 330 aa, Homo sapiens
  Payload ID: 5578
  Gene Symbol: EEF2KMT
  Gene Name: eukaryotic elongation factor 2 lysine methyltransferase
  Uniprot ID: Q96G04
  ENSP ID: ENSP00000398502
MAPEENAGTELLLQSFERRFLAARTLRSFPWQSLEAKLRDSSDSELLRDILHKTVKHPVCVKHPPSVKYARCFLSELIKKHEAVHTEPLDELYEALAETLMAKESTQGHRSYLLPSGGSVTLSESTAIISYGTTGLVTWDAALYLAEWAIENPAVFTNRTVLELGSGAGLTGLAICKMCRPRAYIFSDCHSRVLEQLRGNVLLNGLSLEADITAKLDSPRVTVAQLDWDVATVHQLSAFQPDVVIAADVLYCPEAIMSLVGVLRRLAACREHQRAPEVYVAFTVRNPETCQLFTTELGRAGIRWEVEPRHEQKLFPYEEHLEMAMLNLTL

SEQ ID NO: 28471 - protein, 58 aa, Homo sapiens
  Payload ID: 5578
  Gene Symbol: EEF2KMT
  Gene Name: eukaryotic elongation factor 2 lysine methyltransferase
  ENSP ID: ENSP00000464773
MAPEENAGTELLLQSFERRFLAARTLRSFPWQAVIVLVTGTQLPSPILKSQRRQDRRA

SEQ ID NO: 28472 - protein, 73 aa, Homo sapiens
  Payload ID: 5578
  Gene Symbol: EEF2KMT
  Gene Name: eukaryotic elongation factor 2 lysine methyltransferase
  ENSP ID: ENSP00000464781
MAPEENAGTELLLQSFERRFLAARTLRSFPWQSLEAKLRDSSDSELLRDILHKVRIPESLGLMTLPPESLQKT

SEQ ID NO: 28473 - protein, 73 aa, Homo sapiens; identical to SEQ ID NO: 28472
  Payload ID: 5578
  Gene Symbol: EEF2KMT
  Gene Name: eukaryotic elongation factor 2 lysine methyltransferase
  ENSP ID: ENSP00000467790

SEQ ID NO: 28474 - protein, 269 aa, Homo sapiens
  Payload ID: 5578
  Gene Symbol: EEF2KMT
  Gene Name: eukaryotic elongation factor 2 lysine methyltransferase
  ENSP ID: ENSP00000468599
MAPEENAGTELLLQSFERRFLAARTLRSFPWQSLEAKLRDSSDSELLRDILHKPSGGSVTLSESTAIISYGTTGLVTWDAALYLAEWAIENPAVFTNRTVLELGSGAGLTGLAICKMCRPRAYIFSDCHSRVLEQLRGNVLLNGLSLEADITAKLDSPRVTVAQLDWDVATVHQLSAFQPDVVIAADVLYCPEAIMSLVGVLRRLAACREHQRAPEVYVAFTVRNPETCQLFTTELGRAGIRWEVEPRHEQKLFPYEEHLEMAMLNLTL

SEQ ID NO: 28475 - protein, 596 aa, Homo sapiens
  Payload ID: 5579
  Gene Symbol: EEFSEC
  Gene Name: eukaryotic elongation factor, selenocysteine-tRNA-specific
  Uniprot ID: P57772
  ENSP ID: ENSP00000254730
MAGRRVNVNVGVLGHIDSGKTALARALSTTASTAAFDKQPQSRERGITLDLGFSCFSVPLPARLRSSLPEFQAAPEAEPEPGEPLLQVTLVDCPGHASLIRTIIGGAQIIDLMMLVIDVTKGMQTQSAECLVIGQIACQKLVVVLNKIDLLPEGKRQAAIDKMTKKMQKTLENTKFRGAPIIPVAAKPGGPEAPETEAPQGIPELIELLTSQISIPTRDPSGPFLMSVDHCFSIKGQGTVMTGTILSGSISLGDSVEIPALKVVKKVKSMQMFHMPITSAMQGDRLGICVTQFDPKLLERGLVCAPESLHTVHAALISVEKIPYFRGPLQTKAKFHITVGHETVMGRLMFFSPAPDNFDQEPILDSFNFSQEYLFQEQYLSKDLTPAVTDNDEADKKAGQATEGHCPRQQWALVEFEKPVTCPRLCLVIGSRLDADIHTNTCRLAFHGILLHGLEDRNYADSFLPRLKVYKLKHKHGLVERAMDDYSVIGRSLFKKETNIQLFVGLKVHLSTGELGIIDSAFGQSGKFKIHIPGGLSPESKKILTPALKKRARAGRGEATRQEESAERSEPSQHVVLSLTFKRYVFDTHKRMVQSP

SEQ ID NO: 28476 - protein, 436 aa, Homo sapiens
  Payload ID: 5579
  Gene Symbol: EEFSEC
  Gene Name: eukaryotic elongation factor, selenocysteine-tRNA-specific
  ENSP ID: ENSP00000417660
MAGRRVNVNVGVLGHIDSGKTALARALSTTASTAAFDKQPQSRERGITLDLGFSCFSVPLPARLRSSLPEFQAAPEAEPEPGEPLLQVTLVDCPGHASLIRTIIGGAQIIDLMMLVIDVTKGMQTQSAECLVIGQIACQKLVVVLNKIDLLPEGKRQAAIDKMTKKMQKTLENTKFRGAPIIPVAAKPGGPEAPETEAPQGIPELIEVVKKVKSMQMFHMPITSAMQGDRLGICVTQFDPKLLERGLVCAPESLHTVHAALISVEKIPYFRGPLQTKAKFHITVGHETVMGRLMFFSPAPDNFDQEPILDSFNFSQEYLFQEQYLSKDLTPAVTDNDEADKKAGQATEGHCPRQQWALVEFEKPVTCPRLCLVIGSRLDADIHTNTCRLAFHGILLHGLEDRNYADSFLPRLKVYKLKHKHGLVERVASAPSPRRS

SEQ ID NO: 28477 - protein, 462 aa, Homo sapiens
  Payload ID: 5580
  Gene Symbol: EEF1A1
  Gene Name: eukaryotic translation elongation factor 1 alpha 1
  Uniprot ID: P68104
  ENSP ID: ENSP00000330054
MGKEKTHINIVVIGHVDSGKSTTTGHLIYKCGGIDKRTIEKFEKEAAEMGKGSFKYAWVLDKLKAERERGITIDISLWKFETSKYYVTIIDAPGHRDFIKNMITGTSQADCAVLIVAAGVGEFEAGISKNGQTREHALLAYTLGVKQLIVGVNKMDSTEPPYSQKRYEEIVKEVSTYIKKIGYNPDTVAFVPISGWNGDNMLEPSANMPWFKGWKVTRKDGNASGTTLLEALDCILPPTRPTDKPLRLPLQDVYKIGGIGTVPVGRVETGVLKPGMVVTFAPVNVTTEVKSVEMHHEALSEALPGDNVGFNVKNVSVKDVRRGNVAGDSKNDPPMEAAGFTAQVIILNHPGQISAGYAPVLDCHTAHIACKFAELKEKIDRRSGKKLEDGPKFLKSGDAAIVDMVPGKPMCVESFSDYPPLGRFAVRDMRQTVAVGVIKAVDKKAAGAGKVTKSAQKAQKAK

SEQ ID NO: 28478 - protein, 462 aa, Homo sapiens; identical to SEQ ID NO: 28477
  Payload ID: 5580
  Gene Symbol: EEF1A1
  Gene Name: eukaryotic translation elongation factor 1 alpha 1
  Uniprot ID: P68104
  ENSP ID: ENSP00000339053

SEQ ID NO: 28479 - protein, 462 aa, Homo sapiens; identical to SEQ ID NO: 28477
  Payload ID: 5580
  Gene Symbol: EEF1A1
  Gene Name: eukaryotic translation elongation factor 1 alpha 1
  Uniprot ID: P68104
  ENSP ID: ENSP00000339063

SEQ ID NO: 28480 - protein, 145 aa, Homo sapiens
  Payload ID: 5580
  Gene Symbol: EEF1A1
  Gene Name: eukaryotic translation elongation factor 1 alpha 1
  ENSP ID: ENSP00000348651
MGKEKTHINIVVIGHVDSGKSTTTGHLIYKCGGIDKRTIEKFEKEAAEMGKGSFKYAWVLDKLKAERERGITIDISLWKFETSKYYVTIIDAPGHRDFIKNMITGTSQADCAVLIVAAGVGEFEAGISKNGQTREHALLAYTLGV

SEQ ID NO: 28481 - protein, 106 aa, Homo sapiens
  Payload ID: 5580
  Gene Symbol: EEF1A1
  Gene Name: eukaryotic translation elongation factor 1 alpha 1
  ENSP ID: ENSP00000392366
MGKEKTHINIVVIGHVDSGKSTTTGHLIYKCGGIDKRTIEKFEKEAAEMGKGSFKYAWVLDKLKAERERGITIDISLWKFETSKYYVTIIDAPGHRDFIKNMITGT

SEQ ID NO: 28482 - protein, 426 aa, Homo sapiens
  Payload ID: 5580
  Gene Symbol: EEF1A1
  Gene Name: eukaryotic translation elongation factor 1 alpha 1
  ENSP ID: ENSP00000479055
MGKEKTHINIVVIGHVDSGKSTTTGHLIYKCGGIDKRTIEKFEKEAAEMGKGSFKYAWVLDKLKAERERGITIDISLWKFETSKYYVTIIDAPGHRDFIKNMITGTSQADCAVLIVAAGVGEFEAGISKNGQTREHALLAYTLGVKQLIVGVNKMDSTEPPYSQKRYEEIVKEVSTYIKKIGYNPDTVAFVPISGWNGDNMLEPSANMPWFKGWKVTRKDGNASGTTLLEALDCILPPTRPTDKPLRLPLQDVYKIGGIGTVPVPSGDWCSPGMVVTFAPVNVTTEVKSVEMHHEALSEALPGDNVGFNVKNVSVKDVRRGNVAGDSKNDPPMEAAGFTAQVIILNHPGQISAGYAPVLDCHTAHIACKFAELKEKIDRRSGKKLEDGPKFLKSGDAAIVDMVPGKPMCVESFSDYPPLGKSLCCS

SEQ ID NO: 28483 - protein, 441 aa, Homo sapiens
  Payload ID: 5580
  Gene Symbol: EEF1A1
  Gene Name: eukaryotic translation elongation factor 1 alpha 1
  ENSP ID: ENSP00000479609
MGKEKTHINIVVIGHVDSGKSTTTGHLIYKCGGIDKRTIEKFEKEAAEMGKGSFKYAWVLDKLKAERERGITIDISLWKFETSKYYVTIIDAPGHRDFIKNMITGTSQADCAVLIVAAGVGEFEAGISKNGQTREHALLAYTQKRYEEIVKEVSTYIKKIGYNPDTVAFVPISGWNGDNMLEPSANMPWFKGWKVTRKDGNASGTTLLEALDCILPPTRPTDKPLRLPLQDVYKIGGIGTVPVGRVETGVLKPGMVVTFAPVNVTTEVKSVEMHHEALSEALPGDNVGFNVKNVSVKDVRRGNVAGDSKNDPPMEAAGFTAQVIILNHPGQISAGYAPVLDCHTAHIACKFAELKEKIDRRSGKKLEDGPKFLKSGDAAIVDMVPGKPMCVESFSDYPPLGRFAVRDMRQTVAVGVIKAVDKKAAGAGKVTKSAQKAQKAK

SEQ ID NO: 28484 - protein, 463 aa, Homo sapiens
  Payload ID: 5581
  Gene Symbol: EEF1A2
  Gene Name: eukaryotic translation elongation factor 1 alpha 2
  Uniprot ID: Q05639
  ENSP ID: ENSP00000217182
MGKEKTHINIVVIGHVDSGKSTTTGHLIYKCGGIDKRTIEKFEKEAAEMGKGSFKYAWVLDKLKAERERGITIDISLWKFETTKYYITIIDAPGHRDFIKNMITGTSQADCAVLIVAAGVGEFEAGISKNGQTREHALLAYTLGVKQLIVGVNKMDSTEPAYSEKRYDEIVKEVSAYIKKIGYNPATVPFVPISGWHGDNMLEPSPNMPWFKGWKVERKEGNASGVSLLEALDTILPPTRPTDKPLRLPLQDVYKIGGIGTVPVGRVETGILRPGMVVTFAPVNITTEVKSVEMHHEALSEALPGDNVGFNVKNVSVKDIRRGNVCGDSKSDPPQEAAQFTSQVIILNHPGQISAGYSPVIDCHTAHIACKFAELKEKIDRRSGKKLEDNPKSLKSGDAAIVEMVPGKPMCVESFSQYPPLGRFAVRDMRQTVAVGVIKNVEKKSGGAGKVTKSAQKAQKAGK

SEQ ID NO: 28485 - protein, 463 aa, Homo sapiens; identical to SEQ ID NO: 28484
  Payload ID: 5581
  Gene Symbol: EEF1A2
  Gene Name: eukaryotic translation elongation factor 1 alpha 2
  Uniprot ID: Q05639
  ENSP ID: ENSP00000298049

SEQ ID NO: 28486 - protein, 225 aa, Homo sapiens
  Payload ID: 5582
  Gene Symbol: EEF1B2
  Gene Name: eukaryotic translation elongation factor 1 beta 2
  Uniprot ID: P24534
  ENSP ID: ENSP00000236957
MGFGDLKSPAGLQVLNDYLADKSYIEGYVPSQADVAVFEAVSSPPPADLCHALRWYNHIKSYEKEKASLPGVKKALGKYGPADVEDTTGSGATDSKDDDDIDLFGSDDEEESEEAKRLREERLAQYESKKAKKPALVAKSSILLDVKPWDDETDMAKLEECVRSIQADGLVWGSSKLVPVGYGIKKLQIQCVVEDDKVGTDMLEEQITAFEDYVQSMDVAAFNKI

SEQ ID NO: 28487 - protein, 225 aa, Homo sapiens; identical to SEQ ID NO: 28486
  Payload ID: 5582
  Gene Symbol: EEF1B2
  Gene Name: eukaryotic translation elongation factor 1 beta 2
  Uniprot ID: P24534
  ENSP ID: ENSP00000376055

SEQ ID NO: 28488 - protein, 225 aa, Homo sapiens; identical to SEQ ID NO: 28486
  Payload ID: 5582
  Gene Symbol: EEF1B2
  Gene Name: eukaryotic translation elongation factor 1 beta 2
  Uniprot ID: P24534
  ENSP ID: ENSP00000376056

SEQ ID NO: 28489 - protein, 68 aa, Homo sapiens
  Payload ID: 5582
  Gene Symbol: EEF1B2
  Gene Name: eukaryotic translation elongation factor 1 beta 2
  ENSP ID: ENSP00000387407
MGFGDLKSPAGLQVCVNVSVSLAGMCHHKQMWQYLKPCPAHRLPTCVMPYVGIITSSLTKRKRPACQE

SEQ ID NO: 28490 - protein, 68 aa, Homo sapiens
  Payload ID: 5582
  Gene Symbol: EEF1B2
  Gene Name: eukaryotic translation elongation factor 1 beta 2
  ENSP ID: ENSP00000393501
MGFGDLKSPAGLQVLNDYLADKSYIEGYVPSQADVAVFEAVSSPPPADLCHALRWYNHIKSYEKEKAR

SEQ ID NO: 28491 - protein, 68 aa, Homo sapiens; identical to SEQ ID NO: 28490
  Payload ID: 5582
  Gene Symbol: EEF1B2
  Gene Name: eukaryotic translation elongation factor 1 beta 2
  ENSP ID: ENSP00000397793

SEQ ID NO: 28492 - protein, 29 aa, Homo sapiens
  Payload ID: 5582
  Gene Symbol: EEF1B2
  Gene Name: eukaryotic translation elongation factor 1 beta 2
  ENSP ID: ENSP00000399917
MGFGDLKSPAGLQVLNDYLADKSYIEGCV

SEQ ID NO: 28493 - protein, 123 aa, Homo sapiens
  Payload ID: 5582
  Gene Symbol: EEF1B2
  Gene Name: eukaryotic translation elongation factor 1 beta 2
  ENSP ID: ENSP00000407730
MGFGDLKSPAGLQVLNDYLADKSYIEGYVPSQADVAVFEAVSSPPPADLCHALRWYNHIKSYEKEKASLPGVKKALGKYGPADVEDTTGSGATDSKDDDDIDLFGSDDEEESEEAKRLREERL

SEQ ID NO: 28494 - protein, 281 aa, Homo sapiens
  Payload ID: 5583
  Gene Symbol: EEF1D
  Gene Name: eukaryotic translation elongation factor 1 delta (guanine nucleotide exchange protein)
  Uniprot ID: P29692
  ENSP ID: ENSP00000317399
MATNFLAHEKIWFDKFKYDDAERRFYEQMNGPVAGASRQENGASVILRDIARARENIQKSLAGSSGPGASSGTSGDHGELVVRIASLEVENQSLRGVVQELQQAISKLEARLNVLEKSSPGHRATAPQTQHVSPMRQVEPPAKKPATPAEDDEDDDIDLFGSDNEEEDKEAAQLREERLRQYAEKKAKKPALVAKSSILLDVKPWDDETDMAQLEACVRSIQLDGLVWGASKLVPVGYGIRKLQIQCVVEDDKVGTDLLEEEITKFEEHVQSVDIAAFNKI

SEQ ID NO: 28495 - protein, 281 aa, Homo sapiens; identical to SEQ ID NO: 28494
  Payload ID: 5583
  Gene Symbol: EEF1D
  Gene Name: eukaryotic translation elongation factor 1 delta (guanine nucleotide exchange protein)
  Uniprot ID: P29692
  ENSP ID: ENSP00000378551

SEQ ID NO: 28496 - protein, 281 aa, Homo sapiens; identical to SEQ ID NO: 28494
  Payload ID: 5583
  Gene Symbol: EEF1D
  Gene Name: eukaryotic translation elongation factor 1 delta (guanine nucleotide exchange protein)
  Uniprot ID: P29692
  ENSP ID: ENSP00000388261

SEQ ID NO: 28497 - protein, 647 aa, Homo sapiens
  Payload ID: 5583
  Gene Symbol: EEF1D
  Gene Name: eukaryotic translation elongation factor 1 delta (guanine nucleotide exchange protein)
  Uniprot ID: P29692
  ENSP ID: ENSP00000391944
MRSGKASCTLETVWEDKHKYEEAERRFYEHEATQAAASAQQLPAEGPAMNGPGQDDPEDADEAEAPDGGSRRDPRKSQDSRKPLQKKRKRSPKSGLGPADLALLGLSAERVWLDKSLFDQAESSYRQKLADVAAQAAWPPALAPWGLCTHGNQVACHHVTWGIWVNKSSFDQAERAFVEWSQALLLAPDGSRRQGTPNTGQQVAVPDLAHQPSPPVNGQPPLGSLQALVREVWLEKPRYDAAERGFYEALFDGHPPGKVRLQERAGLAEGARRGRRDRRGRNILGNKRAGLRRADGEAPSALPYCYFLQKDAEAPWLSKPAYDSAECRHHAAEALRVAWCLEAASLSHRPGPRSGLSVSSLRPNRKMATNFLAHEKIWFDKFKYDDAERRFYEQMNGPVAGASRQENGASVILRDIARARENIQKSLAGSSGPGASSGTSGDHGELVVRIASLEVENQSLRGVVQELQQAISKLEARLNVLEKSSPGHRATAPQTQHVSPMRQVEPPAKKPATPAEDDEDDDIDLFGSDNEEEDKEAAQLREERLRQYAEKKAKKPALVAKSSILLDVKPWDDETDMAQLEACVRSIQLDGLVWGASKLVPVGYGIRKLQIQCVVEDDKVGTDLLEEEITKFEEHVQSVDIAAFNKI

SEQ ID NO: 28498 - protein, 647 aa, Homo sapiens; identical to SEQ ID NO: 28497
  Payload ID: 5583
  Gene Symbol: EEF1D
  Gene Name: eukaryotic translation elongation factor 1 delta (guanine nucleotide exchange protein)
  Uniprot ID: P29692
  ENSP ID: ENSP00000410059

SEQ ID NO: 28499 - protein, 81 aa, Homo sapiens
  Payload ID: 5583
  Gene Symbol: EEF1D
  Gene Name: eukaryotic translation elongation factor 1 delta (guanine nucleotide exchange protein)
  ENSP ID: ENSP00000431285
MRSGKASCTLETVWEDKHKYEEAERRFYEHEATQAAASAQQLPAEGPAMNGPGQDDPEDADEAEAPDGGSRRDPRKSQDSR

SEQ ID NO: 28500 - protein, 62 aa, Homo sapiens
  Payload ID: 5583
  Gene Symbol: EEF1D
  Gene Name: eukaryotic translation elongation factor 1 delta (guanine nucleotide exchange protein)
  ENSP ID: ENSP00000431307
MRSGKASCTLETVWEDKHKYEEAERRFYEHEATQAAASAQQLPAEGPAMNGPGQDDPEDADE

SEQ ID NO: 28501 - protein, 84 aa, Homo sapiens
  Payload ID: 5583
  Gene Symbol: EEF1D
  Gene Name: eukaryotic translation elongation factor 1 delta (guanine nucleotide exchange protein)
  ENSP ID: ENSP00000431401
MRSGKASCTLETVWEDKHKYEEAERRFYEHEATQAAASAQQLPAEGPAMNGPGQDDPEDADEAEAPDGGSRRDPRKSQDSRKPL

SEQ ID NO: 28502 - protein, 187 aa, Homo sapiens
  Payload ID: 5583
  Gene Symbol: EEF1D
  Gene Name: eukaryotic translation elongation factor 1 delta (guanine nucleotide exchange protein)
  ENSP ID: ENSP00000431460
MATNFLAHEKIWFDKFKYDDAERRFYEQMNGPVAGASRQSSGPGASSGTSGDHGELVVRIASLEVENQSLRGVVQELQQAISKLEARLNVLEKSSPGHRATAPQTQHVSPMRQVEPPAKKPATPAEDDEDDDIDLFGSDNEEEDKEAAQLREERLRQYAEKKAKKPALVAKSSILLDVKPWDDETDM

SEQ ID NO: 28503 - protein, 39 aa, Homo sapiens
  Payload ID: 5583
  Gene Symbol: EEF1D
  Gene Name: eukaryotic translation elongation factor 1 delta (guanine nucleotide exchange protein)
  ENSP ID: ENSP00000431613
MATNFLAHEKIWFDKFKYDDAERRFYEQMNGPVAGASRQ

SEQ ID NO: 28504 - protein, 139 aa, Homo sapiens
  Payload ID: 5583
  Gene Symbol: EEF1D
  Gene Name: eukaryotic translation elongation factor 1 delta (guanine nucleotide exchange protein)
  ENSP ID: ENSP00000431742
MATNFLAHEKIWFDKFKYDDAERRFYEQMNGPVAGASRQENGASVILRDIARARENIQKSLAGSSGPGASSGTSGDHVVQELQQAISKLEARLNVLEKSSPGHRATAPQTQHVSPMRQVEPPAKKPATPAEDDEDDDID

SEQ ID NO: 28505 - protein, 257 aa, Homo sapiens
  Payload ID: 5583
  Gene Symbol: EEF1D
  Gene Name: eukaryotic translation elongation factor 1 delta (guanine nucleotide exchange protein)
  Uniprot ID: P29692
  ENSP ID: ENSP00000431763
MATNFLAHEKIWFDKFKYDDAERRFYEQMNGPVAGASRQSSGPGASSGTSGDHGELVVRIASLEVENQSLRGVVQELQQAISKLEARLNVLEKSSPGHRATAPQTQHVSPMRQVEPPAKKPATPAEDDEDDDIDLFGSDNEEEDKEAAQLREERLRQYAEKKAKKPALVAKSSILLDVKPWDDETDMAQLEACVRSIQLDGLVWGASKLVPVGYGIRKLQIQCVVEDDKVGTDLLEEEITKFEEHVQSVDIAAFNKI

SEQ ID NO: 28506 - protein, 210 aa, Homo sapiens
  Payload ID: 5583
  Gene Symbol: EEF1D
  Gene Name: eukaryotic translation elongation factor 1 delta (guanine nucleotide exchange protein)
  ENSP ID: ENSP00000431833
  MOD_RES (1)..(1): Any amino acid
XRAGLRRADGEAPSALPYCYFLQKDAEAPWLSKPAYDSAECRHHAAEALRVAWCLEAASLSHRPGPRSGLSVSSLRPNRKMATNFLAHEKIWFDKFKYDDAERRFYEQMNGPVAGASRQENGASVILRDIARARENIQKSLAGSSGPGASSGTSGDHGELVVRIASLEVENQSLRGVVQELQQAISKLEARLNVLEKSSPGHRATAPQTQ

SEQ ID NO: 28507 - protein, 137 aa, Homo sapiens
  Payload ID: 5583
  Gene Symbol: EEF1D
  Gene Name: eukaryotic translation elongation factor 1 delta (guanine nucleotide exchange protein)
  ENSP ID: ENSP00000431933
MLPACTRSQERPASRKMATNFLAHEKIWFDKFKYDDAERRFYEQMNGPVAGASRQENGASVILRDIARARENIQKSLAGSSGPGASSGTSGDHGELVVRIASLEVENQSLRGVVQELQQAISKLEARLNVLEKSSPG

SEQ ID NO: 28508 - protein, 257 aa, Homo sapiens
  Payload ID: 5583
  Gene Symbol: EEF1D
  Gene Name: eukaryotic translation elongation factor 1 delta (guanine nucleotide exchange protein)
  ENSP ID: ENSP00000432221
MRSGKASCTLETVWEDKHKYEEAERRFYEHEATQAAASAQQLPAEGPAMNGPGQDDPEDADEAEAPDGGSRRDPRKSQDSRKPLQKKRKRSPKSGLGPADLALLGLSAERVWLDKSLFDQAESSYRQKLADVAAQAAWPPALAPWGLCTHGNQVACHHVTWGIWVNKSSFDQAERAFVEWSQALLLAPDGSRRQGTPNTGQQVAVPDLAHQPSPPVNGQPPLGSLQALVREVWLEKPRYDAAERGFYEALFDGHPPG

SEQ ID NO: 28509 - protein, 238 aa, Homo sapiens
  Payload ID: 5583
  Gene Symbol: EEF1D
  Gene Name: eukaryotic translation elongation factor 1 delta (guanine nucleotide exchange protein)
  ENSP ID: ENSP00000432429
MATNFLAHEKIWFDKFKYDDAERRFYEQMNGPVAGASRQSSGPGASSGTSGDHVVQELQQAISKLEARLNVLEKSSPGHRATAPQTQHVSPMRQVEPPAKKPATPAEDDEDDDIDLFGSDNEEEDKEAAQLREERLRQYAEKKAKKPALVAKSSILLDVKPWDDETDMAQLEACVRSIQLDGLVWGASKLVPVGYGIRKLQIQCVVEDDKVGTDLLEEEITKFEEHVQSVDIAAFNKI

SEQ ID NO: 28510 - protein, 106 aa, Homo sapiens
  Payload ID: 5583
  Gene Symbol: EEF1D
  Gene Name: eukaryotic translation elongation factor 1 delta (guanine nucleotide exchange protein)
  ENSP ID: ENSP00000432881
MATNFLAHEKIWFDKFKYDDAERRFYEQMNGPVAGASRQSSGPGASSGTSGDHGELVVRIASLEVENQSLRGVVQELQQAISKLEARLNVLEKSSPGHRATAPQTQ

SEQ ID NO: 28511 - protein, 190 aa, Homo sapiens
  Payload ID: 5583
  Gene Symbol: EEF1D
  Gene Name: eukaryotic translation elongation factor 1 delta (guanine nucleotide exchange protein)
  ENSP ID: ENSP00000432919
MRSGKASCTLETVWEDKHKYEEAERRFYEHEATQAAASAQQLPAEGPAMNGPGQDDPEDADEAEAPDGGSRRDPRKSQDSRKPLQKKRKRSPKSGLGPADLALLGLSAERVWLDKSLFDQAESSYRQKLADVAAQAAWPPALAPWGLCTHGNQVACHHVTWGIWVNKSSFDQAERAFVEWSQALLLAPDG

SEQ ID NO: 28512 - protein, 180 aa, Homo sapiens
  Payload ID: 5583
  Gene Symbol: EEF1D
  Gene Name: eukaryotic translation elongation factor 1 delta (guanine nucleotide exchange protein)
  ENSP ID: ENSP00000432941
MRSGKASCTLETVWEDKHKYEEAERRFYEHEATQAAASAQQLPAEGPAMNGPGQDDPEDADEAEAPDGGSRRDPRKSQDSRKPLQKKRKRSPKSGLGPADLALLGLSAERVWLDKSLFDQAESSYRQKLADVAAQAAWPPALAPWGLCTHGNQVACHHVTWGIWVNKSSFDQAERAFVEW

SEQ ID NO: 28513 - protein, 68 aa, Homo sapiens
  Payload ID: 5583
  Gene Symbol: EEF1D
  Gene Name: eukaryotic translation elongation factor 1 delta (guanine nucleotide exchange protein)
  ENSP ID: ENSP00000433101
MRSGKASCTLETVWEDKHKYEEAERRFYEHEATQAAASAQQLPAEGPAMNGPGQDDPEDADEAEAPDG

SEQ ID NO: 28514 - protein, 21 aa, Homo sapiens
  Payload ID: 5583
  Gene Symbol: EEF1D
  Gene Name: eukaryotic translation elongation factor 1 delta (guanine nucleotide exchange protein)
  ENSP ID: ENSP00000433255
MRSGKASCTLETVWEDKHKYE

SEQ ID NO: 28515 - protein, 31 aa, Homo sapiens
  Payload ID: 5583
  Gene Symbol: EEF1D
  Gene Name: eukaryotic translation elongation factor 1 delta (guanine nucleotide exchange protein)
  ENSP ID: ENSP00000433398
MRSGKASCTLETVWEDKHKYEEAERRFYEHE

SEQ ID NO: 28516 - protein, 168 aa, Homo sapiens
  Payload ID: 5583
  Gene Symbol: EEF1D
  Gene Name: eukaryotic translation elongation factor 1 delta (guanine nucleotide exchange protein)
  ENSP ID: ENSP00000433412
MATNFLAHEKIWFDKFKYDDAERRFYEQMNGPVAGASRQENGASVILRDIARARENIQKSLAGSSGPGASSGTSGDHGELVVRIASLEVENQSLRGVVQELQQAISKLEARLNVLEKSSPGHRATAPQTQHVSPMRQVEPPAKKPATPAEDDEDDDIDLFGSDNEEED

SEQ ID NO: 28517 - protein, 129 aa, Homo sapiens
  Payload ID: 5583
  Gene Symbol: EEF1D
  Gene Name: eukaryotic translation elongation factor 1 delta (guanine nucleotide exchange protein)
  ENSP ID: ENSP00000433520
MRSGKASCTLETVWEDKHKYEEAERRFYEHEATQAAASAQQLPAEGPAMNGPGQDDPEDADEAEAPDGGSRRDPRKSQDSRKPLQKKRKRSPKSGLGPADLALLGLSAERVWLDKSLFDQAESSYRQKL

SEQ ID NO: 28518 - protein, 261 aa, Homo sapiens
  Payload ID: 5583
  Gene Symbol: EEF1D
  Gene Name: eukaryotic translation elongation factor 1 delta (guanine nucleotide exchange protein)
  ENSP ID: ENSP00000433611
MATNFLAHEKIWFDKFKYDDAERRFYEQMNGPVAGASRQENGASVILRDIARARENIQKSLAGSSGPGASSGTSGDHGELVVRIASLEVENQSLRGVVQELQQAISKLEARLNVLEKSSPGHRATAPQTQHVSPMRQVEPPAKKPATPAEDDEDDDIDLFGSDNEEEDKEAAQLREERLRQYAEKKAKKPALVAKSSILLDVKPWDDETDMAQLEACVRSIQLDGLVWGASKLVPVGYGIRKLQIQCVVEDDKVGTDLLEE

SEQ ID NO: 28519 - protein, 179 aa, Homo sapiens
  Payload ID: 5583
  Gene Symbol: EEF1D
  Gene Name: eukaryotic translation elongation factor 1 delta (guanine nucleotide exchange protein)
  ENSP ID: ENSP00000433698
MRSGKASCTLETVWEDKHKYEEAERRFYEHEATQAAASAQQLPAEGPAMNGPGQDDPEDADEAEAPDGGSRRDPRKSQDSRKPLQKKRKRSPKSGLGPADLALLGLSAERVWLDKSLFDQAESSYRQKLADVAAQAAWPPALAPWGLCTHGNQVACHHVTWGIWVNKSSFDQAERAFVE

SEQ ID NO: 28520 - protein, 99 aa, Homo sapiens
  Payload ID: 5583
  Gene Symbol: EEF1D
  Gene Name: eukaryotic translation elongation factor 1 delta (guanine nucleotide exchange protein)
  ENSP ID: ENSP00000433784
MATNFLAHEKIWFDKFKYDDAERRFYEQMNGPVCALSSWTGWSGGLPSWCPWATVSGSYRFSVWWRTTRWGQTCWRRRSPSLRSTCRVSISQLSTRSEA

SEQ ID NO: 28521 - protein, 697 aa, Homo sapiens
  Payload ID: 5583
  Gene Symbol: EEF1D
  Gene Name: eukaryotic translation elongation factor 1 delta (guanine nucleotide exchange protein)
  ENSP ID: ENSP00000434070
MEAPLGSILSPCPGRAATGRAGTGRVGTGLRPPAVLQLCPLLAFYRCVRKMRSGKASCTLETVWEDKHKYEEAERRFYEHEATQAAASAQQLPAEGPAMNGPGQDDPEDADEAEAPDGGSRRDPRKSQDSRKPLQKKRKRSPKSGLGPADLALLGLSAERVWLDKSLFDQAESSYRQKLADVAAQAAWPPALAPWGLCTHGNQVACHHVTWGIWVNKSSFDQAERAFVEWSQALLLAPDGSRRQGTPNTGQQVAVPDLAHQPSPPVNGQPPLGSLQALVREVWLEKPRYDAAERGFYEALFDGHPPGKVRLQERAGLAEGARRGRRDRRGRNILGNKRAGLRRADGEAPSALPYCYFLQKDAEAPWLSKPAYDSAECRHHAAEALRVAWCLEAASLSHRPGPRSGLSVSSLRPNRKMATNFLAHEKIWFDKFKYDDAERRFYEQMNGPVAGASRQENGASVILRDIARARENIQKSLAGSSGPGASSGTSGDHGELVVRIASLEVENQSLRGVVQELQQAISKLEARLNVLEKSSPGHRATAPQTQHVSPMRQVEPPAKKPATPAEDDEDDDIDLFGSDNEEEDKEAAQLREERLRQYAEKKAKKPALVAKSSILLDVKPWDDETDMAQLEACVRSIQLDGLVWGASKLVPVGYGIRKLQIQCVVEDDKVGTDLLEEEITKFEEHVQSVDIAAFNKI

SEQ ID NO: 28522 - protein, 39 aa, Homo sapiens; identical to SEQ ID NO: 28503
  Payload ID: 5583
  Gene Symbol: EEF1D
  Gene Name: eukaryotic translation elongation factor 1 delta (guanine nucleotide exchange protein)
  ENSP ID: ENSP00000434123

SEQ ID NO: 28523 - protein, 300 aa, Homo sapiens
  Payload ID: 5583
  Gene Symbol: EEF1D
  Gene Name: eukaryotic translation elongation factor 1 delta (guanine nucleotide exchange protein)
  ENSP ID: ENSP00000434389
MRSGKASCTLETVWEDKHKYEEAERRFYEHEATQAAASAQQLPAEGPAMNGPGQDDPEDADEAEAPDGGSRRDPRKSQDSRKPLQKKRKRSPKSGLGPADLALLGLSAERVWLDKSLFDQAESSYRQKLADVAAQAAWPPALAPWGLCTHGNQVACHHVTWGIWVNKSSFDQAERAFVEWSQALLLAPDGSRRQGTPNTGQQVAVPDLAHQPSPPVNGQPPLGSLQALVREVWLEKPRYDAAERGFYEALFDGHPPGKVRLQERAGLAEGARRGRRDRRGRNILGNKRAGLRRADGEAPS

SEQ ID NO: 28524 - protein, 198 aa, Homo sapiens
  Payload ID: 5583
  Gene Symbol: EEF1D
  Gene Name: eukaryotic translation elongation factor 1 delta (guanine nucleotide exchange protein)
  ENSP ID: ENSP00000434448
MATNFLAHEKIWFDKFKYDDAERRFYEQMNGPVAGASRQENGASVILRDIARARENIQKSLAGSSGPGASSGTSGDHGELVVRIASLEVENQSLRGVVQELQQAISKLEARLNVLEKSSPGHRATAPQTQHVSPMRQVEPPAKKPATPAEDDEDDDIDLFGSDNEEEDKEAAQLREERLRQYAEKKAKKPALVAKSSI

SEQ ID NO: 28525 - protein, 204 aa, Homo sapiens
  Payload ID: 5583
  Gene Symbol: EEF1D
  Gene Name: eukaryotic translation elongation factor 1 delta (guanine nucleotide exchange protein)
  ENSP ID: ENSP00000434691
MATNFLAHEKIWFDKFKYDDAERRFYEQMNGPVAGASRQENGASVILRDIARARENIQKSLAGSSGPGASSGTSGDHGELVVRIASLEVENQSLRGVVQELQQAISKLEARLNVLEKSSPGHRATAPQTQHVSPMRQVEPPAKKPATPAEDDEDDDIDLFGSDNEEEDKEAAQLREERLRQYAEKKAKKPALVAKSSILLDVKP

SEQ ID NO: 28526 - protein, 281 aa, Homo sapiens; identical to SEQ ID NO: 28494
  Payload ID: 5583
  Gene Symbol: EEF1D
  Gene Name: eukaryotic translation elongation factor 1 delta (guanine nucleotide exchange protein)
  Uniprot ID: P29692
  ENSP ID: ENSP00000434872

SEQ ID NO: 28527 - protein, 119 aa, Homo sapiens
  Payload ID: 5583
  Gene Symbol: EEF1D
  Gene Name: eukaryotic translation elongation factor 1 delta (guanine nucleotide exchange protein)
  ENSP ID: ENSP00000435015
GSDNEEEDKEAAQLREERLRQYAEKKAKKPALVAKSSILLDVKPWDDETDMAQLEACVRSIQLDGLVWGASKLVPVGYGIRKLQIQCVVEDDKVGTDLLEEEITKFEEHSVDIAAFNKI

SEQ ID NO: 28528 - protein, 156 aa, Homo sapiens
  Payload ID: 5583
  Gene Symbol: EEF1D
  Gene Name: eukaryotic translation elongation factor 1 delta (guanine nucleotide exchange protein)
  ENSP ID: ENSP00000435117
  MOD_RES (1)..(1): Any amino acid
XPLWQHVSPMRQVEPPAKKPATPAEDDEDDDIDLFGSDNEEEDKEAAQLREERLRQYAEKKAKKPALVAKSSILLDVKPWDDETDMAQLEACVRSIQLDGLVWGASKLVPVGYGIRKLQIQCVVEDDKVGTDLLEEEITKFEEHVQSVDIAAFNKI

SEQ ID NO: 28529 - protein, 63 aa, Homo sapiens
  Payload ID: 5583
  Gene Symbol: EEF1D
  Gene Name: eukaryotic translation elongation factor 1 delta (guanine nucleotide exchange protein)
  ENSP ID: ENSP00000435477
MATNFLAHEKIWFDKFKYDDAERRFYEQMNGPVAGASRQENGASVILRDIARARENIQKSLAG

SEQ ID NO: 28530 - protein, 36 aa, Homo sapiens
  Payload ID: 5583
  Gene Symbol: EEF1D
  Gene Name: eukaryotic translation elongation factor 1 delta (guanine nucleotide exchange protein)
  ENSP ID: ENSP00000435617
MRSGKASCTLETVWEDKHKYEEAERRFYEHEATQAA

SEQ ID NO: 28531 - protein, 257 aa, Homo sapiens; identical to SEQ ID NO: 28505
  Payload ID: 5583
  Gene Symbol: EEF1D
  Gene Name: eukaryotic translation elongation factor 1 delta (guanine nucleotide exchange protein)
  Uniprot ID: P29692
  ENSP ID: ENSP00000435697

SEQ ID NO: 28532 - protein, 49 aa, Homo sapiens
  Payload ID: 5583
  Gene Symbol: EEF1D
  Gene Name: eukaryotic translation elongation factor 1 delta (guanine nucleotide exchange protein)
  ENSP ID: ENSP00000435719
MRSGKASCTLETVWEDKHKYEEAERRFYEHEATQAAASAQQLPAEGPAM

SEQ ID NO: 28533 - protein, 130 aa, Homo sapiens
  Payload ID: 5583
  Gene Symbol: EEF1D
  Gene Name: eukaryotic translation elongation factor 1 delta (guanine nucleotide exchange protein)
  ENSP ID: ENSP00000436045
MATNFLAHEKIWFDKFKYDDAERRFYEQMNGPVAGASRQENGASVILRDIARARENIQKSLAGSSGPGASSGTSGDHGELVVRIASLEVENQSLRGVVQELQQAISKLEARLNVLEKSSPGHRATAPQTQ

SEQ ID NO: 28534 - protein, 157 aa, Homo sapiens
  Payload ID: 5583
  Gene Symbol: EEF1D
  Gene Name: eukaryotic translation elongation factor 1 delta (guanine nucleotide exchange protein)
  ENSP ID: ENSP00000436251
MRSGKASCTLETVWEDKHKYEEAERRFYEHEATQAAASAQQLPAEGPAMNGPGQDDPEDADEAEAPDGGSRRDPRKSQDSRKPLQKKRKRSPKSGLGPADLALLGLSAERVWLDKSLFDQAESSYRQKLADVAAQAAWPPALAPWGLCTHGNQVACH

SEQ ID NO: 28535 - protein, 262 aa, Homo sapiens
  Payload ID: 5583
  Gene Symbol: EEF1D
  Gene Name: eukaryotic translation elongation factor 1 delta (guanine nucleotide exchange protein)
  Uniprot ID: P29692
  ENSP ID: ENSP00000436507
MATNFLAHEKIWFDKFKYDDAERRFYEQMNGPVAGASRQENGASVILRDIARARENIQKSLAGSSGPGASSGTSGDHVVQELQQAISKLEARLNVLEKSSPGHRATAPQTQHVSPMRQVEPPAKKPATPAEDDEDDDIDLFGSDNEEEDKEAAQLREERLRQYAEKKAKKPALVAKSSILLDVKPWDDETDMAQLEACVRSIQLDGLVWGASKLVPVGYGIRKLQIQCVVEDDKVGTDLLEEEITKFEEHVQSVDIAAFNKI

SEQ ID NO: 28536 - protein, 204 aa, Homo sapiens; identical to SEQ ID NO: 28525
  Payload ID: 5583
  Gene Symbol: EEF1D
  Gene Name: eukaryotic translation elongation factor 1 delta (guanine nucleotide exchange protein)
  ENSP ID: ENSP00000436542

SEQ ID NO: 28537 - protein, 53 aa, Homo sapiens
  Payload ID: 5583
  Gene Symbol: EEF1D
  Gene Name: eukaryotic translation elongation factor 1 delta (guanine nucleotide exchange protein)
  ENSP ID: ENSP00000436718
MRSGKASCTLETVWEDKHKYEEAERRFYEHEATQAAASAQQLPAEGPAMNGPG

SEQ ID NO: 28538 - protein, 36 aa, Homo sapiens
  Payload ID: 5583
  Gene Symbol: EEF1D
  Gene Name: eukaryotic translation elongation factor 1 delta (guanine nucleotide exchange protein)
  ENSP ID: ENSP00000436880
MAQLEACVRSIQLDGLVWGASKLVPVGYGIRKLQIQ

SEQ ID NO: 28539 - protein, 166 aa, Homo sapiens
  Payload ID: 5583
  Gene Symbol: EEF1D
  Gene Name: eukaryotic translation elongation factor 1 delta (guanine nucleotide exchange protein)
  ENSP ID: ENSP00000436933
MATNFLAHEKIWFDKFKYDDAERRFYEQMNGPVAGASRQENGASVILRDIARARENIQKSLAGSSGPGASSGTSGDHGELVVRIASLEVENQSLRGVVQELQQAISKLEARLNVLEKSSPGHRATAPQTQHVSPMRQVEPPAKKPATPAEDDEDDDIDLFGSDNEE

SEQ ID NO: 28540 - protein, 35 aa, Homo sapiens
  Payload ID: 5583
  Gene Symbol: EEF1D
  Gene Name: eukaryotic translation elongation factor 1 delta (guanine nucleotide exchange protein)
  ENSP ID: ENSP00000437117
MATNFLAHEKIWFDKFKYDDAERRFYEQMNGPVAG

SEQ ID NO: 28541 - protein, 146 aa, Homo sapiens
  Payload ID: 5583
  Gene Symbol: EEF1D
  Gene Name: eukaryotic translation elongation factor 1 delta (guanine nucleotide exchange protein)
  ENSP ID: ENSP00000437223
MRSGKASCTLETVWEDKHKYEEAERRFYEHEATQAAASAQQLPAEGPAMNGPGQDDPEDADEAEAPDGGSRRDPRKSQDSRKPLQKKRKRSPKSGLGPADLALLGLSAERVWLDKSLFDQAESSYRQKLADVAAQAAWPPALAPWG

SEQ ID NO: 28542 - protein, 130 aa, Homo sapiens; identical to SEQ ID NO: 28533
  Payload ID: 5583
  Gene Symbol: EEF1D
  Gene Name: eukaryotic translation elongation factor 1 delta (guanine nucleotide exchange protein)
  ENSP ID: ENSP00000437276

SEQ ID NO: 28543 - protein, 647 aa, Homo sapiens; identical to SEQ ID NO: 28497
  Payload ID: 5583
  Gene Symbol: EEF1D
  Gene Name: eukaryotic translation elongation factor 1 delta (guanine nucleotide exchange protein)
  Uniprot ID: P29692
  ENSP ID: ENSP00000477608

SEQ ID NO: 28544 - protein, 631 aa, Homo sapiens
  Payload ID: 5583
  Gene Symbol: EEF1D
  Gene Name: eukaryotic translation elongation factor 1 delta (guanine nucleotide exchange protein)
  ENSP ID: ENSP00000478271
MRSGKASCTLETVWEDKHKYEEAERRFYEHEATQAAASAQQLPAEGPAMNGPGQDDPEDADEAEAPDGGSRRDPRKSQDSRKPLQKKRKRSPKSGLGPADLALLGLSAERVWLDKSLFDQAESSYRQKLADVAAQAAWPPALAPWGLCTHGNQVACHHVTWGIWVNKSSFDQAERAFVEWSQALLLAPDGSRRQGTPNTGQQVAVPDLAHQPSPPVNGQPPLGSLQALVREVWLEKPRYDAAERGFYEALFDGHPPGKVRLQERAGLAEGARRGRRDRRGRNILGNKRAGLRRADGEAPSALPYCYFLQKDAEAPWLSKPAYDSAECRHHAAEALRVAWCLEAASLSHRPGPRSGLSVSSLRPNRKMATNFLAHEKIWFDKFKYDDAERRFYEQMNGPVAGASRQENGASVILRDIARARENIQKSLAGSSGPGASSGTSGDHGELVVRIASLEVENQSLRGVVQELQQAISKLEARLNVLEKSSPGHRATAPQTQHVSPMRQVEPPAKKPATPAEDDEDDDIDLFGSDNEEEDKEAAQLREERLRQYAEKKAKKPALVAKSSILLDVKPWDDETDMAQLEACVRSIQLDGLVWGASKLVPVGYGIRKLQIQCVGGRQGGDRLAGGGDHQV

SEQ ID NO: 28545 - protein, 281 aa, Homo sapiens; identical to SEQ ID NO: 28494
  Payload ID: 5583
  Gene Symbol: EEF1D
  Gene Name: eukaryotic translation elongation factor 1 delta (guanine nucleotide exchange protein)
  Uniprot ID: P29692
  ENSP ID: ENSP00000478340

SEQ ID NO: 28546 - protein, 281 aa, Homo sapiens; identical to SEQ ID NO: 28494
  Payload ID: 5583
  Gene Symbol: EEF1D
  Gene Name: eukaryotic translation elongation factor 1 delta (guanine nucleotide exchange protein)
  Uniprot ID: P29692
  ENSP ID: ENSP00000479653

SEQ ID NO: 28547 - protein, 647 aa, Homo sapiens; identical to SEQ ID NO: 28497
  Payload ID: 5583
  Gene Symbol: EEF1D
  Gene Name: eukaryotic translation elongation factor 1 delta (guanine nucleotide exchange protein)
  Uniprot ID: P29692
  ENSP ID: ENSP00000480505

SEQ ID NO: 28548 - protein, 281 aa, Homo sapiens; identical to SEQ ID NO: 28494
  Payload ID: 5583
  Gene Symbol: EEF1D
  Gene Name: eukaryotic translation elongation factor 1 delta (guanine nucleotide exchange protein)
  Uniprot ID: P29692
  ENSP ID: ENSP00000483527

SEQ ID NO: 28549 - protein, 631 aa, Homo sapiens; identical to SEQ ID NO: 28544
  Payload ID: 5583
  Gene Symbol: EEF1D
  Gene Name: eukaryotic translation elongation factor 1 delta (guanine nucleotide exchange protein)
  ENSP ID: ENSP00000484536

SEQ ID NO: 28550 - protein, 179 aa, Homo sapiens; identical to SEQ ID NO: 28519
  Payload ID: 5583
  Gene Symbol: EEF1D
  Gene Name: eukaryotic translation elongation factor 1 delta (guanine nucleotide exchange protein)
  ENSP ID: ENSP00000487621

SEQ ID NO: 28551 - protein, 21 aa, Homo sapiens
  Payload ID: 5583
  Gene Symbol: EEF1D
  Gene Name: eukaryotic translation elongation factor 1 delta (guanine nucleotide exchange protein)
  ENSP ID: ENSP00000487622
MRSGKASCTLETVWEDKHKYE

SEQ ID NO: 28552 - protein, 84 aa, Homo sapiens; identical to SEQ ID NO: 28501
  Payload ID: 5583
  Gene Symbol: EEF1D
  Gene Name: eukaryotic translation elongation factor 1 delta (guanine nucleotide exchange protein)
  ENSP ID: ENSP00000487641

SEQ ID NO: 28553 - protein, 281 aa, Homo sapiens; identical to SEQ ID NO: 28494
  Payload ID: 5583
  Gene Symbol: EEF1D
  Gene Name: eukaryotic translation elongation factor 1 delta (guanine nucleotide exchange protein)
  Uniprot ID: P29692
  ENSP ID: ENSP00000487680

SEQ ID NO: 28554 - protein, 198 aa, Homo sapiens; identical to SEQ ID NO: 28524
  Payload ID: 5583
  Gene Symbol: EEF1D
  Gene Name: eukaryotic translation elongation factor 1 delta (guanine nucleotide exchange protein)
  ENSP ID: ENSP00000487710

SEQ ID NO: 28555 - protein, 166 aa, Homo sapiens; identical to SEQ ID NO: 28539
  Payload ID: 5583
  Gene Symbol: EEF1D
  Gene Name: eukaryotic translation elongation factor 1 delta (guanine nucleotide exchange protein)
  ENSP ID: ENSP00000487713

SEQ ID NO: 28556 - protein, 261 aa, Homo sapiens; identical to SEQ ID NO: 28518
  Payload ID: 5583
  Gene Symbol: EEF1D
  Gene Name: eukaryotic translation elongation factor 1 delta (guanine nucleotide exchange protein)
  ENSP ID: ENSP00000487745

SEQ ID NO: 28557 - protein, 35 aa, Homo sapiens; identical to SEQ ID NO: 28540
  Payload ID: 5583
  Gene Symbol: EEF1D
  Gene Name: eukaryotic translation elongation factor 1 delta (guanine nucleotide exchange protein)
  ENSP ID: ENSP00000487777

SEQ ID NO: 28558 - protein, 53 aa, Homo sapiens; identical to SEQ ID NO: 28537
  Payload ID: 5583
  Gene Symbol: EEF1D
  Gene Name: eukaryotic translation elongation factor 1 delta (guanine nucleotide exchange protein)
  ENSP ID: ENSP00000487871

SEQ ID NO: 28559 - protein, 68 aa, Homo sapiens; identical to SEQ ID NO: 28513
  Payload ID: 5583
  Gene Symbol: EEF1D
  Gene Name: eukaryotic translation elongation factor 1 delta (guanine nucleotide exchange protein)
  ENSP ID: ENSP00000487890

SEQ ID NO: 28560 - protein, 62 aa, Homo sapiens; identical to SEQ ID NO: 28500
  Payload ID: 5583
  Gene Symbol: EEF1D
  Gene Name: eukaryotic translation elongation factor 1 delta (guanine nucleotide exchange protein)
  ENSP ID: ENSP00000487932

SEQ ID NO: 28561 - protein, 238 aa, Homo sapiens; identical to SEQ ID NO: 28509
  Payload ID: 5583
  Gene Symbol: EEF1D
  Gene Name: eukaryotic translation elongation factor 1 delta (guanine nucleotide exchange protein)
  ENSP ID: ENSP00000488005

SEQ ID NO: 28562 - protein, 257 aa, Homo sapiens; identical to SEQ ID NO: 28505
  Payload ID: 5583
  Gene Symbol: EEF1D
  Gene Name: eukaryotic translation elongation factor 1 delta (guanine nucleotide exchange protein)
  Uniprot ID: P29692
  ENSP ID: ENSP00000488026

SEQ ID NO: 28563 - protein, 157 aa, Homo sapiens; identical to SEQ ID NO: 28534
  Payload ID: 5583
  Gene Symbol: EEF1D
  Gene Name: eukaryotic translation elongation factor 1 delta (guanine nucleotide exchange protein)
  ENSP ID: ENSP00000488129

SEQ ID NO: 28564 - protein, 36 aa, Homo sapiens; identical to SEQ ID NO: 28530
  Payload ID: 5583
  Gene Symbol: EEF1D
  Gene Name: eukaryotic translation elongation factor 1 delta (guanine nucleotide exchange protein)
  ENSP ID: ENSP00000488167

SEQ ID NO: 28565 - protein, 168 aa, Homo sapiens; identical to SEQ ID NO: 28516
  Payload ID: 5583
  Gene Symbol: EEF1D
  Gene Name: eukaryotic translation elongation factor 1 delta (guanine nucleotide exchange protein)
  ENSP ID: ENSP00000488200

SEQ ID NO: 28566 - protein, 81 aa, Homo sapiens; identical to SEQ ID NO: 28499
  Payload ID: 5583
  Gene Symbol: EEF1D
  Gene Name: eukaryotic translation elongation factor 1 delta (guanine nucleotide exchange protein)
  ENSP ID: ENSP00000488220

SEQ ID NO: 28567 - protein, 204 aa, Homo sapiens; identical to SEQ ID NO: 28525
  Payload ID: 5583
  Gene Symbol: EEF1D
  Gene Name: eukaryotic translation elongation factor 1 delta (guanine nucleotide exchange protein)
  ENSP ID: ENSP00000488233

SEQ ID NO: 28568 - protein, 180 aa, Homo sapiens; identical to SEQ ID NO: 28512
  Payload ID: 5583
  Gene Symbol: EEF1D
  Gene Name: eukaryotic translation elongation factor 1 delta (guanine nucleotide exchange protein)
  ENSP ID: ENSP00000488244

SEQ ID NO: 28569 - protein, 146 aa, Homo sapiens; identical to SEQ ID NO: 28541
  Payload ID: 5583
  Gene Symbol: EEF1D
  Gene Name: eukaryotic translation elongation factor 1 delta (guanine nucleotide exchange protein)
  ENSP ID: ENSP00000488247

SEQ ID NO: 28570 - protein, 257 aa, Homo sapiens; identical to SEQ ID NO: 28505
  Payload ID: 5583
  Gene Symbol: EEF1D
  Gene Name: eukaryotic translation elongation factor 1 delta (guanine nucleotide exchange protein)
  Uniprot ID: P29692
  ENSP ID: ENSP00000488275

SEQ ID NO: 28571 - protein, 63 aa, Homo sapiens; identical to SEQ ID NO: 28529
  Payload ID: 5583
  Gene Symbol: EEF1D
  Gene Name: eukaryotic translation elongation factor 1 delta (guanine nucleotide exchange protein)
  ENSP ID: ENSP00000488298

SEQ ID NO: 28572 - protein, 31 aa, Homo sapiens; identical to SEQ ID NO: 28515
  Payload ID: 5583
  Gene Symbol: EEF1D
  Gene Name: eukaryotic translation elongation factor 1 delta (guanine nucleotide exchange protein)
  ENSP ID: ENSP00000488400

SEQ ID NO: 28573 - protein, 300 aa, Homo sapiens; identical to SEQ ID NO: 28523
  Payload ID: 5583
  Gene Symbol: EEF1D
  Gene Name: eukaryotic translation elongation factor 1 delta (guanine nucleotide exchange protein)
  ENSP ID: ENSP00000488411

SEQ ID NO: 28574 - protein, 99 aa, Homo sapiens; identical to SEQ ID NO: 28520
  Payload ID: 5583
  Gene Symbol: EEF1D
  Gene Name: eukaryotic translation elongation factor 1 delta (guanine nucleotide exchange protein)
  ENSP ID: ENSP00000488514

SEQ ID NO: 28575 - protein, 139 aa, Homo sapiens; identical to SEQ ID NO: 28504
  Payload ID: 5583
  Gene Symbol: EEF1D
  Gene Name: eukaryotic translation elongation factor 1 delta (guanine nucleotide exchange protein)
  ENSP ID: ENSP00000488535

SEQ ID NO: 28576 - protein, 109 aa, Homo sapiens
  Payload ID: 5583
  Gene Symbol: EEF1D
  Gene Name: eukaryotic translation elongation factor 1 delta (guanine nucleotide exchange protein)
  ENSP ID: ENSP00000488544
PGKVRLQERAGLAEGARRGRRDRRGRNILGNKRAGLRRADGEAPSALPYCYFLQKDAEAPWLSKPAYDSAECRHHAAEALRVAWCLEAASLSHRPGPRSGLSVSSLRPK

SEQ ID NO: 28577 - protein, 39 aa, Homo sapiens; identical to SEQ ID NO: 28503
  Payload ID: 5583
  Gene Symbol: EEF1D
  Gene Name: eukaryotic translation elongation factor 1 delta (guanine nucleotide exchange protein)
  ENSP ID: ENSP00000488549

SEQ ID NO: 28578 - protein, 204 aa, Homo sapiens; identical to SEQ ID NO: 28525
  Payload ID: 5583
  Gene Symbol: EEF1D
  Gene Name: eukaryotic translation elongation factor 1 delta (guanine nucleotide exchange protein)
  ENSP ID: ENSP00000488663

SEQ ID NO: 28579 - protein, 262 aa, Homo sapiens; identical to SEQ ID NO: 28535
  Payload ID: 5583
  Gene Symbol: EEF1D
  Gene Name: eukaryotic translation elongation factor 1 delta (guanine nucleotide exchange protein)
  Uniprot ID: P29692
  ENSP ID: ENSP00000488672

SEQ ID NO: 28580 - protein, 49 aa, Homo sapiens; identical to SEQ ID NO: 28532
  Payload ID: 5583
  Gene Symbol: EEF1D
  Gene Name: eukaryotic translation elongation factor 1 delta (guanine nucleotide exchange protein)
  ENSP ID: ENSP00000488681

SEQ ID NO: 28581 - protein, 257 aa, Homo sapiens; identical to SEQ ID NO: 28508
  Payload ID: 5583
  Gene Symbol: EEF1D
  Gene Name: eukaryotic translation elongation factor 1 delta (guanine nucleotide exchange protein)
  ENSP ID: ENSP00000488733

SEQ ID NO: 28582 - protein, 129 aa, Homo sapiens; identical to SEQ ID NO: 28517
  Payload ID: 5583
  Gene Symbol: EEF1D
  Gene Name: eukaryotic translation elongation factor 1 delta (guanine nucleotide exchange protein)
  ENSP ID: ENSP00000488738

SEQ ID NO: 28583 - protein, 190 aa, Homo sapiens; identical to SEQ ID NO: 28511
  Payload ID: 5583
  Gene Symbol: EEF1D
  Gene Name: eukaryotic translation elongation factor 1 delta (guanine nucleotide exchange protein)
  ENSP ID: ENSP00000488795

SEQ ID NO: 28584 - protein, 187 aa, Homo sapiens; identical to SEQ ID NO: 28502
  Payload ID: 5583
  Gene Symbol: EEF1D
  Gene Name: eukaryotic translation elongation factor 1 delta (guanine nucleotide exchange protein)
  ENSP ID: ENSP00000488901

SEQ ID NO: 28585 - protein, 174 aa, Homo sapiens
  Payload ID: 5584
  Gene Symbol: EEF1E1
  Gene Name: eukaryotic translation elongation factor 1 epsilon 1
  Uniprot ID: O43324
  ENSP ID: ENSP00000369038
MAAAAELSLLEKSLGLSKGNKYSAQGERQIPVLQTNNGPSLTGLTTIAAHLVKQANKEYLLGSTAEEKAIVQQWLEYRVTQVDGHSSKNDIHTLLKDLNSYLEDKVYLTGYNFTLADILLYYGLHRFIVDLTVQEKEKYLNVSRWFCHIQHYPGIRQHLSSVVFIKNRLYTNSH

SEQ ID NO: 28586 - protein, 139 aa, Homo sapiens
  Payload ID: 5584
  Gene Symbol: EEF1E1
  Gene Name: eukaryotic translation elongation factor 1 epsilon 1
  Uniprot ID: O43324
  ENSP ID: ENSP00000414363
MAAAAELSLLEKSLGLSKGNKYSAQGERQIPVLQTNNGPSLTGLTTIAAHLVKQANKEYLLGSTAEEKAIVQQWLEYRVTQVDGHSSKNDIHTLLKDLNSYLEDKVYLTGYNFTLADILLYYGLHRFIIRKLRHTEVGN

SEQ ID NO: 28587 - protein, 150 aa, Homo sapiens
  Payload ID: 5584
  Gene Symbol: EEF1E1
  Gene Name: eukaryotic translation elongation factor 1 epsilon 1
  ENSP ID: ENSP00000424222
MAAAAELSLLEKSLGLSKGNKYSAQGERQIPVLQTNNGPSLTGLTTIAAHLVKQANKEYLLGSTAEEKAIVQQWLEYRVTQVDGHSSKNDIHTLLKDLNSYLEDKVYLTGYNFTLADILLYYGLHRFIVSICIVTGFFSVVLRMIFKTLS

SEQ ID NO: 28588 - protein, 94 aa, Homo sapiens
  Payload ID: 5584
  Gene Symbol: EEF1E1
  Gene Name: eukaryotic translation elongation factor 1 epsilon 1
  ENSP ID: ENSP00000425577
MAERTPKESWPNLGDSGKAFLKPWIISLSVTTHSECGKHHKIPVLQTNNGPSLTGLTTIAAHLVKQANKEYLLGSTAEEKAIVQQWLEYRVTQV

SEQ ID NO: 28589 - protein, 56 aa, Homo sapiens
  Payload ID: 5584
  Gene Symbol: EEF1E1
  Gene Name: eukaryotic translation elongation factor 1 epsilon 1
  ENSP ID: ENSP00000427143
VDGHSSKNDIHTLLKVLTLSPRLECNGVILAHCNLRLLGSSDSRASASRVNGITGS

SEQ ID NO: 28590 - protein, 136 aa, Homo sapiens
  Payload ID: 5584
  Gene Symbol: EEF1E1
  Gene Name: eukaryotic translation elongation factor 1 epsilon 1
  ENSP ID: ENSP00000427572
  MOD_RES (1)..(1): Any amino acid
XGLSKGNKYSAQGERQIPVLQTNNGPSLTGLTTIAAHLVKQANKEYLLGSTAEEKAIVQQWLEYRVTQVDGHSSKNDIHTLLKDLNSYLEDKVYLTGYNFTLADILLYYGLHRFIANHDCFVYKKMRIVTGPHVCL

SEQ ID NO: 28591 - protein, 437 aa, Homo sapiens
  Payload ID: 5585
  Gene Symbol: EEF1G
  Gene Name: eukaryotic translation elongation factor 1 gamma
  Uniprot ID: P26641
  ENSP ID: ENSP00000331901
MAAGTLYTYPENWRAFKALIAAQYSGAQVRVLSAPPHFHFGQTNRTPEFLRKFPAGKVPAFEGDDGFCVFESNAIAYYVSNEELRGSTPEAAAQVVQWVSFADSDIVPPASTWVFPTLGIMHHNKQATENAKEEVRRILGLLDAYLKTRTFLVGERVTLADITVVCTLLWLYKQVLEPSFRQAFPNTNRWFLTCINQPQFRAVLGEVKLCEKMAQFDAKKFAETQPKKDTPRKEKGSREEKQKPQAERKEEKKAAAPAPEEEMDECEQALAAEPKAKDPFAHLPKSTFVLDEFKRKYSNEDTLSVALPYFWEHFDKDGWSLWYSEYRFPEELTQTFMSCNLITGMFQRLDKLRKNAFASVILFGTNNSSSISGVWVFRGQELAFPLSPDWQVDYESYTWRKLDPGSEETQTLVREYFSWEGAFQHVGKAFNQGKIFK

SEQ ID NO: 28592 - protein, 858 aa, Homo sapiens
  Payload ID: 5586
  Gene Symbol: EEF2
  Gene Name: eukaryotic translation elongation factor 2
  Uniprot ID: P13639
  ENSP ID: ENSP00000307940
MVNFTVDQIRAIMDKKANIRNMSVIAHVDHGKSTLTDSLVCKAGIIASARAGETRFTDTRKDEQERCITIKSTAISLFYELSENDLNFIKQSKDGAGFLINLIDSPGHVDFSSEVTAALRVTDGALVVVDCVSGVCVQTETVLRQAIAERIKPVLMMNKMDRALLELQLEPEELYQTFQRIVENVNVIISTYGEGESGPMGNIMIDPVLGTVGFGSGLHGWAFTLKQFAEMYVAKFAAKGEGQLGPAERAKKVEDMMKKLWGDRYFDPANGKFSKSATSPEGKKLPRTFCQLILDPIFKVFDAIMNFKKEETAKLIEKLDIKLDSEDKDKEGKPLLKAVMRRWLPAGDALLQMITIHLPSPVTAQKYRCELLYEGPPDDEAAMGIKSCDPKGPLMMYISKMVPTSDKGRFYAFGRVFSGLVSTGLKVRIMGPNYTPGKKEDLYLKPIQRTILMMGRYVEPIEDVPCGNIVGLVGVDQFLVKTGTITTFEHAHNMRVMKFSVSPVVRVAVEAKNPADLPKLVEGLKRLAKSDPMVQCIIEESGEHIIAGAGELHLEICLKDLEEDHACIPIKKSDPVVSYRETVSEESNVLCLSKSPNKHNRLYMKARPFPDGLAEDIDKGEVSARQELKQRARYLAEKYEWDVAEARKIWCFGPDGTGPNILTDITKGVQYLNEIKDSVVAGFQWATKEGALCEENMRGVRFDVHDVTLHADAIHRGGGQIIPTARRCLYASVLTAQPRLMEPIYLVEIQCPEQVVGGIYGVLNRKRGHVFEESQVAGTPMFVVKAYLPVNESFGFTADLRSNTGGQAFPQCVFDHWQILPGDPFDNSSRPSQVVAETRKRKGLKEGIPALDNFLDKL

SEQ ID NO: 28593 - protein, 85 aa, Homo sapiens
  Payload ID: 5586
  Gene Symbol: EEF2
  Gene Name: eukaryotic translation elongation factor 2
  ENSP ID: ENSP00000471265
  MOD_RES (1)..(1): Any amino acid
XEESNVLCLSKSPNKHNRLYMKARPFPDGLAEDIDKGGMGHPTLFPFLQRETQMSKLILTNALRGLFGYMARSGFCPRKGKGTRG

SEQ ID NO: 28594 - protein, 113 aa, Homo sapiens
  Payload ID: 5587
  Gene Symbol: EIF1
  Gene Name: eukaryotic translation initiation factor 1
  Uniprot ID: P41567
  ENSP ID: ENSP00000419449
MSAIQNLHSFDPFADASKGDDLLPAGTEDYIHIRIQQRNGRKTLTTVQGIADDYDKKKLVKAFKKKFACNGTVIEHPEYGEVIQLQGDQRKNICQFLVEIGLAKDDQLKVHGF

SEQ ID NO: 28595 - protein, 121 aa, Homo sapiens
  Payload ID: 5587
  Gene Symbol: EIF1
  Gene Name: eukaryotic translation initiation factor 1
  ENSP ID: ENSP00000466321
MSAIQNLHSFDPFADASKGDDLLPAGTEDYIHIRIQQRNGRKTLTTVQGIADDYDKKKLVKAFKKKFACNGTVIEHPEYGEVIQLQGDQRKNICQFLVEIGLAKDDQLKVHGFKNLTACIM

SEQ ID NO: 28596 - protein, 53 aa, Homo sapiens
  Payload ID: 5587
  Gene Symbol: EIF1
  Gene Name: eukaryotic translation initiation factor 1
  ENSP ID: ENSP00000467918
DYDKKKLVKAFKKKFACNGTVIEHPEYGEVIQLQGDQRKNICQFLVEVSSVTT

SEQ ID NO: 28597 - protein, 165 aa, Homo sapiens
  Payload ID: 5588
  Gene Symbol: EIF1AD
  Gene Name: eukaryotic translation initiation factor 1A domain containing
  Uniprot ID: Q8N9N8
  ENSP ID: ENSP00000309175
MSQATKRKHVVKEVLGEHIVPSDQQQIVRVLRTPGNNLHEVETAQGQRFLVSMPSKYRKNIWIKRGDFLIVDPIEEGEKVKAEISFVLCKDHVRSLQKEGFWPEAFSEVAEKHNNRNRQTQPELPAEPQLSGEESSSEDDSDLFVNTNRRQYHESEEESEEEEAA

SEQ ID NO: 28598 - protein, 78 aa, Homo sapiens
  Payload ID: 5588
  Gene Symbol: EIF1AD
  Gene Name: eukaryotic translation initiation factor 1A domain containing
  ENSP ID: ENSP00000432135
MSQATKRKHVVKEVLGEHIVPSDQQQIVRVLRTPGNNLHEVETAQGQRFLVSMPSKYRKNIWIKRGDFLIVDPIEEGE

SEQ ID NO: 28599 - protein, 113 aa, Homo sapiens
  Payload ID: 5588
  Gene Symbol: EIF1AD
  Gene Name: eukaryotic translation initiation factor 1A domain containing
  ENSP ID: ENSP00000433320
MSQATKRKHVVKEVLGEHIVPSDQQQIVRVLRTPGNNLHEVETAQGQRFLVSMPSKYRKNIWIKRGDFLIVDPIEEGEKVKAEISFVLCKDHVRSLQKEGFWPEAFSEVAEKH

SEQ ID NO: 28600 - protein, 165 aa, Homo sapiens; identical to SEQ ID NO: 28597
  Payload ID: 5588
  Gene Symbol: EIF1AD
  Gene Name: eukaryotic translation initiation factor 1A domain containing
  Uniprot ID: Q8N9N8
  ENSP ID: ENSP00000434056

SEQ ID NO: 28601 - protein, 113 aa, Homo sapiens
  Payload ID: 5588
  Gene Symbol: EIF1AD
  Gene Name: eukaryotic translation initiation factor 1A domain containing
  ENSP ID: ENSP00000434796
MPSKYRKNIWIKRGDFLIVDPIEEGEKVKAEISFVLCKDHVRSLQKEGFWPEAFSEVAEKHNNRNRQTQPELPAEPQLSGEESSSEDDSDLFVNTNRRQYHESEEESEEEEAA

SEQ ID NO: 28602 - protein, 165 aa, Homo sapiens; identical to SEQ ID NO: 28597
  Payload ID: 5588
  Gene Symbol: EIF1AD
  Gene Name: eukaryotic translation initiation factor 1A domain containing
  Uniprot ID: Q8N9N8
  ENSP ID: ENSP00000435439

SEQ ID NO: 28603 - protein, 114 aa, Homo sapiens
  Payload ID: 5588
  Gene Symbol: EIF1AD
  Gene Name: eukaryotic translation initiation factor 1A domain containing
  ENSP ID: ENSP00000435891
MSQATKRKHVVKEVLGEHIVPSDQQQIVRVLRTPGNNLHEVETAQGQRFLVSMPSKYRKNIWIKRGDFLIVDPIEEGEKVKAEISFVLCKDHVRSLQKEGFWPEAFSEVAEKHN

SEQ ID NO: 28604 - protein, 165 aa, Homo sapiens; identical to SEQ ID NO: 28597
  Payload ID: 5588
  Gene Symbol: EIF1AD
  Gene Name: eukaryotic translation initiation factor 1A domain containing
  Uniprot ID: Q8N9N8
  ENSP ID: ENSP00000435942

SEQ ID NO: 28605 - protein, 165 aa, Homo sapiens; identical to SEQ ID NO: 28597
  Payload ID: 5588
  Gene Symbol: EIF1AD
  Gene Name: eukaryotic translation initiation factor 1A domain containing
  Uniprot ID: Q8N9N8
  ENSP ID: ENSP00000436644

SEQ ID NO: 28606 - protein, 64 aa, Homo sapiens
  Payload ID: 5588
  Gene Symbol: EIF1AD
  Gene Name: eukaryotic translation initiation factor 1A domain containing
  ENSP ID: ENSP00000436876
MSQATKRKHVVKEVLGEHIVPSDQQQIVRVLRTPGNNLHEVETAQGQRFLGTFSLLTPLKREKR

SEQ ID NO: 28607 - protein, 116 aa, Homo sapiens
  Payload ID: 5589
  Gene Symbol: EIF1AX
  Gene Name: eukaryotic translation initiation factor 1A, X-linked
  ENSP ID: ENSP00000368912
MPKNKEYAQVIKMLGNGRLEAMCFDGVKRLCHIRGKLRKKVWINTSDIILVGLRDYQDNKADVILKYNADEARSLKAYGELPEHAKINETDTFGPGDDDEIQFDDIGDDDEDIDDI

SEQ ID NO: 28608 - protein, 144 aa, Homo sapiens
  Payload ID: 5589
  Gene Symbol: EIF1AX
  Gene Name: eukaryotic translation initiation factor 1A, X-linked
  Uniprot ID: P47813
  ENSP ID: ENSP00000368927
MPKNKGKGGKNRRRGKNENESEKRELVFKEDGQEYAQVIKMLGNGRLEAMCFDGVKRLCHIRGKLRKKVWINTSDIILVGLRDYQDNKADVILKYNADEARSLKAYGELPEHAKINETDTFGPGDDDEIQFDDIGDDDEDIDDI

SEQ ID NO: 28609 - protein, 144 aa, Homo sapiens
  Payload ID: 5590
  Gene Symbol: EIF1AY
  Gene Name: eukaryotic translation initiation factor 1A, Y-linked
  Uniprot ID: O14602
  ENSP ID: ENSP00000354722
MPKNKGKGGKNRRRGKNENESEKRELVFKEDGQEYAQVIKMLGNGRLEALCFDGVKRLCHIRGKLRKKVWINTSDIILVGLRDYQDNKADVILKYNADEARSLKAYGELPEHAKINETDTFGPGDDDEIQFDDIGDDDEDIDDI

SEQ ID NO: 28610 - protein, 127 aa, Homo sapiens
  Payload ID: 5590
  Gene Symbol: EIF1AY
  Gene Name: eukaryotic translation initiation factor 1A, Y-linked
  ENSP ID: ENSP00000372222
MPKNKGKGGKNRRRGKNENESEKRELVFKEDGQEYAQVIKMLGNGRLEALCFDGVKRLCHIRGKLRKKDNKADVILKYNADEARSLKAYGELPEHAKINETDTFGPGDDDEIQFDDIGDDDEDIDDI

SEQ ID NO: 28611 - protein, 113 aa, Homo sapiens
  Payload ID: 5591
  Gene Symbol: EIF1B
  Gene Name: eukaryotic translation initiation factor 1B
  Uniprot ID: O60739
  ENSP ID: ENSP00000232905
MSTIQNLQSFDPFADATKGDDLLPAGTEDYIHIRIQQRNGRKTLTTVQGIADDYDKKKLVKAFKKKFACNGTVIEHPEYGEVIQLQGDQRKNICQFLLEVGIVKEEQLKVHGF

SEQ ID NO: 28612 - protein, 1649 aa, Homo sapiens
  Payload ID: 5592
  Gene Symbol: EIF2AK4
  Gene Name: eukaryotic translation initiation factor 2 alpha kinase 4
  Uniprot ID: Q9P2K8
  ENSP ID: ENSP00000263791
MAGGRGAPGRGRDEPPESYPQRQDHELQALEAIYGADFQDLRPDACGPVKEPPEINLVLYPQGLTGEEVYVKVDLRVKCPPTYPDVVPEIELKNAKGLSNESVNLLKSRLEELAKKHCGEVMIFELAYHVQSFLSEHNKPPPKSFHEEMLERRAQEEQQRLLEAKRKEEQEQREILHEIQRRKEEIKEEKKRKEMAKQERLEIASLSNQDHTSKKDPGGHRTAAILHGGSPDFVGNGKHRANSSGRSRRERQYSVCNSEDSPGSCEILYFNMGSPDQLMVHKGKCIGSDEQLGKLVYNALETATGGFVLLYEWVLQWQKKMGPFLTSQEKEKIDKCKKQIQGTETEFNSLVKLSHPNVVRYLAMNLKEQDDSIVVDILVEHISGVSLAAHLSHSGPIPVHQLRRYTAQLLSGLDYLHSNSVVHKVLSASNVLVDAEGTVKITDYSISKRLADICKEDVFEQTRVRFSDNALPYKTGKKGDVWRLGLLLLSLSQGQECGEYPVTIPSDLPADFQDFLKKCVCLDDKERWSPQQLLKHSFINPQPKMPLVEQSPEDSEGQDYVETVIPSNRLPSAAFFSETQRQFSRYFIEFEELQLLGKGAFGAVIKVQNKLDGCCYAVKRIPINPASRQFRRIKGEVTLLSRLHHENIVRYYNAWIERHERPAGPGTPPPDSGPLAKDDRAARGQPASDTDGLDSVEAAAPPPILSSSVEWSTSGERSASARFPATGPGSSDDEDDDEDEHGGVFSQSFLPASDSESDIIFDNEDENSKSQNQDEDCNEKNGCHESEPSVTTEAVHYLYIQMEYCEKSTLRDTIDQGLYRDTVRLWRLFREILDGLAYIHEKGMIHRDLKPVNIFLDSDDHVKIGDFGLATDHLAFSADSKQDDQTGDLIKSDPSGHLTGMVGTALYVSPEVQGSTKSAYNQKVDLFSLGIIFFEMSYHPMVTASERIFVLNQLRDPTSPKFPEDFDDGEHAKQKSVISWLLNHDPAKRPTATELLKSELLPPPQMEESELHEVLHHTLTNVDGKAYRTMMAQIFSQRISPAIDYTYDSDILKGNFSIRTAKMQQHVCETIIRIFKRHGAVQLCTPLLLPRNRQIYEHNEAALFMDHSGMLVMLPFDLRIPFARYVARNNILNLKRYCIERVFRPRKLDRFHPKELLECAFDIVTSTTNSFLPTAEIIYTIYEIIQEFPALQERNYSIYLNHTMLLKAILLHCGIPEDKLSQVYIILYDAVTEKLTRREVEAKFCNLSLSSNSLCRLYKFIEQKGDLQDLMPTINSLIKQKTGIAQLVKYGLKDLEEVVGLLKKLGIKLQVLINLGLVYKVQQHNGIIFQFVAFIKRRQRAVPEILAAGGRYDLLIPQFRGPQALGPVPTAIGVSIAIDKISAAVLNMEESVTISSCDLLVVSVGQMSMSRAINLTQKLWTAGITAEIMYDWSQSQEELQEYCRHHEITYVALVSDKEGSHVKVKSFEKERQTEKRVLETELVDHVLQKLRTKVTDERNGREASDNLAVQNLKGSFSNASGLFEIHGATVVPIVSVLAPEKLSASTRRRYETQVQTRLQTSLANLHQKSSEIEILAVDLPKETILQFLSLEWDADEQAFNTTVKQLLSRLPKQRYLKLVCDEIYNIKVEKKVSVLFLYSYRDDYYRILF

SEQ ID NO: 28613 - protein, 616 aa, Homo sapiens
  Payload ID: 5592
  Gene Symbol: EIF2AK4
  Gene Name: eukaryotic translation initiation factor 2 alpha kinase 4
  Uniprot ID: Q9P2K8
  ENSP ID: ENSP00000453148
MAGGRGAPGRGRDEPPESYPQRQDHELQALEAIYGADFQDLRPDACGPVKEPPEINLVLYPQGLTGEEVYVKVDLRVKCPPTYPDVVPEIELKNAKGLSNESVNLLKSRLEELAKKHCGEVMIFELAYHVQSFLSEHNKPPPKSFHEEMLERRAQEEQQRLLEAKRKEEQEQREILHEIQRRKEEIKEEKKRKEMAKQERLEIASLSNQDHTSKKDPGGHRTAAILHGGSPDFVGNGKHRANSSGRSRRERQYSVCNSEDSPGSCEILYFNMGSPDQLMVHKGKCIGSDEQLGKLVYNALETATGGFVLLYEWVLQWQKKMGPFLTSQEKEKIDKCKKQIQGTETEFNSLVKLSHPNVVRYLAMNLKEQDDSIVVDILVEHISGVSLAAHLSHSGPIPVHQLRRYTAQLLSGLDYLHSNSVVHKVLSASNVLVDAEGTVKITDYSISKRLADICKEDVFEQTRVRFSDNALPYKTGKKGDVWRLGLLLLSLSQGQECGEYPVTIPSDLPADFQDFLKKCVCLDDKERWSPQQLLKHSFINPQPKMPLVEQSPEDSEGQDYVETVIPSNRLPSAAFFSETQRQFSRYFIEFEELQLLGKGAFGAVIKVWYRVIPSPL

SEQ ID NO: 28614 - protein, 1427 aa, Homo sapiens
  Payload ID: 5592
  Gene Symbol: EIF2AK4
  Gene Name: eukaryotic translation initiation factor 2 alpha kinase 4
  ENSP ID: ENSP00000453575
  MOD_RES (1)..(1): Any amino acid
XAKQERLEIASLSNQDHTSKKDPGGHRTAAILHGGSPDFVGNGKHRANSSGRSRRERQYSVCNSEDSPGSCEILYFNMGSPDQLMVHKGKCIGSDEQLGKLVYNALETATGGFVLLYEWVLQWQKKMGPFLTSQEKEKIDKCKKQIQGTETEFNSLVKLSHPNVVRYLAMNLKEQDDSIVVDILVEHISGVSLAAHLSHSGPIPVHQLRRYTAQLLSGLDYLHSNSVVHKVLSASNVLVDAEGTVKITDYSISKRLADICKEDVFEQTRVRFSDNALPYKTGKKGDVWRLGLLLLSLSQGQECGEYPVTIPSDLPADFQDFLKKCVCLDDKERWSPQQLLKHSFINPQPKMPLVEQSPEDSEGQDYVETVIPSNRLPSAAFFSETQRQFSRYFIEFEELQLLGKGAFGAVIKVQNKLDGCCYAVKRIPINPASRQFRRIKGEVTLLSRLHHENIVRYYNAWIERHERPAGPGTPPPDSGPLAKDDRAARGQPASDTDGLDSVEAAAPPPILSSSVEWSTSGERSASARFPATGPGSSDDEDDDEDEHGGVFSQSFLPASDSESDIIFDNEDENSKSQNQMEYCEKSTLRDTIDQGLYRDTVRLWRLFREILDGLAYIHEKGMIHRDLKPVNIFLDSDDHVKIGDFGLATDHLAFSADSKQDDQTGDLIKSDPSGHLTGMVGTALYVSPEVQGSTKSAYNQKVDLFSLGIIFFEMSYHPMVTASERIFVLNQLRDPTSPKFPEDFDDGEHAKQKSVISWLLNHDPAKRPTATELLKSELLPPPQMEESELHEVLHHTLTNVDGKAYRTMMAQIFSQRISPAIDYTYDSDILKGNFSIRTAKMQQHVCETIIRIFKRHGAVQLCTPLLLPRNRQIYEHNEAALFMDHSGMLVMLPFDLRIPFARYVARNNILNLKRYCIERVFRPRKLDRFHPKELLECAFDIVTSTTNSFLPTAEIIYTIYEIIQEFPALQERNYSIYLNHTMLLKAILLHCGIPEDKLSQVYIILYDAVTEKLTRREVEAKFCNLSLSSNSLCRLYKFIEQKGDLQDLMPTINSLIKQKTGIAQLVKYGLKDLEEVVGLLKKLGIKLQVLINLGLVYKVQQHNGIIFQFVAFIKRRQRAVPEILAAGGRYDLLIPQFRGPQALGPVPTAIGVSIAIDKISAAVLNMEESVTISSCDLLVVSVGQMSMSRAINLTQKLWTAGITAEIMYDWSQSQEELQEYCRHHEITYVALVSDKEGSHVKVKSFEKERQTEKRVLETELVDHVLQKLRTKVTDERNGREASDNLAVQNLKGSFSNASGLFEIHGATVVPIVSVLAPEKLSASTRRRYETQVQTRLQTSLANLHQKSSEIEILAVDLPKETILQFLSLEWDADEQAFNTTVKQLLSRLPKQRYLKLVCDEIYNIKVEKKVSVLFLYSYRDDYYRILF

SEQ ID NO: 28615 - protein, 136 aa, Homo sapiens
  Payload ID: 5592
  Gene Symbol: EIF2AK4
  Gene Name: eukaryotic translation initiation factor 2 alpha kinase 4
  ENSP ID: ENSP00000453968
MAGGRGAPGRGRDEPPESYPQRQDHELQALEAIYGADFQDLRPDACGPVKEPPEINLVLYPQGLTGEEVYVKVDLRVKCPPTYPDVVPEIELKNAKGLSNESVNLLKSRLEELAKKHCGEQQGWRGLTPTLKEVQV

SEQ ID NO: 28616 - protein, 80 aa, Homo sapiens
  Payload ID: 5592
  Gene Symbol: EIF2AK4
  Gene Name: eukaryotic translation initiation factor 2 alpha kinase 4
  ENSP ID: ENSP00000454210
  MOD_RES (1)..(1): Any amino acid
XIVSVLAPEKLSASTRRRYETQWDADEQAFNTTVKQLLSRLPKQRYLKLVCDEIYNIKVEKKVSVLFLYSYRDDYYRILF

SEQ ID NO: 28617 - protein, 315 aa, Homo sapiens
  Payload ID: 5593
  Gene Symbol: EIF2S1
  Gene Name: eukaryotic translation initiation factor 2, subunit 1 alpha, 35kDa
  Uniprot ID: P05198
  ENSP ID: ENSP00000256383
MPGLSCRFYQHKFPEVEDVVMVNVRSIAEMGAYVSLLEYNNIEGMILLSELSRRRIRSINKLIRIGRNECVVVIRVDKEKGYIDLSKRRVSPEEAIKCEDKFTKSKTVYSILRHVAEVLEYTKDEQLESLFQRTAWVFDDKYKRPGYGAYDAFKHAVSDPSILDSLDLNEDEREVLINNINRRLTPQAVKIRADIEVACYGYEGIDAVKEALRAGLNCSTENMPIKINLIAPPRYVMTTTTLERTEGLSVLSQAMAVIKEKIEEKRGVFNVQMEPKVVTDTDETELARQMERLERENAEVDGDDDAEEMEAKAED

SEQ ID NO: 28618 - protein, 315 aa, Homo sapiens; identical to SEQ ID NO: 28617
  Payload ID: 5593
  Gene Symbol: EIF2S1
  Gene Name: eukaryotic translation initiation factor 2, subunit 1 alpha, 35kDa
  Uniprot ID: P05198
  ENSP ID: ENSP00000425299

SEQ ID NO: 28619 - protein, 273 aa, Homo sapiens
  Payload ID: 5593
  Gene Symbol: EIF2S1
  Gene Name: eukaryotic translation initiation factor 2, subunit 1 alpha, 35kDa
  ENSP ID: ENSP00000451975
MPGLSCRFYQHKFPEVEDVVMVNVRSIAEMGAYVSLLEYNNIEGMILLSELSRRRIRSINKLIRIGRNECVVVIRVDKEKGYIDLSKRRVSPEEAIKCEDKFTKSKTVYSILRHVAEVLEYTKDEQLESLFQRTAWVFDDKYKRPGYGAYDAFKHAVSDPSILDSLDLNEDEREVLINNINRRLTPQAVKIRADIEVACYGYEGIDAVKEALRAGLNCSTENMPIKINLIAPPRYVMTTTTLERTEGLSVLSQAMAVIKEKIEEKRGVFNVQM

SEQ ID NO: 28620 - protein, 252 aa, Homo sapiens
  Payload ID: 5593
  Gene Symbol: EIF2S1
  Gene Name: eukaryotic translation initiation factor 2, subunit 1 alpha, 35kDa
  ENSP ID: ENSP00000452034
  MOD_RES (1)..(1): Any amino acid
XMILLSELSRRRIRSINKLIRIGRNECVVVIRVDKEKGYIDLSKRRVSPEEAIKCEDKFTKSKTVYSILRHVAEVLEYTKDEQLESLFQRTAWVFDDKYKRPGYGAYDAFKHAVSDPSILDSLDLNEDEREVLINNINRRLTPQAVKIRADIEVACYGYEGIDAVKEALRAGLNCSTENMPIKINLIAPPRYVMTTTTLERTEGLSVLSQAMAVIKEKIEEKRGVFNVQMEVRSIDSFLIMTQEVPKRSSCR

SEQ ID NO: 28621 - protein, 333 aa, Homo sapiens
  Payload ID: 5594
  Gene Symbol: EIF2S2
  Gene Name: eukaryotic translation initiation factor 2, subunit 2 beta, 38kDa
  Uniprot ID: P20042
  ENSP ID: ENSP00000364119
MSGDEMIFDPTMSKKKKKKKKPFMLDEEGDTQTEETQPSETKEVEPEPTEDKDLEADEEDTRKKDASDDLDDLNFFNQKKKKKKTKKIFDIDEAEEGVKDLKIESDVQEPTEPEDDLDIMLGNKKKKKKNVKFPDEDEILEKDEALEDEDNKKDDGISFSNQTGPAWAGSERDYTYEELLNRVFNIMREKNPDMVAGEKRKFVMKPPQVVRVGTKKTSFVNFTDICKLLHRQPKHLLAFLLAELGTSGSIDGNNQLVIKGRFQQKQIENVLRRYIKEYVTCHTCRSPDTILQKDTRLYFLQCETCHSRCSVASIKTGFQAVTGKRAQLRAKAN

SEQ ID NO: 28622 - protein, 472 aa, Homo sapiens
  Payload ID: 5595
  Gene Symbol: EIF2S3
  Gene Name: eukaryotic translation initiation factor 2, subunit 3 gamma, 52kDa
  Uniprot ID: P41091
  ENSP ID: ENSP00000253039
MAGGEAGVTLGQPHLSRQDLTTLDVTKLTPLSHEVISRQATINIGTIGHVAHGKSTVVKAISGVHTVRFKNELERNITIKLGYANAKIYKLDDPSCPRPECYRSCGSSTPDEFPTDIPGTKGNFKLVRHVSFVDCPGHDILMATMLNGAAVMDAALLLIAGNESCPQPQTSEHLAAIEIMKLKHILILQNKIDLVKESQAKEQYEQILAFVQGTVAEGAPIIPISAQLKYNIEVVCEYIVKKIPVPPRDFTSEPRLIVIRSFDVNKPGCEVDDLKGGVAGGSILKGVLKVGQEIEVRPGIVSKDSEGKLMCKPIFSKIVSLFAEHNDLQYAAPGGLIGVGTKIDPTLCRADRMVGQVLGAVGALPEIFTELEISYFLLRRLLGVRTEGDKKAAKVQKLSKNEVLMVNIGSLSTGGRVSAVKADLGKIVLTNPVCTEVGEKIALSRRVEKHWRLIGWGQIRRGVTIKPTVDDD

SEQ ID NO: 28623 - protein, 183 aa, Homo sapiens
  Payload ID: 5595
  Gene Symbol: EIF2S3
  Gene Name: eukaryotic translation initiation factor 2, subunit 3 gamma, 52kDa
  ENSP ID: ENSP00000391383
  MOD_RES (1)..(1): Any amino acid
XAGGEAGVTLGQPHLSRQDLTTLDVTKLTPLSHEVISRQATINIGTIGHVAHGKSTVVKAISGVHTVRFKNELERNITIKLGYANAKIYKLDDPSCPRPECYRSCGSSTPDEFPTDIPGTKGNFKLVRHVSFVDCPGHDILMATMLNGAAVMDAALLLIGKYLTIGLDKSMWNKSKMKYLKGN

SEQ ID NO: 28624 - protein, 580 aa, Homo sapiens
  Payload ID: 5596
  Gene Symbol: EIF2A
  Gene Name: eukaryotic translation initiation factor 2A, 65kDa
  ENSP ID: ENSP00000273435
MAPSTPLLTVRGSEGLYMVNGPPHFTESTVFPRESGKNCKVCIFSKDGTLFAWGNGENVTNKGLLHSFDLLKAVCLEFSPKNTVLATWQPYTTSKDGTAGIPNLQLYDVKTGTCLKSFIQKKMQNWCPSWSEDETLCARNVNNEVHFFENNNFNTIANKLHLQKINDFVLSPGPQPYKVAVYVPGSKGAPSFVRLYQYPNFAGPHAALANKSFFKADKVTMLWNKKATAVLVIASTDVDKTGASYYGEQTLHYIATNGESAVVQLPKNGPIYDVVWNSSSTEFCAVYGFMPAKATIFNLKCDPVFDFGTGPRNAAYYSPHGHILVLAGFGNLRGQMEVWDVKNYKLISKPVASDSTYFAWCPDGEHILTATCAPRLRVNNGYKIWHYTGSILHKYDVPSNAELWQVSWQPFLDGIFPAKTITYQAVPSEVPNEEPKVATAYRPPALRNKPITNSKLHEEEPPQNMKPQSGNDKPLSKTALKNQRKHEAKKAAKQEARSDKSPDLAPTPAPQSTPRNTVSQSISGDPEIDKKIKNLKKKLKAIEQLKEQAATGKQLEKNQLEKIQKETALLQELEDLELGI

SEQ ID NO: 28625 - protein, 524 aa, Homo sapiens
  Payload ID: 5596
  Gene Symbol: EIF2A
  Gene Name: eukaryotic translation initiation factor 2A, 65kDa
  Uniprot ID: Q9BY44
  ENSP ID: ENSP00000385292
MAPSTPLLTVRGSEGLYMVNGPPHFTESTVFPRESGKNCKVCIFSKDGTLFAWGNGEKVNIISVTNKGLLHSFDLLKAVCLEFSPKNTVLATWQPYTNTIANKLHLQKINDFVLSPGPQPYKVAVYVPGSKGAPSFVRLYQYPNFAGPHAALANKSFFKADKVTMLWNKKATAVLVIASTDVDKTGASYYGEQTLHYIATNGESAVVQLPKNGPIYDVVWNSSSTEFCAVYGFMPAKATIFNLKCDPVFDFGTGPRNAAYYSPHGHILVLAGFGNLRGQMEVWDVKNYKLISKPVASDSTYFAWCPDGEHILTATCAPRLRVNNGYKIWHYTGSILHKYDVPSNAELWQVSWQPFLDGIFPAKTITYQAVPSEVPNEEPKVATAYRPPALRNKPITNSKLHEEEPPQNMKPQSGNDKPLSKTALKNQRKHEAKKAAKQEARSDKSPDLAPTPAPQSTPRNTVSQSISGDPEIDKKIKNLKKKLKAIEQLKEQAATGKQLEKNQLEKIQKETALLQELEDLELGI

SEQ ID NO: 28626 - protein, 585 aa, Homo sapiens
  Payload ID: 5596
  Gene Symbol: EIF2A
  Gene Name: eukaryotic translation initiation factor 2A, 65kDa
  Uniprot ID: Q9BY44
  ENSP ID: ENSP00000417229
MAPSTPLLTVRGSEGLYMVNGPPHFTESTVFPRESGKNCKVCIFSKDGTLFAWGNGEKVNIISVTNKGLLHSFDLLKAVCLEFSPKNTVLATWQPYTTSKDGTAGIPNLQLYDVKTGTCLKSFIQKKMQNWCPSWSEDETLCARNVNNEVHFFENNNFNTIANKLHLQKINDFVLSPGPQPYKVAVYVPGSKGAPSFVRLYQYPNFAGPHAALANKSFFKADKVTMLWNKKATAVLVIASTDVDKTGASYYGEQTLHYIATNGESAVVQLPKNGPIYDVVWNSSSTEFCAVYGFMPAKATIFNLKCDPVFDFGTGPRNAAYYSPHGHILVLAGFGNLRGQMEVWDVKNYKLISKPVASDSTYFAWCPDGEHILTATCAPRLRVNNGYKIWHYTGSILHKYDVPSNAELWQVSWQPFLDGIFPAKTITYQAVPSEVPNEEPKVATAYRPPALRNKPITNSKLHEEEPPQNMKPQSGNDKPLSKTALKNQRKHEAKKAAKQEARSDKSPDLAPTPAPQSTPRNTVSQSISGDPEIDKKIKNLKKKLKAIEQLKEQAATGKQLEKNQLEKIQKETALLQELEDLELGI

SEQ ID NO: 28627 - protein, 75 aa, Homo sapiens
  Payload ID: 5596
  Gene Symbol: EIF2A
  Gene Name: eukaryotic translation initiation factor 2A, 65kDa
  ENSP ID: ENSP00000417575
MAPSTPLLTVRGSEGLYMVNGPPHFTESTVFPRDRVSPCCPAGLELPTSGDPPASASQTAGITGGIWEELQSLYL

SEQ ID NO: 28628 - protein, 236 aa, Homo sapiens
  Payload ID: 5596
  Gene Symbol: EIF2A
  Gene Name: eukaryotic translation initiation factor 2A, 65kDa
  ENSP ID: ENSP00000418698
MAPSTPLLTVRGSEGLYMVNGPPHFTESTVFPRESGKNCKVCIFSKDGTLFAWGNGEKVNIISVTNKGLLHSFDLLKAVCLEFSPKNTVLATWQPYTTSKDGTAGIPNLQLYDVKTGTCLKSFIQKKMQNWCPSWSEDETLCARNVNNEVHFFENNNFIGSRVSASGSFLDTIANKLHLQKINDFVLSPGPQPYKVAVYVPGSKGAPSFVRLYQYPNFAGPHAALANKSFFKADKV

SEQ ID NO: 28629 - protein, 59 aa, Homo sapiens
  Payload ID: 5596
  Gene Symbol: EIF2A
  Gene Name: eukaryotic translation initiation factor 2A, 65kDa
  ENSP ID: ENSP00000419456
MAPSTPLLTVRGSEGLYMVNGPPHFTESTVFPRESGKNCKVCIFSKDGTLFAWGNGENF

SEQ ID NO: 28630 - protein, 158 aa, Homo sapiens
  Payload ID: 5596
  Gene Symbol: EIF2A
  Gene Name: eukaryotic translation initiation factor 2A, 65kDa
  ENSP ID: ENSP00000420493
  MOD_RES (1)..(1): Any amino acid
XVRGSEGLYMVNGPPHFTESTVFPRESGKNCKVCIFSKDGTLFAWGNGEKVNIISVTNKGLLHSFDLLKAVCLEFSPKNTVLATWQPYTTSKDGTAGIPNLQLYDVKTGTCLKSFIQKKMQNWCPSWSEDETLCARNVNNEVHFFENNNFSGCLCSRK

SEQ ID NO: 28631 - protein, 40 aa, Homo sapiens
  Payload ID: 5596
  Gene Symbol: EIF2A
  Gene Name: eukaryotic translation initiation factor 2A, 65kDa
  ENSP ID: ENSP00000420495
HAALDSPRIRRTVHGEWTTTFYRKHSVSKGIWEELQSLYL

SEQ ID NO: 28632 - protein, 560 aa, Homo sapiens
  Payload ID: 5596
  Gene Symbol: EIF2A
  Gene Name: eukaryotic translation initiation factor 2A, 65kDa
  Uniprot ID: Q9BY44
  ENSP ID: ENSP00000420537
MAPSTPLLTVRGSEGLYMVNGPPHFTESTVFPRVNIISVTNKGLLHSFDLLKAVCLEFSPKNTVLATWQPYTTSKDGTAGIPNLQLYDVKTGTCLKSFIQKKMQNWCPSWSEDETLCARNVNNEVHFFENNNFNTIANKLHLQKINDFVLSPGPQPYKVAVYVPGSKGAPSFVRLYQYPNFAGPHAALANKSFFKADKVTMLWNKKATAVLVIASTDVDKTGASYYGEQTLHYIATNGESAVVQLPKNGPIYDVVWNSSSTEFCAVYGFMPAKATIFNLKCDPVFDFGTGPRNAAYYSPHGHILVLAGFGNLRGQMEVWDVKNYKLISKPVASDSTYFAWCPDGEHILTATCAPRLRVNNGYKIWHYTGSILHKYDVPSNAELWQVSWQPFLDGIFPAKTITYQAVPSEVPNEEPKVATAYRPPALRNKPITNSKLHEEEPPQNMKPQSGNDKPLSKTALKNQRKHEAKKAAKQEARSDKSPDLAPTPAPQSTPRNTVSQSISGDPEIDKKIKNLKKKLKAIEQLKEQAATGKQLEKNQLEKIQKETALLQELEDLELGI

SEQ ID NO: 28633 - protein, 316 aa, Homo sapiens
  Payload ID: 5596
  Gene Symbol: EIF2A
  Gene Name: eukaryotic translation initiation factor 2A, 65kDa
  ENSP ID: ENSP00000420611
  MOD_RES (1)..(1): Any amino acid
XWNKKATAVLVIASTDVDKTGASYYGEQTLHYIATNGESAVVQLPKNGPIYDVVWNSSSTEFCAVYGFMPAKATIFNLKCDPVFDFGTGPRNAAYYSPHGHILVLAGFGNLRGQMEVWDVKNYKLISKPVASDSTYFAWCPDGEHILTATCAPRLRVNNGYKIWHYTGSILHKYDVPSNAELWQVSWQPFLDGIFPAKTITYQAVPSEVPNEEPKVATAYRPPALRNKPITNSKLHEEEPPQNMKPQSGNDKPLSKTALKNQRKHEAKKAAKQKLKAIEQLKEQAATGKQLEKNQLEKIQKETALLQELEDLELGI

SEQ ID NO: 28634 - protein, 630 aa, Homo sapiens
  Payload ID: 5597
  Gene Symbol: EIF2AK1
  Gene Name: eukaryotic translation initiation factor 2-alpha kinase 1
  Uniprot ID: Q9BQI3
  ENSP ID: ENSP00000199389
MQGGNSGVRKREEEGDGAGAVAAPPAIDFPAEGPDPEYDESDVPAEIQVLKEPLQQPTFPFAVANQLLLVSLLEHLSHVHEPNPLRSRQVFKLLCQTFIKMGLLSSFTCSDEFSSLRLHHNRAITHLMRSAKERVRQDPCEDISRIQKIRSREVALEAQTSRYLNEFEELAILGKGGYGRVYKVRNKLDGQYYAIKKILIKGATKTVCMKVLREVKVLAGLQHPNIVGYHTAWIEHVHVIQPRADRAAIELPSLEVLSDQEEDREQCGVKNDESSSSSIIFAEPTPEKEKRFGESDTENQNNKSVKYTTNLVIRESGELESTLELQENGLAGLSASSIVEQQLPLRRNSHLEESFTSTEESSEENVNFLGQTEAQYHLMLHIQMQLCELSLWDWIVERNKRGREYVDESACPYVMANVATKIFQELVEGVFYIHNMGIVHRDLKPRNIFLHGPDQQVKIGDFGLACTDILQKNTDWTNRNGKRTPTHTSRVGTCLYASPEQLEGSEYDAKSDMYSLGVVLLELFQPFGTEMERAEVLTGLRTGQLPESLRKRCPVQAKYIQHLTRRNSSQRPSAIQLLQSELFQNSGNVNLTLQMKIIEQEKEIAELKKQLNLLSQDKGVRDDGKDGGVG

SEQ ID NO: 28635 - protein, 81 aa, Homo sapiens
  Payload ID: 5597
  Gene Symbol: EIF2AK1
  Gene Name: eukaryotic translation initiation factor 2-alpha kinase 1
  ENSP ID: ENSP00000392459
MQGGNSGVRKREEEGDGAGAVAAPPAIDFPAEGPDPEYDEMWSCCVSQAGLERLASSDSPASAFQNAGIIDNLMFQQKSRC

SEQ ID NO: 28636 - protein, 72 aa, Homo sapiens
  Payload ID: 5597
  Gene Symbol: EIF2AK1
  Gene Name: eukaryotic translation initiation factor 2-alpha kinase 1
  ENSP ID: ENSP00000392734
  MOD_RES (1)..(1): Any amino acid
XLAGLTPLGVAAVASAGTGGICWCSQRGAEGWGPTPQRRPVNLTLQMKIIEQEKEIAELKKQLNLLSQDKGA

SEQ ID NO: 28637 - protein, 164 aa, Homo sapiens
  Payload ID: 5597
  Gene Symbol: EIF2AK1
  Gene Name: eukaryotic translation initiation factor 2-alpha kinase 1
  ENSP ID: ENSP00000397590
MQGGNSGVRKREEEGDGAGAVAAPPAIDFPAEGPDPEYDESDVPAEIQVLKEPLQQPTFPFAVANQLLLVSLLEHLSHVHEPNPLRSRQVFKLLCQTFIKMGLLSSFTCSDEFSSLRLHHNRAITHLMRSAKERVRQDPCEDISRIQKIRDEKFHFSPSFPNQH

SEQ ID NO: 28638 - protein, 551 aa, Homo sapiens
  Payload ID: 5598
  Gene Symbol: EIF2AK2
  Gene Name: eukaryotic translation initiation factor 2-alpha kinase 2
  Uniprot ID: P19525
  ENSP ID: ENSP00000233057
MAGDLSAGFFMEELNTYRQKQGVVLKYQELPNSGPPHDRRFTFQVIIDGREFPEGEGRSKKEAKNAAAKLAVEILNKEKKAVSPLLLTTTNSSEGLSMGNYIGLINRIAQKKRLTVNYEQCASGVHGPEGFHYKCKMGQKEYSIGTGSTKQEAKQLAAKLAYLQILSEETSVKSDYLSSGSFATTCESQSNSLVTSTLASESSSEGDFSADTSEINSNSDSLNSSSLLMNGLRNNQRKAKRSLAPRFDLPDMKETKYTVDKRFGMDFKEIELIGSGGFGQVFKAKHRIDGKTYVIKRVKYNNEKAEREVKALAKLDHVNIVHYNGCWDGFDYDPETSDDSLESSDYDPENSKNSSRSKTKCLFIQMEFCDKGTLEQWIEKRRGEKLDKVLALELFEQITKGVDYIHSKKLIHRDLKPSNIFLVDTKQVKIGDFGLVTSLKNDGKRTRSKGTLRYMSPEQISSQDYGKEVDLYALGLILAELLHVCDTAFETSKFFTDLRDGIISDIFDKKEKTLLQKLLSKKPEDRPNTSEILRTLTVWKKSPEKNERHTC

SEQ ID NO: 28639 - protein, 102 aa, Homo sapiens
  Payload ID: 5598
  Gene Symbol: EIF2AK2
  Gene Name: eukaryotic translation initiation factor 2-alpha kinase 2
  ENSP ID: ENSP00000374663
MAGDLSAGFFMEELNTYRQKQGVVLKYQELPNSGPPHDRRFTFQVIIDGREFPEGEGRSKKEAKNAAAKLAVEILNKEKKAVSPLLLTTTNSSEGLSMGNYI

SEQ ID NO: 28640 - protein, 551 aa, Homo sapiens; identical to SEQ ID NO: 28638
  Payload ID: 5598
  Gene Symbol: EIF2AK2
  Gene Name: eukaryotic translation initiation factor 2-alpha kinase 2
  Uniprot ID: P19525
  ENSP ID: ENSP00000378559

SEQ ID NO: 28641 - protein, 510 aa, Homo sapiens
  Payload ID: 5598
  Gene Symbol: EIF2AK2
  Gene Name: eukaryotic translation initiation factor 2-alpha kinase 2
  Uniprot ID: P19525
  ENSP ID: ENSP00000385014
MAGDLSAGFFMEELNTYRQKQGVVLKYQELPNSGPPHDRRFTFQVIIDGREFPEGEGRSKKEAKNAAAKLAVEILNKEKKAVSPLLLTTTNSSEGLSMGNYIGLINRIAQKKRLTVNYEQCASGVHGPEGFHYKCKMGQKEYSIGTGSTKQEAKQLAAKLAYLQILSEETSVKSDYLSSGSFATTCESQSNSLVTSTLASESSSEGDFSADTSEINSNSDSLNSSSLLMNGLRNNQRKAKRSLAPRFDLPDMKETKYTVDKRKAEREVKALAKLDHVNIVHYNGCWDGFDYDPETSDDSLESSDYDPENSKNSSRSKTKCLFIQMEFCDKGTLEQWIEKRRGEKLDKVLALELFEQITKGVDYIHSKKLIHRDLKPSNIFLVDTKQVKIGDFGLVTSLKNDGKRTRSKGTLRYMSPEQISSQDYGKEVDLYALGLILAELLHVCDTAFETSKFFTDLRDGIISDIFDKKEKTLLQKLLSKKPEDRPNTSEILRTLTVWKKSPEKNERHTC

SEQ ID NO: 28642 - protein, 141 aa, Homo sapiens
  Payload ID: 5598
  Gene Symbol: EIF2AK2
  Gene Name: eukaryotic translation initiation factor 2-alpha kinase 2
  ENSP ID: ENSP00000393921
MAGDLSAGFFMEELNTYRQKQGVVLKYQELPNSGPPHDRRFTFQVIIDGREFPEGEGRSKKEAKNAAAKLAVEILNKEKKAVSPLLLTTTNSSEGLSMGNYIGLINRIAQKKRLTVNYEQCASGVHGPEGFHYKCKMGQKE

SEQ ID NO: 28643 - protein, 1116 aa, Homo sapiens
  Payload ID: 5599
  Gene Symbol: EIF2AK3
  Gene Name: eukaryotic translation initiation factor 2-alpha kinase 3
  Uniprot ID: Q9NZJ5
  ENSP ID: ENSP00000307235
MERAISPGLLVRALLLLLLLLGLAARTVAAGRARGLPAPTAEAAFGLGAAAAPTSATRVPAAGAVAAAEVTVEDAEALPAAAGEQEPRGPEPDDETELRPRGRSLVIISTLDGRIAALDPENHGKKQWDLDVGSGSLVSSSLSKPEVFGNKMIIPSLDGALFQWDQDRESMETVPFTVESLLESSYKFGDDVVLVGGKSLTTYGLSAYSGKVRYICSALGCRQWDSDEMEQEEDILLLQRTQKTVRAVGPRSGNEKWNFSVGHFELRYIPDMETRAGFIESTFKPNENTEESKIISDVEEQEAAIMDIVIKVSVADWKVMAFSKKGGHLEWEYQFCTPIASAWLLKDGKVIPISLFDDTSYTSNDDVLEDEEDIVEAARGATENSVYLGMYRGQLYLQSSVRISEKFPSSPKALESVTNENAIIPLPTIKWKPLIHSPSRTPVLVGSDEFDKCLSNDKFSHEEYSNGALSILQYPYDNGYYLPYYKRERNKRSTQITVRFLDNPHYNKNIRKKDPVLLLHWWKEIVATILFCIIATTFIVRRLFHPHPHRQRKESETQCQTENKYDSVSGEANDSSWNDIKNSGYISRYLTDFEPIQCLGRGGFGVVFEAKNKVDDCNYAIKRIRLPNRELAREKVMREVKALAKLEHPGIVRYFNAWLEAPPEKWQEKMDEIWLKDESTDWPLSSPSPMDAPSVKIRRMDPFATKEHIEIIAPSPQRSRSFSVGISCDQTSSSESQFSPLEFSGMDHEDISESVDAAYNLQDSCLTDCDVEDGTMDGNDEGHSFELCPSEASPYVRSRERTSSSIVFEDSGCDNASSKEEPKTNRLHIGNHCANKLTAFKPTSSKSSSEATLSISPPRPTTLSLDLTKNTTEKLQPSSPKVYLYIQMQLCRKENLKDWMNGRCTIEERERSVCLHIFLQIAEAVEFLHSKGLMHRDLKPSNIFFTMDDVVKVGDFGLVTAMDQDEEEQTVLTPMPAYARHTGQVGTKLYMSPEQIHGNSYSHKVDIFSLGLILFELLYPFSTQMERVRTLTDVRNLKFPPLFTQKYPCEYVMVQDMLSPSPMERPEAINIIENAVFEDLDFPGKTVLRQRSRSLSSSGTKHSRQSNNSHSPLPSN

SEQ ID NO: 28644 - protein, 965 aa, Homo sapiens
  Payload ID: 5599
  Gene Symbol: EIF2AK3
  Gene Name: eukaryotic translation initiation factor 2-alpha kinase 3
  ENSP ID: ENSP00000408325
MIIPSLDGALFQWDQDRESMETVPFTVESLLESSYKFGDDVVLVGGKSLTTYGLSAYSGKVRYICSALGCRQWDSDEMEQEEDILLLQRTQKTVRAVGPRSGNEKWNFSVGHFELRYIPDMETRAGFIESTFKPNENTEESKIISDVEEQEAAIMDIVIKVSVADWKVMAFSKKGGHLEWEYQFCTPIASAWLLKDGKVIPISLFDDTSYTSNDDVLEDEEDIVEAARGATENSVYLGMYRGQLYLQSSVRISEKFPSSPKALESVTNENAIIPLPTIKWKPLIHSPSRTPVLVGSDEFDKCLSNDKFSHEEYSNGALSILQYPYDNGYYLPYYKRERNKRSTQITVRFLDNPHYNKNIRKKDPVLLLHWWKEIVATILFCIIATTFIVRRLFHPHPHRQRKESETQCQTENKYDSVSGEANDSSWNDIKNSGYISRYLTDFEPIQCLGRGGFGVVFEAKNKVDDCNYAIKRIRLPNRELAREKVMREVKALAKLEHPGIVRYFNAWLEAPPEKWQEKMDEIWLKDESTDWPLSSPSPMDAPSVKIRRMDPFATKEHIEIIAPSPQRSRSFSVGISCDQTSSSESQFSPLEFSGMDHEDISESVDAAYNLQDSCLTDCDVEDGTMDGNDEGHSFELCPSEASPYVRSRERTSSSIVFEDSGCDNASSKEEPKTNRLHIGNHCANKLTAFKPTSSKSSSEATLSISPPRPTTLSLDLTKNTTEKLQPSSPKVYLYIQMQLCRKENLKDWMNGRCTIEERERSVCLHIFLQIAEAVEFLHSKGLMHRDLKPSNIFFTMDDVVKVGDFGLVTAMDQDEEEQTVLTPMPAYARHTGQVGTKLYMSPEQIHGNSYSHKVDIFSLGLILFELLYPFSTQMERVRTLTDVRNLKFPPLFTQKYPCEYVMVQDMLSPSPMERPEAINIIENAVFEDLDFPGKTVLRQRSRSLSSSGTKHSRQSNNSHSPLPSN

SEQ ID NO: 28645 - protein, 956 aa, Homo sapiens
  Payload ID: 5599
  Gene Symbol: EIF2AK3
  Gene Name: eukaryotic translation initiation factor 2-alpha kinase 3
  ENSP ID: ENSP00000412076
MCYSEGGWSTSGSRLQLLITIILLKVFGNKMIIPSLDGALFQWDQDRESMETVPFTVESLLESSYKFGDDVVLVGGKSLTTYGLSAYSGKVRYICSALGCRQWDSDEMEQEEDILLLQRTQKTVRAVGPRSGNEKWNFSVGHFELRYIPDMETRAGFIESTFKPNENTEESKIISDVEEQEAAIMDIVIKVSVADWKVMAFSKKGGHLEWEYQFCTPIASAWLLKDGKVIPISLFDDTSYTSNDDVLEDEEDIVEAARGATENSVYLGMYRGQLYLQSSVRISEKFPSSPKALESVTNENAIIPLPTIKWKPLIHSPSRTPVLVGSDEFDKCLSNDKFSHEEYSNGALSILQYPYDNGYYLPYYKRERNKRSTQITVRFLDNPHYNKNIRKKDPVLLLHWWKEIVATILFCIIATTFIVRRLFHPHPHRQRKESETQCQTENKYDSVSGEANDSSWNDIKNSGYISRYLTDFEPIQCLGRGGFGVVFEAKNKVDDCNYAIKRIRLPNRELAREKVMREVKALAKLEHPGIVRYFNAWLEAPPEKWQEKMDEIWLKDESTDWPLSSPSPMDAPSVKIRRMDPFATKEHIEIIAPSPQRSRSFSVGISCDQTSSSESQFSPLEFSGMDHEDISESVDAAYNLQDSCLTDCDVEDGTMDGNDEGHSFELCPSEASPYVRSRERTSSSIVFEDSGCDNASSKEEPKTNRLHIGNHCANKLTAFKPTSSKSSSEATLSISPPRPTTLSLDLTKNTTEKLQPSSPKVYLYIQMQLCRKENLKDWMNGRCTIEERERSVCLHIFLQIAEAVEFLHSKGLMHRDLKPSNIFFTMDDVVKVGDFGLVTAMDQDEEEQTVLTPMPAYARHTGQVGTKLYMSPEQIHGNSYSHKVDIFSLGLILFELLYPFSTQMERVRTLTDVRNLKFPPLFTQKYPCEYVMVQDMLSPSPMERPEAINIIENAVF

SEQ ID NO: 28646 - protein, 305 aa, Homo sapiens
  Payload ID: 5600
  Gene Symbol: EIF2B1
  Gene Name: eukaryotic translation initiation factor 2B, subunit 1 alpha, 26kDa
  Uniprot ID: Q14232
  ENSP ID: ENSP00000416250
MDDKELIEYFKSQMKEDPDMASAVAAIRTLLEFLKRDKGETIQGLRANLTSAIETLCGVDSSVAVSSGGELFLRFISLASLEYSDYSKCKKIMIERGELFLRRISLSRNKIADLCHTFIKDGATILTHAYSRVVLRVLEAAVAAKKRFSVYVTESQPDLSGKKMAKALCHLNVPVTVVLDAAVGYIMEKADLVIVGAEGVVENGGIINKIGTNQMAVCAKAQNKPFYVVAESFKFVRLFPLNQQDVPDKFKYKADTLKVAQTGQDLKEEHPWVDYTAPSLITLLFTDLGVLTPSAVSDELIKLYL

SEQ ID NO: 28647 - protein, 202 aa, Homo sapiens
  Payload ID: 5600
  Gene Symbol: EIF2B1
  Gene Name: eukaryotic translation initiation factor 2B, subunit 1 alpha, 26kDa
  ENSP ID: ENSP00000438060
MKEDPDMASAVAAIRTLLEFLKRDKGETIQGLRANLTSAIETLCGVDSSVAVSSGGELFLRFISLASLEYSDYSKCKKIMIERGELFLRRISLSRNKIADLCHTFIKDGATILTHAYSRVVLRVLEAAVAAKKRFSVYVTESQPDLSGKKMAKALCHLNVPVTVVLDAAVGLEPTRWLCVPKHRTNLSMWLQKVSSLSGSFH

SEQ ID NO: 28648 - protein, 152 aa, Homo sapiens
  Payload ID: 5600
  Gene Symbol: EIF2B1
  Gene Name: eukaryotic translation initiation factor 2B, subunit 1 alpha, 26kDa
  ENSP ID: ENSP00000443172
  MOD_RES (1)..(1): Any amino acid
XRGRLGSPGAPQQEDAMDDKELIEYFKSQMKEDPDMASAVAAIRTLLEFLKRDKGETIQGLRANLTSAIETLCGVDSSVAVSSGGELFLRFISLASLEYSDYSKCKKIMIERGELFLRRISLSRNKIADLCHTFIKDGALHHGESRSCHSWC

SEQ ID NO: 28649 - protein, 222 aa, Homo sapiens
  Payload ID: 5600
  Gene Symbol: EIF2B1
  Gene Name: eukaryotic translation initiation factor 2B, subunit 1 alpha, 26kDa
  Uniprot ID: Q14232
  ENSP ID: ENSP00000444183
MDDKELIEYFKSQMKEDPDMASAVAAIRTLLEFLKRDKGETIQGLRANLTSAIETLCGVDSSVAVSSGGELFLRFISLASLEYSDYSKCKKIMIERGELFLRRISLSRNKIADLCHTFIKDGATILTHAYSRVVLRVLEAAVAAKKRFSVYVTESQPDLSGQVPFCSVMCPAIILQSKLRITVQQDQNQNVPPACQQSALPFIVPFPAFGRKITEFAAGRSI

SEQ ID NO: 28650 - protein, 351 aa, Homo sapiens
  Payload ID: 5601
  Gene Symbol: EIF2B2
  Gene Name: eukaryotic translation initiation factor 2B, subunit 2 beta, 39kDa
  Uniprot ID: P49770
  ENSP ID: ENSP00000266126
MPGSAAKGSELSERIESFVETLKRGGGPRSSEEMARETLGLLRQIITDHRWSNAGELMELIRREGRRMTAAQPSETTVGNMVRRVLKIIREEYGRLHGRSDESDQQESLHKLLTSGGLNEDFSFHYAQLQSNIIEAINELLVELEGTMENIAAQALEHIHSNEVIMTIGFSRTVEAFLKEAARKRKFHVIVAECAPFCQGHEMAVNLSKAGIETTVMTDAAIFAVMSRVNKVIIGTKTILANGALRAVTGTHTLALAAKHHSTPLIVCAPMFKLSPQFPNEEDSFHKFVAPEEVLPFTEGDILEKVSVHCPVFDYVPPELITLFISNIGGNAPSYIYRLMSELYHPDDHVL

SEQ ID NO: 28651 - protein, 200 aa, Homo sapiens
  Payload ID: 5601
  Gene Symbol: EIF2B2
  Gene Name: eukaryotic translation initiation factor 2B, subunit 2 beta, 39kDa
  ENSP ID: ENSP00000451681
ELSERIESFVETLKRGGGPRSSEEMARETLGLLRQIITDHRWSNAGELMELIRREGRRMTAAQPSETTVGNMVRRVLKIIREEYGRLHGRSDESDQQESLHKLLTSGGLNEDFSFHYAQLQSNIIEAINELLVELEGTMENIAAQALEHIHSNEVIMTIGFSRTVEAFLKEAARKRKFHVIVAECAPFCQNQPFPPIAGS

SEQ ID NO: 28652 - protein, 206 aa, Homo sapiens
  Payload ID: 5601
  Gene Symbol: EIF2B2
  Gene Name: eukaryotic translation initiation factor 2B, subunit 2 beta, 39kDa
  ENSP ID: ENSP00000452311
MPGSAAKGSELSERIESFVETLKRGGGPRSSEEMARETLGLLRQIITDHRWSNAGELMELIRREGRRMTAAQPSETTVGNMVRRVLKIIREEYGRLHGRSDESDQQESLHKLLTSGGLNEDFSFHYAQLQSNIIEAINELLVELEGTMENIAAQALEHIHSNEVIMTIGFSRTVEAFLKEAARKRKFHVIVAECAPFCQQVLRQLS

SEQ ID NO: 28653 - protein, 71 aa, Homo sapiens
  Payload ID: 5601
  Gene Symbol: EIF2B2
  Gene Name: eukaryotic translation initiation factor 2B, subunit 2 beta, 39kDa
  ENSP ID: ENSP00000452582
ETTVMTDAAIFAVMSRVNKVIIGTKTILANGALRAVTGTHTLALAAKHHSTPLIVCAPMFKLSPQGLSFVT

SEQ ID NO: 28654 - protein, 452 aa, Homo sapiens
  Payload ID: 5602
  Gene Symbol: EIF2B3
  Gene Name: eukaryotic translation initiation factor 2B, subunit 3 gamma, 58kDa
  Uniprot ID: Q9NR50
  ENSP ID: ENSP00000353575
MEFQAVVMAVGGGSRMTDLTSSIPKPLLPVGNKPLIWYPLNLLERVGFEEVIVVTTRDVQKALCAEFKMKMKPDIVCIPDDADMGTADSLRYIYPKLKTDVLVLSCDLITDVALHEVVDLFRAYDASLAMLMRKGQDSIEPVPGQKGKKKAVEQRDFIGVDSTGKRLLFMANEADLDEELVIKGSILQKHPRIRFHTGLVDAHLYCLKKYIVDFLMENGSITSIRSELIPYLVRKQFSSASSQQGQEEKEEDLKKKELKSLDIYSFIKEANTLNLAPYDACWNACRGDRWEDLSRSQVRCYVHIMKEGLCSRVSTLGLYMEANRQVPKLLSALCPEEPPVHSSAQIVSKHLVGVDSLIGPETQIGEKSSIKRSVIGSSCLIKDRVTITNCLLMNSVTVEEGSNIQGSVICNNAVIEKGADIKDCLIGSGQRIEAKAKRVNEVIVGNDQLMEI

SEQ ID NO: 28655 - protein, 412 aa, Homo sapiens
  Payload ID: 5602
  Gene Symbol: EIF2B3
  Gene Name: eukaryotic translation initiation factor 2B, subunit 3 gamma, 58kDa
  Uniprot ID: Q9NR50
  ENSP ID: ENSP00000361257
MEFQAVVMAVGGGSRMTDLTSSIPKPLLPVGNKPLIWYPLNLLERVGFEEVIVVTTRDVQKALCAEFKMKMKPDIVCIPDDADMGTADSLRYIYPKLKTDVLVLSCDLITDVALHEVVDLFRAYDASLAMLMRKGQDSIEPVPGQKGKKKAVEQRDFIGVDSTGKRLLFMANEADLDEELVIKGSILQKHPRIRFHTGLVDAHLYCLKKYIVDFLMENGSITSIRSELIPYLVRKQFSSASSQQGQEEKEEDLKKKELKSLDIYSFIKEANTLNLAPYDACWNACRGDRWEDLSRSQVRCYVHIMKEGLCSRVSTLGLYMEANRQVPKLLSALCPEEPPVHSSAQIVSKHLVGVDSLIGPETQIGEKSSIKRSVIGSSCLIKDRVTITNCLLMNSVTVEEGYVSPCTHLRQR

SEQ ID NO: 28656 - protein, 222 aa, Homo sapiens
  Payload ID: 5602
  Gene Symbol: EIF2B3
  Gene Name: eukaryotic translation initiation factor 2B, subunit 3 gamma, 58kDa
  ENSP ID: ENSP00000396985
  MOD_RES (1)..(1): Any amino acid
XVIKGSILQKHPRIRFHTGLVDAHLYCLKKYIVDFLMENGSITSIRSELIPYLVRKQFSSASSQQGQEEKEEDLKKKELKSLDIYSFIKEANTLNLAPYDACWNACRGDRWEDLSRSQVRCYVHIMKEGLCSRVSTLGLYMEANRQVPKLLSALCPEEPPVHSSAQIVSKHLVGVDSLIGPETQIGEKSSIKRSVIGSSCLIKDRVTITNCLLMNSVTVEEG

SEQ ID NO: 28657 - protein, 401 aa, Homo sapiens
  Payload ID: 5602
  Gene Symbol: EIF2B3
  Gene Name: eukaryotic translation initiation factor 2B, subunit 3 gamma, 58kDa
  Uniprot ID: Q9NR50
  ENSP ID: ENSP00000483996
MEFQAVVMAVGGGSRMTDLTSSIPKPLLPVGNKPLIWYPLNLLERVGFEEVIVVTTRDVQKALCAEFKMKMKPDIVCIPDDADMGTADSLRYIYPKLKTDVLVLSCDLITDVALHEVVDLFRAYDASLAMLMRKGQDSIEPVPGQKGKKKAVEQRDFIGVDSTGKRLLFMANEADLDEELVIKGSILQKHPRIRFHTGLVDAHLYCLKKYIVDFLMENGSITSIRSELIPYLVRKQFSSASSQQGQEEKEEDLKKKELKSLDIYSFIKEANTLNLAPYDACWNACRGDRWEDLSRSQVRCYVHIMKEGLCSRVSTLGLYMEANRQVPKLLSALCPEEPPVHSSAQIVSKHLVGVDSLIGPETQIGEKSSIKRSVIGSSCLIKDRVTITNCLLMNSVTVEEG

SEQ ID NO: 28658 - protein, 128 aa, Homo sapiens
  Payload ID: 5602
  Gene Symbol: EIF2B3
  Gene Name: eukaryotic translation initiation factor 2B, subunit 3 gamma, 58kDa
  ENSP ID: ENSP00000485842
MEFQAVVMAVGGGSRMTDLTSSIPKPLLPVGNKPLIWYPLNLLERVGFEEVIVVTTRDVQKALCAEFKMKMKPDIVCIPDDADMGTADSLRYIYPKLKLPKPLSLTYQERLLVHSFSQALDRCAGAEL

SEQ ID NO: 28659 - protein, 523 aa, Homo sapiens
  Payload ID: 5603
  Gene Symbol: EIF2B4
  Gene Name: eukaryotic translation initiation factor 2B, subunit 4 delta, 67kDa
  Uniprot ID: Q9UI10
  ENSP ID: ENSP00000233552
MAAVAVAVREDSGSGMKAELPPGPGAVGREMTKEEKLQLRKEKKQQKKKRKEEKGAEPETGSAVSAAQCQVGPTRELPESGIQLGTPREKVPAGRSKAELRAERRAKQEAERALKQARKGEQGGPPPKASPSTAGETPSGVKRLPEYPQVDDLLLRRLVKKPERQQVPTRKDYGSKVSLFSHLPQYSRQNSLTQFMSIPSSVIHPAMVRLGLQYSQGLVSGSNARCIALLRALQQVIQDYTTPPNEELSRDLVNKLKPYMSFLTQCRPLSASMHNAIKFLNKEITSVGSSKREEEAKSELRAAIDRYVQEKIVLAAQAISRFAYQKISNGDVILVYGCSSLVSRILQEAWTEGRRFRVVVVDSRPWLEGRHTLRSLVHAGVPASYLLIPAASYVLPEVSKVLLGAHALLANGSVMSRVGTAQLALVARAHNVPVLVCCETYKFCERVQTDAFVSNELDDPDDLQCKRGEHVALANWQNHASLRLLNLVYDVTPPELVDLVITELGMIPCSSVPVVLRVKSSDQ

SEQ ID NO: 28660 - protein, 235 aa, Homo sapiens
  Payload ID: 5603
  Gene Symbol: EIF2B4
  Gene Name: eukaryotic translation initiation factor 2B, subunit 4 delta, 67kDa
  ENSP ID: ENSP00000384375
MAAVAVAVREDSGSGMKAELPPGPGAVGREMTKEEKLQLRKEKKQQKKKRKEEKGAEPETGSAVSAAQCQVGPTRELPESGIQLGTPREKVPAGRSKAELRAERRAKQEAERALKQARKGEQGGPPPKASPSTAGETPSGVKRLPEYPQVDDLLLRRLVKKPERQQVPTRKDYGSKVSLFSHLPQYSRQNSLTQFMSHGATRPAVLPGPGQWLQCPVYCPASCLAAGDSGLHNTA

SEQ ID NO: 28661 - protein, 522 aa, Homo sapiens
  Payload ID: 5603
  Gene Symbol: EIF2B4
  Gene Name: eukaryotic translation initiation factor 2B, subunit 4 delta, 67kDa
  Uniprot ID: Q9UI10
  ENSP ID: ENSP00000394397
MAAVAVAVREDSGSGMKAELPPGPGAVGREMTKEEKLQLRKEKKQQKKKRKEEKGAEPETGSAVSAAQCQGPTRELPESGIQLGTPREKVPAGRSKAELRAERRAKQEAERALKQARKGEQGGPPPKASPSTAGETPSGVKRLPEYPQVDDLLLRRLVKKPERQQVPTRKDYGSKVSLFSHLPQYSRQNSLTQFMSIPSSVIHPAMVRLGLQYSQGLVSGSNARCIALLRALQQVIQDYTTPPNEELSRDLVNKLKPYMSFLTQCRPLSASMHNAIKFLNKEITSVGSSKREEEAKSELRAAIDRYVQEKIVLAAQAISRFAYQKISNGDVILVYGCSSLVSRILQEAWTEGRRFRVVVVDSRPWLEGRHTLRSLVHAGVPASYLLIPAASYVLPEVSKVLLGAHALLANGSVMSRVGTAQLALVARAHNVPVLVCCETYKFCERVQTDAFVSNELDDPDDLQCKRGEHVALANWQNHASLRLLNLVYDVTPPELVDLVITELGMIPCSSVPVVLRVKSSDQ

SEQ ID NO: 28662 - protein, 543 aa, Homo sapiens
  Payload ID: 5603
  Gene Symbol: EIF2B4
  Gene Name: eukaryotic translation initiation factor 2B, subunit 4 delta, 67kDa
  Uniprot ID: Q9UI10
  ENSP ID: ENSP00000394869
MPTQQPAAPSTRAPKPSRSLSGSLCALFSDADSGSGMKAELPPGPGAVGREMTKEEKLQLRKEKKQQKKKRKEEKGAEPETGSAVSAAQCQGPTRELPESGIQLGTPREKVPAGRSKAELRAERRAKQEAERALKQARKGEQGGPPPKASPSTAGETPSGVKRLPEYPQVDDLLLRRLVKKPERQQVPTRKDYGSKVSLFSHLPQYSRQNSLTQFMSIPSSVIHPAMVRLGLQYSQGLVSGSNARCIALLRALQQVIQDYTTPPNEELSRDLVNKLKPYMSFLTQCRPLSASMHNAIKFLNKEITSVGSSKREEEAKSELRAAIDRYVQEKIVLAAQAISRFAYQKISNGDVILVYGCSSLVSRILQEAWTEGRRFRVVVVDSRPWLEGRHTLRSLVHAGVPASYLLIPAASYVLPEVSKVLLGAHALLANGSVMSRVGTAQLALVARAHNVPVLVCCETYKFCERVQTDAFVSNELDDPDDLQCKRGEHVALANWQNHASLRLLNLVYDVTPPELVDLVITELGMIPCSSVPVVLRVKSSDQ

SEQ ID NO: 28663 - protein, 194 aa, Homo sapiens
  Payload ID: 5603
  Gene Symbol: EIF2B4
  Gene Name: eukaryotic translation initiation factor 2B, subunit 4 delta, 67kDa
  ENSP ID: ENSP00000406631
  MOD_RES (1)..(1): Any amino acid
XRLPEYPQVDDLLLRRLVKKPERQQVPTRKDYGSKVSLFSHLPQYSRQNSLTQFMSIPSSVIHPAMVRLGLQYSQGLVSGSNARCIALLRALQQVIQDYTTPPNEELSRDLVNKLKPYMSFLTQCRPLSASMHNAIKFLNKEITSVGSSKREEEACHHTHIQAPGMIIRGIKVSISCSLRILLHLGQVRTSSSH

SEQ ID NO: 28664 - protein, 12 aa, Homo sapiens
  Payload ID: 5603
  Gene Symbol: EIF2B4
  Gene Name: eukaryotic translation initiation factor 2B, subunit 4 delta, 67kDa
  ENSP ID: ENSP00000407956
MAAVAVAVREGE

SEQ ID NO: 28665 - protein, 544 aa, Homo sapiens
  Payload ID: 5603
  Gene Symbol: EIF2B4
  Gene Name: eukaryotic translation initiation factor 2B, subunit 4 delta, 67kDa
  ENSP ID: ENSP00000429323
MPTQQPAAPSTRAPKPSRSLSGSLCALFSDADSGSGMKAELPPGPGAVGREMTKEEKLQLRKEKKQQKKKRKEEKGAEPETGSAVSAAQCQVGPTRELPESGIQLGTPREKVPAGRSKAELRAERRAKQEAERALKQARKGEQGGPPPKASPSTAGETPSGVKRLPEYPQVDDLLLRRLVKKPERQQVPTRKDYGSKVSLFSHLPQYSRQNSLTQFMSIPSSVIHPAMVRLGLQYSQGLVSGSNARCIALLRALQQVIQDYTTPPNEELSRDLVNKLKPYMSFLTQCRPLSASMHNAIKFLNKEITSVGSSKREEEAKSELRAAIDRYVQEKIVLAAQAISRFAYQKISNGDVILVYGCSSLVSRILQEAWTEGRRFRVVVVDSRPWLEGRHTLRSLVHAGVPASYLLIPAASYVLPEVSKVLLGAHALLANGSVMSRVGTAQLALVARAHNVPVLVCCETYKFCERVQTDAFVSNELDDPDDLQCKRGEHVALANWQNHASLRLLNLVYDVTPPELVDLVITELGMIPCSSVPVVLRVKSSDQ

SEQ ID NO: 28666 - protein, 520 aa, Homo sapiens
  Payload ID: 5603
  Gene Symbol: EIF2B4
  Gene Name: eukaryotic translation initiation factor 2B, subunit 4 delta, 67kDa
  ENSP ID: ENSP00000477710
MAAVAVAVREDSGSGMKAESPWAWVGREMTKEEKLQLRKEKKQQKKKRKEEKGAEPETGSAVSAAQCQGPTRELPESGIQLGTPREKVPAGRSKAELRAERRAKQEAERALKQARKGEQGGPPPKASPSTAGETPSGVKRLPEYPQVDDLLLRRLVKKPERQQVPTRKDYGSKVSLFSHLPQYSRQNSLTQFMSIPSSVIHPAMVRLGLQYSQGLVSGSNARCIALLRALQQVIQDYTTPPNEELSRDLVNKLKPYMSFLTQCRPLSASMHNAIKFLNKEITSVGSSKREEEAKSELRAAIDRYVQEKIVLAAQAISRFAYQKISNGDVILVYGCSSLVSRILQEAWTEGRRFRVVVVDSRPWLEGRHTLRSLVHAGVPASYLLIPAASYVLPEVSKVLLGAHALLANGSVMSRVGTAQLALVARAHNVPVLVCCETYKFCERVQTDAFVSNELDDPDDLQCKRGEHVALANWQNHASLRLLNLVYDVTPPELVDLVITELGMIPCSSVPVVLRVKSSDQ

SEQ ID NO: 28667 - protein, 228 aa, Homo sapiens [sequence omitted]

SEQ ID NO: 28668 - protein, 721 aa, Homo sapiens
  Payload ID: 5604
  Gene Symbol: EIF2B5
  Gene Name: eukaryotic translation initiation factor 2B, subunit 5 epsilon, 82kDa
  Uniprot ID: Q13144
  ENSP ID: ENSP00000273783
MAAPVVAPPGVVVSRANKRSGAGPGGSGGGGARGAEEEPPPPLQAVLVADSFDRRFFPISKDQPRVLLPLANVALIDYTLEFLTATGVQETFVFCCWKAAQIKEHLLKSKWCRPTSLNVVRIITSELYRSLGDVLRDVDAKALVRSDFLLVYGDVISNINITRALEEHRLRRKLEKNVSVMTMIFKESSPSHPTRCHEDNVVVAVDSTTNRVLHFQKTQGLRRFAFPLSLFQGSSDGVEVRYDLLDCHISICSPQVAQLFTDNFDYQTRDDFVRGLLVNEEILGNQIHMHVTAKEYGARVSNLHMYSAVCADVIRRWVYPLTPEANFTDSTTQSCTHSRHNIYRGPEVSLGHGSILEENVLLGSGTVIGSNCFITNSVIGPGCHIGDNVVLDQTYLWQGVRVAAGAQIHQSLLCDNAEVKERVTLKPRSVLTSQVVVGPNITLPEGSVISLHPPDAEEDEDDGEFSDDSGADQEKDKVKMKGYNPAEVGAAGKGYLWKAAGMNMEEEEELQQNLWGLKINMEEESESESEQSMDSEEPDSRGGSPQMDDIKVFQNEVLGTLQRGKEENISCDNLVLEINSLKYAYNISLKEVMQVLSHVVLEFPLQQMDSPLDSSRYCALLLPLLKAWSPVFRNYIKRAADHLEALAAIEDFFLEHEALGISMAKVLMAFYQLEILAEETILSWFSQRDTTDKGQQLRKNQQLQRFIQWLKEAEEESSEDD

SEQ ID NO: 28669 - protein, 92 aa, Homo sapiens
  Payload ID: 5604
  Gene Symbol: EIF2B5
  Gene Name: eukaryotic translation initiation factor 2B, subunit 5 epsilon, 82kDa
  ENSP ID: ENSP00000408198
  MOD_RES (1)..(1): Any amino acid
XVAPPGVVVSRANKRSGAGPGGSGGGGARGAEEEPPPPLQAVLVADSFDRRFFPISKDQPRVLLPLANVALIDYTLEFLTATGGRGPKYHAA

SEQ ID NO: 28670 - protein, 705 aa, Homo sapiens
  Payload ID: 5604
  Gene Symbol: EIF2B5
  Gene Name: eukaryotic translation initiation factor 2B, subunit 5 epsilon, 82kDa
  ENSP ID: ENSP00000409142
MAAPVVAPPGVVVSRANKRSGAGPGGSGGGGARGAEEEPPPPLQAVLVADSFDRRFFPISKDQPRVLLPLANVALIDYTLEFLTATGVQETFVFCCWKAAQIKEHLLKSKWCRPTSLNVVRIITSELYRSLGDVLRDVDAKALVRSDFLLVYGDVISNINITRALEEHRLRRKLEKNVSVMTMIFKESSPSHPTRCHEDNVVVAVDSTTNRVLHFQKTQGLRRFAFPLSLFQGSSDGVEVRYDLLDCHISICSPQVAQLFTDNFDYQTRDDFVRGLLVNEEILGNQIHMHVTAKEYGARVSNLHMYSAVCADVIRRWVYPLTPEANFTDSTTQSCTHSRHNIYRGPEVSLGHGSILEENVLLGSGTVIGSNCFITNSVIGPGCHIGDNVVLDQTYLWQGVRVAAGAQIHQSLLCDNAEVKERVTLKPRSVLTSQVVVGPNITLPEGSVISLHPPDAEEDEDDGEFSDDSGADQEKDKVKMKGYNPAEVGAAGKGYLWKAAGMNMEEEEELQQNLWGLKINMEEESESESEQSMDSEEPDSRGGSPQMDDIKVFQNEVLGTLQRGKEENISCDNLVLEINSLKYAYNISLKEVMQVLSHVVLEFPLQQMDSPLDSSRYCALLLPLLKAWSPVFRNYIKRAADHLEALAAIEDFFLEHEALGISMAKVLMAFYQLEILAEETILSWFSQRDTTDKGQQLRKNQQVVC

SEQ ID NO: 28671 - protein, 107 aa, Homo sapiens
  Payload ID: 5604
  Gene Symbol: EIF2B5
  Gene Name: eukaryotic translation initiation factor 2B, subunit 5 epsilon, 82kDa
  ENSP ID: ENSP00000414775
MAAPVVAPPGVVVSRANKRSGAGPGGSGGGGARGAEEEPPPPLQAVLVADSFDRRFFPISKDQPRVLLPLANVALIDYTLEFLTATGVQETFVFCCWKAAQIKEHLL

SEQ ID NO: 28672 - protein, 584 aa, Homo sapiens
  Payload ID: 5605
  Gene Symbol: EIF2D
  Gene Name: eukaryotic translation initiation factor 2D
  Uniprot ID: P41214
  ENSP ID: ENSP00000271764
MFAKAFRVKSNTAIKGSDRRKLRADVTTAFPTLGTDQVSELVPGKEELNIVKLYAHKGDAVTVYVSGGNPILFELEKNLYPTVYTLWSYPDLLPTFTTWPLVLEKLVGGADLMLPGLVMPPAGLPQVQKGDLCAISLVGNRAPVAIGVAAMSTAEMLTSGLKGRGFSVLHTYQDHLWRSGNKSSPPSIAPLALDSADLSEEKGSVQMDSTLQGDMRHMTLEGEEENGEVHQAREDKSLSEAPEDTSTRGLNQDSTDSKTLQEQMDELLQQCFLHALKCRVKKADLPLLTSTFLGSHMFSCCPEGRQLDIKKSSYKKLSKFLQQMQQEQIIQVKELSKGVESIVAVDWKHPRITSFVIPEPSPTSQTIQEGSREQPYHPPDIKPLYCVPASMTLLFQESGHKKGSFLEGSEVRTIVINYAKKNDLVDADNKNLVRLDPILCDCILEKNEQHTVMKLPWDSLLTRCLEKLQPAYQVTLPGQEPIVKKGRICPIDITLAQRASNKKVTVVRNLEAYGLDPYSVAAILQQRCQASTTVNPAPGAKDSLQVQIQGNQVHHLGWLLLEEYQLPRKHIQGLEKALKPGKKK

SEQ ID NO: 28673 - protein, 460 aa, Homo sapiens
  Payload ID: 5605
  Gene Symbol: EIF2D
  Gene Name: eukaryotic translation initiation factor 2D
  Uniprot ID: P41214
  ENSP ID: ENSP00000356081
MFAKAFRVKSNTAIKGSDRRKLRADVTTAFPTLGTDQVSELVPGKEELNIVKLYAHKGDAVTVYVSGGNPILFELEKNLYPTVYTLWSYPDLLPTFTTWPLVLEKLVGGADLMLPGLVMPPAGLPQVQKGDLCAISLVGNRAPVAIGVAAMSTAEMLTSGLKGRGFSVLHTYQDHLCPEGRQLDIKKSSYKKLSKFLQQMQQEQIIQVKELSKGVESIVAVDWKHPRITSFVIPEPSPTSQTIQEGSREQPYHPPDIKPLYCVPASMTLLFQESGHKKGSFLEGSEVRTIVINYAKKNDLVDADNKNLVRLDPILCDCILEKNEQHTVMKLPWDSLLTRCLEKLQPAYQVTLPGQEPIVKKGRICPIDITLAQRASNKKVTVVRNLEAYGLDPYSVAAILQQRCQASTTVNPAPGAKDSLQVQIQGNQVHHLGWLLLEEYQLPRKHIQGLEKALKPGKKK

SEQ ID NO: 28674 - protein, 270 aa, Homo sapiens
  Payload ID: 5605
  Gene Symbol: EIF2D
  Gene Name: eukaryotic translation initiation factor 2D
  ENSP ID: ENSP00000394685
MFAKAFRVKSNTAIKGSDRRKLRADVTTAFPTLGTDQVSELVPGKEELNIVKLYAHKGDAVTVYVSGGNPILFELEKNLYPTDLMLPGLVMPPAGLPQVQKGDLCAISLVGNRAPVAIGVAAMSTAEMLTSGLKGRGFSVLHTYQDHLWRSGNKSSPPSIAPLALDSADLSEEKGSVQMDSTLQGDMRHMTLEGEEENGEVHQAREDKSLSEAPEDTSTRGLNQDSTDSKTLQEQMDELLQQCFLHALKCRVKKADLPLLTSTFLGSHMF

SEQ ID NO: 28675 - protein, 66 aa, Homo sapiens
  Payload ID: 5605
  Gene Symbol: EIF2D
  Gene Name: eukaryotic translation initiation factor 2D
  ENSP ID: ENSP00000479327
  MOD_RES (1)..(1): Any amino acid
XLQEQMDELLQQCFLHALKCRVKKADLPLLTSTFLGSHMFSCCPEGRQLDIKKSSYKKEGELSGGQ

SEQ ID NO: 28676 - protein, 62 aa, Homo sapiens
  Payload ID: 5605
  Gene Symbol: EIF2D
  Gene Name: eukaryotic translation initiation factor 2D
  ENSP ID: ENSP00000484299
DSLLTRCLEKLQPAYQVTLPGQEPIVKKGRICPIDITLAQRASNKKITKLRLSLRNMPVVPC

SEQ ID NO: 28677 - protein, 73 aa, Homo sapiens
  Payload ID: 5605
  Gene Symbol: EIF2D
  Gene Name: eukaryotic translation initiation factor 2D
  ENSP ID: ENSP00000484590
  MOD_RES (1)..(1): Any amino acid
XVLEKLVGGADLMLPGLVMPPAGLPQPRRTTTGHKEVKLQKGRGAFWRAVRSERSSLTTPRKMTWLMQTTKIL

SEQ ID NO: 28678 - protein, 357 aa, Homo sapiens
  Payload ID: 5606
  Gene Symbol: EIF3F
  Gene Name: Eukaryotic translation initiation factor 3 subunit F
  ENSP ID: ENSP00000485772
MATPAVPVSAPPATPTPVPAAAPASVPAPTPAPAAAPVPAAAPASSSDPAAAAAATAAPGQTPASAQAPAQTPAPALPGPALPGPFPGGRVVRLHPVILASIVDSYERRNEGAARVIGTLLGTVDKHSVEVTNCFSVPHNESEDEVAVDMEFAKNMYELHKKVSPNELILGWYATGHDITEHSVLIHEYYSREAPNPIHLTVDTSLQNGRMSIKAYVSTLMGVPGRTMGVMFTPLTVKYAYYDTERIGVDLIMKTCFSPNRVIGLSSDLQQVGGASARIQDALSTVLQYAEDVLSGKVSADNTVGRFLMSLVNQVPKIVPDDFETMLNSNINDLLMVTYLANLTQSQIALNEKLVNL

SEQ ID NO: 28679 - protein, 357 aa, Homo sapiens; identical to SEQ ID NO: 28678
  Payload ID: 5606
  Gene Symbol: EIF3F
  Gene Name: Eukaryotic translation initiation factor 3 subunit F
  ENSP ID: ENSP00000486798

SEQ ID NO: 28680 - protein, 124 aa, Homo sapiens
  Payload ID: 5606
  Gene Symbol: EIF3F
  Gene Name: Eukaryotic translation initiation factor 3 subunit F
  ENSP ID: ENSP00000487000
MATPAVPVSAPPATPTPVPAAAPASVPAPTPAPAAAPVPAAAPASSSDPAAAAAATAAPGQTPASAQAPAQTPAPALPGPALPGPFPGGRVVRLHPVILASIVDSYERRNEGAARVIGTLLGGC

SEQ ID NO: 28681 - protein, 100 aa, Homo sapiens
  Payload ID: 5606
  Gene Symbol: EIF3F
  Gene Name: Eukaryotic translation initiation factor 3 subunit F
  ENSP ID: ENSP00000487359
NRVIGLSSDLQQVGGASARIQDALSTVLQYAEDVLSGKVSADNTVGRFLMSLVNQVPKIVPDDFETMLNSNINVSALPEPLLAWFLPPPQHIHSNVKRVG

SEQ ID NO: 28682 - protein, 1382 aa, Homo sapiens
  Payload ID: 5607
  Gene Symbol: EIF3A
  Gene Name: eukaryotic translation initiation factor 3, subunit A
  Uniprot ID: Q14152
  ENSP ID: ENSP00000358140
MPAYFQRPENALKRANEFLEVGKKQPALDVLYDVMKSKKHRTWQKIHEPIMLKYLELCVDLRKSHLAKEGLYQYKNICQQVNIKSLEDVVRAYLKMAEEKTEAAKEESQQMVLDIEDLDNIQTPESVLLSAVSGEDTQDRTDRLLLTPWVKFLWESYRQCLDLLRNNSRVERLYHDIAQQAFKFCLQYTRKAEFRKLCDNLRMHLSQIQRHHNQSTAINLNNPESQSMHLETRLVQLDSAISMELWQEAFKAVEDIHGLFSLSKKPPKPQLMANYYNKVSTVFWKSGNALFHASTLHRLYHLSREMRKNLTQDEMQRMSTRVLLATLSIPITPERTDIARLLDMDGIIVEKQRRLATLLGLQAPPTRIGLINDMVRFNVLQYVVPEVKDLYNWLEVEFNPLKLCERVTKVLNWVREQPEKEPELQQYVPQLQNNTILRLLQQVSQIYQSIEFSRLTSLVPFVDAFQLERAIVDAARHCDLQVRIDHTSRTLSFGSDLNYATREDAPIGPHLQSMPSEQIRNQLTAMSSVLAKALEVIKPAHILQEKEEQHQLAVTAYLKNSRKEHQRILARRQTIEERKERLESLNIQREKEELEQREAELQKVRKAEEERLRQEAKEREKERILQEHEQIKKKTVRERLEQIKKTELGAKAFKDIDIEDLEELDPDFIMAKQVEQLEKEKKELQERLKNQEKKIDYFERAKRLEEIPLIKSAYEEQRIKDMDLWEQQEEERITTMQLEREKALEHKNRMSRMLEDRDLFVMRLKAARQSVYEEKLKQFEERLAEERHNRLEERKRQRKEERRITYYREKEEEEQRRAEEQMLKEREERERAERAKREEELREYQERVKKLEEVERKKRQRELEIEERERRREEERRLGDSSLSRKDSRWGDRDSEGTWRKGPEADSEWRRGPPEKEWRRGEGRDEDRSHRRDEERPRRLGDDEDREPSLRPDDDRVPRRGMDDDRGPRRGPEEDRFSRRGADDDRPSWRNTDDDRPPRRIADEDRGNWRHADDDRPPRRGLDEDRGSWRTADEDRGPRRGMDDDRGPRRGGADDERSSWRNADDDRGPRRGLDDDRGPRRGMDDDRGPRRGMDDDRGPRRGMDDDRGPRRGLDDDRGPWRNADDDRIPRRGAEDDRGPWRNMDDDRLSRRADDDRFPRRGDDSRPGPWRPLVKPGGWREKEKAREESWGPPRESRPSEEREWDREKERDRDNQDREENDKDPERERDRERDVDREDRFRRPRDEGGWRRGPAEESSSWRDSSRRDDRDRDDRRRERDDRRDLRERRDLRDDRDRRGPPLRSEREEVSSWRRADDRKDDRVEERDPPRRVPPPALSRDRERDRDREREGEKEKASWRAEKDRESLRRTKNETDEDGWTTVRR

SEQ ID NO: 28683 - protein, 1382 aa, Homo sapiens; identical to SEQ ID NO: 28682
  Payload ID: 5607
  Gene Symbol: EIF3A
  Gene Name: eukaryotic translation initiation factor 3, subunit A
  Uniprot ID: Q14152
  ENSP ID: ENSP00000438178

SEQ ID NO: 28684 - protein, 814 aa, Homo sapiens
  Payload ID: 5608
  Gene Symbol: EIF3B
  Gene Name: eukaryotic translation initiation factor 3, subunit B
  Uniprot ID: P55884
  ENSP ID: ENSP00000354125
MQDAENVAVPEAAEERAEPGQQQPAAEPPPAEGLLRPAGPGAPEAAGTEASSEEVGIAEAGPESEVRTEPAAEAEAASGPSESPSPPAAEELPGSHAEPPVPAQGEAPGEQARDERSDSRAQAVSEDAGGNEGRAAEAEPRALENGDADEPSFSDPEDFVDDVSEEELLGDVLKDRPQEADGIDSVIVVDNVPQVGPDRLEKLKNVIHKIFSKFGKITNDFYPEEDGKTKGYIFLEYASPAHAVDAVKNADGYKLDKQHTFRVNLFTDFDKYMTISDEWDIPEKQPFKDLGNLRYWLEEAECRDQYSVIFESGDRTSIFWNDVKDPVSIEERARWTETYVRWSPKGTYLATFHQRGIALWGGEKFKQIQRFSHQGVQLIDFSPCERYLVTFSPLMDTQDDPQAIIIWDILTGHKKRGFHCESSAHWPIFKWSHDGKFFARMTLDTLSIYETPSMGLLDKKSLKISGIKDFSWSPGGNIIAFWVPEDKDIPARVTLMQLPTRQEIRVRNLFNVVDCKLHWQKNGDYLCVKVDRTPKGTQGVVTNFEIFRMREKQVPVDVVEMKETIIAFAWEPNGSKFAVLHGEAPRISVSFYHVKNNGKIELIKMFDKQQANTIFWSPQGQFVVLAGLRSMNGALAFVDTSDCTVMNIAEHYMASDVEWDPTGRYVVTSVSWWSHKVDNAYWLWTFQGRLLQKNNKDRFCQLLWRPRPPTLLSQEQIKQIKKDLKKYSKIFEQKDRLSQSKASKELVERRRTMMEDFRKYRKMAQELYMEQKNERLELRGGVDTDELDSNVDDWEEETIEFFVTEEIIPLGNQE

SEQ ID NO: 28685 - protein, 814 aa, Homo sapiens; identical to SEQ ID NO: 28684
  Payload ID: 5608
  Gene Symbol: EIF3B
  Gene Name: eukaryotic translation initiation factor 3, subunit B
  Uniprot ID: P55884
  ENSP ID: ENSP00000380206

SEQ ID NO: 28686 - protein, 302 aa, Homo sapiens
  Payload ID: 5608
  Gene Symbol: EIF3B
  Gene Name: eukaryotic translation initiation factor 3, subunit B
  ENSP ID: ENSP00000407785
MQDAENVAVPEAAEERAEPGQQQPAAEPPPAEGLLRPAGPGAPEAAGTEASSEEVGIAEAGPESEGEAPGEQARDERSDSRAQAVSEDAGGNEGRAAEAEPRALENGDADEPSFSDPEDFVDDVSEEELLGDVLKDRPQEADGIDSVIVVDNVPQVGPDRLEKLKNVIHKIFSKFGKITNDFYPEEDGKTKGYIFLEYASPAHAVDAVKNADGYKLDKQHTFRVNLFTDFDKYMTISDEWDIPEKQPFKDLGNLRYWLEEAECRDQYSVIFESGDRTSIFWNDVKDPVSIEERARWTETYVR

SEQ ID NO: 28687 - protein, 153 aa, Homo sapiens
  Payload ID: 5608
  Gene Symbol: EIF3B
  Gene Name: eukaryotic translation initiation factor 3, subunit B
  ENSP ID: ENSP00000408062
MTISDEWDIPEKQPFKDLGNLRYWLEEAECRDQYSVIFESGDRTSIFWNDVKDPVSIEERARWTETYVRWSPKGTYLATFHQRGIALWGGEKFKQIQRFSHQGVQLIDFSPCERYLVTFSPLMDTQDDPQAIIIWDILTGHKKRGFHCESSAH

SEQ ID NO: 28688 - protein, 913 aa, Homo sapiens
  Payload ID: 5609
  Gene Symbol: EIF3C
  Gene Name: eukaryotic translation initiation factor 3, subunit C
  Uniprot ID: Q99613
  ENSP ID: ENSP00000332604
MSRFFTTGSDSESESSLSGEELVTKPVGGNYGKQPLLLSEDEEDTKRVVRSAKDKRFEELTNLIRTIRNAMKIRDVTKCLEEFELLGKAYGKAKSIVDKEGVPRFYIRILADLEDYLNELWEDKEGKKKMNKNNAKALSTLRQKIRKYNRDFESHITSYKQNPEQSADEDAEKNEEDSEGSSDEDEDEDGVSAATFLKKKSEAPSGESRKFLKKMDDEDEDSEDSEDDEDWDTGSTSSDSDSEEEEGKQTALASRFLKKAPTTDEDKKAAEKKREDKAKKKHDRKSKRLDEEEEDNEGGEWERVRGGVPLVKEKPKMFAKGTEITHAVVIKKLNEILQARGKKGTDRAAQIELLQLLVQIAAENNLGEGVIVKIKFNIIASLYDYNPNLATYMKPEMWGKCLDCINELMDILFANPNIFVGENILEESENLHNADQPLRVRGCILTLVERMDEEFTKIMQNTDPHSQEYVEHLKDEAQVCAIIERVQRYLEEKGTTEEVCRIYLLRILHTYYKFDYKAHQRQLTPPEGSSKSEQDQAENEGEDSAVLMERLCKYIYAKDRTDRIRTCAILCHIYHHALHSRWYQARDLMLMSHLQDNIQHADPPVQILYNRTMVQLGICAFRQGLTKDAHNALLDIQSSGRAKELLGQGLLLRSLQERNQEQEKVERRRQVPFHLHINLELLECVYLVSAMLLEIPYMAAHESDARRRMISKQFHHQLRVGERQPLLGPPESMREHVVAASKAMKMGDWKTCHSFIINEKMNGKVWDLFPEADKVRTMLVRKIQEESLRTYLFTYSSVYDSISMETLSDMFELDLPTVHSIISKMIINEELMASLDQPTQTVVMHRTEPTAQQNLALQLAEKLGSLVENNERVFDHKQGTYGGYFRDQKDGYRKNEGYMRRGGYRQQQSQTAY

SEQ ID NO: 28689 - protein, 913 aa, Homo sapiens; identical to SEQ ID NO: 28688
  Payload ID: 5609
  Gene Symbol: EIF3C
  Gene Name: eukaryotic translation initiation factor 3, subunit C
  Uniprot ID: Q99613
  ENSP ID: ENSP00000378953

SEQ ID NO: 28690 - protein, 132 aa, Homo sapiens
  Payload ID: 5609
  Gene Symbol: EIF3C
  Gene Name: eukaryotic translation initiation factor 3, subunit C
  ENSP ID: ENSP00000455277
MKIRDVTKCLEEFELLGKAYGKAKSIVDKEGVPRFYIRILADLEDYLNELWEDKEGKKKMNKNNAKALSTLRQKIRKYNRDFESHITSYKQNPEQSADEDAEKNEEDSEGSSDEDEDEDGVSAATFLKKKSE

SEQ ID NO: 28691 - protein, 148 aa, Homo sapiens
  Payload ID: 5609
  Gene Symbol: EIF3C
  Gene Name: eukaryotic translation initiation factor 3, subunit C
  ENSP ID: ENSP00000455278
MSRFFTTGSDSESESSLSGEELVTKPVGGNYGKQPLLLSEDEEDTKRVVRSAKDKRFEELTNLIRTIRNAMKIRDVTKCLEEFELLGKAYGKAKSIVDKEGVPRFYIRILADLEDYLNELWEDKEGKKKMNKNNAKALSTLRQKIRKY

SEQ ID NO: 28692 - protein, 903 aa, Homo sapiens
  Payload ID: 5609
  Gene Symbol: EIF3C
  Gene Name: eukaryotic translation initiation factor 3, subunit C
  Uniprot ID: Q99613
  ENSP ID: ENSP00000456416
MSRFFTTGSDSESESSLSGEELVTKPVGGNYGKQPLLLSEDEEDTKRVVRSAKDKRFEELTNLIRTIRNAMKIRDVTKCLEEFELLGKAYGKAKSIVDKEGVPRFYIRILADLEDYLNEMNKNNAKALSTLRQKIRKYNRDFESHITSYKQNPEQSADEDAEKNEEDSEGSSDEDEDEDGVSAATFLKKKSEAPSGESRKFLKKMDDEDEDSEDSEDDEDWDTGSTSSDSDSEEEEGKQTALASRFLKKAPTTDEDKKAAEKKREDKAKKKHDRKSKRLDEEEEDNEGGEWERVRGGVPLVKEKPKMFAKGTEITHAVVIKKLNEILQARGKKGTDRAAQIELLQLLVQIAAENNLGEGVIVKIKFNIIASLYDYNPNLATYMKPEMWGKCLDCINELMDILFANPNIFVGENILEESENLHNADQPLRVRGCILTLVERMDEEFTKIMQNTDPHSQEYVEHLKDEAQVCAIIERVQRYLEEKGTTEEVCRIYLLRILHTYYKFDYKAHQRQLTPPEGSSKSEQDQAENEGEDSAVLMERLCKYIYAKDRTDRIRTCAILCHIYHHALHSRWYQARDLMLMSHLQDNIQHADPPVQILYNRTMVQLGICAFRQGLTKDAHNALLDIQSSGRAKELLGQGLLLRSLQERNQEQEKVERRRQVPFHLHINLELLECVYLVSAMLLEIPYMAAHESDARRRMISKQFHHQLRVGERQPLLGPPESMREHVVAASKAMKMGDWKTCHSFIINEKMNGKVWDLFPEADKVRTMLVRKIQEESLRTYLFTYSSVYDSISMETLSDMFELDLPTVHSIISKMIINEELMASLDQPTQTVVMHRTEPTAQQNLALQLAEKLGSLVENNERVFDHKQGTYGGYFRDQKDGYRKNEGYMRRGGYRQQQSQTAY

SEQ ID NO: 28693 - protein, 79 aa, Homo sapiens
  Payload ID: 5609
  Gene Symbol: EIF3C
  Gene Name: eukaryotic translation initiation factor 3, subunit C
  ENSP ID: ENSP00000457389
MKIRDVTKCLEEFELLGKAYGKAKSIVDKEGVPRFYIRILADLEDYLNELWEDKEGKKKMNKNNAKALSTLRQKIRKYN

SEQ ID NO: 28694 - protein, 913 aa, Homo sapiens; identical to SEQ ID NO: 28688
  Payload ID: 5609
  Gene Symbol: EIF3C
  Gene Name: eukaryotic translation initiation factor 3, subunit C
  Uniprot ID: Q99613
  ENSP ID: ENSP00000457418

SEQ ID NO: 28695 - protein, 913 aa, Homo sapiens; identical to SEQ ID NO: 28688
  Payload ID: 5609
  Gene Symbol: EIF3C
  Gene Name: eukaryotic translation initiation factor 3, subunit C
  Uniprot ID: Q99613
  ENSP ID: ENSP00000457963

SEQ ID NO: 28696 - protein, 914 aa, Homo sapiens
  Payload ID: 5610
  Gene Symbol: EIF3CL
  Gene Name: eukaryotic translation initiation factor 3, subunit C-like
  Uniprot ID: B5ME19
  ENSP ID: ENSP00000370258
MSRFFTTGSDSESESSLSGEELVTKPVGGNYGKQPLLLSEDEEDTKRVVRSAKDKRFEELTNLIRTIRNAMKIRDVTKCLEEFELLGKAYGKAKSIVDKEGVPRFYIRILADLEDYLNELWEDKEGKKKMNKNNAKALSTLRQKIRKYNRDFESHITSYKQNPEQSADEDAEKNEEDSEGSSDEDEDEDGVSAATFLKKKSEAPSGESRKFLKKMDDEDEDSEDSEDDEDWDTGSTSSDSDSEEEEGKQTALASRFLKKAPTTDEDKKAAEKKREDKAKKKHDRKSKRLDEEEEEDNEGGEWERVRGGVPLVKEKPKMFAKGTEITHAVVIKKLNEILQARGKKGTDRAAQIELLQLLVQIAAENNLGEGVIVKIKFNIIASLYDYNPNLATYMKPEMWGKCLDCINELMDILFANPNIFVGENILEESENLHNADQPLRVRGCILTLVERMDEEFTKIMQNTDPHSQEYVEHLKDEAQVCAIIERVQRYLEEKGTTEEVCRIYLLRILHTYYKFDYKAHQRQLTPPEGSSKSEQDQAENEGEDSAVLMERLCKYIYAKDRTDRIRTCAILCHIYHHALHSRWYQARDLMLMSHLQDNIQHADPPVQILYNRTMVQLGICAFRQGLTKDAHNALLDIQSSGRAKELLGQGLLLRSLQERNQEQEKVERRRQVPFHLHINLELLECVYLVSAMLLEIPYMAAHESDARRRMISKQFHHQLRVGERQPLLGPPESMREHVVAASKAMKMGDWKTCHSFIINEKMNGKVWDLFPEADKVRTMLVRKIQEESLRTYLFTYSSVYDSISMETLSDMFELDLPTVHSIISKMIINEELMASLDQPTQTVVMHRTEPTAQQNLALQLAEKLGSLVENNERVFDHKQGTYGGYFRDQKDGYRKNEGYMRRGGYRQQQSQTAY

SEQ ID NO: 28697 - protein, 914 aa, Homo sapiens; identical to SEQ ID NO: 28696
  Payload ID: 5610
  Gene Symbol: EIF3CL
  Gene Name: eukaryotic translation initiation factor 3, subunit C-like
  Uniprot ID: B5ME19
  ENSP ID: ENSP00000381917

SEQ ID NO: 28698 - protein, 548 aa, Homo sapiens
  Payload ID: 5611
  Gene Symbol: EIF3D
  Gene Name: eukaryotic translation initiation factor 3, subunit D
  Uniprot ID: O15371
  ENSP ID: ENSP00000216190
MAKFMTPVIQDNPSGWGPCAVPEQFRDMPYQPFSKGDRLGKVADWTGATYQDKRYTNKYSSQFGGGSQYAYFHEEDESSFQLVDTARTQKTAYQRNRMRFAQRNLRRDKDRRNMLQFNLQILPKSAKQKERERIRLQKKFQKQFGVRQKWDQKSQKPRDSSVEVRSDWEVKEEMDFPQLMKMRYLEVSEPQDIECCGALEYYDKAFDRITTRSEKPLRSIKRIFHTVTTTDDPVIRKLAKTQGNVFATDAILATLMSCTRSVYSWDIVVQRVGSKLFFDKRDNSDFDLLTVSETANEPPQDEGNSFNSPRNLAMEATYINHNFSQQCLRMGKERYNFPNPNPFVEDDMDKNEIASVAYRYRRWKLGDDIDLIVRCEHDGVMTGANGEVSFINIKTLNEWDSRHCNGVDWRQKLDSQRGAVIATELKNNSYKLARWTCCALLAGSEYLKLGYVSRYHVKDSSRHVILGTQQFKPNEFASQINLSVENAWGILRCVIDICMKLEEGKYLILKDPNKQVIRVYSLPDGTFSSDEDEEEEEEEEEEEEEEET

SEQ ID NO: 28699 - protein, 123 aa, Homo sapiens
  Payload ID: 5611
  Gene Symbol: EIF3D
  Gene Name: eukaryotic translation initiation factor 3, subunit D
  ENSP ID: ENSP00000385212
MAKFMTPVIQDNPSGWGPCAVPEQFRDMPYQPFSKGDRLGKVADWTGATYQDKRYTNKYSSQFGGGSQYAYFHEEDESSFQLVDTARTQKTAYQRNRMRFAQRNLRRDKDRRNMLQFNLQILP

SEQ ID NO: 28700 - protein, 548 aa, Homo sapiens; identical to SEQ ID NO: 28698
  Payload ID: 5611
  Gene Symbol: EIF3D
  Gene Name: eukaryotic translation initiation factor 3, subunit D
  Uniprot ID: O15371
  ENSP ID: ENSP00000385812

SEQ ID NO: 28701 - protein, 269 aa, Homo sapiens
  Payload ID: 5611
  Gene Symbol: EIF3D
  Gene Name: eukaryotic translation initiation factor 3, subunit D
  ENSP ID: ENSP00000390438
MAKFMTPVIQDNPSGWGPCAVPEQFRDMPYQPFSKGDRLGKVADWTGATYQDKRYTNKYSSQFGGGSQYAYFHEEDESSFQLVDTARTQKTAYQRNRMRFAQRNLRRDKDRRNMLQFNLQILPKSAKQKERERIRLQKKFQKQFGVRQKWDQKSQKPRDSSVEVRSDWEVKEEMDFPQLMKMRYLEVSEPQDIECCGALEYYDKAFDRITTRSEKPLRSIKRIFHTVTTTDDPVIRKLAKTQGNVFATDAILATLMSCTRSVYSWDIVV

SEQ ID NO: 28702 - protein, 105 aa, Homo sapiens
  Payload ID: 5611
  Gene Symbol: EIF3D
  Gene Name: eukaryotic translation initiation factor 3, subunit D
  ENSP ID: ENSP00000391061
  MOD_RES (1)..(1): Any amino acid
XFDRITTRSEKPLRSIKRIFHTVTTTDDPVIRKLAKTQGNVFATDAILATLMSCTRSVYSWDIVVQRVGSKLFFDKRDNSDFALRTLSVTLCCMVSDHATLLQTS

SEQ ID NO: 28703 - protein, 173 aa, Homo sapiens
  Payload ID: 5611
  Gene Symbol: EIF3D
  Gene Name: eukaryotic translation initiation factor 3, subunit D
  ENSP ID: ENSP00000403584
MAKFMTPVIQDNPSGWGPCAVPEQFRDMPYQPFSKGDRLGKVADWTGATYQDKRYTNKYSSQFGGGSQYAYFHEEDESSFQLVDTARTQKTAYQRNRMRFAQRNLRRDKDRRNMLQFNLQILPKSAKQKERERIRLQKKFQKQFGVRQKWDQKSQKPRDSSVEVRSDWEVKEE

SEQ ID NO: 28704 - protein, 49 aa, Homo sapiens
  Payload ID: 5611
  Gene Symbol: EIF3D
  Gene Name: eukaryotic translation initiation factor 3, subunit D
  ENSP ID: ENSP00000487325
MKLEEGKYLILKDPNKQVIRVYSLPDGTFSSDEDEEEEEEEEEEEEAGD

SEQ ID NO: 28705 - protein, 445 aa, Homo sapiens
  Payload ID: 5612
  Gene Symbol: EIF3E
  Gene Name: eukaryotic translation initiation factor 3, subunit E
  Uniprot ID: P60228
  ENSP ID: ENSP00000220849
MAEYDLTTRIAHFLDRHLVFPLLEFLSVKEIYNEKELLQGKLDLLSDTNMVDFAMDVYKNLYSDDIPHALREKRTTVVAQLKQLQAETEPIVKMFEDPETTRQMQSTRDGRMLFDYLADKHGFRQEYLDTLYRYAKFQYECGNYSGAAEYLYFFRVLVPATDRNALSSLWGKLASEILMQNWDAAMEDLTRLKETIDNNSVSSPLQSLQQRTWLIHWSLFVFFNHPKGRDNIIDLFLYQPQYLNAIQTMCPHILRYLTTAVITNKDVRKRRQVLKDLVKVIQQESYTYKDPITEFVECLYVNFDFDGAQKKLRECESVLVNDFFLVACLEDFIENARLFIFETFCRIHQCISINMLADKLNMTPEEAERWIVNLIRNARLDAKIDSKLGHVVMGNNAVSPYQQVIEKTKSLSFRSQMLAMNIEKKLNQNSRSEAPNWATQDSGFY

SEQ ID NO: 28706 - protein, 156 aa, Homo sapiens
  Payload ID: 5612
  Gene Symbol: EIF3E
  Gene Name: eukaryotic translation initiation factor 3, subunit E
  ENSP ID: ENSP00000428170
  MOD_RES (1)..(1): Any amino acid
XLMQNWDAAMEDLTRLKETIDNNSVSSPLQSLQQRTWLIHWSLFVFFNHPKGRDNIIDLFLYQPHMLADKLNMTPEEAERWIVNLIRNARLDAKIDSKLGHVVMGNNAVSPYQQVIEKTKSLSFRSQMLAMNIEKKLNQNSRSEAPNWATQDSGFY

SEQ ID NO: 28707 - protein, 352 aa, Homo sapiens
  Payload ID: 5612
  Gene Symbol: EIF3E
  Gene Name: eukaryotic translation initiation factor 3, subunit E
  ENSP ID: ENSP00000428796
MFEDPETTRQMQSTRDGRMLFDYLADKHGFRQEYLDTLYRYAKFQYECGNYSGAAEYLYFFRVLVPATDRNALSSLWGKLASEILMQNWDAAMEDLTRLKETIDNNSVSSPLQSLQQRTWLIHWSLFVFFNHPKGRDNIIDLFLYQPQYLNAIQTMCPHILRYLTTAVITNKDVRKRRQVLKDLVKVIQQESYTYKDPITEFVECLYVNFDFDGAQKKLRECESVLVNDFFLVACLEDFIENARLFIFETFCRIHQCISINMLADKLNMTPEEAERWIVNLIRNARLDAKIDSKLGHVVMGNNAVSPYQQVIEKTKSLSFRSQMLAMNIEKKLNQNSRSEAPNWATQDSGFY

SEQ ID NO: 28708 - protein, 45 aa, Homo sapiens
  Payload ID: 5612
  Gene Symbol: EIF3E
  Gene Name: eukaryotic translation initiation factor 3, subunit E
  ENSP ID: ENSP00000429327
MAEYDLTTRIAHFLDRHLVFPLLEFLSVKEVVSAMWMEKHIGVYY

SEQ ID NO: 28709 - protein, 74 aa, Homo sapiens
  Payload ID: 5612
  Gene Symbol: EIF3E
  Gene Name: eukaryotic translation initiation factor 3, subunit E
  ENSP ID: ENSP00000429968
  MOD_RES (1)..(1): Any amino acid
XFLDRHLVFPLLEFLSVKEIYNEKELLQGKLDLLSDTNMVDFAMDVYKNLYSDDIPHGMVGCSLTTWRTSMVLG

SEQ ID NO: 28710 - protein, 171 aa, Homo sapiens
  Payload ID: 5612
  Gene Symbol: EIF3E
  Gene Name: eukaryotic translation initiation factor 3, subunit E
  ENSP ID: ENSP00000430152
  MOD_RES (1)..(1): Any amino acid
XEYDLTTRIAHFLDRHLVFPLLEFLSVKEIYNEKELLQGKLDLLSDTNMVDFAMDVYKNLYSDDIPHALREKRTTVVAQLKQLQAETEPIVKMFEDPETTRQMQSTRDGRMLFDYLADKHGFRQEYLDTLYRYAKFQYECGNYSGAAEYLYFFRVLMESCYVAQADLKLLA

SEQ ID NO: 28711 - protein, 56 aa, Homo sapiens
  Payload ID: 5612
  Gene Symbol: EIF3E
  Gene Name: eukaryotic translation initiation factor 3, subunit E
  ENSP ID: ENSP00000430649
MAEYDLTTRIAHFLDRHLVFPLLEFLSVKEERWRGFYLYTALPRKGKRWFVGTHKK

SEQ ID NO: 28712 - protein, 75 aa, Homo sapiens
  Payload ID: 5612
  Gene Symbol: EIF3E
  Gene Name: eukaryotic translation initiation factor 3, subunit E
  ENSP ID: ENSP00000430678
MVDFAMDVYKNLYSDDIPHALREKRTTVVAQLKQLQAETEPIVKMFEDPETTRQMQSTRDGRMLFDYLADKHGFR

SEQ ID NO: 28713 - protein, 75 aa, Homo sapiens
  Payload ID: 5612
  Gene Symbol: EIF3E
  Gene Name: eukaryotic translation initiation factor 3, subunit E
  ENSP ID: ENSP00000430709
MAEYDLTTRIAHFLDRHLVFPLLEFLSVKEIYNEKELLQGKLDLLSDTNMVDFAMDVYKNLYSDDIPHVLFCIFN

SEQ ID NO: 28714 - protein, 226 aa, Homo sapiens
  Payload ID: 5612
  Gene Symbol: EIF3E
  Gene Name: eukaryotic translation initiation factor 3, subunit E
  ENSP ID: ENSP00000430839
MAEYDLTTRIAHFLDRHLVFPLLEFLSVKEVPATDRNALSSLWGKLASEILMQNWDAAMEDLTRLKETIDNNSVSSPLQSLQQRTWLIHWSLFVFFNHPKGRDNIIDLFLYQPQYLNAIQTMCPHILRYLTTAVITNKDVRKRRQVLKDLVKVIQQESYTYKDPITEFVECLYVNFDFDGAQKKLRECESVLVNDFFLVACLEDFIENARLFIFETFCRIHQCISI

SEQ ID NO: 28715 - protein, 357 aa, Homo sapiens; identical to SEQ ID NO: 28678
  Payload ID: 5613
  Gene Symbol: EIF3F
  Gene Name: eukaryotic translation initiation factor 3, subunit F
  Uniprot ID: O00303
  ENSP ID: ENSP00000310040

SEQ ID NO: 28716 - protein, 357 aa, Homo sapiens; identical to SEQ ID NO: 28678
  Payload ID: 5613
  Gene Symbol: EIF3F
  Gene Name: eukaryotic translation initiation factor 3, subunit F
  Uniprot ID: O00303
  ENSP ID: ENSP00000431800

SEQ ID NO: 28717 - protein, 124 aa, Homo sapiens; identical to SEQ ID NO: 28680
  Payload ID: 5613
  Gene Symbol: EIF3F
  Gene Name: eukaryotic translation initiation factor 3, subunit F
  ENSP ID: ENSP00000432489

SEQ ID NO: 28718 - protein, 100 aa, Homo sapiens; identical to SEQ ID NO: 28681
  Payload ID: 5613
  Gene Symbol: EIF3F
  Gene Name: eukaryotic translation initiation factor 3, subunit F
  ENSP ID: ENSP00000434286

SEQ ID NO: 28719 - protein, 320 aa, Homo sapiens
  Payload ID: 5614
  Gene Symbol: EIF3G
  Gene Name: eukaryotic translation initiation factor 3, subunit G
  Uniprot ID: O75821
  ENSP ID: ENSP00000253108
MPTGDFDSKPSWADQVEEEGEDDKCVTSELLKGIPLATGDTSPEPELLPGAPLPPPKEVINGNIKTVTEYKIDEDGKKFKIVRTFRIETRKASKAVARRKNWKKFGNSEFDPPGPNVATTTVSDDVSMTFITSKEDLNCQEEEDPMNKLKGQKIVSCRICKGDHWTTRCPYKDTLGPMQKELAEQLGLSTGEKEKLPGELEPVQATQNKTGKYVPPSLRDGASRRGESMQPNRRADDNATIRVTNLSEDTRETDLQELFRPFGSISRIYLAKDKTTGQSKGFAFISFHRREDAARAIAGVSGFGYDHLILNVEWAKPSTN

SEQ ID NO: 28720 - protein, 262 aa, Homo sapiens
  Payload ID: 5614
  Gene Symbol: EIF3G
  Gene Name: eukaryotic translation initiation factor 3, subunit G
  ENSP ID: ENSP00000465882
MPTGDFDSKPSWADQVEEEGEDDKCVTSELLKGIPLATGDTSPEPELLPGAPLPPPKEVINGNIKTVTEYKIDEDGKKFKVRIVRTFRIETRKASKAVARRKNWKKFGNSEFDPPGPNVATTTVSDDVSMTFITSKEDLNCQEEEDPMNKLKGQKIVSCRICKGDHWTTRCPYKDTLGPMQKELAEQLGLSTGEKEKLPGELEPVQATQNKTGKYVPPSLRDGASRRGESMQPNRRADDNATIRVTNLSEDTRETDLQELFR

SEQ ID NO: 28721 - protein, 149 aa, Homo sapiens
  Payload ID: 5614
  Gene Symbol: EIF3G
  Gene Name: eukaryotic translation initiation factor 3, subunit G
  ENSP ID: ENSP00000465933
MPTGDFDSKPSWADQVEEEGEDDKCVTSELLKGIPLATGDTSPEPELLPGAPLPPPKEVINGNIKTVTEYKIDEDGKKFKIVRTFRIETRKASKAVARRKSVALSPRLKCSGTISTHCNLRLLGSSDSPASASRVAGVTELEEVRELRV

SEQ ID NO: 28722 - protein, 289 aa, Homo sapiens
  Payload ID: 5614
  Gene Symbol: EIF3G
  Gene Name: eukaryotic translation initiation factor 3, subunit G
  ENSP ID: ENSP00000466860
MPTGDFDSKPSWADQVEEEGEDDKCVTSELLKGIPLATGDTSPEPELLPGAPLPPPKEVINGNIKTVTEYKIDEDGKKFKIVRTFRIETRKASKAVARRKNWKKFGNSEFDPPGPNVATTTVSDDVSMTFITSKEDLNCQEEEDPMNKLKGQKIVSCRICKGDHWTTRCPYKDTLGPMQKELAEQLGLSTELEPVQATQNKTGKYVPPSLRDGASRRGESMQPNRRADDNATIRVTNLSEDTRETDLQELFRPFGSISRIYLAKDKTTGQSKGFAFISFHRREDAARAI

SEQ ID NO: 28723 - protein, 52 aa, Homo sapiens
  Payload ID: 5614
  Gene Symbol: EIF3G
  Gene Name: eukaryotic translation initiation factor 3, subunit G
  ENSP ID: ENSP00000466943
MPTGDFDSKPSWADQVEEEGEDDKCVTSELLKGIPLATGDTSPEPELLPGGE

SEQ ID NO: 28724 - protein, 118 aa, Homo sapiens
  Payload ID: 5614
  Gene Symbol: EIF3G
  Gene Name: eukaryotic translation initiation factor 3, subunit G
  ENSP ID: ENSP00000467187
TGEKEKLPGELEPVQATQNKTGKYVPPSLRDGASRRGESMQPNRREDTRETDLQELFRPFGSISRIYLAKDKTTGQSKGFAFISFHRREDAARAIAGVSGFGYDHLILNVEWAKPSTN

SEQ ID NO: 28725 - protein, 227 aa, Homo sapiens
  Payload ID: 5614
  Gene Symbol: EIF3G
  Gene Name: eukaryotic translation initiation factor 3, subunit G
  ENSP ID: ENSP00000468159
MPTGDFDSKPSWADQVEEEGEDDKCVTSELLKGIPLATGDTSPEPELLPGAPLPPPKEVINGNIKTVTEYKIDEDGKKFKIVRTFRIETRKASKAVARRKDLNCQEEEDPMNKLKGQKIVSCRICKGDHWTTRCPYKDTLGPMQKELAEQLGLSTGEKEKLPGELEPVQATQNKTGKYVPPSLRDGASRRGESMQPNRRADDNATIRVTNLSEDTRETDLQELFRPF

SEQ ID NO: 28726 - protein, 40 aa, Homo sapiens
  Payload ID: 5614
  Gene Symbol: EIF3G
  Gene Name: eukaryotic translation initiation factor 3, subunit G
  ENSP ID: ENSP00000468313
MPTGDFDSKPSWADQVEEEGEDGVIPKALPSQLGSSCPWS

SEQ ID NO: 28727 - protein, 366 aa, Homo sapiens
  Payload ID: 5615
  Gene Symbol: EIF3H
  Gene Name: eukaryotic translation initiation factor 3, subunit H
  ENSP ID: ENSP00000276682
MYSRHAQRIPPGKKMASRKEGTGSTATSSSSTAGAAGKGKGKGGSGDSAVKQVQIDGLVVLKIIKHYQEEGQGTEVVQGVLLGLVVEDRLEITNCFPFPQHTEDDADFDEVQYQMEMMRSLRHVNIDHLHVGWYQSTYYGSFVTRALLDSQFSYQHAIEESVVLIYDPIKTAQGSLSLKAYRLTPKLMEVCKEKDFSPEALKKANITFEYMFEEVPIVIKNSHLINVLMWELEKKSAVADKHELLSLASSNHLGKNLQLLMDRVDEMSQDIVKYNTYMRNTSKQQQQKHQYQQRRQQENMQRQSRGEPPLPEEDLSKLFKPPQPPARMDSLLIAGQINTYCQNIKEFTAQNLGKLFMAQALQEYNN

SEQ ID NO: 28728 - protein, 97 aa, Homo sapiens
  Payload ID: 5615
  Gene Symbol: EIF3H
  Gene Name: eukaryotic translation initiation factor 3, subunit H
  ENSP ID: ENSP00000427908
MYSRHAQRIPPGKKMASRKEGTGSTATSSSSTAGAAGKGKGKGGSGDSAVKQVQIDGLVVLKIIKHYQEEGQGTEVVQGVLLGLVVEDRLEITNCFP

SEQ ID NO: 28729 - protein, 244 aa, Homo sapiens
  Payload ID: 5615
  Gene Symbol: EIF3H
  Gene Name: eukaryotic translation initiation factor 3, subunit H
  ENSP ID: ENSP00000428195
MALPSISFGVICQPLEKGTSTHRRRGTGLGGKGSRIWLDTKRVRFTRDSWVVMEASQERDPSWRVQYQMEMMRSLRHVNIDHLHVGWYQSTYYGSFVTRALLDSQFSYQHAIEESVVLIYDPIKTAQGSLSLKAYRLTPKLMEVCKEKDFSPEALKKANITFEYMFEEVPIVIKNSHLINVLMWELEKKSAVADKHELLSLASSNHLGKNLQLLMDRVDEMSQDIVKYNTYMRNTSKQQQQKHQ

SEQ ID NO: 28730 - protein, 235 aa, Homo sapiens
  Payload ID: 5615
  Gene Symbol: EIF3H
  Gene Name: eukaryotic translation initiation factor 3, subunit H
  ENSP ID: ENSP00000428669
MASRKEGTGSTATSSSSTAGAAGKGKGKGGSGDSAVKQVQIDGLFSGQVSSQKPFLDPPKVVLKIIKHYQEEGQGTEVVQGVLLGLVVEDRLEITNCFPFPQHTEDDADFDEVQYQMEMMRSLRHVNIDHLHVGWYQSTYYGSFVTRALLDSQFSYQHAIEESVVLIYDPIKTAQGSLSLKAYRLTPKLMEVCKEKDFSPEALKKANITFEYMFEEVPIVIKNSHLINVLMWELE

SEQ ID NO: 28731 - protein, 170 aa, Homo sapiens
  Payload ID: 5615
  Gene Symbol: EIF3H
  Gene Name: eukaryotic translation initiation factor 3, subunit H
  ENSP ID: ENSP00000428885
MASRKEGTGSTATSSSSTAGAAGKGKGKGGSGDSAVKQVQIDGLVVLKIIKHYQEEGQGTEVVQGVLLGLVVEDRLEITNCFPFPQHTEDDADFDEGSFIVQHTSELRSLLLLSSIPLNVFQYQMEMMRSLRHVNIDHLHVGWYQSTYYGSFVTRALLDSQFSYQHAIEE

SEQ ID NO: 28732 - protein, 56 aa, Homo sapiens
  Payload ID: 5615
  Gene Symbol: EIF3H
  Gene Name: eukaryotic translation initiation factor 3, subunit H
  ENSP ID: ENSP00000429884
MASRKEGTGSTATSSSSTAGAAGKGKGKGGSGDSAVKQVQIDGLGNAFKYVDRKYC

SEQ ID NO: 28733 - protein, 352 aa, Homo sapiens
  Payload ID: 5615
  Gene Symbol: EIF3H
  Gene Name: eukaryotic translation initiation factor 3, subunit H
  Uniprot ID: O15372
  ENSP ID: ENSP00000429931
MASRKEGTGSTATSSSSTAGAAGKGKGKGGSGDSAVKQVQIDGLVVLKIIKHYQEEGQGTEVVQGVLLGLVVEDRLEITNCFPFPQHTEDDADFDEVQYQMEMMRSLRHVNIDHLHVGWYQSTYYGSFVTRALLDSQFSYQHAIEESVVLIYDPIKTAQGSLSLKAYRLTPKLMEVCKEKDFSPEALKKANITFEYMFEEVPIVIKNSHLINVLMWELEKKSAVADKHELLSLASSNHLGKNLQLLMDRVDEMSQDIVKYNTYMRNTSKQQQQKHQYQQRRQQENMQRQSRGEPPLPEEDLSKLFKPPQPPARMDSLLIAGQINTYCQNIKEFTAQNLGKLFMAQALQEYNN

SEQ ID NO: 28734 - protein, 46 aa, Homo sapiens
  Payload ID: 5615
  Gene Symbol: EIF3H
  Gene Name: eukaryotic translation initiation factor 3, subunit H
  ENSP ID: ENSP00000430926
MASRKEGTGSTATSSSSTAGAAGKGKGKGGSGDSAVKQVQIDGLFS

SEQ ID NO: 28735 - protein, 349 aa, Homo sapiens
  Payload ID: 5615
  Gene Symbol: EIF3H
  Gene Name: eukaryotic translation initiation factor 3, subunit H
  ENSP ID: ENSP00000482724
MASRKEGTGSTATSSSSTAGAAGKGKGKGGSGDSAVKQVQIDGLVIIKHYQEEGQGTEVVQGVLLGLVVEDRLEITNCFPFPQHTEDDADFDEVQYQMEMMRSLRHVNIDHLHVGWYQSTYYGSFVTRALLDSQFSYQHAIEESVVLIYDPIKTAQGSLSLKAYRLTPKLMEVCKEKDFSPEALKKANITFEYMFEEVPIVIKNSHLINVLMWELEKKSAVADKHELLSLASSNHLGKNLQLLMDRVDEMSQDIVKYNTYMRNTSKQQQQKHQYQQRRQQENMQRQSRGEPPLPEEDLSKLFKPPQPPARMDSLLIAGQINTYCQNIKEFTAQNLGKLFMAQALQEYNN

SEQ ID NO: 28736 - protein, 125 aa, Homo sapiens
  Payload ID: 5616
  Gene Symbol: EIF3I
  Gene Name: eukaryotic translation initiation factor 3, subunit I
  ENSP ID: ENSP00000347194
MKPILLQGHERSITQIKYNREGDLLFTVAKDPIVNVWYSVNGERLGTYMGHTGAVWCVDADWDTKHVLTGSADNSCRLWDCETGKQLALLKTNSAVRTCGFDFGGNIIMFSTDKQMGYQCFVSFF

SEQ ID NO: 28737 - protein, 325 aa, Homo sapiens
  Payload ID: 5616
  Gene Symbol: EIF3I
  Gene Name: eukaryotic translation initiation factor 3, subunit I
  Uniprot ID: Q13347
  ENSP ID: ENSP00000362688
MKPILLQGHERSITQIKYNREGDLLFTVAKDPIVNVWYSVNGERLGTYMGHTGAVWCVDADWDTKHVLTGSADNSCRLWDCETGKQLALLKTNSAVRTCGFDFGGNIIMFSTDKQMGYQCFVSFFDLRDPSQIDNNEPYMKIPCNDSKITSAVWGPLGECIIAGHESGELNQYSAKSGEVLVNVKEHSRQINDIQLSRDMTMFVTASKDNTAKLFDSTTLEHQKTFRTERPVNSAALSPNYDHVVLGGGQEAMDVTTTSTRIGKFEARFFHLAFEEEFGRVKGHFGPINSVAFHPDGKSYSSGGEDGYVRIHYFDPQYFEFEFEA

SEQ ID NO: 28738 - protein, 258 aa, Homo sapiens
  Payload ID: 5617
  Gene Symbol: EIF3J
  Gene Name: eukaryotic translation initiation factor 3, subunit J
  Uniprot ID: O75822
  ENSP ID: ENSP00000261868
MAAAAAAAGDSDSWDADAFSVEDPVRKVGGGGTAGGDRWEGEDEDEDVKDNWDDDDDEKKEEAEVKPEVKISEKKKIAEKIKEKERQQKKRQEEIKKRLEEPEEPKVLTPEEQLADKLRLKKLQEESDLELAKETFGVNNAVYGIDAMNPSSRDDFTEFGKLLKDKITQYEKSLYYASFLEVLVRDVCISLEIDDLKKITNSLTVLCSEKQKQEKQSKAKKKKKGVVPGGGLKATMKDDLADYGGYDGGYVQDYEDFM

SEQ ID NO: 28739 - protein, 209 aa, Homo sapiens
  Payload ID: 5617
  Gene Symbol: EIF3J
  Gene Name: eukaryotic translation initiation factor 3, subunit J
  Uniprot ID: O75822
  ENSP ID: ENSP00000414548
MAAAAAAAGDSDSWDADAFSVEDPVRKVGGGGTAGGDRWEGEDEDEDVKLEEPEEPKVLTPEEQLADKLRLKKLQEESDLELAKETFGVNNAVYGIDAMNPSSRDDFTEFGKLLKDKITQYEKSLYYASFLEVLVRDVCISLEIDDLKKITNSLTVLCSEKQKQEKQSKAKKKKKGVVPGGGLKATMKDDLADYGGYDGGYVQDYEDFM

SEQ ID NO: 28740 - protein, 204 aa, Homo sapiens
  Payload ID: 5617
  Gene Symbol: EIF3J
  Gene Name: eukaryotic translation initiation factor 3, subunit J
  Uniprot ID: O75822
  ENSP ID: ENSP00000440221
MAAAAAAAGDSDSWDADAFSVEDPVRKVGGGGTAGGDRWEGEDEDEDVKDNWDDDDDEKKEEAEVKPEVKISEKKKIAEKIKEKERQQKKRQEEIKKRLEEPEEPKVLTPEEQLADKLRLKKLQEESDLELAKETFVEIDDLKKITNSLTVLCSEKQKQEKQSKAKKKKKGVVPGGGLKATMKDDLADYGGYDGGYVQDYEDFM

SEQ ID NO: 28741 - protein, 106 aa, Homo sapiens
  Payload ID: 5617
  Gene Symbol: EIF3J
  Gene Name: eukaryotic translation initiation factor 3, subunit J
  ENSP ID: ENSP00000443563
  MOD_RES (1)..(1): Any amino acid
XLQEESDLELAKETFGVNNAVYGIDAMNPSSRDDFTEFGKLLKDKITQYEKSLYYASFLEVLVRDVCISLEIDDLKKITNSLTVLCSEKQKQEKVRASCVGKWVLN

SEQ ID NO: 28742 - protein, 117 aa, Homo sapiens
  Payload ID: 5617
  Gene Symbol: EIF3J
  Gene Name: eukaryotic translation initiation factor 3, subunit J
  ENSP ID: ENSP00000453282
  MOD_RES (1)..(1): Any amino acid
XYGIDAMNPSSRDDFTEFGKLLKDKITQYEKSLYYASFLEVLVRDVCISLEIDDLKKITNSLTVLCSEKQKQEKQSKAKKKKKGVVPGGGLKATMKDDLADYGGYDGGYVQDYEDFM

SEQ ID NO: 28743 - protein, 218 aa, Homo sapiens
  Payload ID: 5618
  Gene Symbol: EIF3K
  Gene Name: eukaryotic translation initiation factor 3, subunit K
  Uniprot ID: Q9UBQ5
  ENSP ID: ENSP00000248342
MAMFEQMRANVGKLLKGIDRYNPENLATLERYVETQAKENAYDLEANLAVLKLYQFNPAFFQTTVTAQILLKALTNLPHTDFTLCKCMIDQAHQEERPIRQILYLGDLLETCHFQAFWQALDENMDLLEGITGFEDSVRKFICHVVGITYQHIDRWLLAEMLGDLSDSQLKVWMSKYGWSADESGQIFICSQEESIKPKNIVEKIDFDSVSSIMASSQ

SEQ ID NO: 28744 - protein, 211 aa, Homo sapiens
  Payload ID: 5618
  Gene Symbol: EIF3K
  Gene Name: eukaryotic translation initiation factor 3, subunit K
  Uniprot ID: Q9UBQ5
  ENSP ID: ENSP00000438145
MAMFEQMRANVGKLLKGIDRYNPENLATLERYVETQAKENAYDLEANLAVLKLYQFNPAFFQTTVTAQILLKALTNLPHTDFTLCKCMIDQAHQEERPIRQILYLGDLLETCHFQAFWQALDENMDLLEGITGFEDSVRKFICHVVGITYQHIDRWLLAEMLGDLSDSQLKVWMSKYGWSADESGQIFICSQEESIKPKNIVEKIDFDSEW

SEQ ID NO: 28745 - protein, 124 aa, Homo sapiens
  Payload ID: 5618
  Gene Symbol: EIF3K
  Gene Name: eukaryotic translation initiation factor 3, subunit K
  ENSP ID: ENSP00000440999
MIDQAHQEERPIRQILYLGDLLETCHFQAFWQALDENMDLLEGITGFEDSVRKFICHVVGITYQHIDRWLLAEMLGDLSDSQLKVWMSKYGWSADESGQIFICSQEESIKPKNIVEKIDFDSEW

SEQ ID NO: 28746 - protein, 131 aa, Homo sapiens
  Payload ID: 5618
  Gene Symbol: EIF3K
  Gene Name: eukaryotic translation initiation factor 3, subunit K
  ENSP ID: ENSP00000465460
MIDQAHQEERPIRQILYLGDLLETCHFQAFWQALDENMDLLEGITGFEDSVRKFICHVVGITYQHIDRWLLAEMLGDLSDSQLKVWMSKYGWSADESGQIFICSQEESIKPKNIVEKIDFDSVSSIMASSQ

SEQ ID NO: 28747 - protein, 170 aa, Homo sapiens
  Payload ID: 5618
  Gene Symbol: EIF3K
  Gene Name: eukaryotic translation initiation factor 3, subunit K
  ENSP ID: ENSP00000467895
MAMFEQMRANVGKLLKGIDRYQFNPAFFQTTVTAQILLKALTNLPHTDFTLCKCMIDQAHQEERPIRQILYLGDLLETCHFQAFWQALDENMDLLEGITGFEDSVRKFICHVVGITYQHIDRWLLAEMLGDLSDSQLKVWMSKYGWSADESGQIFICSQEESIKPKNIVE

SEQ ID NO: 28748 - protein, 192 aa, Homo sapiens
  Payload ID: 5618
  Gene Symbol: EIF3K
  Gene Name: eukaryotic translation initiation factor 3, subunit K
  ENSP ID: ENSP00000468231
MAMFEQMRANVGKLLKGIDRYNPENLATLERYVETQAKENAYDLEANLAVLKLYQFNPAFFQTTVTAQILLKALTNLPHTDFTLCKCMIDQAHQEERPIRQILYLGDLLETCHFQAFWQALDENMDLLEGITGFEDSVRKYSQLKVWMSKYGWSADESGQIFICSQEESIKPKNIVEKIDFDSVSSIMASSQ

SEQ ID NO: 28749 - protein, 137 aa, Homo sapiens
  Payload ID: 5618
  Gene Symbol: EIF3K
  Gene Name: eukaryotic translation initiation factor 3, subunit K
  ENSP ID: ENSP00000468525
MAMFEQMRANVGKLLKGIDRYNPENLATLERYVETQAKENAYDLEANLAVLKLYQFNPAFFQTTVTAQILLKALTNLPHTDFTLCKCMIDQAHQEERPIRQILYLGDLLETCHFQAFWVCPASWPPPSNFRCLIKMC

SEQ ID NO: 28750 - protein, 185 aa, Homo sapiens
  Payload ID: 5618
  Gene Symbol: EIF3K
  Gene Name: eukaryotic translation initiation factor 3, subunit K
  ENSP ID: ENSP00000479334
MAMFEQMRANVGKLLKGIDRYQFNPAFFQTTVTAQILLKALTNLPHTDFTLCKCMIDQAHQEERPIRQILYLGDLLETCHFQAFWQALDENMDLLEGITGFEDSVRKFICHVVGITYQHIDRWLLAEMLGDLSDSQLKVWMSKYGWSADESGQIFICSQEESIKPKNIVEKIDFDSVSSIMASSQ

SEQ ID NO: 28751 - protein, 185 aa, Homo sapiens; identical to SEQ ID NO: 28750
  Payload ID: 5618
  Gene Symbol: EIF3K
  Gene Name: eukaryotic translation initiation factor 3, subunit K
  ENSP ID: ENSP00000488955

SEQ ID NO: 28752 - protein, 192 aa, Homo sapiens; identical to SEQ ID NO: 28748
  Payload ID: 5618
  Gene Symbol: EIF3K
  Gene Name: eukaryotic translation initiation factor 3, subunit K
  ENSP ID: ENSP00000488959

SEQ ID NO: 28753 - protein, 124 aa, Homo sapiens; identical to SEQ ID NO: 28745
  Payload ID: 5618
  Gene Symbol: EIF3K
  Gene Name: eukaryotic translation initiation factor 3, subunit K
  ENSP ID: ENSP00000489153

SEQ ID NO: 28754 - protein, 211 aa, Homo sapiens; identical to SEQ ID NO: 28744
  Payload ID: 5618
  Gene Symbol: EIF3K
  Gene Name: eukaryotic translation initiation factor 3, subunit K
  ENSP ID: ENSP00000489379

SEQ ID NO: 28755 - protein, 218 aa, Homo sapiens; identical to SEQ ID NO: 28743
  Payload ID: 5618
  Gene Symbol: EIF3K
  Gene Name: eukaryotic translation initiation factor 3, subunit K
  ENSP ID: ENSP00000489438

SEQ ID NO: 28756 - protein, 170 aa, Homo sapiens; identical to SEQ ID NO: 28747
  Payload ID: 5618
  Gene Symbol: EIF3K
  Gene Name: eukaryotic translation initiation factor 3, subunit K
  ENSP ID: ENSP00000489493

SEQ ID NO: 28757 - protein, 131 aa, Homo sapiens; identical to SEQ ID NO: 28746
  Payload ID: 5618
  Gene Symbol: EIF3K
  Gene Name: eukaryotic translation initiation factor 3, subunit K
  ENSP ID: ENSP00000489565

SEQ ID NO: 28758 - protein, 137 aa, Homo sapiens; identical to SEQ ID NO: 28749
  Payload ID: 5618
  Gene Symbol: EIF3K
  Gene Name: eukaryotic translation initiation factor 3, subunit K
  ENSP ID: ENSP00000489590

SEQ ID NO: 28759 - protein, 516 aa, Homo sapiens
  Payload ID: 5619
  Gene Symbol: EIF3L
  Gene Name: eukaryotic translation initiation factor 3, subunit L
  Uniprot ID: Q9Y262
  ENSP ID: ENSP00000371099
MSYPADDYESEAAYDPYAYPSDYDMHTGDPKQDLAYERQYEQQTYQVIPEVIKNFIQYFHKTVSDLIDQKVYELQASRVSSDVIDQKVYEIQDIYENSWTKLTERFFKNTPWPEAEAIAPQVGNDAVFLILYKELYYRHIYAKVSFQSFSQYRCKTAKKSEEEIDFLRSNPKIWNVHSVLNVLHSLVDKSNINRQLEVYTSGGDPESVAGEYGRHSLYKMLGYFSLVGLLRLHSLLGDYYQAIKVLENIELNKKSMYSRVPECQVTTYYYVGFAYLMMRRYQDAIRVFANILLYIQRTKSMFQRTTYKYEMINKQNEQMHALLAIALTMYPMRIDESIHLQLREKYGDKMLRMQKGDPQVYEELFSYSCPKFLSPVVPNYDNVHPNYHKEPFLQQLKVFSDEVQQQAQLSTIRSFLKLYTTMPVAKLAGFLDLTEQEFRIQLLVFKHKMKNLVWTSGISALDGEFQSASEVDFYIDKDMIHIADTKVARRYGDFFIRQIHKFEELNRTLKKMGQRP

SEQ ID NO: 28760 - protein, 466 aa, Homo sapiens
  Payload ID: 5619
  Gene Symbol: EIF3L
  Gene Name: eukaryotic translation initiation factor 3, subunit L
  ENSP ID: ENSP00000384634
MSYRPVVSPVMSLTRRCMRSRTSMRTDAVFLILYKELYYRHIYAKVSGGPSLEQRFESYYNYCNLFNYILNADGPAPLELPNQWLWDIIDEFIYQFQSFSQYRCKTAKKSEEEIDFLRSNPKIWNVHSVLNVLHSLVDKSNINRQLEVYTSGGDPESVAGEYGRHSLYKMLGYFSLVGLLRLHSLLGDYYQAIKVLENIELNKKSMYSRVPECQVTTYYYVGFAYLMMRRYQDAIRVFANILLYIQRTKSMFQRTTYKYEMINKQNEQMHALLAIALTMYPMRIDESIHLQLREKYGDKMLRMQKGDPQVYEELFSYSCPKFLSPVVPNYDNVHPNYHKEPFLQQLKVFSDEVQQQAQLSTIRSFLKLYTTMPVAKLAGFLDLTEQEFRIQLLVFKHKMKNLVWTSGISALDGEFQSASEVDFYIDKDMIHIADTKVARRYGDFFIRQIHKFEELNRTLKKMGQRP

SEQ ID NO: 28761 - protein, 150 aa, Homo sapiens
  Payload ID: 5619
  Gene Symbol: EIF3L
  Gene Name: eukaryotic translation initiation factor 3, subunit L
  ENSP ID: ENSP00000390271
MHTGDPKQDLAYERQYEQQTYQVIPEVIKNFIQYFHKTVSDLIDQKVYELQASRVSSDVIDQKVYEIQDIYENSWTKLTERFFKNTPWPEAEAIAPQVGNDAVFLILYKELYYRHIYAKVSGGPSLEQRFESYYNYCNLFNYILNADGPA

SEQ ID NO: 28762 - protein, 183 aa, Homo sapiens
  Payload ID: 5619
  Gene Symbol: EIF3L
  Gene Name: eukaryotic translation initiation factor 3, subunit L
  ENSP ID: ENSP00000393822
MSYPADDYESEAAYDPYAYPSDYDMHTETRFRRVVQAGLELLTSGDPKQDLAYERQYEQQTYQVIPEVIKNFIQYFHKTVSDLIDQKVYELQASRVSSDVIDQKVYEIQDIYENSWTKLTERFFKNTPWPEAEAIAPQVGNDAVFLILYKELYYRHIYAKVSGGPSLEQRFESYYNYCNLFNY

SEQ ID NO: 28763 - protein, 40 aa, Homo sapiens
  Payload ID: 5619
  Gene Symbol: EIF3L
  Gene Name: eukaryotic translation initiation factor 3, subunit L
  ENSP ID: ENSP00000398176
FPAVLASEAAMSYPADDYESEEIQSRTLLMNVSMNSKPIR

SEQ ID NO: 28764 - protein, 127 aa, Homo sapiens
  Payload ID: 5619
  Gene Symbol: EIF3L
  Gene Name: eukaryotic translation initiation factor 3, subunit L
  ENSP ID: ENSP00000410576
ISLFPAVLASEAAMSYPADDYESEAAYDPYAYPSDYDMHTGDPKQDLAYERQYEQQTYQVIPEVIKNFIQYFHKTVSDLIDQKVYELQASRVSSDVIDQKVYEIQDIYENRYGLLAERASFWVGLAW

SEQ ID NO: 28765 - protein, 109 aa, Homo sapiens
  Payload ID: 5619
  Gene Symbol: EIF3L
  Gene Name: eukaryotic translation initiation factor 3, subunit L
  ENSP ID: ENSP00000412349
QLLVFKHKMKNLVWTSGISALDGEFQSASEVDFYIDKDMIHIADTKVARRYGDFFIRQIHKFEEMESCAVTHAGVQRRDLSSLQPLPPGFKRVSLLSLPHSWNYSLIEP

SEQ ID NO: 28766 - protein, 607 aa, Homo sapiens
  Payload ID: 5619
  Gene Symbol: EIF3L
  Gene Name: eukaryotic translation initiation factor 3, subunit L
  ENSP ID: ENSP00000416892
MARGLGKASGFPAGPSGAELPASGRRRGPLISLFPAVLASEAAMSYPADDYESEAAYDPYAYPSDYDMHTGDPKQDLAYERQYEQQTYQVIPEVIKNFIQYFHKTVSDLIDQKVYELQASRVSSDVIDQKVYEIQDIYENSWTKLTERFFKNTPWPEAEAIAPQVGNDAVFLILYKELYYRHIYAKVSGGPSLEQRFESYYNYCNLFNYILNADGPAPLELPNQWLWDIIDEFIYQFQSFSQYRCKTAKKSEEEIDFLRSNPKIWNVHSVLNVLHSLVDKSNINRQLEVYTSGGDPESVAGEYGRHSLYKMLGYFSLVGLLRLHSLLGDYYQAIKVLENIELNKKSMYSRVPECQVTTYYYVGFAYLMMRRYQDAIRVFANILLYIQRTKSMFQRTTYKYEMINKQNEQMHALLAIALTMYPMRIDESIHLQLREKYGDKMLRMQKGDPQVYEELFSYSCPKFLSPVVPNYDNVHPNYHKEPFLQQLKVFSDEVQQQAQLSTIRSFLKLYTTMPVAKLAGFLDLTEQEFRIQLLVFKHKMKNLVWTSGISALDGEFQSASEVDFYIDKDMIHIADTKVARRYGDFFIRQIHKFEELNRTLKKMGQRP

SEQ ID NO: 28767 - protein, 564 aa, Homo sapiens
  Payload ID: 5619
  Gene Symbol: EIF3L
  Gene Name: eukaryotic translation initiation factor 3, subunit L
  Uniprot ID: Q9Y262
  ENSP ID: ENSP00000485663
MSYPADDYESEAAYDPYAYPSDYDMHTGDPKQDLAYERQYEQQTYQVIPEVIKNFIQYFHKTVSDLIDQKVYELQASRVSSDVIDQKVYEIQDIYENSWTKLTERFFKNTPWPEAEAIAPQVGNDAVFLILYKELYYRHIYAKVSGGPSLEQRFESYYNYCNLFNYILNADGPAPLELPNQWLWDIIDEFIYQFQSFSQYRCKTAKKSEEEIDFLRSNPKIWNVHSVLNVLHSLVDKSNINRQLEVYTSGGDPESVAGEYGRHSLYKMLGYFSLVGLLRLHSLLGDYYQAIKVLENIELNKKSMYSRVPECQVTTYYYVGFAYLMMRRYQDAIRVFANILLYIQRTKSMFQRTTYKYEMINKQNEQMHALLAIALTMYPMRIDESIHLQLREKYGDKMLRMQKGDPQVYEELFSYSCPKFLSPVVPNYDNVHPNYHKEPFLQQLKVFSDEVQQQAQLSTIRSFLKLYTTMPVAKLAGFLDLTEQEFRIQLLVFKHKMKNLVWTSGISALDGEFQSASEVDFYIDKDMIHIADTKVARRYGDFFIRQIHKFEELNRTLKKMGQRP

SEQ ID NO: 28768 - protein, 191 aa, Homo sapiens
  Payload ID: 5620
  Gene Symbol: EIF3M
  Gene Name: eukaryotic translation initiation factor 3, subunit M
  ENSP ID: ENSP00000319910
MNSVVSLLLILEPDKQEALIESLCEKLVKFREGERPSLRLQLLSNLFHGMDKNTPVRYTVYCSLIKVAASCGAIQYIPTELDQVRKWISDWNLTTEKKHTLLRLLYEALVDCKKSDAASKVMVELLGSYTEDNASQARVDAHRCIVRALKDPNAFLFDHLLTLKPVKFLEGELIHDLLTIFVSAKLASYVK

SEQ ID NO: 28769 - protein, 220 aa, Homo sapiens
  Payload ID: 5620
  Gene Symbol: EIF3M
  Gene Name: eukaryotic translation initiation factor 3, subunit M
  ENSP ID: ENSP00000432139
KKHTLLRLLYEALVDCKKSDAASKVMVELLGSYTEDNASQARVDAHRCIVRALKDPNAFLFDHLLTLKPVKFLEGELIHDLLTIFVSAKLASYVKFYQNNKDFIDSLGLLHEQNMAKMRLLTFMGMAVENKEISFDTMQQELQIGADDVEAFVIDAVRTKMVYCKIDQTQRKVVVSCSGELEGLGSICHSTHRTFGKQQWQQLYDTLNAWKQNLNKVKNS

SEQ ID NO: 28770 - protein, 59 aa, Homo sapiens
  Payload ID: 5620
  Gene Symbol: EIF3M
  Gene Name: eukaryotic translation initiation factor 3, subunit M
  ENSP ID: ENSP00000432286
MSVPAFIDISEEDQAAELRAYLKSKGAEISEENSEGGLHVDLAQIIEACDVCLKEDDKG

SEQ ID NO: 28771 - protein, 102 aa, Homo sapiens
  Payload ID: 5620
  Gene Symbol: EIF3M
  Gene Name: eukaryotic translation initiation factor 3, subunit M
  ENSP ID: ENSP00000432891
MNSVVSLLLILEPDKQEALIESLCEKLVKFREGERPSLRLQLLSNLFHGMDKNTPVRYTVYCSLIKVAASCGAIQYIPTELDQVRKWISDWNLTTEKKHTLL

SEQ ID NO: 28772 - protein, 74 aa, Homo sapiens
  Payload ID: 5620
  Gene Symbol: EIF3M
  Gene Name: eukaryotic translation initiation factor 3, subunit M
  ENSP ID: ENSP00000434080
MSVPAFIDISEEDQVRKWISDWNLTTEKKHTLLRLLYEALVDCKKSDAASKVMVELLGSYTEDNASQARVDAHR

SEQ ID NO: 28773 - protein, 123 aa, Homo sapiens
  Payload ID: 5620
  Gene Symbol: EIF3M
  Gene Name: eukaryotic translation initiation factor 3, subunit M
  ENSP ID: ENSP00000435501
MSVPAFIDISEEDQAAELRAYLKSKGAEISEENSEGGLHVDLAQIIEACDVCLKEDDKDVESVMNSVVSLLLILEPDKQEALIESLCEKLVKFREGERPSLRLQLLENGFLTGISPLKKSTPF

SEQ ID NO: 28774 - protein, 30 aa, Homo sapiens
  Payload ID: 5620
  Gene Symbol: EIF3M
  Gene Name: eukaryotic translation initiation factor 3, subunit M
  ENSP ID: ENSP00000435834
MSVPAFIDISEEDQELRFQKRTRKVDFMLI

SEQ ID NO: 28775 - protein, 374 aa, Homo sapiens
  Payload ID: 5620
  Gene Symbol: EIF3M
  Gene Name: eukaryotic translation initiation factor 3, subunit M
  Uniprot ID: Q7L2H7
  ENSP ID: ENSP00000436049
MSVPAFIDISEEDQAAELRAYLKSKGAEISEENSEGGLHVDLAQIIEACDVCLKEDDKDVESVMNSVVSLLLILEPDKQEALIESLCEKLVKFREGERPSLRLQLLSNLFHGMDKNTPVRYTVYCSLIKVAASCGAIQYIPTELDQVRKWISDWNLTTEKKHTLLRLLYEALVDCKKSDAASKVMVELLGSYTEDNASQARVDAHRCIVRALKDPNAFLFDHLLTLKPVKFLEGELIHDLLTIFVSAKLASYVKFYQNNKDFIDSLGLLHEQNMAKMRLLTFMGMAVENKEISFDTMQQELQIGADDVEAFVIDAVRTKMVYCKIDQTQRKVVVSHSTHRTFGKQQWQQLYDTLNAWKQNLNKVKNSLLSLSDT

SEQ ID NO: 28776 - protein, 242 aa, Homo sapiens
  Payload ID: 5620
  Gene Symbol: EIF3M
  Gene Name: eukaryotic translation initiation factor 3, subunit M
  Uniprot ID: Q7L2H7
  ENSP ID: ENSP00000436787
MSVPAFIDISEEDQVRKWISDWNLTTEKKHTLLRLLYEALVDCKKSDAASKVMVELLGSYTEDNASQARVDAHRCIVRALKDPNAFLFDHLLTLKPVKFLEGELIHDLLTIFVSAKLASYVKFYQNNKDFIDSLGLLHEQNMAKMRLLTFMGMAVENKEISFDTMQQELQIGADDVEAFVIDAVRTKMVYCKIDQTQRKVVVSHSTHRTFGKQQWQQLYDTLNAWKQNLNKVKNSLLSLSDT

SEQ ID NO: 28777 - protein, 1599 aa, Homo sapiens
  Payload ID: 5621
  Gene Symbol: EIF4G1
  Gene Name: eukaryotic translation initiation factor 4 gamma, 1
  Uniprot ID: Q04637
  ENSP ID: ENSP00000316879
MNKAPQSTGPPPAPSPGLPQPAFPPGQTAPVVFSTPQATQMNTPSQPRQHFYPSRAQPPSSAASRVQSAAPARPGPAAHVYPAGSQVMMIPSQISYPASQGAYYIPGQGRSTYVVPTQQYPVQPGAPGFYPGASPTEFGTYAGAYYPAQGVQQFPTGVAPTPVLMNQPPQIAPKRERKTIRIRDPNQGGKDITEEIMSGARTASTPTPPQTGGGLEPQANGETPQVAVIVRPDDRSQGAIIADRPGLPGPEHSPSESQPSSPSPTPSPSPVLEPGSEPNLAVLSIPGDTMTTIQMSVEESTPISRETGEPYRLSPEPTPLAEPILEVEVTLSKPVPESEFSSSPLQAPTPLASHTVEIHEPNGMVPSEDLEPEVESSPELAPPPACPSESPVPIAPTAQPEELLNGAPSPPAVDLSPVSEPEEQAKEVTASMAPPTIPSATPATAPSATSPAQEEEMEEEEEEEEGEAGEAGEAESEKGGEELLPPESTPIPANLSQNLEAAAATQVAVSVPKRRRKIKELNKKEAVGDLLDAFKEANPAVPEVENQPPAGSNPGPESEGSGVPPRPEEADETWDSKEDKIHNAENIQPGEQKYEYKSDQWKPLNLEEKKRYDREFLLGFQFIFASMQKPEGLPHISDVVLDKANKTPLRPLDPTRLQGINCGPDFTPSFANLGRTTLSTRGPPRGGPGGELPRGPAGLGPRRSQQGPRKEPRKIIATVLMTEDIKLNKAEKAWKPSSKRTAADKDRGEEDADGSKTQDLFRRVRSILNKLTPQMFQQLMKQVTQLAIDTEERLKGVIDLIFEKAISEPNFSVAYANMCRCLMALKVPTTEKPTVTVNFRKLLLNRCQKEFEKDKDDDEVFEKKQKEMDEAATAEERGRLKEELEEARDIARRRSLGNIKFIGELFKLKMLTEAIMHDCVVKLLKNHDEESLECLCRLLTTIGKDLDFEKAKPRMDQYFNQMEKIIKEKKTSSRIRFMLQDVLDLRGSNWVPRRGDQGPKTIDQIHKEAEMEEHREHIKVQQLMAKGSDKRRGGPPGPPISRGLPLVDDGGWNTVPISKGSRPIDTSRLTKITKPGSIDSNNQLFAPGGRLSWGKGSSGGSGAKPSDAASEAARPATSTLNRFSALQQAVPTESTDNRRVVQRSSLSRERGEKAGDRGDRLERSERGGDRGDRLDRARTPATKRSFSKEVEERSRERPSQPEGLRKAASLTEDRDRGRDAVKREAALPPVSPLKAALSEEELEKKSKAIIEEYLHLNDMKEAVQCVQELASPSLLFIFVRHGVESTLERSAIAREHMGQLLHQLLCAGHLSTAQYYQGLYEILELAEDMEIDIPHVWLYLAELVTPILQEGGVPMGELFREITKPLRPLGKAASLLLEILGLLCKSMGPKKVGTLWREAGLSWKEFLPEGQDIGAFVAEQKVEYTLGEESEAPGQRALPSEELNRQLEKLLKEGSSNQRVFDWIEANLSEQQIVSNTLVRALMTAVCYSAIIFETPLRVDVAVLKARAKLLQKYLCDEQKELQALYALQALVVTLEQPPNLLRMFFDALYDEDVVKEDAFYSWESSKDPAEQQGKGVALKSVTAFFKWLREAEEESDHN

SEQ ID NO: 28778 - protein, 1435 aa, Homo sapiens
  Payload ID: 5621
  Gene Symbol: EIF4G1
  Gene Name: eukaryotic translation initiation factor 4 gamma, 1
  Uniprot ID: Q04637
  ENSP ID: ENSP00000317600
MNQPPQIAPKRERKTIRIRDPNQGGKDITEEIMSGARTASTPTPPQTGGGLEPQANGETPQVAVIVRPDDRSQGAIIADRPGLPGPEHSPSESQPSSPSPTPSPSPVLEPGSEPNLAVLSIPGDTMTTIQMSVEESTPISRETGEPYRLSPEPTPLAEPILEVEVTLSKPVPESEFSSSPLQAPTPLASHTVEIHEPNGMVPSEDLEPEVESSPELAPPPACPSESPVPIAPTAQPEELLNGAPSPPAVDLSPVSEPEEQAKEVTASMAPPTIPSATPATAPSATSPAQEEEMEEEEEEEEGEAGEAGEAESEKGGEELLPPESTPIPANLSQNLEAAAATQVAVSVPKRRRKIKELNKKEAVGDLLDAFKEANPAVPEVENQPPAGSNPGPESEGSGVPPRPEEADETWDSKEDKIHNAENIQPGEQKYEYKSDQWKPLNLEEKKRYDREFLLGFQFIFASMQKPEGLPHISDVVLDKANKTPLRPLDPTRLQGINCGPDFTPSFANLGRTTLSTRGPPRGGPGGELPRGPAGLGPRRSQQGPRKEPRKIIATVLMTEDIKLNKAEKAWKPSSKRTAADKDRGEEDADGSKTQDLFRRVRSILNKLTPQMFQQLMKQVTQLAIDTEERLKGVIDLIFEKAISEPNFSVAYANMCRCLMALKVPTTEKPTVTVNFRKLLLNRCQKEFEKDKDDDEVFEKKQKEMDEAATAEERGRLKEELEEARDIARRRSLGNIKFIGELFKLKMLTEAIMHDCVVKLLKNHDEESLECLCRLLTTIGKDLDFEKAKPRMDQYFNQMEKIIKEKKTSSRIRFMLQDVLDLRGSNWVPRRGDQGPKTIDQIHKEAEMEEHREHIKVQQLMAKGSDKRRGGPPGPPISRGLPLVDDGGWNTVPISKGSRPIDTSRLTKITKPGSIDSNNQLFAPGGRLSWGKGSSGGSGAKPSDAASEAARPATSTLNRFSALQQAVPTESTDNRRVVQRSSLSRERGEKAGDRGDRLERSERGGDRGDRLDRARTPATKRSFSKEVEERSRERPSQPEGLRKAASLTEDRDRGRDAVKREAALPPVSPLKAALSEEELEKKSKAIIEEYLHLNDMKEAVQCVQELASPSLLFIFVRHGVESTLERSAIAREHMGQLLHQLLCAGHLSTAQYYQGLYEILELAEDMEIDIPHVWLYLAELVTPILQEGGVPMGELFREITKPLRPLGKAASLLLEILGLLCKSMGPKKVGTLWREAGLSWKEFLPEGQDIGAFVAEQKVEYTLGEESEAPGQRALPSEELNRQLEKLLKEGSSNQRVFDWIEANLSEQQIVSNTLVRALMTAVCYSAIIFETPLRVDVAVLKARAKLLQKYLCDEQKELQALYALQALVVTLEQPPNLLRMFFDALYDEDVVKEDAFYSWESSKDPAEQQGKGVALKSVTAFFKWLREAEEESDHN

SEQ ID NO: 28779 - protein, 1395 aa, Homo sapiens
  Payload ID: 5621
  Gene Symbol: EIF4G1
  Gene Name: eukaryotic translation initiation factor 4 gamma, 1
  ENSP ID: ENSP00000323737
MSGARTASTPTPPQTGGGLEPQANGETPQVAVIVRPDDRSQGAIIADRPGLPGPEHSPSESQPSSPSPTPSPSPVLEPGSEPNLAVLSIPGDTMTTIQMSVEESTPISRETGEPYRLSPEPTPLAEPILEVEVTLSKPVPESEFSSSPLQAPTPLASHTVEIHEPNGMVPSEDLEPEVESSPELAPPPACPSESPVPIAPTAQPEELLNGAPSPPAVDLSPVSEPEEQAKEVTASMAPPTIPSATPATAPSATSPAQEEEMEEEEEEEEGEAGEAGEAESEKGGEELLPPESTPIPANLSQNLEAAAATQVAVSVPKRRRKIKELNKKEAVGDLLDAFKEANPAVPEVENQPPAGSNPGPESEGSGVPPRPEEADETWDSKEDKIHNAENIQPGEQKYEYKSDQWKPLNLEEKKRYDREFLLGFQFIFASMQKPEGLPHISDVVLDKANKTPLRPLDPTRLQGINCGPDFTPSFANLGRTTLSTRGPPRGGPGGELPRGPQAGLGPRRSQQGPRKEPRKIIATVLMTEDIKLNKAEKAWKPSSKRTAADKDRGEEDADGSKTQDLFRRVRSILNKLTPQMFQQLMKQVTQLAIDTENASKGSLTSFLRRPFQSPTSLWPMQHVPLPHGAESAHYGKPTVTVNFRKLLLNRCQKEFEKDKDDDEVFEKKQKEMDEAATAEERGRLKEELEEARDIARRRSLGNIKFIGELFKLKMLTEAIMHDCVVKLLKNHDEESLECLCRLLTTIGKDLDFEKAKPRMDQYFNQMEKIIKEKKTSSRIRFMLQDVLDLRGSNWVPRRGDQGPRPLTRSIRRLRWKTSRAHQSAAAHPRAVTSVGAVLQALPSAVDFPLWMMVANTVPISKGSRPIDTSRLTKITKPGSIDSNNQLFAPGGRLSWGKGSSGGSGAKPSDAASEAARPATSTLNRFSALQQAVPTESTDNRRVVQRSSLSRERGEKAGDRGDRLERVNGEGTVGTGLIVRTPATKRSFSKEVEERSRERPSQPEGLRKAASLTEDRDRGRDAVKREAALPPVSPLKAALSEEELEKKSKAIIEEYLHLNDMKEAVQCVQELASPSLLFIFVRHGVESTLERSAIAREHMGQLLHQLLCAGHLSTAQYYQGLYEILELAEDMEIDIPHVWLYLAELVTPILQEGGVPMGELFREITKPLRPLGKAASLLLEILGLLCKSMGPKKVGTLWREAGLSWKEFLPEGQDIGAFVAEQKVEYTLGEESEAPGQRALPSEELNRQLEKLLKEGSSNQRVFDWIEANLSEQQIVSNTLVRALMTAVCYSAIIFETPLRVDVAVLKARAKLLQKYLCDEEGATGALRLQALVVTLEQPPNLLRMFFDALYDEDVVKEDAFYSWESSKDPAEQQGKGVALKSVTAFFKWLREAGGV

SEQ ID NO: 28780 - protein, 1606 aa, Homo sapiens
  Payload ID: 5621
  Gene Symbol: EIF4G1
  Gene Name: eukaryotic translation initiation factor 4 gamma, 1
  Uniprot ID: Q04637
  ENSP ID: ENSP00000338020
MNKAPQSTGPPPAPSPGLPQPAFPPGQTAPVVFSTPQATQMNTPSQPRQGGFRSLQHFYPSRAQPPSSAASRVQSAAPARPGPAAHVYPAGSQVMMIPSQISYPASQGAYYIPGQGRSTYVVPTQQYPVQPGAPGFYPGASPTEFGTYAGAYYPAQGVQQFPTGVAPTPVLMNQPPQIAPKRERKTIRIRDPNQGGKDITEEIMSGARTASTPTPPQTGGGLEPQANGETPQVAVIVRPDDRSQGAIIADRPGLPGPEHSPSESQPSSPSPTPSPSPVLEPGSEPNLAVLSIPGDTMTTIQMSVEESTPISRETGEPYRLSPEPTPLAEPILEVEVTLSKPVPESEFSSSPLQAPTPLASHTVEIHEPNGMVPSEDLEPEVESSPELAPPPACPSESPVPIAPTAQPEELLNGAPSPPAVDLSPVSEPEEQAKEVTASMAPPTIPSATPATAPSATSPAQEEEMEEEEEEEEGEAGEAGEAESEKGGEELLPPESTPIPANLSQNLEAAAATQVAVSVPKRRRKIKELNKKEAVGDLLDAFKEANPAVPEVENQPPAGSNPGPESEGSGVPPRPEEADETWDSKEDKIHNAENIQPGEQKYEYKSDQWKPLNLEEKKRYDREFLLGFQFIFASMQKPEGLPHISDVVLDKANKTPLRPLDPTRLQGINCGPDFTPSFANLGRTTLSTRGPPRGGPGGELPRGPAGLGPRRSQQGPRKEPRKIIATVLMTEDIKLNKAEKAWKPSSKRTAADKDRGEEDADGSKTQDLFRRVRSILNKLTPQMFQQLMKQVTQLAIDTEERLKGVIDLIFEKAISEPNFSVAYANMCRCLMALKVPTTEKPTVTVNFRKLLLNRCQKEFEKDKDDDEVFEKKQKEMDEAATAEERGRLKEELEEARDIARRRSLGNIKFIGELFKLKMLTEAIMHDCVVKLLKNHDEESLECLCRLLTTIGKDLDFEKAKPRMDQYFNQMEKIIKEKKTSSRIRFMLQDVLDLRGSNWVPRRGDQGPKTIDQIHKEAEMEEHREHIKVQQLMAKGSDKRRGGPPGPPISRGLPLVDDGGWNTVPISKGSRPIDTSRLTKITKPGSIDSNNQLFAPGGRLSWGKGSSGGSGAKPSDAASEAARPATSTLNRFSALQQAVPTESTDNRRVVQRSSLSRERGEKAGDRGDRLERSERGGDRGDRLDRARTPATKRSFSKEVEERSRERPSQPEGLRKAASLTEDRDRGRDAVKREAALPPVSPLKAALSEEELEKKSKAIIEEYLHLNDMKEAVQCVQELASPSLLFIFVRHGVESTLERSAIAREHMGQLLHQLLCAGHLSTAQYYQGLYEILELAEDMEIDIPHVWLYLAELVTPILQEGGVPMGELFREITKPLRPLGKAASLLLEILGLLCKSMGPKKVGTLWREAGLSWKEFLPEGQDIGAFVAEQKVEYTLGEESEAPGQRALPSEELNRQLEKLLKEGSSNQRVFDWIEANLSEQQIVSNTLVRALMTAVCYSAIIFETPLRVDVAVLKARAKLLQKYLCDEQKELQALYALQALVVTLEQPPNLLRMFFDALYDEDVVKEDAFYSWESSKDPAEQQGKGVALKSVTAFFKWLREAEEESDHN

SEQ ID NO: 28781 - protein, 1600 aa, Homo sapiens
  Payload ID: 5621
  Gene Symbol: EIF4G1
  Gene Name: eukaryotic translation initiation factor 4 gamma, 1
  Uniprot ID: Q04637
  ENSP ID: ENSP00000343450
MNKAPQSTGPPPAPSPGLPQPAFPPGQTAPVVFSTPQATQMNTPSQPRQHFYPSRAQPPSSAASRVQSAAPARPGPAAHVYPAGSQVMMIPSQISYPASQGAYYIPGQGRSTYVVPTQQYPVQPGAPGFYPGASPTEFGTYAGAYYPAQGVQQFPTGVAPTPVLMNQPPQIAPKRERKTIRIRDPNQGGKDITEEIMSGARTASTPTPPQTGGGLEPQANGETPQVAVIVRPDDRSQGAIIADRPGLPGPEHSPSESQPSSPSPTPSPSPVLEPGSEPNLAVLSIPGDTMTTIQMSVEESTPISRETGEPYRLSPEPTPLAEPILEVEVTLSKPVPESEFSSSPLQAPTPLASHTVEIHEPNGMVPSEDLEPEVESSPELAPPPACPSESPVPIAPTAQPEELLNGAPSPPAVDLSPVSEPEEQAKEVTASMAPPTIPSATPATAPSATSPAQEEEMEEEEEEEEGEAGEAGEAESEKGGEELLPPESTPIPANLSQNLEAAAATQVAVSVPKRRRKIKELNKKEAVGDLLDAFKEANPAVPEVENQPPAGSNPGPESEGSGVPPRPEEADETWDSKEDKIHNAENIQPGEQKYEYKSDQWKPLNLEEKKRYDREFLLGFQFIFASMQKPEGLPHISDVVLDKANKTPLRPLDPTRLQGINCGPDFTPSFANLGRTTLSTRGPPRGGPGGELPRGPQAGLGPRRSQQGPRKEPRKIIATVLMTEDIKLNKAEKAWKPSSKRTAADKDRGEEDADGSKTQDLFRRVRSILNKLTPQMFQQLMKQVTQLAIDTEERLKGVIDLIFEKAISEPNFSVAYANMCRCLMALKVPTTEKPTVTVNFRKLLLNRCQKEFEKDKDDDEVFEKKQKEMDEAATAEERGRLKEELEEARDIARRRSLGNIKFIGELFKLKMLTEAIMHDCVVKLLKNHDEESLECLCRLLTTIGKDLDFEKAKPRMDQYFNQMEKIIKEKKTSSRIRFMLQDVLDLRGSNWVPRRGDQGPKTIDQIHKEAEMEEHREHIKVQQLMAKGSDKRRGGPPGPPISRGLPLVDDGGWNTVPISKGSRPIDTSRLTKITKPGSIDSNNQLFAPGGRLSWGKGSSGGSGAKPSDAASEAARPATSTLNRFSALQQAVPTESTDNRRVVQRSSLSRERGEKAGDRGDRLERSERGGDRGDRLDRARTPATKRSFSKEVEERSRERPSQPEGLRKAASLTEDRDRGRDAVKREAALPPVSPLKAALSEEELEKKSKAIIEEYLHLNDMKEAVQCVQELASPSLLFIFVRHGVESTLERSAIAREHMGQLLHQLLCAGHLSTAQYYQGLYEILELAEDMEIDIPHVWLYLAELVTPILQEGGVPMGELFREITKPLRPLGKAASLLLEILGLLCKSMGPKKVGTLWREAGLSWKEFLPEGQDIGAFVAEQKVEYTLGEESEAPGQRALPSEELNRQLEKLLKEGSSNQRVFDWIEANLSEQQIVSNTLVRALMTAVCYSAIIFETPLRVDVAVLKARAKLLQKYLCDEQKELQALYALQALVVTLEQPPNLLRMFFDALYDEDVVKEDAFYSWESSKDPAEQQGKGVALKSVTAFFKWLREAEEESDHN

SEQ ID NO: 28782 - protein, 1606 aa, Homo sapiens; identical to SEQ ID NO: 28780
  Payload ID: 5621
  Gene Symbol: EIF4G1
  Gene Name: eukaryotic translation initiation factor 4 gamma, 1
  Uniprot ID: Q04637
  ENSP ID: ENSP00000371767

SEQ ID NO: 28783 - protein, 1512 aa, Homo sapiens
  Payload ID: 5621
  Gene Symbol: EIF4G1
  Gene Name: eukaryotic translation initiation factor 4 gamma, 1
  Uniprot ID: Q04637
  ENSP ID: ENSP00000376320
MMIPSQISYPASQGAYYIPGQGRSTYVVPTQQYPVQPGAPGFYPGASPTEFGTYAGAYYPAQGVQQFPTGVAPTPVLMNQPPQIAPKRERKTIRIRDPNQGGKDITEEIMSGARTASTPTPPQTGGGLEPQANGETPQVAVIVRPDDRSQGAIIADRPGLPGPEHSPSESQPSSPSPTPSPSPVLEPGSEPNLAVLSIPGDTMTTIQMSVEESTPISRETGEPYRLSPEPTPLAEPILEVEVTLSKPVPESEFSSSPLQAPTPLASHTVEIHEPNGMVPSEDLEPEVESSPELAPPPACPSESPVPIAPTAQPEELLNGAPSPPAVDLSPVSEPEEQAKEVTASMAPPTIPSATPATAPSATSPAQEEEMEEEEEEEEGEAGEAGEAESEKGGEELLPPESTPIPANLSQNLEAAAATQVAVSVPKRRRKIKELNKKEAVGDLLDAFKEANPAVPEVENQPPAGSNPGPESEGSGVPPRPEEADETWDSKEDKIHNAENIQPGEQKYEYKSDQWKPLNLEEKKRYDREFLLGFQFIFASMQKPEGLPHISDVVLDKANKTPLRPLDPTRLQGINCGPDFTPSFANLGRTTLSTRGPPRGGPGGELPRGPAGLGPRRSQQGPRKEPRKIIATVLMTEDIKLNKAEKAWKPSSKRTAADKDRGEEDADGSKTQDLFRRVRSILNKLTPQMFQQLMKQVTQLAIDTEERLKGVIDLIFEKAISEPNFSVAYANMCRCLMALKVPTTEKPTVTVNFRKLLLNRCQKEFEKDKDDDEVFEKKQKEMDEAATAEERGRLKEELEEARDIARRRSLGNIKFIGELFKLKMLTEAIMHDCVVKLLKNHDEESLECLCRLLTTIGKDLDFEKAKPRMDQYFNQMEKIIKEKKTSSRIRFMLQDVLDLRGSNWVPRRGDQGPKTIDQIHKEAEMEEHREHIKVQQLMAKGSDKRRGGPPGPPISRGLPLVDDGGWNTVPISKGSRPIDTSRLTKITKPGSIDSNNQLFAPGGRLSWGKGSSGGSGAKPSDAASEAARPATSTLNRFSALQQAVPTESTDNRRVVQRSSLSRERGEKAGDRGDRLERSERGGDRGDRLDRARTPATKRSFSKEVEERSRERPSQPEGLRKAASLTEDRDRGRDAVKREAALPPVSPLKAALSEEELEKKSKAIIEEYLHLNDMKEAVQCVQELASPSLLFIFVRHGVESTLERSAIAREHMGQLLHQLLCAGHLSTAQYYQGLYEILELAEDMEIDIPHVWLYLAELVTPILQEGGVPMGELFREITKPLRPLGKAASLLLEILGLLCKSMGPKKVGTLWREAGLSWKEFLPEGQDIGAFVAEQKVEYTLGEESEAPGQRALPSEELNRQLEKLLKEGSSNQRVFDWIEANLSEQQIVSNTLVRALMTAVCYSAIIFETPLRVDVAVLKARAKLLQKYLCDEQKELQALYALQALVVTLEQPPNLLRMFFDALYDEDVVKEDAFYSWESSKDPAEQQGKGVALKSVTAFFKWLREAEEESDHN

SEQ ID NO: 28784 - protein, 71 aa, Homo sapiens
  Payload ID: 5621
  Gene Symbol: EIF4G1
  Gene Name: eukaryotic translation initiation factor 4 gamma, 1
  ENSP ID: ENSP00000390755
MNKAPQSTGPPPAPSPGLPQPAFPPGQTAPVVFSTPQATQMNTPSQPRQLAPTIQPKGCSSFPLAWPPPQF

SEQ ID NO: 28785 - protein, 833 aa, Homo sapiens
  Payload ID: 5621
  Gene Symbol: EIF4G1
  Gene Name: eukaryotic translation initiation factor 4 gamma, 1
  ENSP ID: ENSP00000391412
MNKAPQSTGPPPAPSPGLPQPAFPPGQTAPVVFSTPQATQMNTPSQPRQHFYPSRAQPPSSAASRVQSAAPARPGPAAHVYPAGSQVMMIPSQISYPASQGAYYIPGQGRSTYVVPTQQYPVQPGAPGFYPGASPTEFGTYAGAYYPAQGVQQFPTGVAPTPVLMNQPPQIAPKRERKTIRIRDPNQGGKDITEEIMSGARTASTPTPPQTGGGLEPQANGETPQVAVIVRPDDRSQGAIIADRPGLPGPEHSPSESQPSSPSPTPSPSPVLEPGSEPNLAVLSIPGDTMTTIQMSVEESTPISRETGEPYRLSPEPTPLAEPILEVEVTLSKPVPESEFSSSPLQAPTPLASHTVEIHEPNGMVPSEDLEPEVESSPELAPPPACPSESPVPIAPTAQPEELLNGAPSPPAVDLSPVSEPEEQAKEVTASMAPPTIPSATPATAPSATSPAQEEEMEEEEEEEEGEAGEAGEAESEKGGEELLPPESTPIPANLSQNLEAAAATQVAVSVPKRRRKIKELNKKEAVGDLLDAFKEANPAVPEVENQPPAGSNPGPESEGSGVPPRPEEADETWDSKEDKIHNAENIQPGEQKYEYKSDQWKPLNLEEKKRYDREFLLGFQFIFASMQKPEGLPHISDVVLDKANKTPLRPLDPTRLQGINCGPDFTPSFANLGRTTLSTRGPPRGGPGGELPRGPQAGLGPRRSQQGPRKEPRKIIATVLMTEDIKLNKAEKAWKPSSKRTAADKDRGEEDADGSKTQDLFRRVRSILNKLTPQMFQQLMKQVTQLAIDTEERLKGVIDLIFEKAISEPNFSVAYANMCRCLMALKVPTTEK

SEQ ID NO: 28786 - protein, 1559 aa, Homo sapiens
  Payload ID: 5621
  Gene Symbol: EIF4G1
  Gene Name: eukaryotic translation initiation factor 4 gamma, 1
  Uniprot ID: Q04637
  ENSP ID: ENSP00000391935
MNTPSQPRQHFYPSRAQPPSSAASRVQSAAPARPGPAAHVYPAGSQVMMIPSQISYPASQGAYYIPGQGRSTYVVPTQQYPVQPGAPGFYPGASPTEFGTYAGAYYPAQGVQQFPTGVAPTPVLMNQPPQIAPKRERKTIRIRDPNQGGKDITEEIMSGARTASTPTPPQTGGGLEPQANGETPQVAVIVRPDDRSQGAIIADRPGLPGPEHSPSESQPSSPSPTPSPSPVLEPGSEPNLAVLSIPGDTMTTIQMSVEESTPISRETGEPYRLSPEPTPLAEPILEVEVTLSKPVPESEFSSSPLQAPTPLASHTVEIHEPNGMVPSEDLEPEVESSPELAPPPACPSESPVPIAPTAQPEELLNGAPSPPAVDLSPVSEPEEQAKEVTASMAPPTIPSATPATAPSATSPAQEEEMEEEEEEEEGEAGEAGEAESEKGGEELLPPESTPIPANLSQNLEAAAATQVAVSVPKRRRKIKELNKKEAVGDLLDAFKEANPAVPEVENQPPAGSNPGPESEGSGVPPRPEEADETWDSKEDKIHNAENIQPGEQKYEYKSDQWKPLNLEEKKRYDREFLLGFQFIFASMQKPEGLPHISDVVLDKANKTPLRPLDPTRLQGINCGPDFTPSFANLGRTTLSTRGPPRGGPGGELPRGPAGLGPRRSQQGPRKEPRKIIATVLMTEDIKLNKAEKAWKPSSKRTAADKDRGEEDADGSKTQDLFRRVRSILNKLTPQMFQQLMKQVTQLAIDTEERLKGVIDLIFEKAISEPNFSVAYANMCRCLMALKVPTTEKPTVTVNFRKLLLNRCQKEFEKDKDDDEVFEKKQKEMDEAATAEERGRLKEELEEARDIARRRSLGNIKFIGELFKLKMLTEAIMHDCVVKLLKNHDEESLECLCRLLTTIGKDLDFEKAKPRMDQYFNQMEKIIKEKKTSSRIRFMLQDVLDLRGSNWVPRRGDQGPKTIDQIHKEAEMEEHREHIKVQQLMAKGSDKRRGGPPGPPISRGLPLVDDGGWNTVPISKGSRPIDTSRLTKITKPGSIDSNNQLFAPGGRLSWGKGSSGGSGAKPSDAASEAARPATSTLNRFSALQQAVPTESTDNRRVVQRSSLSRERGEKAGDRGDRLERSERGGDRGDRLDRARTPATKRSFSKEVEERSRERPSQPEGLRKAASLTEDRDRGRDAVKREAALPPVSPLKAALSEEELEKKSKAIIEEYLHLNDMKEAVQCVQELASPSLLFIFVRHGVESTLERSAIAREHMGQLLHQLLCAGHLSTAQYYQGLYEILELAEDMEIDIPHVWLYLAELVTPILQEGGVPMGELFREITKPLRPLGKAASLLLEILGLLCKSMGPKKVGTLWREAGLSWKEFLPEGQDIGAFVAEQKVEYTLGEESEAPGQRALPSEELNRQLEKLLKEGSSNQRVFDWIEANLSEQQIVSNTLVRALMTAVCYSAIIFETPLRVDVAVLKARAKLLQKYLCDEQKELQALYALQALVVTLEQPPNLLRMFFDALYDEDVVKEDAFYSWESSKDPAEQQGKGVALKSVTAFFKWLREAEEESDHN

SEQ ID NO: 28787 - protein, 226 aa, Homo sapiens
  Payload ID: 5621
  Gene Symbol: EIF4G1
  Gene Name: eukaryotic translation initiation factor 4 gamma, 1
  ENSP ID: ENSP00000392908
  MOD_RES (1)..(1): Any amino acid
XKAKPRMDQYFNQMEKIIKEKKTSSRIRFMLQDVLDLRGSNWVPRRGDQGPKTIDQIHKEAEMEEHREHIKVQQLMAKGSDKRRGGPPGPPISRGLPLVDDGGWNTVPISKGSRPIDTSRLTKITKVGPGSIDSNNQLFAPGGRLSWGKGSSGGSGAKPSDAASEAARPATSTLNRFSALQQAVPTESTDNRRVVQRSSLSRERGEKAGDRGDRLERSERGGDRGD

SEQ ID NO: 28788 - protein, 1560 aa, Homo sapiens
  Payload ID: 5621
  Gene Symbol: EIF4G1
  Gene Name: eukaryotic translation initiation factor 4 gamma, 1
  ENSP ID: ENSP00000395974
MNTPSQPRQHFYPSRAQPPSSAASRVQSAAPARPGPAAHVYPAGSQVMMIPSQISYPASQGAYYIPGQGRSTYVVPTQQYPVQPGAPGFYPGASPTEFGTYAGAYYPAQGVQQFPTGVAPTPVLMNQPPQIAPKRERKTIRIRDPNQGGKDITEEIMSGARTASTPTPPQTGGGLEPQANGETPQVAVIVRPDDRSQGAIIADRPGLPGPEHSPSESQPSSPSPTPSPSPVLEPGSEPNLAVLSIPGDTMTTIQMSVEESTPISRETGEPYRLSPEPTPLAEPILEVEVTLSKPVPESEFSSSPLQAPTPLASHTVEIHEPNGMVPSEDLEPEVESSPELAPPPACPSESPVPIAPTAQPEELLNGAPSPPAVDLSPVSEPEEQAKEVTASMAPPTIPSATPATAPSATSPAQEEEMEEEEEEEEGEAGEAGEAESEKGGEELLPPESTPIPANLSQNLEAAAATQVAVSVPKRRRKIKELNKKEAVGDLLDAFKEANPAVPEVENQPPAGSNPGPESEGSGVPPRPEEADETWDSKEDKIHNAENIQPGEQKYEYKSDQWKPLNLEEKKRYDREFLLGFQFIFASMQKPEGLPHISDVVLDKANKTPLRPLDPTRLQGINCGPDFTPSFANLGRTTLSTRGPPRGGPGGELPRGPQAGLGPRRSQQGPRKEPRKIIATVLMTEDIKLNKAEKAWKPSSKRTAADKDRGEEDADGSKTQDLFRRVRSILNKLTPQMFQQLMKQVTQLAIDTEERLKGVIDLIFEKAISEPNFSVAYANMCRCLMALKVPTTEKPTVTVNFRKLLLNRCQKEFEKDKDDDEVFEKKQKEMDEAATAEERGRLKEELEEARDIARRRSLGNIKFIGELFKLKMLTEAIMHDCVVKLLKNHDEESLECLCRLLTTIGKDLDFEKAKPRMDQYFNQMEKIIKEKKTSSRIRFMLQDVLDLRGSNWVPRRGDQGPKTIDQIHKEAEMEEHREHIKVQQLMAKGSDKRRGGPPGPPISRGLPLVDDGGWNTVPISKGSRPIDTSRLTKITKPGSIDSNNQLFAPGGRLSWGKGSSGGSGAKPSDAASEAARPATSTLNRFSALQQAVPTESTDNRRVVQRSSLSRERGEKAGDRGDRLERSERGGDRGDRLDRARTPATKRSFSKEVEERSRERPSQPEGLRKAASLTEDRDRGRDAVKREAALPPVSPLKAALSEEELEKKSKAIIEEYLHLNDMKEAVQCVQELASPSLLFIFVRHGVESTLERSAIAREHMGQLLHQLLCAGHLSTAQYYQGLYEILELAEDMEIDIPHVWLYLAELVTPILQEGGVPMGELFREITKPLRPLGKAASLLLEILGLLCKSMGPKKVGTLWREAGLSWKEFLPEGQDIGAFVAEQKVEYTLGEESEAPGQRALPSEELNRQLEKLLKEGSSNQRVFDWIEANLSEQQIVSNTLVRALMTAVCYSAIIFETPLRVDVAVLKARAKLLQKYLCDEQKELQALYALQALVVTLEQPPNLLRMFFDALYDEDVVKEDAFYSWESSKDPAEQQGKGVALKSVTAFFKWLREAEEESDHN

SEQ ID NO: 28789 - protein, 180 aa, Homo sapiens
  Payload ID: 5621
  Gene Symbol: EIF4G1
  Gene Name: eukaryotic translation initiation factor 4 gamma, 1
  ENSP ID: ENSP00000396888
  MOD_RES (1)..(1): Any amino acid
XLHQLLCAGHLSTAQYYQGLYEILELAEDMEIDIPHVWLYLAELVTPILQEGGVPMGELFREITKPLRPLGKAASLLLEILGLLCKSMGPKKVGTLWREAGLSWKEFLPEGQDIGAFVAEQKVEYTLGEESEAPGQRALPSEELNRQLEKLLKEGSSNQRVFDWIENLGIICFSHTGQPE

SEQ ID NO: 28790 - protein, 757 aa, Homo sapiens
  Payload ID: 5621
  Gene Symbol: EIF4G1
  Gene Name: eukaryotic translation initiation factor 4 gamma, 1
  ENSP ID: ENSP00000398145
MNQPPQIAPKRERKTIRIRDPNQGGKDITEEIMSGARTASTPTPPQTGGGLEPQANGETPQVAVIVRPDDRSQGAIIADRPGLPGPEHSPSESQPSSPSPTPSPSPVLEPGSEPNLAVLSIPGDTMTTIQMSVEESTPISRETGEPYRLSPEPTPLAEPILEVEVTLSKPVPESEFSSSPLQAPTPLASHTVEIHEPNGMVPSEDLEPEVESSPELAPPPACPSESPVPIAPTAQPEELLNGAPSPPAVDLSPVSEPEEQAKEVTASMAPPTIPSATPATAPSATSPAQEEEMEEEEEEEEGEAGEAGEAESEKGGEELLPPESTPIPANLSQNLEAAAATQVAVSVPKRRRKIKELNKKEAVGDLLDAFKEANPAVPEVENQPPAGSNPGPESEGSGVPPRPEEADETWDSKEDKIHNAENIQPGEQKYEYKSDQWKPLNLEEKKRYDREFLLGFQFIFASMQKPEGLPHISDVVLDKANKTPLRPLDPTRLQGINCGPDFTPSFANLGRTTLSTRGPPRGGPGGELPRGPAGLGPRRSQQGPRKEPRKIIATVLMTEDIKLNKAEKAWKPSSKRTAADKDRGEEDADGSKTQDLFRRVRSILNKLTPQMFQQLMKQVTQLAIDTEERLKGVIDLIFEKAISEPNFSVAYANMCRCLMALKVPTTEKPTVTVNFRKLLLNRCQKEFEKDKDDDEVFEKKQKEMDEAATAEERGRLKEELEEARDIARRRSLGNIKFIGELFKLKMLTEAIMHDCVV

SEQ ID NO: 28791 - protein, 1436 aa, Homo sapiens
  Payload ID: 5621
  Gene Symbol: EIF4G1
  Gene Name: eukaryotic translation initiation factor 4 gamma, 1
  ENSP ID: ENSP00000399858
MNQPPQIAPKRERKTIRIRDPNQGGKDITEEIMSGARTASTPTPPQTGGGLEPQANGETPQVAVIVRPDDRSQGAIIADRPGLPGPEHSPSESQPSSPSPTPSPSPVLEPGSEPNLAVLSIPGDTMTTIQMSVEESTPISRETGEPYRLSPEPTPLAEPILEVEVTLSKPVPESEFSSSPLQAPTPLASHTVEIHEPNGMVPSEDLEPEVESSPELAPPPACPSESPVPIAPTAQPEELLNGAPSPPAVDLSPVSEPEEQAKEVTASMAPPTIPSATPATAPSATSPAQEEEMEEEEEEEEGEAGEAGEAESEKGGEELLPPESTPIPANLSQNLEAAAATQVAVSVPKRRRKIKELNKKEAVGDLLDAFKEANPAVPEVENQPPAGSNPGPESEGSGVPPRPEEADETWDSKEDKIHNAENIQPGEQKYEYKSDQWKPLNLEEKKRYDREFLLGFQFIFASMQKPEGLPHISDVVLDKANKTPLRPLDPTRLQGINCGPDFTPSFANLGRTTLSTRGPPRGGPGGELPRGPQAGLGPRRSQQGPRKEPRKIIATVLMTEDIKLNKAEKAWKPSSKRTAADKDRGEEDADGSKTQDLFRRVRSILNKLTPQMFQQLMKQVTQLAIDTEERLKGVIDLIFEKAISEPNFSVAYANMCRCLMALKVPTTEKPTVTVNFRKLLLNRCQKEFEKDKDDDEVFEKKQKEMDEAATAEERGRLKEELEEARDIARRRSLGNIKFIGELFKLKMLTEAIMHDCVVKLLKNHDEESLECLCRLLTTIGKDLDFEKAKPRMDQYFNQMEKIIKEKKTSSRIRFMLQDVLDLRGSNWVPRRGDQGPKTIDQIHKEAEMEEHREHIKVQQLMAKGSDKRRGGPPGPPISRGLPLVDDGGWNTVPISKGSRPIDTSRLTKITKPGSIDSNNQLFAPGGRLSWGKGSSGGSGAKPSDAASEAARPATSTLNRFSALQQAVPTESTDNRRVVQRSSLSRERGEKAGDRGDRLERSERGGDRGDRLDRARTPATKRSFSKEVEERSRERPSQPEGLRKAASLTEDRDRGRDAVKREAALPPVSPLKAALSEEELEKKSKAIIEEYLHLNDMKEAVQCVQELASPSLLFIFVRHGVESTLERSAIAREHMGQLLHQLLCAGHLSTAQYYQGLYEILELAEDMEIDIPHVWLYLAELVTPILQEGGVPMGELFREITKPLRPLGKAASLLLEILGLLCKSMGPKKVGTLWREAGLSWKEFLPEGQDIGAFVAEQKVEYTLGEESEAPGQRALPSEELNRQLEKLLKEGSSNQRVFDWIEANLSEQQIVSNTLVRALMTAVCYSAIIFETPLRVDVAVLKARAKLLQKYLCDEQKELQALYALQALVVTLEQPPNLLRMFFDALYDEDVVKEDAFYSWESSKDPAEQQGKGVALKSVTAFFKWLREAEEESDHN

SEQ ID NO: 28792 - protein, 285 aa, Homo sapiens
  Payload ID: 5621
  Gene Symbol: EIF4G1
  Gene Name: eukaryotic translation initiation factor 4 gamma, 1
  ENSP ID: ENSP00000399969
MSGARTASTPTPPQTGGGLEPQANGETPQVAVIVRPDDRSQGAIIADRPGLPGPEHSPSESQPSSPSPTPSPSPVLEPGSEPNLAVLSIPGDTMTTIQMSVEESTPISRETGEPYRLSPEPTPLAEPILEVEVTLSKPVPESEFSSSPLQAPTPLASHTVEIHEPNGMVPSEDLEPEVESSPELAPPPACPSESPVPIAPTAQPEELLNGAPSPPAVDLSPVSEPEEQAKEVTASMAPPTIPSATPATAPSATSPAQEEEMEEEEEEEEGEAGEAGEAESEKGGE

SEQ ID NO: 28793 - protein, 50 aa, Homo sapiens
  Payload ID: 5621
  Gene Symbol: EIF4G1
  Gene Name: eukaryotic translation initiation factor 4 gamma, 1
  ENSP ID: ENSP00000400351
MNQPPQIAPKRERKTIRIRDPNQGGKDITEEIMSGARTASTPTPPQAELK

SEQ ID NO: 28794 - protein, 903 aa, Homo sapiens
  Payload ID: 5621
  Gene Symbol: EIF4G1
  Gene Name: eukaryotic translation initiation factor 4 gamma, 1
  ENSP ID: ENSP00000403269
MNKAPQSTGPPPAPSPGLPQPAFPPGQTAPVVFSTPQATQMNTPSQPRQGRSTYVVPTQQYPVQPGAPGFYPGASPTEFGTYAGAYYPAQGVQQFPTGVAPTPVLMNQPPQIAPKRERKTIRIRDPNQGGKDITEEIMSGARTASTPTPPQTGGGLEPQANGETPQVAVIVRPDDRSQGAIIADRPGLPGPEHSPSESQPSSPSPTPSPSPVLEPGSEPNLAVLSIPGDTMTTIQMSVEESTPISRETGEPYRLSPEPTPLAEPILEVEVTLSKPVPESEFSSSPLQAPTPLASHTVEIHEPNGMVPSEDLEPEVESSPELAPPPACPSESPVPIAPTAQPEELLNGAPSPPAVDLSPVSEPEEQAKEVTASMAPPTIPSATPATAPSATSPAQEEEMEEEEEEEEGEAGEAGEAESEKGGEELLPPESTPIPANLSQNLEAAAATQVAVSVPKRRRKIKELNKKEAVGDLLDAFKEANPAVPEVENQPPAGSNPGPESEGSGVPPRPEEADETWDSKEDKIHNAENIQPGEQKYEYKSDQWKPLNLEEKKRYDREFLLGFQFIFASMQKPEGLPHISDVVLDKANKTPLRPLDPTRLQGINCGPDFTPSFANLGRTTLSTRGPPRGGPGGELPRGPAGLGPRRSQQGPRKEPRKIIATVLMTEDIKLNKAEKAWKPSSKRTAADKDRGEEDADGSKTQDLFRRVRSILNKLTPQMFQQLMKQVTQLAIDTEERLKGVIDLIFEKAISEPNFSVAYANMCRCLMALKVPTTEKPTVTVNFRKLLLNRCQKEFEKDKDDDEVFEKKQKEMDEAATAEERGRLKEELEEARDIARRRSLGNIKFIGELFKLKMLTEAIMHDCVVKLLKNHDEESLECLCRLLTTIGKDLDFEKAKPRMDQYFNQM

SEQ ID NO: 28795 - protein, 1403 aa, Homo sapiens
  Payload ID: 5621
  Gene Symbol: EIF4G1
  Gene Name: eukaryotic translation initiation factor 4 gamma, 1
  Uniprot ID: Q04637
  ENSP ID: ENSP00000404754
MSGARTASTPTPPQTGGGLEPQANGETPQVAVIVRPDDRSQGAIIADRPGLPGPEHSPSESQPSSPSPTPSPSPVLEPGSEPNLAVLSIPGDTMTTIQMSVEESTPISRETGEPYRLSPEPTPLAEPILEVEVTLSKPVPESEFSSSPLQAPTPLASHTVEIHEPNGMVPSEDLEPEVESSPELAPPPACPSESPVPIAPTAQPEELLNGAPSPPAVDLSPVSEPEEQAKEVTASMAPPTIPSATPATAPSATSPAQEEEMEEEEEEEEGEAGEAGEAESEKGGEELLPPESTPIPANLSQNLEAAAATQVAVSVPKRRRKIKELNKKEAVGDLLDAFKEANPAVPEVENQPPAGSNPGPESEGSGVPPRPEEADETWDSKEDKIHNAENIQPGEQKYEYKSDQWKPLNLEEKKRYDREFLLGFQFIFASMQKPEGLPHISDVVLDKANKTPLRPLDPTRLQGINCGPDFTPSFANLGRTTLSTRGPPRGGPGGELPRGPAGLGPRRSQQGPRKEPRKIIATVLMTEDIKLNKAEKAWKPSSKRTAADKDRGEEDADGSKTQDLFRRVRSILNKLTPQMFQQLMKQVTQLAIDTEERLKGVIDLIFEKAISEPNFSVAYANMCRCLMALKVPTTEKPTVTVNFRKLLLNRCQKEFEKDKDDDEVFEKKQKEMDEAATAEERGRLKEELEEARDIARRRSLGNIKFIGELFKLKMLTEAIMHDCVVKLLKNHDEESLECLCRLLTTIGKDLDFEKAKPRMDQYFNQMEKIIKEKKTSSRIRFMLQDVLDLRGSNWVPRRGDQGPKTIDQIHKEAEMEEHREHIKVQQLMAKGSDKRRGGPPGPPISRGLPLVDDGGWNTVPISKGSRPIDTSRLTKITKPGSIDSNNQLFAPGGRLSWGKGSSGGSGAKPSDAASEAARPATSTLNRFSALQQAVPTESTDNRRVVQRSSLSRERGEKAGDRGDRLERSERGGDRGDRLDRARTPATKRSFSKEVEERSRERPSQPEGLRKAASLTEDRDRGRDAVKREAALPPVSPLKAALSEEELEKKSKAIIEEYLHLNDMKEAVQCVQELASPSLLFIFVRHGVESTLERSAIAREHMGQLLHQLLCAGHLSTAQYYQGLYEILELAEDMEIDIPHVWLYLAELVTPILQEGGVPMGELFREITKPLRPLGKAASLLLEILGLLCKSMGPKKVGTLWREAGLSWKEFLPEGQDIGAFVAEQKVEYTLGEESEAPGQRALPSEELNRQLEKLLKEGSSNQRVFDWIEANLSEQQIVSNTLVRALMTAVCYSAIIFETPLRVDVAVLKARAKLLQKYLCDEQKELQALYALQALVVTLEQPPNLLRMFFDALYDEDVVKEDAFYSWESSKDPAEQQGKGVALKSVTAFFKWLREAEEESDHN

SEQ ID NO: 28796 - protein, 143 aa, Homo sapiens
  Payload ID: 5621
  Gene Symbol: EIF4G1
  Gene Name: eukaryotic translation initiation factor 4 gamma, 1
  ENSP ID: ENSP00000407240
MNKAPQSTGPPPAPSPGLPQPAFPPGQTAPVVFSTPQATQMNTPSQPRQHFYPSRAQPPSSAASRVQSAAPARPGPAAHVYPAGSQVMMIPSQISYPASQGAYYIPGQYPVQPGAPGFYPGASPTEFGTYAGAYYPAQGVQQF

SEQ ID NO: 28797 - protein, 127 aa, Homo sapiens
  Payload ID: 5621
  Gene Symbol: EIF4G1
  Gene Name: eukaryotic translation initiation factor 4 gamma, 1
  ENSP ID: ENSP00000407244
MSGARTASTPTPPQTGGGLEPQANGETPQVAVIVRPDDRSQGAIIADRPGLPGPEHSPSESQPSSPSPTPSPSPVLEPGSEPNLAVLSIPGDTMTTIQMSVEESTPISRETGEPYRLSPEPTPLAEP

SEQ ID NO: 28798 - protein, 1513 aa, Homo sapiens
  Payload ID: 5621
  Gene Symbol: EIF4G1
  Gene Name: eukaryotic translation initiation factor 4 gamma, 1
  ENSP ID: ENSP00000407682
MMIPSQISYPASQGAYYIPGQGRSTYVVPTQQYPVQPGAPGFYPGASPTEFGTYAGAYYPAQGVQQFPTGVAPTPVLMNQPPQIAPKRERKTIRIRDPNQGGKDITEEIMSGARTASTPTPPQTGGGLEPQANGETPQVAVIVRPDDRSQGAIIADRPGLPGPEHSPSESQPSSPSPTPSPSPVLEPGSEPNLAVLSIPGDTMTTIQMSVEESTPISRETGEPYRLSPEPTPLAEPILEVEVTLSKPVPESEFSSSPLQAPTPLASHTVEIHEPNGMVPSEDLEPEVESSPELAPPPACPSESPVPIAPTAQPEELLNGAPSPPAVDLSPVSEPEEQAKEVTASMAPPTIPSATPATAPSATSPAQEEEMEEEEEEEEGEAGEAGEAESEKGGEELLPPESTPIPANLSQNLEAAAATQVAVSVPKRRRKIKELNKKEAVGDLLDAFKEANPAVPEVENQPPAGSNPGPESEGSGVPPRPEEADETWDSKEDKIHNAENIQPGEQKYEYKSDQWKPLNLEEKKRYDREFLLGFQFIFASMQKPEGLPHISDVVLDKANKTPLRPLDPTRLQGINCGPDFTPSFANLGRTTLSTRGPPRGGPGGELPRGPQAGLGPRRSQQGPRKEPRKIIATVLMTEDIKLNKAEKAWKPSSKRTAADKDRGEEDADGSKTQDLFRRVRSILNKLTPQMFQQLMKQVTQLAIDTEERLKGVIDLIFEKAISEPNFSVAYANMCRCLMALKVPTTEKPTVTVNFRKLLLNRCQKEFEKDKDDDEVFEKKQKEMDEAATAEERGRLKEELEEARDIARRRSLGNIKFIGELFKLKMLTEAIMHDCVVKLLKNHDEESLECLCRLLTTIGKDLDFEKAKPRMDQYFNQMEKIIKEKKTSSRIRFMLQDVLDLRGSNWVPRRGDQGPKTIDQIHKEAEMEEHREHIKVQQLMAKGSDKRRGGPPGPPISRGLPLVDDGGWNTVPISKGSRPIDTSRLTKITKPGSIDSNNQLFAPGGRLSWGKGSSGGSGAKPSDAASEAARPATSTLNRFSALQQAVPTESTDNRRVVQRSSLSRERGEKAGDRGDRLERSERGGDRGDRLDRARTPATKRSFSKEVEERSRERPSQPEGLRKAASLTEDRDRGRDAVKREAALPPVSPLKAALSEEELEKKSKAIIEEYLHLNDMKEAVQCVQELASPSLLFIFVRHGVESTLERSAIAREHMGQLLHQLLCAGHLSTAQYYQGLYEILELAEDMEIDIPHVWLYLAELVTPILQEGGVPMGELFREITKPLRPLGKAASLLLEILGLLCKSMGPKKVGTLWREAGLSWKEFLPEGQDIGAFVAEQKVEYTLGEESEAPGQRALPSEELNRQLEKLLKEGSSNQRVFDWIEANLSEQQIVSNTLVRALMTAVCYSAIIFETPLRVDVAVLKARAKLLQKYLCDEQKELQALYALQALVVTLEQPPNLLRMFFDALYDEDVVKEDAFYSWESSKDPAEQQGKGVALKSVTAFFKWLREAEEESDHN

SEQ ID NO: 28799 - protein, 163 aa, Homo sapiens
  Payload ID: 5621
  Gene Symbol: EIF4G1
  Gene Name: eukaryotic translation initiation factor 4 gamma, 1
  ENSP ID: ENSP00000409545
MSGARTASTPTPPQTGGGLEPQANGETPQVAVIVRPDDRSQGAIIADRPGLPGPEHSPSESQPSSPSPTPSPSPVLEPGSEPNLAVLSIPGDTMTTIQMSVEESTPISRETGEPYRLSPEPTPLAEPILEVEVTLSKPVPESEFSSSPLQAPTPLASHTVEIH

SEQ ID NO: 28800 - protein, 92 aa, Homo sapiens
  Payload ID: 5621
  Gene Symbol: EIF4G1
  Gene Name: eukaryotic translation initiation factor 4 gamma, 1
  ENSP ID: ENSP00000411214
MMIPSQISYPASQGAYYIPGQGRSTYVVPTQQYPVQPGAPGFYPGASPTEFGTYAGAYYPAQGVQQFPTGVAPTPVLMNQPPQIAPKRERKT

SEQ ID NO: 28801 - protein, 143 aa, Homo sapiens
  Payload ID: 5621
  Gene Symbol: EIF4G1
  Gene Name: eukaryotic translation initiation factor 4 gamma, 1
  ENSP ID: ENSP00000411707
MSGARTASTPTPPQTGGGLEPQANGETPQVAVIVRPDDRSQGAIIADRPGLPGPEHSPSESQPSSPSPTPSPSPVLEPGSEPNLAVLSIPGDTMTTIQMSVEESTPISRETGEPYRLSPEPTPLAEPILEVEVTLSKPVPESE

SEQ ID NO: 28802 - protein, 1404 aa, Homo sapiens
  Payload ID: 5621
  Gene Symbol: EIF4G1
  Gene Name: eukaryotic translation initiation factor 4 gamma, 1
  Uniprot ID: Q04637
  ENSP ID: ENSP00000411826
MSGARTASTPTPPQTGGGLEPQANGETPQVAVIVRPDDRSQGAIIADRPGLPGPEHSPSESQPSSPSPTPSPSPVLEPGSEPNLAVLSIPGDTMTTIQMSVEESTPISRETGEPYRLSPEPTPLAEPILEVEVTLSKPVPESEFSSSPLQAPTPLASHTVEIHEPNGMVPSEDLEPEVESSPELAPPPACPSESPVPIAPTAQPEELLNGAPSPPAVDLSPVSEPEEQAKEVTASMAPPTIPSATPATAPSATSPAQEEEMEEEEEEEEGEAGEAGEAESEKGGEELLPPESTPIPANLSQNLEAAAATQVAVSVPKRRRKIKELNKKEAVGDLLDAFKEANPAVPEVENQPPAGSNPGPESEGSGVPPRPEEADETWDSKEDKIHNAENIQPGEQKYEYKSDQWKPLNLEEKKRYDREFLLGFQFIFASMQKPEGLPHISDVVLDKANKTPLRPLDPTRLQGINCGPDFTPSFANLGRTTLSTRGPPRGGPGGELPRGPQAGLGPRRSQQGPRKEPRKIIATVLMTEDIKLNKAEKAWKPSSKRTAADKDRGEEDADGSKTQDLFRRVRSILNKLTPQMFQQLMKQVTQLAIDTEERLKGVIDLIFEKAISEPNFSVAYANMCRCLMALKVPTTEKPTVTVNFRKLLLNRCQKEFEKDKDDDEVFEKKQKEMDEAATAEERGRLKEELEEARDIARRRSLGNIKFIGELFKLKMLTEAIMHDCVVKLLKNHDEESLECLCRLLTTIGKDLDFEKAKPRMDQYFNQMEKIIKEKKTSSRIRFMLQDVLDLRGSNWVPRRGDQGPKTIDQIHKEAEMEEHREHIKVQQLMAKGSDKRRGGPPGPPISRGLPLVDDGGWNTVPISKGSRPIDTSRLTKITKPGSIDSNNQLFAPGGRLSWGKGSSGGSGAKPSDAASEAARPATSTLNRFSALQQAVPTESTDNRRVVQRSSLSRERGEKAGDRGDRLERSERGGDRGDRLDRARTPATKRSFSKEVEERSRERPSQPEGLRKAASLTEDRDRGRDAVKREAALPPVSPLKAALSEEELEKKSKAIIEEYLHLNDMKEAVQCVQELASPSLLFIFVRHGVESTLERSAIAREHMGQLLHQLLCAGHLSTAQYYQGLYEILELAEDMEIDIPHVWLYLAELVTPILQEGGVPMGELFREITKPLRPLGKAASLLLEILGLLCKSMGPKKVGTLWREAGLSWKEFLPEGQDIGAFVAEQKVEYTLGEESEAPGQRALPSEELNRQLEKLLKEGSSNQRVFDWIEANLSEQQIVSNTLVRALMTAVCYSAIIFETPLRVDVAVLKARAKLLQKYLCDEQKELQALYALQALVVTLEQPPNLLRMFFDALYDEDVVKEDAFYSWESSKDPAEQQGKGVALKSVTAFFKWLREAEEESDHN

SEQ ID NO: 28803 - protein, 869 aa, Homo sapiens
  Payload ID: 5621
  Gene Symbol: EIF4G1
  Gene Name: eukaryotic translation initiation factor 4 gamma, 1
  ENSP ID: ENSP00000413159
MNKAPQSTGPPPAPSPGLPQPAFPPGQTAPVVFSTPQATQMNTPSQPRQGGFRSLQHFYPSRAQPPSSAASRVQSAAPARPGPAAHVYPAGSQVMMIPSQISYPASQGAYYIPGQGRSTYVVPTQQYPVQPGAPGFYPGASPTEFGTYAGAYYPAQGVQQFPTGVAPTPVLMNQPPQIAPKRERKTIRIRDPNQGGKDITEEIMSGARTASTPTPPQTGGGLEPQANGETPQVAVIVRPDDRSQGAIIADRPGLPGPEHSPSESQPSSPSPTPSPSPVLEPGSEPNLAVLSIPGDTMTTIQMSVEESTPISRETGEPYRLSPEPTPLAEPILEVEVTLSKPVPESEFSSSPLQAPTPLASHTVEIHEPNGMVPSEDLEPEVESSPELAPPPACPSESPVPIAPTAQPEELLNGAPSPPAVDLSPVSEPEEQAKEVTASMAPPTIPSATPATAPSATSPAQEEEMEEEEEEEEGEAGEAGEAESEKGGEELLPPESTPIPANLSQNLEAAAATQVAVSVPKRRRKIKELNKKEAVGDLLDAFKEANPAVPEVENQPPAGSNPGPESEGSGVPPRPEEADETWDSKEDKIHNAENIQPGEQKYEYKSDQWKPLNLEEKKRYDREFLLGFQFIFASMQKPEGLPHISDVVLDKANKTPLRPLDPTRLQGINCGPDFTPSFANLGRTTLSTRGPPRGGPGGELPRGPQAGLGPRRSQQGPRKEPRKIIATVLMTEDIKLNKAEKAWKPSSKRTAADKDRGEEDADGSKTQDLFRRVRSILNKLTPQMFQQLMKQVTQLAIDTEERLKGVIDLIFEKAISEPNFSVAYANMCRCLMALKVPTTEKPTVTVNFRKLLLNRCQKEFEKDKDDDEVF

SEQ ID NO: 28804 - protein, 87 aa, Homo sapiens
  Payload ID: 5621
  Gene Symbol: EIF4G1
  Gene Name: eukaryotic translation initiation factor 4 gamma, 1
  ENSP ID: ENSP00000415842
MNTPSQPRQHFYPSRAQPPSSAASRVQSAAPARPGPAAHVYPAGSQVMMIPSQISYPASQGAYYIPGQGRSTYVVPTQQYPVQPGAP

SEQ ID NO: 28805 - protein, 160 aa, Homo sapiens
  Payload ID: 5621
  Gene Symbol: EIF4G1
  Gene Name: eukaryotic translation initiation factor 4 gamma, 1
  ENSP ID: ENSP00000415943
MNTPSQPRQHFYPSRAQPPSSAASRVQSAAPARPGPAAHVYPAGSQVMMIPSQISYPASQGAYYIPGQQYPVQPGAPGFYPGASPTEFGTYAGAYYPAQGVQQFPTGVAPTPVLMNQPPQIAPKRERKTIRIRDPNQGGKDITEEIMSGARTASTPTPPQ

SEQ ID NO: 28806 - protein, 1606 aa, Homo sapiens; identical to SEQ ID NO: 28780
  Payload ID: 5621
  Gene Symbol: EIF4G1
  Gene Name: eukaryotic translation initiation factor 4 gamma, 1
  Uniprot ID: Q04637
  ENSP ID: ENSP00000416255

SEQ ID NO: 28807 - protein, 907 aa, Homo sapiens
  Payload ID: 5622
  Gene Symbol: EIF4G2
  Gene Name: eukaryotic translation initiation factor 4 gamma, 2
  Uniprot ID: P78344
  ENSP ID: ENSP00000340281
VESAIAEGGASRFSASSGGGGSRGAPQHYPKTAGNSEFLGKTPGQNAQKWIPARSTRRDDNSAANNSANEKERHDAIFRKVRGILNKLTPEKFDKLCLELLNVGVESKLILKGVILLIVDKALEEPKYSSLYAQLCLRLAEDAPNFDGPAAEGQPGQKQSTTFRRLLISKLQDEFENRTRNVDVYDKRENPLLPEEEEQRAIAKIKMLGNIKFIGELGKLDLIHESILHKCIKTLLEKKKRVQLKDMGEDLECLCQIMRTVGPRLDHERAKSLMDQYFARMCSLMLSKELPARIRFLLQDTVELREHHWVPRKAFLDNGPKTINQIRQDAVKDLGVFIPAPMAQGMRSDFFLEGPFMPPRMKMDRDPLGGLADMFGQMPGSGIGTGPGVIQDRFSPTMGRHRSNQLFNGHGGHIMPPTQSQFGEMGGKFMKSQGLSQLYHNQSQGLLSQLQGQSKDMPPRFSKKGQLNADEISLRPAQSFLMNKNQVPKLQPQITMIPPSAQPPRTQTPPLGQTPQLGLKTNPPLIQEKPAKTSKKPPPSKEELLKLTETVVTEYLNSGNANEAVNGVREMRAPKHFLPEMLSKVIILSLDRSDEDKEKASSLISLLKQEGIATSDNFMQAFLNVLDQCPKLEVDIPLVKSYLAQFAARAIISELVSISELAQPLESGTHFPLFLLCLQQLAKLQDREWLTELFQQSKVNMQKMLPEIDQNKDRMLEILEGKGLSFLFPLLKLEKELLKQIKLDPSPQTIYKWIKDNISPKLHVDKGFVNILMTSFLQYISSEVNPPSDETDSSSAPSKEQLEQEKQLLLSFKPVMQKFLHDHVDLQVSALYALQVHCYNSNFPKGMLLRFFVHFYDMEIIEEEAFLAWKEDITQEFPGKGKALFQVNQWLTWLETAEEEESEEEAD

SEQ ID NO: 28808 - protein, 869 aa, Homo sapiens
  Payload ID: 5622
  Gene Symbol: EIF4G2
  Gene Name: eukaryotic translation initiation factor 4 gamma, 2
  ENSP ID: ENSP00000379778
VESAIAEGGASRFSASSGGGGSRGAPQHYPKTAGNSEFLGKTPGQNAQKWIPARSTRRDDNSAANNSANEKERHDAIFRKVRGILNKLTPEKFDKLCLELLNVGVESKLILKGVILLIVDKALEEPKYSSLYAQLCLRLAEDAPNFDGPAAEGQPGQKQSTTFRRLLISKLQDEFENRTRNVDVYDKRENPLLPEEEEQRAIAKIKMLGNIKFIGELGKLDLIHESILHKCIKTLLEKKKRVQLKDMGEDLECLCQIMRTVGPRLDHERAKSLMDQYFARMCSLMLSKELPARIRFLLQDTVELREHHWVPRKAFLDNGPKTINQIRQDAVKDLGVFIPAPMAQGMRSDFFLEGPFMPPRMKMDRDPLGGLADMFGQMPGSGIGTGPGVIQDRFSPTMGRHRSNQLFNGHGGHIMPPTQSQFGEMGGKFMKSQISLRPAQSFLMNKNQVPKLQPQITMIPPSAQPPRTQTPPLGQTPQLGLKTNPPLIQEKPAKTSKKPPPSKEELLKLTETVVTEYLNSGNANEAVNGVREMRAPKHFLPEMLSKVIILSLDRSDEDKEKASSLISLLKQEGIATSDNFMQAFLNVLDQCPKLEVDIPLVKSYLAQFAARAIISELVSISELAQPLESGTHFPLFLLCLQQLAKLQDREWLTELFQQSKVNMQKMLPEIDQNKDRMLEILEGKGLSFLFPLLKLEKELLKQIKLDPSPQTIYKWIKDNISPKLHVDKGFVNILMTSFLQYISSEVNPPSDETDSSSAPSKEQLEQEKQLLLSFKPVMQKFLHDHVDLQVSALYALQVHCYNSNFPKGMLLRFFVHFYDMEIIEEEAFLAWKEDITQEFPGKGKALFQVNQWLTWLETAEEEESEEEAD

SEQ ID NO: 28809 - protein, 129 aa, Homo sapiens
  Payload ID: 5622
  Gene Symbol: EIF4G2
  Gene Name: eukaryotic translation initiation factor 4 gamma, 2
  ENSP ID: ENSP00000431511
VESAIAEGGASRFSASSGGGGSRGAPQHYPKTAGNSEFLGKTPGQNAQKWIPARSTRRDDNSAANNSANEKERHDAIFRKVRGILNKLTPEKFDKLCLELLNVGVESKLILKGVILLIVDKALEEPKYS

SEQ ID NO: 28810 - protein, 444 aa, Homo sapiens
  Payload ID: 5622
  Gene Symbol: EIF4G2
  Gene Name: eukaryotic translation initiation factor 4 gamma, 2
  ENSP ID: ENSP00000431583
VESAIAEGGASRFSASSGGGGSRGAPQHYPKTAGNSEFLGKTPGQNAQKWIPARSTRRDDNSAANNSANEKERHDAIFRKVRGILNKLTPEKFDKLCLELLNVGVESKLILKGVILLIVDKALEEPKYSSLYAQLCLRLAEDAPNFDGPAAEGQPGQKQSTTFRRLLISKLQDEFENRTRNVDVYDKRENPLLPEEEEQRAIAKIKMLGNIKFIGELGKLDLIHESILHKCIKTLLEKKKRVQLKDMGEDLECLCQIMRTVGPRLDHERAKSLMDQYFARMCSLMLSKELPARIRFLLQDTVELREHHWVPRKAFLDNGPKTINQIRQDAVKDLGVFIPAPMAQGMRSDFFLEGPFMPPRMKMDRDPLGGLADMFGQMPGSGIGTGPGVIQDRFSPTMGRHRSNQLFNGHGGHIMPPTQSQFGEMGGKFMKSQISLRPAQSFLM

SEQ ID NO: 28811 - protein, 282 aa, Homo sapiens
  Payload ID: 5622
  Gene Symbol: EIF4G2
  Gene Name: eukaryotic translation initiation factor 4 gamma, 2
  ENSP ID: ENSP00000433121
VESAIAEGGASRFSASSGGGGSRGAPQHYPKTAGNSEFLGKTPGQNAQKWIPARSTRRDDNSAANNSANEKERHDAIFRKVRGILNKLTPEKFDKLCLELLNVGVESKLILKGVILLIVDKALEEPKYSSLYAQLCLRLAEDAPNFDGPAAEGQPGQKQSTTFRRLLISKLQDEFENRTRNVDVYDKRENPLLPEEEEQRAIAKIKMLGNIKFIGELGKLDLIHESILHKCIKTLLEKKKRVQLKDMGEDLECLCQIMRTVGPRLDHERAKSLMDQYFARMC

SEQ ID NO: 28812 - protein, 84 aa, Homo sapiens
  Payload ID: 5622
  Gene Symbol: EIF4G2
  Gene Name: eukaryotic translation initiation factor 4 gamma, 2
  ENSP ID: ENSP00000433217
VESAIAEGGASRFSASSGGGGSRGAPQHYPKTAGNSEFLGKTPGQNAQKWIPARSTRRDDNSAANNSANEKERHDAIFRKVRGI

SEQ ID NO: 28813 - protein, 116 aa, Homo sapiens
  Payload ID: 5622
  Gene Symbol: EIF4G2
  Gene Name: eukaryotic translation initiation factor 4 gamma, 2
  ENSP ID: ENSP00000433335
VESAIAEGGASRFSASSGGGGSRGAPQHYPKTAGNSEFLGKTPGQNAQKWIPARSTRRDDNSAANNSANEKERHDAIFRKVRGILNKLTPEKFDKLCLELLNVGVESKLILKGVIL

SEQ ID NO: 28814 - protein, 907 aa, Homo sapiens; identical to SEQ ID NO: 28807
  Payload ID: 5622
  Gene Symbol: EIF4G2
  Gene Name: eukaryotic translation initiation factor 4 gamma, 2
  ENSP ID: ENSP00000433371

SEQ ID NO: 28815 - protein, 185 aa, Homo sapiens
  Payload ID: 5622
  Gene Symbol: EIF4G2
  Gene Name: eukaryotic translation initiation factor 4 gamma, 2
  ENSP ID: ENSP00000433561
MIPPSAQPPRTQTPPLGQTPQLGLKTNPPLIQEKPAKTSKKPPPSKEELLKLTETVVTEYLNSGNANEAVNGVREMRAPKHFLPEMLSKVIILSLDRSDEDKEKASSLISLLKQEGIATSDNFMQAFLNVLDQCPKLEVDIPLVKSYLAQFAARAIISELLAKLQDREWLTELFQQSKVNMQKML

SEQ ID NO: 28816 - protein, 907 aa, Homo sapiens; identical to SEQ ID NO: 28807
  Payload ID: 5622
  Gene Symbol: EIF4G2
  Gene Name: eukaryotic translation initiation factor 4 gamma, 2
  ENSP ID: ENSP00000433664

SEQ ID NO: 28817 - protein, 234 aa, Homo sapiens
  Payload ID: 5622
  Gene Symbol: EIF4G2
  Gene Name: eukaryotic translation initiation factor 4 gamma, 2
  ENSP ID: ENSP00000434815
ISLLKQEGIATSDNFMQAFLNVLDQCPKLEVDIPLVKSYLAQFAARAIISELVSISELAQPLESGTHFPLFLLCLQQLAKLQDREWLTELFQQSKVNMQKMLPDNISPKLHVDKGFVNILMTSFLQYISSEVNPPSDETDSSSAPSKEQLEQEKQLLLSFKPVMQKFLHDHVDLQVSALYALQVHCYNSNFPKGMLLRFFVHFYDMEIIEEEAFLAWKEDITQEFPGKGKALFQ

SEQ ID NO: 28818 - protein, 88 aa, Homo sapiens
  Payload ID: 5622
  Gene Symbol: EIF4G2
  Gene Name: eukaryotic translation initiation factor 4 gamma, 2
  ENSP ID: ENSP00000434940
VEKRHDAIFRKVRGILNKLTPEKFDKLCLELLNVGVESKLILKGVILLIVDKALEEPKYSSLYAQLCLRLAEDAPNFDGPAAEGQPGQ

SEQ ID NO: 28819 - protein, 46 aa, Homo sapiens
  Payload ID: 5622
  Gene Symbol: EIF4G2
  Gene Name: eukaryotic translation initiation factor 4 gamma, 2
  ENSP ID: ENSP00000435220
VESAIAEGGASRFRNGFLHEALDEMTTPQQTTPQTKKNDMMQSSGK

SEQ ID NO: 28820 - protein, 244 aa, Homo sapiens
  Payload ID: 5622
  Gene Symbol: EIF4G2
  Gene Name: eukaryotic translation initiation factor 4 gamma, 2
  ENSP ID: ENSP00000435523
VESAIAEGGASRFSASSGGGGSRGAPQHYPKTAGNSEFLGKTPGQNAQKWIPARSTRRDDNSAANNSANEKERHDAIFRKVRGILNKLTPEKFDKLCLELLNVGVESKLILKGVILLIVDKALEEPKYSSLYAQLCLRLAEDAPNFDGPAAEGQPGQKQSTTFRRLLISKLQDEFENRTRNVDVYDKRENPLLPEEEEQRAIAKIKMLGNIKFIGELGKLDLIHESILHKCIKTLLEKKKRVQL

SEQ ID NO: 28821 - protein, 84 aa, Homo sapiens
  Payload ID: 5622
  Gene Symbol: EIF4G2
  Gene Name: eukaryotic translation initiation factor 4 gamma, 2
  ENSP ID: ENSP00000435912
VESAIAEGGASRFSEFLGKTPGQNAQKWIPARSTRRDDNSAANNSANEKERHDAIFRKVRGILNKLTPEKFDKLCLELLNVGVE

SEQ ID NO: 28822 - protein, 112 aa, Homo sapiens
  Payload ID: 5622
  Gene Symbol: EIF4G2
  Gene Name: eukaryotic translation initiation factor 4 gamma, 2
  ENSP ID: ENSP00000436235
VESAIAEGGASRFSASSGGGGSRGAPQHYPKTAGNSEFLGKTPGQNAQKWIPARSTRRDDNSAANNSANEKERHDAIFRKVRGILNKLTPEKFDKLCLELLNVGVESKLILK

SEQ ID NO: 28823 - protein, 20 aa, Homo sapiens
  Payload ID: 5622
  Gene Symbol: EIF4G2
  Gene Name: eukaryotic translation initiation factor 4 gamma, 2
  ENSP ID: ENSP00000436680
  MOD_RES (1)..(1): Any amino acid
XEKERHDAIFRKVRGLWTKP

SEQ ID NO: 28824 - protein, 1585 aa, Homo sapiens
  Payload ID: 5623
  Gene Symbol: EIF4G3
  Gene Name: eukaryotic translation initiation factor 4 gamma, 3
  Uniprot ID: O43432
  ENSP ID: ENSP00000264211
MNSQPQTRSPFFQRPQIQPPRATIPNSSPSIRPGAQTPTAVYQANQHIMMVNHLPMPYPVPQGPQYCIPQYRHSGPPYVGPPQQYPVQPPGPGPFYPGPGPGDFPNAYGTPFYPSQPVYQSAPIIVPTQQQPPPAKREKKTIRIRDPNQGGKDITEEIMSGGGSRNPTPPIGRPTSTPTPPQQLPSQVPEHSPVVYGTVESAHLAASTPVTAASDQKQEEKPKPDPVLKSPSPVLRLVLSGEKKEQEGQTSETTAIVSIAELPLPPSPTTVSSVARSTIAAPTSSALSSQPIFTTAIDDRCELSSPREDTIPIPSLTSCTETSDPLPTNENDDDICKKPCSVAPNDIPLVSSTNLINEINGVSEKLSATESIVEIVKQEVLPLTLELEILENPPEEMKLECIPAPITPSTVPSFPPTPPTPPASPPHTPVIVPAAATTVSSPSAAITVQRVLEEDESIRTCLSEDAKEIQNKIEVEADGQTEEILDSQNLNSRRSPVPAQIAITVPKTWKKPKDRTRTTEEMLEAELELKAEEELSIDKVLESEQDKMSQGFHPERDPSDLKKVKAVEENGEEAEPVRNGAESVSEGEGIDANSGSTDSSGDGVTFPFKPESWKPTDTEGKKQYDREFLLDFQFMPACIQKPEGLPPISDVVLDKINQPKLPMRTLDPRILPRGPDFTPAFADFGRQTPGGRGVPLLNVGSRRSQPGQRREPRKIITVSVKEDVHLKKAENAWKPSQKRDSQADDPENIKTQELFRKVRSILNKLTPQMFNQLMKQVSGLTVDTEERLKGVIDLVFEKAIDEPSFSVAYANMCRCLVTLKVPMADKPGNTVNFRKLLLNRCQKEFEKDKADDDVFEKKQKELEAASAPEERTRLHDELEEAKDKARRRSIGNIKFIGELFKLKMLTEAIMHDCVVKLLKNHDEESLECLCRLLTTIGKDLDFEKAKPRMDQYFNQMEKIVKERKTSSRIRFMLQDVIDLRLCNWVSRRADQGPKTIEQIHKEAKIEEQEEQRKVQQLMTKEKRRPGVQRVDEGGWNTVQGAKNSRVLDPSKFLKITKPTIDEKIQLVPKAQLGSWGKGSSGGAKASETDALRSSASSLNRFSALQPPAPSGSTPSTPVEFDSRRTLTSRGSMGREKNDKPLPSATARPNTFMRGGSSKDLLDNQSQEEQRREMLETVKQLTGGVDVERNSTEAERNKTRESAKPEISAMSAHDKAALSEEELERKSKSIIDEFLHINDFKEAMQCVEELNAQGLLHVFVRVGVESTLERSQITRDHMGQLLYQLVQSEKLSKQDFFKGFSETLELADDMAIDIPHIWLYLAELVTPMLKEGGISMRELTIEFSKPLLPVGRAGVLLSEILHLLCKQMSHKKVGALWREADLSWKDFLPEGEDVHNFLLEQKLDFIESDSPCSSEALSKKELSAEELYKRLEKLIIEDKANDEQIFDWVEANLDEIQMSSPTFLRALMTAVCKAAIIADSSTFRVDTAVIKQRVPILLKYLDSDTEKELQALYALQASIVKLDQPANLLRMFFDCLYDEEVISEDAFYKWESSKDPAEQNGKGVALKSVTAFFTWLREAEEESEDN

SEQ ID NO: 28825 - protein, 515 aa, Homo sapiens
  Payload ID: 5623
  Gene Symbol: EIF4G3
  Gene Name: eukaryotic translation initiation factor 4 gamma, 3
  Uniprot ID: O43432
  ENSP ID: ENSP00000349386
MNSQPQTRSPFAAGPRPPHHQFFQRPQIQPPRATIPNSSPSIRPGAQTPTAVYQANQHIMMVNHLPMPYPVPQGPQYCIPQYRHSGPPYVGPPQQYPVQPPGPGPFYPGPGPGDFPNAYGTPFYPSQPVYQSAPIIVPTQQQPPPAKREKKTIRIRDPNQGGKDITEEIMSGGGSRNPTPPIGRPTSTPTPPQQLPSQVPEHSPVVYGTVESAHLAASTPVTAASDQKQEEKPKPDPVLKSPSPVLRLVLSGEKKEQEGQTSETTAIVSIAELPLPPSPTTVSSVARSTIAAPTSSALSSQPIFTTAIDDRCELSSPREDTIPIPSLTSCTETSDPLPTNENDDDICKKPCSVAPNDIPLVSSTNLINEINGVSEKLSATESIVEIVKQEVLPLTLELEILENPPEEMKLECIPAPITPSTVPSFPPTPPTPPASPPHTPVIVPAAATTVSSPSAAITVQRVLEEDESIRTCLSEDAKEIQNKIEVEADGQTEEILDSQNLNSRRSPVPETSNEC

SEQ ID NO: 28826 - protein, 1305 aa, Homo sapiens
  Payload ID: 5623
  Gene Symbol: EIF4G3
  Gene Name: eukaryotic translation initiation factor 4 gamma, 3
  Uniprot ID: O43432
  ENSP ID: ENSP00000364071
MNSQPQTRSPFFQRPQIQPPRATIPNSSPSIRPGAQTPTAVYQANQHIMMVNHLPMPYPVPQGPQYCIPQYRHSGPPYVGPPQQYPVQPPGPGPFYPGPGPGDFPNAYGTPFYPSQPVYQSAPIIVPTQQQPPPAKREKKTIRIRDPNQGGKDITEEIMSGGGSRNPTPPIGRPTSTPTPPQQLPSQVPEHSPVVYGTVESAHLAASTPVTAASDQKQAQIAITVPKTWKKPKDRTRTTEEMLEAELELKAEEELSIDKVLESEQDKMSQGFHPERDPSDLKKVKAVEENGEEAEPVRNGAESVSEGEGIDANSGSTDSSGDGVTFPFKPESWKPTDTEGKKQYDREFLLDFQFMPACIQKPEGLPPISDVVLDKINQPKLPMRTLDPRILPRGPDFTPAFADFGRQTPGGRGVPLLNVGSRRSQPGQRREPRKIITVSVKEDVHLKKAENAWKPSQKRDSQADDPENIKTQELFRKVRSILNKLTPQMFNQLMKQVSGLTVDTEERLKGVIDLVFEKAIDEPSFSVAYANMCRCLVTLKVPMADKPGNTVNFRKLLLNRCQKEFEKDKADDDVFEKKQKELEAASAPEERTRLHDELEEAKDKARRRSIGNIKFIGELFKLKMLTEAIMHDCVVKLLKNHDEESLECLCRLLTTIGKDLDFEKAKPRMDQYFNQMEKIVKERKTSSRIRFMLQDVIDLRLCNWVSRRADQGPKTIEQIHKEAKIEEQEEQRKVQQLMTKEKRRPGVQRVDEGGWNTVQGAKNSRVLDPSKFLKITKPTIDEKIQLVPKAQLGSWGKGSSGGAKASETDALRSSASSLNRFSALQPPAPSGSTPSTPVEFDSRRTLTSRGSMGREKNDKPLPSATARPNTFMRGGSSKDLLDNQSQEEQRREMLETVKQLTGGVDVERNSTEAERNKTRESAKPEISAMSAHDKAALSEEELERKSKSIIDEFLHINDFKEAMQCVEELNAQGLLHVFVRVGVESTLERSQITRDHMGQLLYQLVQSEKLSKQDFFKGFSETLELADDMAIDIPHIWLYLAELVTPMLKEGGISMRELTIEFSKPLLPVGRAGVLLSEILHLLCKQMSHKKVGALWREADLSWKDFLPEGEDVHNFLLEQKLDFIESDSPCSSEALSKKELSAEELYKRLEKLIIEDKANDEQIFDWVEANLDEIQMSSPTFLRALMTAVCKAAIIADSSTFRVDTAVIKQRVPILLKYLDSDTEKELQALYALQASIVKLDQPANLLRMFFDCLYDEEVISEDAFYKWESSKDPAEQNGKGVALKSVTAFFTWLREAEEESEDN

SEQ ID NO: 28827 - protein, 1621 aa, Homo sapiens
  Payload ID: 5623
  Gene Symbol: EIF4G3
  Gene Name: eukaryotic translation initiation factor 4 gamma, 3
  ENSP ID: ENSP00000383274
MNSQPQTRSPFFQRPQIQPPRATIPNSSPSIRPGAQTPTAVYQANQHIMMVNHLPMPYPVPQGPQYCIPQYRHSGPPYVGPPQQYPVQPPGPGPFYPGPGPGDFPNAYGTPFYPSQPVYQSAPIIVPTQQQPPPAKREKKTIRIRDPNQGGKDITEEIMSGGGSRNPTPPIGRPTSTPTPPQLPSQVPEHSPVVYGTVESAHLAASTPVTAASDQKQEEKPKPDPVLKSPSPVLRLVLSGEKKEQEGQTSETTAIVSIAELPLPPSPTTVSSVARSTIAAPTSSALSSQPIFTTAIDDRCELSSPREDTIPIPSLTSCTETSDPLPTNENDDDICKKPCSVAPNDIPLVSSTNLINEINGVSEKLSATESIVEIVKQEVLPLTLELEILENPPEEMKLECIPAPITPSTVPSFPPTPPTPPASPPHTPVIVPAAATTVSSPSAAITVQRVLEEDESIRTCLSEDAKEIQNKIEVEADGQTEEILDSQNLNSRRSPVPAQIAITVPKTWKKPKDRTRTTEEMLEAELELKAEEELSIDKVLESEQDKMSQGFHPERDPSDLKKVKAVEENGEEAEPVRNGAESVSEGEGIDANSGSTDSSGDGVTFPFKPESWKPTDTEGKKQYDREFLLDFQFMPACIQKPEGLPPISDVVLDKINQPKLPMRTLDPRILPRGPDFTPAFADFGRQTPGGRGVPICKVQSRHGLPILEQSKAPTCPPLVMSHPPMKSLPLGLLNVGSRRSQPGQRREPRKIITVSVKEDVHLKKAENAWKPSQKRDSQADDPENIKTQELFRKVRSILNKLTPQMFNQLMKQVSGLTVDTEERLKGVIDLVFEKAIDEPSFSVAYANMCRCLVTLKVPMADKPGNTVNFRKLLLNRCQKEFEKDKADDDVFEKKQKELEAASAPEERTRLHDELEEAKDKARRRSIGNIKFIGELFKLKMLTEAIMHDCVVKLLKNHDEESLECLCRLLTTIGKDLDFEKAKPRMDQYFNQMEKIVKERKTSSRIRFMLQDVIDLRLCNWVSRRADQGPKTIEQIHKEAKIEEQEEQRKVQQLMTKEKRRPGVQRVDEGGWNTVQGAKNSRVLDPSKFLKITKPTIDEKIQLVPKAQLGSWGKGSSGGAKASETDALRSSASSLNRFSALQPPAPSGSTPSTPVEFDSRRTLTSRGSMGREKNDKPLPSATARPNTFMRGGSSKDLLDNQSQEEQRREMLETVKQLTGGVDVERNSTEAERNKTRESAKPEISAMSAHDKAALSEEELERKSKSIIDEFLHINDFKEAMQCVEELNAQGLLHVFVRVGVESTLERSQITRDHMGQLLYQLVQSEKLSKQDFFKGFSETLELADDMAIDIPHIWLYLAELVTPMLKEGGISMRELTIEFSKPLLPVGRAGVLLSEILHLLCKQMSHKKVGALWREADLSWKDFLPEGEDVHNFLLEQKLDFIESDSPCSSEALSKKELSAEELYKRLEKLIIEDKANDEQIFDWVEANLDEIQMSSPTFLRALMTAVCKAAIIADSSTFRVDTAVIKQRVPILLKYLDSDTEKELQALYALQASIVKLDQPANLLRMFFDCLYDEEVISEDAFYKWESSKDPAEQNGKGVALKSVTAFFTWLREAEEESEDN

SEQ ID NO: 28828 - protein, 217 aa, Homo sapiens
  Payload ID: 5623
  Gene Symbol: EIF4G3
  Gene Name: eukaryotic translation initiation factor 4 gamma, 3
  ENSP ID: ENSP00000395381
MNSQPQTRSPFFQRPQIQPPRATIPNSSPSIRPGAQTPTAVYQANQHIMMVNHLPMPYPVPQGPQYCIPQYRHSGPPYVGPPQQYPVQPPGPGPFYPGPGPGDFPNAYGTPFYPSQPVYQSAPIIVPTQQQPPPAKREKKTIRIRDPNQGGKDITEEIMSGGGSRNPTPPIGRPTSTPTPPQQLPSQVPEHSPVVYGTVESAHLAASTPVTAASDQK

SEQ ID NO: 28829 - protein, 220 aa, Homo sapiens
  Payload ID: 5623
  Gene Symbol: EIF4G3
  Gene Name: eukaryotic translation initiation factor 4 gamma, 3
  ENSP ID: ENSP00000396083
MNSQPQTRSPPSRTVPIHCTDNWKRRKVLEQTPVYRSLAGRGWIKYCIFFQRPQIQPPRATIPNSSPSIRPGAQTPTAVYQANQHIMMVNHLPMPYPVPQGPQYCIPQYRHSGPPYVGPPQQYPVQPPGPGPFYPGPGPGDFPNAYGTPFYPSQPVYQSAPIIVPTQQQPPPAKREKKTIRIRDPNQGGKDITEEIMSGGGSRNPTPPIGRPTSTPTPPQ

SEQ ID NO: 28830 - protein, 1591 aa, Homo sapiens
  Payload ID: 5623
  Gene Symbol: EIF4G3
  Gene Name: eukaryotic translation initiation factor 4 gamma, 3
  Uniprot ID: O43432
  ENSP ID: ENSP00000473510
MNSQPQTRSPGGFRPIQFFQRPQIQPPRATIPNSSPSIRPGAQTPTAVYQANQHIMMVNHLPMPYPVPQGPQYCIPQYRHSGPPYVGPPQQYPVQPPGPGPFYPGPGPGDFPNAYGTPFYPSQPVYQSAPIIVPTQQQPPPAKREKKTIRIRDPNQGGKDITEEIMSGGGSRNPTPPIGRPTSTPTPPQLPSQVPEHSPVVYGTVESAHLAASTPVTAASDQKQEEKPKPDPVLKSPSPVLRLVLSGEKKEQEGQTSETTAIVSIAELPLPPSPTTVSSVARSTIAAPTSSALSSQPIFTTAIDDRCELSSPREDTIPIPSLTSCTETSDPLPTNENDDDICKKPCSVAPNDIPLVSSTNLINEINGVSEKLSATESIVEIVKQEVLPLTLELEILENPPEEMKLECIPAPITPSTVPSFPPTPPTPPASPPHTPVIVPAAATTVSSPSAAITVQRVLEEDESIRTCLSEDAKEIQNKIEVEADGQTEEILDSQNLNSRRSPVPAQIAITVPKTWKKPKDRTRTTEEMLEAELELKAEEELSIDKVLESEQDKMSQGFHPERDPSDLKKVKAVEENGEEAEPVRNGAESVSEGEGIDANSGSTDSSGDGVTFPFKPESWKPTDTEGKKQYDREFLLDFQFMPACIQKPEGLPPISDVVLDKINQPKLPMRTLDPRILPRGPDFTPAFADFGRQTPGGRGVPLLNVGSRRSQPGQRREPRKIITVSVKEDVHLKKAENAWKPSQKRDSQADDPENIKTQELFRKVRSILNKLTPQMFNQLMKQVSGLTVDTEERLKGVIDLVFEKAIDEPSFSVAYANMCRCLVTLKVPMADKPGNTVNFRKLLLNRCQKEFEKDKADDDVFEKKQKELEAASAPEERTRLHDELEEAKDKARRRSIGNIKFIGELFKLKMLTEAIMHDCVVKLLKNHDEESLECLCRLLTTIGKDLDFEKAKPRMDQYFNQMEKIVKERKTSSRIRFMLQDVIDLRLCNWVSRRADQGPKTIEQIHKEAKIEEQEEQRKVQQLMTKEKRRPGVQRVDEGGWNTVQGAKNSRVLDPSKFLKITKPTIDEKIQLVPKAQLGSWGKGSSGGAKASETDALRSSASSLNRFSALQPPAPSGSTPSTPVEFDSRRTLTSRGSMGREKNDKPLPSATARPNTFMRGGSSKDLLDNQSQEEQRREMLETVKQLTGGVDVERNSTEAERNKTRESAKPEISAMSAHDKAALSEEELERKSKSIIDEFLHINDFKEAMQCVEELNAQGLLHVFVRVGVESTLERSQITRDHMGQLLYQLVQSEKLSKQDFFKGFSETLELADDMAIDIPHIWLYLAELVTPMLKEGGISMRELTIEFSKPLLPVGRAGVLLSEILHLLCKQMSHKKVGALWREADLSWKDFLPEGEDVHNFLLEQKLDFIESDSPCSSEALSKKELSAEELYKRLEKLIIEDKANDEQIFDWVEANLDEIQMSSPTFLRALMTAVCKAAIIADSSTFRVDTAVIKQRVPILLKYLDSDTEKELQALYALQASIVKLDQPANLLRMFFDCLYDEEVISEDAFYKWESSKDPAEQNGKGVALKSVTAFFTWLREAEEESEDN

SEQ ID NO: 28831 - protein, 1774 aa, Homo sapiens
  Payload ID: 5623
  Gene Symbol: EIF4G3
  Gene Name: eukaryotic translation initiation factor 4 gamma, 3
  ENSP ID: ENSP00000489051
VKKIHRHRLSPATEKGAASSGEGDKDPPPPAHEDIAVKGTATAAGTGPGTGAAAAAAAAVPPPHPAAAAAAAAAAAAAAAAAVPPPHPNIRALQTQAPQQIPRGPVQQPLEDRIFTPAVSAVYSTVTQVARQPGTPTPSPYSAHEINKGHPNLAATPPGHASSPGLSQTPYPSGQNAGPTTLVYPQTPQTMNSQPQTRSPFFQRPQIQPPRATIPNSSPSIRPGAQTPTAVYQANQHIMMVNHLPMPYPVPQGPQYCIPQYRHSGPPYVGPPQQYPVQPPGPGPFYPGPGPGDFPNAYGTPFYPSQPVYQSAPIIVPTQQQPPPAKREKKTIRIRDPNQGGKDITEEIMSGGGSRNPTPPIGRPTSTPTPPQLPSQVPEHSPVVYGTVESAHLAASTPVTAASDQKQEEKPKPDPVLKSPSPVLRLVLSGEKKEQEGQTSETTAIVSIAELPLPPSPTTVSSVARSTIAAPTSSALSSQPIFTTAIDDRCELSSPREDTIPIPSLTSCTETSDPLPTNENDDDICKKPCSVAPNDIPLVSSTNLINEINGVSEKLSATESIVEIVKQEVLPLTLELEILENPPEEMKLECIPAPITPSTVPSFPPTPPTPPASPPHTPVIVPAAATTVSSPSAAITVQRVLEEDESIRTCLSEDAKEIQNKIEVEADGQTEEILDSQNLNSRRSPVPAQIAITVPKTWKKPKDRTRTTEEMLEAELELKAEEELSIDKVLESEQDKMSQGFHPERDPSDLKKVKAVEENGEEAEPVRNGAESVSEGEGIDANSGSTDSSGDGVTFPFKPESWKPTDTEGKKQYDREFLLDFQFMPACIQKPEGLPPISDVVLDKINQPKLPMRTLDPRILPRGPDFTPAFADFGRQTPGGRGVPLLNVGSRRSQPGQRREPRKIITVSVKEDVHLKKAENAWKPSQKRDSQADDPENIKTQELFRKVRSILNKLTPQMFNQLMKQVSGLTVDTEERLKGVIDLVFEKAIDEPSFSVAYANMCRCLVTLKVPMADKPGNTVNFRKLLLNRCQKEFEKDKADDDVFEKKQKELEAASAPEERTRLHDELEEAKDKARRRSIGNIKFIGELFKLKMLTEAIMHDCVVKLLKNHDEESLECLCRLLTTIGKDLDFEKAKPRMDQYFNQMEKIVKERKTSSRIRFMLQDVIDLRLCNWVSRRADQGPKTIEQIHKEAKIEEQEEQRKVQQLMTKEKRRPGVQRVDEGGWNTVQGAKNSRVLDPSKFLKITKPTIDEKIQLVPKAQLGSWGKGSSGGAKASETDALRSSASSLNRFSALQPPAPSGSTPSTPVEFDSRRTLTSRGSMGREKNDKPLPSATARPNTFMRGGSSKDLLDNQSQEEQRREMLETVKQLTGGVDVERNSTEAERNKTRESAKPEISAMSAHDKAALSEEELERKSKSIIDEFLHINDFKEAMQCVEELNAQGLLHVFVRVGVESTLERSQITRDHMGQLLYQLVQSEKLSKQDFFKGFSETLELADDMAIDIPHIWLYLAELVTPMLKEGGISMRELTIEFSKPLLPVGRAGVLLSEILHLLCKQMSHKKVGALWREADLSWKDFLPEGEDVHNFLLEQKLDFIESDSPCSSEALSKKELSAEELYKRLEKLIIEDKANDEQIFDWVEANLDEIQMSSPTFLRALMTAVCKAAIIADSSTFRVDTAVIKQRVPILLKYLDSDTEKELQALYALQASIVKLDQPANLLRMFFDCLYDEEVISEDAFYKWESSKDPAEQNGKGVALKSVTAFFTWLREAEEESEDN

SEQ ID NO: 28832 - protein, 406 aa, Homo sapiens
  Payload ID: 5624
  Gene Symbol: EIF4A1
  Gene Name: eukaryotic translation initiation factor 4A1
  Uniprot ID: P60842
  ENSP ID: ENSP00000293831
MSASQDSRSRDNGPDGMEPEGVIESNWNEIVDSFDDMNLSESLLRGIYAYGFEKPSAIQQRAILPCIKGYDVIAQAQSGTGKTATFAISILQQIELDLKATQALVLAPTRELAQQIQKVVMALGDYMGASCHACIGGTNVRAEVQKLQMEAPHIIVGTPGRVFDMLNRRYLSPKYIKMFVLDEADEMLSRGFKDQIYDIFQKLNSNTQVVLLSATMPSDVLEVTKKFMRDPIRILVKKEELTLEGIRQFYINVEREEWKLDTLCDLYETLTITQAVIFINTRRKVDWLTEKMHARDFTVSAMHGDMDQKERDVIMREFRSGSSRVLITTDLLARGIDVQQVSLVINYDLPTNRENYIHRIGRGGRFGRKGVAINMVTEEDKRTLRDIETFYNTSIEEMPLNVADLI

SEQ ID NO: 28833 - protein, 85 aa, Homo sapiens
  Payload ID: 5624
  Gene Symbol: EIF4A1
  Gene Name: eukaryotic translation initiation factor 4A1
  ENSP ID: ENSP00000461921
MSASQDSRTEPNPEERPREAPGAHPAPGGRVHFAAQAGLLANCGWAGPPSFGGERPEIQRQWPRWDGARRRHRVTGMRLLTALMT

SEQ ID NO: 28834 - protein, 187 aa, Homo sapiens
  Payload ID: 5624
  Gene Symbol: EIF4A1
  Gene Name: eukaryotic translation initiation factor 4A1
  ENSP ID: ENSP00000462275
MSASQDSRDNGPDGMEPEGVIESNWNEIVDSFDDMNLSESLLRGIYAYGFEKPSAIQQRAILPCIKGYDVIAQAQSGTGKTATFAISILQQIELDLKATQALVLAPTRELAQQIQKVVMALGDYMGASCHACIGGTNVRAEVQKLQMEAPHIIVGTPGRVFDMLNRRYLSPKYIKMFVLDEADEMLS

SEQ ID NO: 28835 - protein, 85 aa, Homo sapiens
  Payload ID: 5624
  Gene Symbol: EIF4A1
  Gene Name: eukaryotic translation initiation factor 4A1
  ENSP ID: ENSP00000462372
MEPEGVIESNWNEIVDSFDDMNLSESLLRGIYAYGFEKPSAIQQRAILPCIKGYDVIAQAQSGTGKTATFAISILQQIELDLKAT

SEQ ID NO: 28836 - protein, 50 aa, Homo sapiens
  Payload ID: 5624
  Gene Symbol: EIF4A1
  Gene Name: eukaryotic translation initiation factor 4A1
  ENSP ID: ENSP00000462581
MRWPGRSRALYKLSIGGHSALVSKDHVCEPGFPIQRQWPRWDGARRRHRE

SEQ ID NO: 28837 - protein, 230 aa, Homo sapiens
  Payload ID: 5624
  Gene Symbol: EIF4A1
  Gene Name: eukaryotic translation initiation factor 4A1
  ENSP ID: ENSP00000462719
  MOD_RES (1)..(1): Any amino acid
XVVMALGDYMGASCHACIGGTNVRAEVQKLQMEAPHIIVGTPGRVFDMLNRRYLSPKYIKMFVLDEADEMLSRGFKDQIYDIFQKLNSNTQVVLLSATMPSDVLEVTKKFMRDPIRILVKKEELTLEGIRQFYINVEREEWKLDTLCDLYETLTITQAVIFINTRRKVDWLTEKMHARDFTVSAMHGDMDQKERDVIMREFRSGSSRVLITTDLLGKLYPQNRSRWTVWP

SEQ ID NO: 28838 - protein, 85 aa, Homo sapiens
  Payload ID: 5624
  Gene Symbol: EIF4A1
  Gene Name: eukaryotic translation initiation factor 4A1
  ENSP ID: ENSP00000462741
MGRSTFLRGSRDNGPDGMEPEGVIESNWNEIVDSFDDMNLSESLLRGIYAYGFEKPSAIQQRAILPCIKGYDVIAQAQSGTGKTA

SEQ ID NO: 28839 - protein, 341 aa, Homo sapiens
  Payload ID: 5624
  Gene Symbol: EIF4A1
  Gene Name: eukaryotic translation initiation factor 4A1
  ENSP ID: ENSP00000462753
MSASQDSRSRDNGPDGMEPEGVIESNWNEIVDSFDDMNLSESLLRGIYAYGFEKPSAIQQRAILPCIKGYDVIAQAQSGTGKTATFAISILQQIELDLKATQALVLAPTRELAQQIQKVVMALGDYMGASCHACIGGTNVRAEVQKLQMEAPHIIVGTPGRVFDMLNRRYLSPKYIKMFVLDEADEMLSRGFKDQIYDIFQKLNSNTQVVLLSATMPSDVLEVTKKFMRDPIRILVKKEELTLEGIRQFYINVEREEWKLDTLCDLYETLTITQAVIFINTRRKVDWLTEKMHARDFTVSAMHGDMDQKERDVIMREFRSGSSRVLITTDLLNRSRWTVWP

SEQ ID NO: 28840 - protein, 257 aa, Homo sapiens
  Payload ID: 5624
  Gene Symbol: EIF4A1
  Gene Name: eukaryotic translation initiation factor 4A1
  ENSP ID: ENSP00000462904
MEPEGVIESNWNEIVDSFDDMNLSESLLRGIYAYGFEKPSAIQQRAILPCIKGYDVIAQAQSGTGKTATFAISILQQIELDLKATQALVLAPTRELAQQIQKVVMALGDYMGASCHACIGGTNVRAEVQKLQMEAPHIIVGTPGRVFDMLNRRYLSPKYIKMFVLDEADEMLSRGFKDQIYDIFQKLNSNTQVVLLSATMPSDVLEVTKKFMRDPIRILVKKEELTLEGIRQFYINVEREEWKLDTLCDLYETLTIT

SEQ ID NO: 28841 - protein, 117 aa, Homo sapiens
  Payload ID: 5624
  Gene Symbol: EIF4A1
  Gene Name: eukaryotic translation initiation factor 4A1
  ENSP ID: ENSP00000463067
MFVLDEADEMLSRGFKDQIYDIFQKLNSNTQVVLLSATMPSDVLEVTKKFMRDPIRILVKKEELTLEGIRQFYINVEREEWKLDTLCDLYETLTITQAVIFINTRRKVDWLTEKMHA

SEQ ID NO: 28842 - protein, 134 aa, Homo sapiens
  Payload ID: 5624
  Gene Symbol: EIF4A1
  Gene Name: eukaryotic translation initiation factor 4A1
  ENSP ID: ENSP00000463309
MNLSESLLRGIYAYGFEKPSAIQQRAILPCIKGYDVIAQAQSGTGKTATFAISILQQIELDLKATQALVLAPTRELAQQIQKVVMALGDYMGASCHACIGGTNVRAEVQKLQMEAPHIIVGTPGRVFDMLNRRY

SEQ ID NO: 28843 - protein, 271 aa, Homo sapiens
  Payload ID: 5624
  Gene Symbol: EIF4A1
  Gene Name: eukaryotic translation initiation factor 4A1
  ENSP ID: ENSP00000463366
MSASQDSRSRDNGPDGMEPEGVIESNWNEIVDSFDDMNLSESLLRGIYAYGFEKPSAIQQRAILPCIKGYDVIAQAQSGTGKTATFAISILQQIELDLKATQALVLAPTRELAQQIQKVVMALGDYMGASCHACIGGTNVRAEVQKLQMEAPHIIVGTPGRVFDMLNRRYLSPKYIKMFVLDEADEMLSRGFKDQIYDIFQKLNSNTQEELTLEGIRQFYINVEREEWKLDTLCDLYETLTITQAVIFINTRRKVDWLTEKMHARDFTVSA

SEQ ID NO: 28844 - protein, 68 aa, Homo sapiens
  Payload ID: 5624
  Gene Symbol: EIF4A1
  Gene Name: eukaryotic translation initiation factor 4A1
  ENSP ID: ENSP00000463380
INTRRKVDWLTEKMHARDFTVSAMHGDMDQKERDVIMREFRSGSSRVLITTDLLSVLRAHAEELSFLT

SEQ ID NO: 28845 - protein, 347 aa, Homo sapiens
  Payload ID: 5624
  Gene Symbol: EIF4A1
  Gene Name: eukaryotic translation initiation factor 4A1
  Uniprot ID: P60842
  ENSP ID: ENSP00000463486
MSASQDSRSRDNGPDGMEPEGVIESNWNEIVDSFDDMNLSESLLRGIYAYGFEKPSAIQQRAILPCIKGYDVIAQAQSGTGKTATFAISILQQIELDLKATQALVLAPTRELAQQIQKVVMALGDYMGASCHACIGGTNVRAEVQKLQMEAPHIIVGTPGRVFDMLNRRYLSPKYIKMFVLDEADEMLSRGFKDQIYDIFQKLNSNTQVVLLSATMPSDVLEVTKKFMRDPIRILVKKEELTLEGIRQFYINVEREEWKLDTLCDLYETLTITQAVIFINTRRKVDWLTEKMHARDFTVSAMHGDMDQKERDVIMREFRSGSSRVLITTDLLGKLYPQNRSRWTVWP

SEQ ID NO: 28846 - protein, 163 aa, Homo sapiens
  Payload ID: 5624
  Gene Symbol: EIF4A1
  Gene Name: eukaryotic translation initiation factor 4A1
  ENSP ID: ENSP00000463634
MNLSESLLRGIYAYGFEKPSAIQQRAILPCIKGYDVIAQAQSGTGKTATFAISILQQIELDLKATQALVLAPTRELAQQIQKVVMALGDYMGASCHACIGGTNVRAEVQKLQMEAPHIIVGTPGRVFDMLNRRYLSPKYIKMFVLDEADEMLSRGFKDQIYDI

SEQ ID NO: 28847 - protein, 95 aa, Homo sapiens
  Payload ID: 5624
  Gene Symbol: EIF4A1
  Gene Name: eukaryotic translation initiation factor 4A1
  ENSP ID: ENSP00000463821
MSASQDSRSRDNGPDGMEPEGVIESNWNEIVDSFDDMNLSESLLRGIYAYGFEKPSAIQQRAILPCIKDTEGGHGTRRLHGRLLSRLYRGHQRAC

SEQ ID NO: 28848 - protein, 214 aa, Homo sapiens
  Payload ID: 5624
  Gene Symbol: EIF4A1
  Gene Name: eukaryotic translation initiation factor 4A1
  ENSP ID: ENSP00000464066
  MOD_RES (1)..(1): Any amino acid
XAWAHCARGRHRPRPPTSGSRDNGPDGMEPEGVIESNWNEIVDSFDDMNLSESLLRGIYAYGFEKPSAIQQRAILPCIKGYDVIAQAQSGTGKTATFAISILQQIELDLKATQALVLAPTRELAQQIQKVVMALGDYMGASCHACIGGTNVRAEVQKLQMEAPHIIVGTPGRVFDMLNRRYLSPKYIKMFVLDEADEMLSRGFKDQIYDIFQKL

SEQ ID NO: 28849 - protein, 74 aa, Homo sapiens
  Payload ID: 5624
  Gene Symbol: EIF4A1
  Gene Name: eukaryotic translation initiation factor 4A1
  ENSP ID: ENSP00000464082
MSASQDSRTEPNPEERPREAPGAHPAPGGRVHFAAQAGLLANCGWAGPPSFGGERPEIQRQWPRWDGARRRHRE

SEQ ID NO: 28850 - protein, 74 aa, Homo sapiens; identical to SEQ ID NO: 28849
  Payload ID: 5624
  Gene Symbol: EIF4A1
  Gene Name: eukaryotic translation initiation factor 4A1
  ENSP ID: ENSP00000464320

SEQ ID NO: 28851 - protein, 300 aa, Homo sapiens
  Payload ID: 5624
  Gene Symbol: EIF4A1
  Gene Name: eukaryotic translation initiation factor 4A1
  ENSP ID: ENSP00000464550
MSASQDSRSRDNGPDGMEPEGVIESNWNEIVDSFDDMNLSESLLRGIYAYGFEKPSAIQQRAILPCIKGYDVIAQAQSGTGKTATFAISILQQIELDLKATQALVLAPTRELAQQKVVMALGDYMGASCHACIGGTNVRAEVQKLQMEAPHIIVGTPGRVFDMLNRRYLSPKYIKMFVLDEADEMLSRGFKDQIYDIFQKLNSNTQVVLLSATMPSDVLEVTKKFMRDPIRILVKKEELTLEGIRQFYINVEREEWKLDTLCDLYETLTITQAVIFINTRRKVDWLTEKMHARDFTVSAM

SEQ ID NO: 28852 - protein, 407 aa, Homo sapiens
  Payload ID: 5625
  Gene Symbol: EIF4A2
  Gene Name: eukaryotic translation initiation factor 4A2
  Uniprot ID: Q14240
  ENSP ID: ENSP00000326381
MSGGSADYNREHGGPEGMDPDGVIESNWNEIVDNFDDMNLKESLLRGIYAYGFEKPSAIQQRAIIPCIKGYDVIAQAQSGTGKTATFAISILQQLEIEFKETQALVLAPTRELAQQIQKVILALGDYMGATCHACIGGTNVRNEMQKLQAEAPHIVVGTPGRVFDMLNRRYLSPKWIKMFVLDEADEMLSRGFKDQIYEIFQKLNTSIQVVLLSATMPTDVLEVTKKFMRDPIRILVKKEELTLEGIKQFYINVEREEWKLDTLCDLYETLTITQAVIFLNTRRKVDWLTEKMHARDFTVSALHGDMDQKERDVIMREFRSGSSRVLITTDLLARGIDVQQVSLVINYDLPTNRENYIHRIGRGGRFGRKGVAINFVTEEDKRILRDIETFYNTTVEEMPMNVADLI

SEQ ID NO: 28853 - protein, 96 aa, Homo sapiens
  Payload ID: 5625
  Gene Symbol: EIF4A2
  Gene Name: eukaryotic translation initiation factor 4A2
  ENSP ID: ENSP00000388237
MSGGSADYNREHGGPEGMDPDGVIESNWNEIVDNFDDMNLKESLLRGIYAYGFEKPSAIQQRAIIPCIKDPKGNSGTWRLYGSHLSCLHWWNKCSK

SEQ ID NO: 28854 - protein, 96 aa, Homo sapiens; identical to SEQ ID NO: 28853
  Payload ID: 5625
  Gene Symbol: EIF4A2
  Gene Name: eukaryotic translation initiation factor 4A2
  ENSP ID: ENSP00000392686

SEQ ID NO: 28855 - protein, 408 aa, Homo sapiens
  Payload ID: 5625
  Gene Symbol: EIF4A2
  Gene Name: eukaryotic translation initiation factor 4A2
  Uniprot ID: Q14240
  ENSP ID: ENSP00000398370
MSGGSADYNSREHGGPEGMDPDGVIESNWNEIVDNFDDMNLKESLLRGIYAYGFEKPSAIQQRAIIPCIKGYDVIAQAQSGTGKTATFAISILQQLEIEFKETQALVLAPTRELAQQIQKVILALGDYMGATCHACIGGTNVRNEMQKLQAEAPHIVVGTPGRVFDMLNRRYLSPKWIKMFVLDEADEMLSRGFKDQIYEIFQKLNTSIQVVLLSATMPTDVLEVTKKFMRDPIRILVKKEELTLEGIKQFYINVEREEWKLDTLCDLYETLTITQAVIFLNTRRKVDWLTEKMHARDFTVSALHGDMDQKERDVIMREFRSGSSRVLITTDLLARGIDVQQVSLVINYDLPTNRENYIHRIGRGGRFGRKGVAINFVTEEDKRILRDIETFYNTTVEEMPMNVADLI

SEQ ID NO: 28856 - protein, 97 aa, Homo sapiens
  Payload ID: 5625
  Gene Symbol: EIF4A2
  Gene Name: eukaryotic translation initiation factor 4A2
  ENSP ID: ENSP00000402313
MSGGSADYNSREHGGPEGMDPDGVIESNWNEIVDNFDDMNLKESLLRGIYAYGFEKPSAIQQRAIIPCIKDPKGNSGTWRLYGSHLSCLHWWNKCSK

SEQ ID NO: 28857 - protein, 57 aa, Homo sapiens
  Payload ID: 5625
  Gene Symbol: EIF4A2
  Gene Name: eukaryotic translation initiation factor 4A2
  ENSP ID: ENSP00000407504
MSGGSADYNREHGGPEGMDPDGVIESNWNEIVDNFDDMNLKESLLRGIYAYGFEKPS

SEQ ID NO: 28858 - protein, 362 aa, Homo sapiens
  Payload ID: 5625
  Gene Symbol: EIF4A2
  Gene Name: eukaryotic translation initiation factor 4A2
  ENSP ID: ENSP00000413529
MSGGSADYNREHGGPEGMDPDGVIESNWNEIVDNFDDMNLKESLLRGIYAYGFEKPSAIQQRAIIPCIKGYDVIAQAQSGTGKTATFAISILQQLEIEFKETQALVLAPTRELAQQIQKVILALGDYMGATCHACIGGTNVRNEMQKLQAEAPHIVVGTPGRVFDMLNRRYLSPKWIKMFVLDEADEMLSRGFKDQIYEIFQKLNTSIQVVLLSATMPTDVLEVTKKFMRDPIRILVKKEELTLEGIKQFYINVEREEWKLDTLCDLYETLTITQAVIFLNTRRKVDWLTEKMHARDFTVSALHGDMDQKERDVIMREFRSGSSRVLITTDLLARGIDVQQVSLVINYDLPTNRENYIHRSR

SEQ ID NO: 28859 - protein, 98 aa, Homo sapiens
  Payload ID: 5625
  Gene Symbol: EIF4A2
  Gene Name: eukaryotic translation initiation factor 4A2
  ENSP ID: ENSP00000415878
MSGGSADYNREHGGPEGMDPDGVIESNWNEIVDNFDDMNLKESLLRGIYAYGFEKPSAIQQRAIIPCIKGYDVIAQAQSGTGKTATFAISILQQLEIE

SEQ ID NO: 28860 - protein, 109 aa, Homo sapiens
  Payload ID: 5625
  Gene Symbol: EIF4A2
  Gene Name: eukaryotic translation initiation factor 4A2
  ENSP ID: ENSP00000462571
MDPDGVIESNWNEIVDNFDDMNLKESLLRGIYAYGFEKPSAIQQRAIIPCIKGYDVIAQAQSGTGKTATFAISILQQLEIEFKETQALVLAPTRELAQQIQKVILALGD

SEQ ID NO: 28861 - protein, 411 aa, Homo sapiens
  Payload ID: 5626
  Gene Symbol: EIF4A3
  Gene Name: eukaryotic translation initiation factor 4A3
  Uniprot ID: P38919
  ENSP ID: ENSP00000269349
MATTATMATSGSARKRLLKEEDMTKVEFETSEEVDVTPTFDTMGLREDLLRGIYAYGFEKPSAIQQRAIKQIIKGRDVIAQSQSGTGKTATFSISVLQCLDIQVRETQALILAPTRELAVQIQKGLLALGDYMNVQCHACIGGTNVGEDIRKLDYGQHVVAGTPGRVFDMIRRRSLRTRAIKMLVLDEADEMLNKGFKEQIYDVYRYLPPATQVVLISATLPHEILEMTNKFMTDPIRILVKRDELTLEGIKQFFVAVEREEWKFDTLCDLYDTLTITQAVIFCNTKRKVDWLTEKMREANFTVSSMHGDMPQKERESIMKEFRSGASRVLISTDVWARGLDVPQVSLIINYDLPNNRELYIHRIGRSGRYGRKGVAINFVKNDDIRILRDIEQYYSTQIDEMPMNVADLI

SEQ ID NO: 28862 - protein, 125 aa, Homo sapiens
  Payload ID: 5626
  Gene Symbol: EIF4A3
  Gene Name: eukaryotic translation initiation factor 4A3
  ENSP ID: ENSP00000460439
MATTATMATSGSARKRLLKEEDMTKVEFETSEEVDVTPTFDTMGLREDLLRGIYAYGFEKPSAIQQRAIKQIIKGRDVIAQSQSGTGKTATFSISVLQCLDIQGLLALGDYMNVQCHACIGGTNV

SEQ ID NO: 28863 - protein, 611 aa, Homo sapiens
  Payload ID: 5627
  Gene Symbol: EIF4B
  Gene Name: eukaryotic translation initiation factor 4B
  Uniprot ID: P23588
  ENSP ID: ENSP00000262056
MAASAKKKNKKGKTISLTDFLAEDGGTGGGSTYVSKPVSWADETDDLEGDVSTTWHSNDDDVYRAPPIDRSILPTAPRAAREPNIDRSRLPKSPPYTAFLGNLPYDVTEESIKEFFRGLNISAVRLPREPSNPERLKGFGYAEFEDLDSLLSALSLNEESLGNRRIRVDVADQAQDKDRDDRSFGRDRNRDSDKTDTDWRARPATDSFDDYPPRRGDDSFGDKYRDRYDSDRYRDGYRDGYRDGPRRDMDRYGGRDRYDDRGSRDYDRGYDSRIGSGRRAFGSGYRRDDDYRGGGDRYEDRYDRRDDRSWSSRDDYSRDDYRRDDRGPPQRPKLNLKPRSTPKEDDSSASTSQSTRAASIFGGAKPVDTAAREREVEERLQKEQEKLQRQLDEPKLERRPRERHPSWRSEETQERERSRTGSESSQTGTSTTSSRNARRRESEKSLENETLNKEEDCHSPTSKPPKPDQPLKVMPAPPPKENAWVKRSSNPPARSQSSDTEQQSPTSGGGKVAPAQPSEEGPGRKDENKVDGMNAPKGQTGNSSRGPGDGGNRDHWKESDRKDGKKDQDSRSAPEPKKPEENPASKFSSASKYAALSVDGEDENEGEDYAE

SEQ ID NO: 28864 - protein, 616 aa, Homo sapiens
  Payload ID: 5627
  Gene Symbol: EIF4B
  Gene Name: eukaryotic translation initiation factor 4B
  ENSP ID: ENSP00000388806
MAASAKKKNKKGKTISLTDFLAEDGGTGGGSTYVSKPVSWADETDDLEGDVSTTWHSNDDDVYRAPPIDRSILPTAPRAAREPNIDRSRLPKSPPYTAFLGNLPYDVTEESIKEFFRGLNISAVRLPREPSNPERLKGFGYAEFEDLDSLLSALSLNEESLGNRRIRVDVADQAQDKDRDDRSFGRDRNRDSDKTDTDWRARPATDSFDDYPPRRGDDSFGDKYRDRYDSDRYRDGYRDGYRDGPRRDMDRYGGRDRYDDRGSRDYDRGYDSRIGSGRRAFGSGYRRDDDYRGGGDRYEDRYDRRDDRSWSSRDDYSRDDYRRDDRGPPQRPKLNLKPRSTPKEDDSSASTSQSTRAASIFGGAKPVDTAAREREVEERLQKEQEKLQRQLDEPKLERRPRERHPSWRSEETQERERSRTGSESSQTGTSTTSSRSKSDQDARRRESEKSLENETLNKEEDCHSPTSKPPKPDQPLKVMPAPPPKENAWVKRSSNPPARSQSSDTEQQSPTSGGGKVAPAQPSEEGPGRKDENKVDGMNAPKGQTGNSSRGPGDGGNRDHWKESDRKDGKKDQDSRSAPEPKKPEENPASKFSSASKYAALSVDGEDENEGEDYAE

SEQ ID NO: 28865 - protein, 572 aa, Homo sapiens
  Payload ID: 5627
  Gene Symbol: EIF4B
  Gene Name: eukaryotic translation initiation factor 4B
  Uniprot ID: P23588
  ENSP ID: ENSP00000412530
MAASAKKKNKKGKTISLTDFLAEDGGTGGGSTYVSKPVSWADETDDLEGDVSTTWHSNDDDVYRAPPIDRSILPTAPRAAREPNIDRSRLPKSPPYTAFLGNLPYDVTEESIKEFFRGLNSLGNRRIRVDVADQAQDKDRDDRSFGRDRNRDSDKTDTDWRARPATDSFDDYPPRRGDDSFGDKYRDRYDSDRYRDGYRDGYRDGPRRDMDRYGGRDRYDDRGSRDYDRGYDSRIGSGRRAFGSGYRRDDDYRGGGDRYEDRYDRRDDRSWSSRDDYSRDDYRRDDRGPPQRPKLNLKPRSTPKEDDSSASTSQSTRAASIFGGAKPVDTAAREREVEERLQKEQEKLQRQLDEPKLERRPRERHPSWRSEETQERERSRTGSESSQTGTSTTSSRNARRRESEKSLENETLNKEEDCHSPTSKPPKPDQPLKVMPAPPPKENAWVKRSSNPPARSQSSDTEQQSPTSGGGKVAPAQPSEEGPGRKDENKVDGMNAPKGQTGNSSRGPGDGGNRDHWKESDRKDGKKDQDSRSAPEPKKPEENPASKFSSASKYAALSVDGEDENEGEDYAE

SEQ ID NO: 28866 - protein, 169 aa, Homo sapiens
  Payload ID: 5627
  Gene Symbol: EIF4B
  Gene Name: eukaryotic translation initiation factor 4B
  ENSP ID: ENSP00000447192
MAASVSTTWHSNDDDVYRAPPIDRSILPTAPRAAREPNIDRSRLPKSPPYTAFLGNLPYDVTEESIKEFFRGLNISAVRLPREPSNPERLKGFGYAEFEDLDSLLSALSLNEESLGNRRIRVDVADQAQDKDRDDRSFGRDRNRDSDKTDTDWRARPATDSFDDYPPRR

SEQ ID NO: 28867 - protein, 227 aa, Homo sapiens
  Payload ID: 5627
  Gene Symbol: EIF4B
  Gene Name: eukaryotic translation initiation factor 4B
  ENSP ID: ENSP00000448365
MAASAKKKNKKGKTISLTDFLAEDGGTGGGSTYVSKPVSWADETDDLEGDVSTTWHSNDDDVYRAPPIDRSILPTAPRAAREPNIDRSRLPKSPPYTAFLGNLPYDVTEESIKEFFRGLNISAVRLPREPSNPERLKGFGYAEFEDLDSLLSALSLNEESLGNRRIRVDVADQAQDKDRDDRSFGRDRNRDSDKTDTDWRARPATDSFDDYPPRRGDDSFGDRRNGS

SEQ ID NO: 28868 - protein, 175 aa, Homo sapiens
  Payload ID: 5627
  Gene Symbol: EIF4B
  Gene Name: eukaryotic translation initiation factor 4B
  ENSP ID: ENSP00000448399
MAASAKKKNKKGKTISLTDFLAEDGGTGGGSTYVSKPVSWADETDDLEGDVSTTWHSNDDDVYRAPPIDRSILPTAPRAAREPNIDRSRLPKSPPYTAFLGNLPYDVTEESIKEFFRGLNISAVRLPREPSNPERLKGFGYAEFEDLDSLLSALSLNEECFCYAQTFKVTQGICA

SEQ ID NO: 28869 - protein, 185 aa, Homo sapiens
  Payload ID: 5627
  Gene Symbol: EIF4B
  Gene Name: eukaryotic translation initiation factor 4B
  ENSP ID: ENSP00000448980
MAASAKKKNKKGKTISLTDFLAEDGGTGGGSTYVSKPVSWADETDDLEGDVSTTWHSNDDDVYRAPPIDRSILPTAPRAAREPNIDRSRLPKSPPYTAFLGNLPYDVTEESIKEFFRGLNISAVRLPREPSNPERLKGFGYAEFEDLDSLLSALSLNEESLGNRRIRVDVADQAQDKGTPGPYRI

SEQ ID NO: 28870 - protein, 360 aa, Homo sapiens
  Payload ID: 5627
  Gene Symbol: EIF4B
  Gene Name: eukaryotic translation initiation factor 4B
  ENSP ID: ENSP00000449746
MAASAKKKNKKGKTISLTDFLAEDGGTGGGSTYVSKPVSWADETDDLEGDVSTTWHSNDDDVYRAPPIDRSILPTAPRAAREPNIDRSRLPKSPPYTAFLGNLPYDVTEESIKEFFRGLNISAVRLPREPSNPERLKGFGYAEFEDLDSLLSALSLNEESLGNRRIRVDVADQAQDKEYRDRYDSDRYRDGYRDGYRDGPRRDMDRYGGRDRYDDRGSRDYDRGYDSRIGSGRRAFGSGYRRDDDYRGGGDRYEDRYDRRDDRSWSSRDDYSRDDYRRDDRGPPQRPKLNLKPRSTPKEDDSSASTSQSTRAASIFGGAKPVDTAAREREVEERLQKEQEKLQRQLDEPKLERRPRERHP

SEQ ID NO: 28871 - protein, 275 aa, Homo sapiens
  Payload ID: 5627
  Gene Symbol: EIF4B
  Gene Name: eukaryotic translation initiation factor 4B
  ENSP ID: ENSP00000450324
MAASAKKKNKKGKTISLTDFLAEDGGTGGGSTYVSKPVSWADETDDLEGDVSTTWHSNDDDVYRAPPIDRSILPTAPRAAREPNIDRSRLPKSPPYTAFLGNLPYDVTEESIKEFFRGLNISAVRLPREPSNPERLKGFGYAEFEDLDSLLSALSLNEESLGNRRIRVDVADQAQDKDRDDRSFGRDRNRDSDKTDTDWRARPATDSFDDYPPRRGDDSFGDSYDSRIGSGRRAFGSGYRRDDDYRGGGDRYEDRYDRRDDRSWSSRDDYSRDDY

SEQ ID NO: 28872 - protein, 237 aa, Homo sapiens
  Payload ID: 5628
  Gene Symbol: EIF4E
  Gene Name: eukaryotic translation initiation factor 4E
  Uniprot ID: P06730
  ENSP ID: ENSP00000280892
MLDLTSRGQVGTSRRMAEAACSAHFLETTPTPNPPTTEEEKTESNQEVANPEHYIKHPLQNRWALWFFKNDKSKTWQANLRLISKFDTVEDFWALYNHIQLSSNLMPGCDYSLFKDGIEPMWEDEKNKRGGRWLITLNKQQRRSDLDRFWLETLLCLIGESFDDYSDDVCGAVVNVRAKGDKIAIWTTECENREAVTHIGRVYKERLGLPPKIVIGYQSHADTATKSGSTTKNRFVV

SEQ ID NO: 28873 - protein, 217 aa, Homo sapiens [sequence omitted]

SEQ ID NO: 28874 - protein, 155 aa, Homo sapiens
  Payload ID: 5628
  Gene Symbol: EIF4E
  Gene Name: eukaryotic translation initiation factor 4E
  ENSP ID: ENSP00000421287
  MOD_RES (1)..(1): Any amino acid
XEPETTPTPNPPTTEEEKTESNQEVANPEHYIKHPLQNRWALWFFKNDKSKTWQANLRLISKFDTVEDFWALYNHIQLSSNLMPGCDYSLFKDGIEPMWEDEKNKRGGRWLITLNKQQRRSDLDRFWLETEGIQGKVRTSSKDSDWLSVPRRHSY

SEQ ID NO: 28875 - protein, 245 aa, Homo sapiens
  Payload ID: 5628
  Gene Symbol: EIF4E
  Gene Name: eukaryotic translation initiation factor 4E
  ENSP ID: ENSP00000423977
MKKKQNKKERKKMRAEDGENDAIKKQAESLRESQETTPTPNPPTTEEEKTESNQEVANPEHYIKHPLQNRWALWFFKNDKSKTWQANLRLISKFDTVEDFWALYNHIQLSSNLMPGCDYSLFKDGIEPMWEDEKNKRGGRWLITLNKQQRRSDLDRFWLETLLCLIGESFDDYSDDVCGAVVNVRAKGDKIAIWTTECENREAVTHIGRVYKERLGLPPKIVIGYQSHADTATKSGSTTKNRFVV

SEQ ID NO: 28876 - protein, 248 aa, Homo sapiens
  Payload ID: 5628
  Gene Symbol: EIF4E
  Gene Name: eukaryotic translation initiation factor 4E
  Uniprot ID: P06730
  ENSP ID: ENSP00000425561
MATVEPETTPTPNPPTTEEEKTESNQEVANPEHYIKHPLQNRWALWFFKNDKSKTWQANLRLISKFDTVEDFWALYNHIQLSSNLMPGCDYSLFKDGIEPMWEDEKNKRGGRWLITLNKQQRRSDLDRFWLETRWDLAMLPRLVSNFWPQVILPLQPPKVLELQLLCLIGESFDDYSDDVCGAVVNVRAKGDKIAIWTTECENREAVTHIGRVYKERLGLPPKIVIGYQSHADTATKSGSTTKNRFVV

SEQ ID NO: 28877 - protein, 42 aa, Homo sapiens
  Payload ID: 5628
  Gene Symbol: EIF4E
  Gene Name: eukaryotic translation initiation factor 4E
  ENSP ID: ENSP00000426602
MATVEPETTPTPNPPTTEEEKTESNQEVANPEHYIKHPLQNR

SEQ ID NO: 28878 - protein, 118 aa, Homo sapiens
  Payload ID: 5629
  Gene Symbol: EIF4EBP1
  Gene Name: eukaryotic translation initiation factor 4E binding protein 1
  Uniprot ID: Q13541
  ENSP ID: ENSP00000340691
MSGGSSCSQTPSRAIPATRRVVLGDGVQLPPGDYSTTPGGTLFSTTPGGTRIIYDRKFLMECRNSPVTKTPPRDLPTIPGVTSPSSDEPPMEASQSHLRNSPEDKRAGGEESQFEMDI

SEQ ID NO: 28879 - protein, 120 aa, Homo sapiens
  Payload ID: 5630
  Gene Symbol: EIF4EBP2
  Gene Name: eukaryotic translation initiation factor 4E binding protein 2
  Uniprot ID: Q13542
  ENSP ID: ENSP00000362314
MSSSAGSGHQPSQSRAIPTRTVAISDAAQLPHDYCTTPGGTLFSTTPGGTRIIYDRKFLLDRRNSPMAQTPPCHLPNIPGVTSPGTLIEDSKVEVNNLNNLNNHDRKHAVGDDAQFEMDI

SEQ ID NO: 28880 - protein, 100 aa, Homo sapiens
  Payload ID: 5631
  Gene Symbol: EIF4EBP3
  Gene Name: eukaryotic translation initiation factor 4E binding protein 3
  Uniprot ID: O60516
  ENSP ID: ENSP00000308472
MSTSTSCPIPGGRDQLPDCYSTTPGGTLYATTPGGTRIIYDRKFLLECKNSPIARTPPCCLPQIPGVTTPPTAPLSKLEELKEQETEEEIPDDAQFEMDI

SEQ ID NO: 28881 - protein, 242 aa, Homo sapiens
  Payload ID: 5632
  Gene Symbol: EIF4E1B
  Gene Name: eukaryotic translation initiation factor 4E family member 1B
  Uniprot ID: A6NMX2
  ENSP ID: ENSP00000323714
MLAVEVSEAEGGIREWEEEEKEEEAAERTPTGEKSPNSPRTLLSLRGKARTGGPMEVKLELHPLQNRWALWFFKNDRSRAWQDNLHLVTKVDTVEDFWALYSHIQLASKLSSGCDYALFKDGIQPMWEDSRNKRGGRWLVSLAKQQRHIELDRLWLETLLCLIGESFEEHSREVCGAVVNIRTKGDKIAVWTREAENQAGVLHVGRVYKERLGLSPKTIIGYQAHADTATKSNSLAKNKFVV

SEQ ID NO: 28882 - protein, 90 aa, Homo sapiens
  Payload ID: 5632
  Gene Symbol: EIF4E1B
  Gene Name: eukaryotic translation initiation factor 4E family member 1B
  ENSP ID: ENSP00000421009
MLAVEVSEAEGGIREWEEEEKEEEAAERTPTGEKSPNSPRTLLSLRGKARTGGPMEVKLELHPLQNRWALWFFKNDRSRAWQDNLHLVTK

SEQ ID NO: 28883 - protein, 171 aa, Homo sapiens
  Payload ID: 5632
  Gene Symbol: EIF4E1B
  Gene Name: eukaryotic translation initiation factor 4E family member 1B
  ENSP ID: ENSP00000422420
  MOD_RES (1)..(1): Any amino acid
XLHPLQNRWALWFFKNDRSRAWQDNLHLVTKVDTVEDFWALYSHIQLASKLSSGCDYALFKDGIQPMWEDSRNKRGGRWLVSLAKQQRHIELDRLWLETQRGMWGRRQHPHQGGQDRCVDEGGGKPGGRAARWACIQRAPGPLPKDHHWVPGPCRHSHQEQLPSQEQVCGV

SEQ ID NO: 28884 - protein, 242 aa, Homo sapiens; identical to SEQ ID NO: 28881
  Payload ID: 5632
  Gene Symbol: EIF4E1B
  Gene Name: eukaryotic translation initiation factor 4E family member 1B
  Uniprot ID: A6NMX2
  ENSP ID: ENSP00000427633

SEQ ID NO: 28885 - protein, 245 aa, Homo sapiens
  Payload ID: 5633
  Gene Symbol: EIF4E2
  Gene Name: eukaryotic translation initiation factor 4E family member 2
  Uniprot ID: O60573
  ENSP ID: ENSP00000258416
MNNKFDALKDDDSGDHDQNEENSTQKDGEKEKTERDKNQSSSKRKAVVPGPAEHPLQYNYTFWYSRRTPGRPTSSQSYEQNIKQIGTFASVEQFWRFYSHMVRPGDLTGHSDFHLFKEGIKPMWEDDANKNGGKWIIRLRKGLASRCWENLILAMLGEQFMVGEEICGAVVSVRFQEDIISIWNKTASDQATTARIRDTLRRVLNLPPNTIMEYKTHTDSIKMPGRLGPQRLLFQNLWKPRLNVP

SEQ ID NO: 28886 - protein, 200 aa, Homo sapiens
  Payload ID: 5633
  Gene Symbol: EIF4E2
  Gene Name: eukaryotic translation initiation factor 4E family member 2
  ENSP ID: ENSP00000386424
MNNKFDALKDDDSGDHDQNEENSTQKDGEKEKTERDKNQSSSKRKVEQFWRFYSHMVRPGDLTGHSDFHLFKEGIKPMWEDDANKNGGKWIIRLRKGLASRCWENLILAMLGEQFMVGEEICGAVVSVRFQEDIISIWNKTASDQATTARIRDTLRRVLNLPPNTIMEYKTHTDSIKMPGRLGPQRLLFQNLWKPRLNVP

SEQ ID NO: 28887 - protein, 233 aa, Homo sapiens
  Payload ID: 5633
  Gene Symbol: EIF4E2
  Gene Name: eukaryotic translation initiation factor 4E family member 2
  ENSP ID: ENSP00000386876
MNNKFDALKDDDSGDHDQNEENSTQKDGEKEKTERDKNQSSSKRKAVVPGPAEHPLQYNYTFWYSRRTPGRPTSSQSYEQNIKQIGTFASVEQFWRFYSHMVRPGDLTGHSDFHLFKEGIKPMWEDDANKNGGKWIIRLRKGLASRCWENLILAMLGEQFMVGEEICGAVVSVRFQEDIISIWNKTASDQATTARIRDTLRRVLNLPPNTIMEYKTHTDSIKYVLGGYGRTCP

SEQ ID NO: 28888 - protein, 189 aa, Homo sapiens
  Payload ID: 5633
  Gene Symbol: EIF4E2
  Gene Name: eukaryotic translation initiation factor 4E family member 2
  ENSP ID: ENSP00000386983
MNNKFDALKDDDSGDHDQNEENSTQKDGEKEKTERDKNQSSSKRKVEQFWRFYSHMVRPGDLTGHSDFHLFKEGIKPMWEDDANKNGGKWIIRLRKGLASRCWENLILAMLGEQFMVGEEICGAVVSVRFQEDIISIWNKTASDQATTARIRDTLRRVLNLPPNTIMEYKTHTDSIKDNSSFRNTKITL

SEQ ID NO: 28889 - protein, 234 aa, Homo sapiens
  Payload ID: 5633
  Gene Symbol: EIF4E2
  Gene Name: eukaryotic translation initiation factor 4E family member 2
  Uniprot ID: O60573
  ENSP ID: ENSP00000386996
MNNKFDALKDDDSGDHDQNEENSTQKDGEKEKTERDKNQSSSKRKAVVPGPAEHPLQYNYTFWYSRRTPGRPTSSQSYEQNIKQIGTFASVEQFWRFYSHMVRPGDLTGHSDFHLFKEGIKPMWEDDANKNGGKWIIRLRKGLASRCWENLILAMLGEQFMVGEEICGAVVSVRFQEDIISIWNKTASDQATTARIRDTLRRVLNLPPNTIMEYKTHTDSIKDNSSFRNTKITL

SEQ ID NO: 28890 - protein, 188 aa, Homo sapiens
  Payload ID: 5633
  Gene Symbol: EIF4E2
  Gene Name: eukaryotic translation initiation factor 4E family member 2
  ENSP ID: ENSP00000387328
MNNKFDALKDDDSGDHDQNEENSTQKDGEKEKTERDKNQSSSKRKVEQFWRFYSHMVRPGDLTGHSDFHLFKEGIKPMWEDDANKNGGKWIIRLRKGLASRCWENLILAMLGEQFMVGEEICGAVVSVRFQEDIISIWNKTASDQATTARIRDTLRRVLNLPPNTIMEYKTHTDSIKYVLGGYGRTCP

SEQ ID NO: 28891 - protein, 236 aa, Homo sapiens
  Payload ID: 5633
  Gene Symbol: EIF4E2
  Gene Name: eukaryotic translation initiation factor 4E family member 2
  ENSP ID: ENSP00000387336
MNNKFDALKDDDSGDHDQNEENSTQKDGEKEKTERDKNQSSSKRKAVVPGPAEHPLQYNYTFWYSRRTPGRPTSSQSYEQNIKQIGTFASVEQFWRFYSHMVRPGDLTGHSDFHLFKEGIKPMWEDDANKNGGKWIIRLRKGLASRCWENLILAMLGEQFMVGEEICGAVVSVRFQEDIISIWNKTASDQATTARIRDTLRRVLNLPPNTIMEYKTHTDSIKAWEEFHGLVNSSGR

SEQ ID NO: 28892 - protein, 121 aa, Homo sapiens
  Payload ID: 5633
  Gene Symbol: EIF4E2
  Gene Name: eukaryotic translation initiation factor 4E family member 2
  ENSP ID: ENSP00000389578
RVGCSAPRKGKSSGTSLLCSQGLGGVSWPGEQQRPLIGRSPSVSHTQGTIQAFEIQKSHCESTQAGNNPFLYVCVCPKWMGGLQPVLPLLTEGTSLSRALSFCTHSWRTDSARHPPASLTL

SEQ ID NO: 28893 - protein, 213 aa, Homo sapiens
  Payload ID: 5633
  Gene Symbol: EIF4E2
  Gene Name: eukaryotic translation initiation factor 4E family member 2
  ENSP ID: ENSP00000390904
MSLKDDDSGDHDQNEENSTQKDGEKEKTERDKNQSSSKRKAVVPGPAEHPLQYNYTFWYSRRTPGRPTSSQSYEQNIKQIGTFASVEQFWRFYSHMVRPGDLTGHSDFHLFKEGIKPMWEDDANKNGGKWIIRLRKGLASRCWENLILAMLGEQFMVGEEICGAVVSVRFQEDIISIWNKTASDQATTARIRDTLRRVLNLPPNTIMEYKTHT

SEQ ID NO: 28894 - protein, 118 aa, Homo sapiens
  Payload ID: 5634
  Gene Symbol: EIF4E3
  Gene Name: eukaryotic translation initiation factor 4E family member 3
  Uniprot ID: Q8N5X7
  ENSP ID: ENSP00000295612
MRGERRPLWEEESNAKGGVWKMKVPKDSTSTVWKELLLATIGEQFTDCAAADDEVIGVSVSVRDREDVVQVWNVNASLVGEATVLEKIYELLPHITFKAVFYKPHEEHHAFEGGRGKH

SEQ ID NO: 28895 - protein, 118 aa, Homo sapiens; identical to SEQ ID NO: 28894
  Payload ID: 5634
  Gene Symbol: EIF4E3
  Gene Name: eukaryotic translation initiation factor 4E family member 3
  Uniprot ID: Q8N5X7
  ENSP ID: ENSP00000374476

SEQ ID NO: 28896 - protein, 224 aa, Homo sapiens
  Payload ID: 5634
  Gene Symbol: EIF4E3
  Gene Name: eukaryotic translation initiation factor 4E family member 3
  Uniprot ID: Q8N5X7
  ENSP ID: ENSP00000393324
MALPPAAAPPAGAREPPGSRAAAAAAAPEPPLGLQQLSALQPEPGGVPLHSSWTFWLDRSLPGATAAECASNLKKIYTVQTVQIFWSVYNNIPPVTSLPLRCSYHLMRGERRPLWEEESNAKGGVWKMKVPKDSTSTVWKELLLATIGEQFTDCAAADDEVIGVSVSVRDREDVVQVWNVNASLVGEATVLEKIYELLPHITFKAVFYKPHEEHHAFEGGRGKH

SEQ ID NO: 28897 - protein, 118 aa, Homo sapiens; identical to SEQ ID NO: 28894
  Payload ID: 5634
  Gene Symbol: EIF4E3
  Gene Name: eukaryotic translation initiation factor 4E family member 3
  Uniprot ID: Q8N5X7
  ENSP ID: ENSP00000410350

SEQ ID NO: 28898 - protein, 118 aa, Homo sapiens; identical to SEQ ID NO: 28894
  Payload ID: 5634
  Gene Symbol: EIF4E3
  Gene Name: eukaryotic translation initiation factor 4E family member 3
  Uniprot ID: Q8N5X7
  ENSP ID: ENSP00000411762

SEQ ID NO: 28899 - protein, 51 aa, Homo sapiens
  Payload ID: 5634
  Gene Symbol: EIF4E3
  Gene Name: eukaryotic translation initiation factor 4E family member 3
  ENSP ID: ENSP00000417889
MRGERRPLWEEESNAKGGVWKMKVPKDSTSTVWKELLLATIGEQFTDCAAA

SEQ ID NO: 28900 - protein, 93 aa, Homo sapiens
  Payload ID: 5634
  Gene Symbol: EIF4E3
  Gene Name: eukaryotic translation initiation factor 4E family member 3
  ENSP ID: ENSP00000418211
MRGERRPLWEEESNAKGGVWKMKVPKDSTSTVWKELLLATIGEQFTDCAAADDEVIGVSVSVRDREDVVQVWNVNASLVGEATVLEKIYELLP

SEQ ID NO: 28901 - protein, 44 aa, Homo sapiens
  Payload ID: 5634
  Gene Symbol: EIF4E3
  Gene Name: eukaryotic translation initiation factor 4E family member 3
  ENSP ID: ENSP00000419421
MRGERRPLWEEESNAKGGVWKMKVPKDSTSTVWKELLLATIGEQ

SEQ ID NO: 28902 - protein, 985 aa, Homo sapiens
  Payload ID: 5635
  Gene Symbol: EIF4ENIF1
  Gene Name: eukaryotic translation initiation factor 4E nuclear import factor 1
  Uniprot ID: Q9NRA8
  ENSP ID: ENSP00000328103
MDRRSMGETESGDAFLDLKKPPASKCPHRYTKEELLDIKELPHSKQRPSCLSEKYDSDGVWDPEKWHASLYPASGRSSPVESLKKELDTDRPSLVRRIVDPRERVKEDDLDVVLSPQRRSFGGGCHVTAAVSSRRSGSPLEKDSDGLRLLGGRRIGSGRIISARTFEKDHRLSDKDLRDLRDRDRERDFKDKRFRREFGDSKRVFGERRRNDSYTEEEPEWFSAGPTSQSETIELTGFDDKILEEDHKGRKRTRRRTASVKEGIVECNGGVAEEDEVEVILAQEPAADQEVPRDAVLPEQSPGDFDFNEFFNLDKVPCLASMIEDVLGEGSVSASRFSRWFSNPSRSGSRSSSLGSTPHEELERLAGLEQAILSPGQNSGNYFAPIPLEDHAENKVDILEMLQKAKVDLKPLLSSLSANKEKLKESSHSGVVLSVEEVEAGLKGLKVDQQVKNSTPFMAEHLEETLSAVTNNRQLKKDGDMTAFNKLVSTMKASGTLPSQPKVSRNLESHLMSPAEIPGQPVPKNILQELLGQPVQRPASSNLLSGLMGSLEPTTSLLGQRAPSPPLSQVFQTRAASADYLRPRIPSPIGFTPGPQQLLGDPFQGMRKPMSPITAQMSQLELQQAALEGLALPHDLAVQAANFYQPGFGKPQVDRTRDGFRNRQQRVTKSPAPVHRGNSSSPAPAASITSMLSPSFTPTSVIRKMYESKEKSKEEPASGKAALGDSKEDTQKASEENLLSSSSVPSADRDSSPTTNSKLSALQRSSCSTPLSQANRYTKEQDYRPKATGRKTPTLASPVPTTPFLRPVHQVPLVPHVPMVRPAHQLHPGLVQRMLAQGVHPQHLPSLLQTGVLPPGMDLSHLQGISGPILGQPFYPLPAASHPLLNPRPGTPLHLAMVQQQLQRSVLHPPGSGSHAAAVSVQTTPQNVPSRSGLPHMHSQLEHRPSQRSSSPVGLAKWFGSDVLQQPLPSMPAKVISVDELEYRQ

SEQ ID NO: 28903 - protein, 811 aa, Homo sapiens
  Payload ID: 5635
  Gene Symbol: EIF4ENIF1
  Gene Name: eukaryotic translation initiation factor 4E nuclear import factor 1
  Uniprot ID: Q9NRA8
  ENSP ID: ENSP00000342927
MDRRSMGETESGDAFLDLKKPPASKCPHRYTKEELLDIKELPHSKQRPSCLSEKYDSDGVWDPEKWHASLYPASGRSSPVESLKKELDTDRPSLVRRIVGIVECNGGVAEEDEVEVILAQEPAADQEVPRDAVLPEQSPGDFDFNEFFNLDKVPCLASMIEDVLGEGSVSASRFSRWFSNPSRSGSRSSSLGSTPHEELERLAGLEQAILSPGQNSGNYFAPIPLEDHAENKVDILEMLQKAKVDLKPLLSSLSANKEKLKESSHSGVVLSVEEVEAGLKGLKVDQQVKNSTPFMAEHLEETLSAVTNNRQLKKDGDMTAFNKLVSTMKRNLESHLMSPAEIPGQPVPKNILQELLGQPVQRPASSNLLSGLMGSLEPTTSLLGQRAPSPPLSQVFQTRAASADYLRPRIPSPIGFTPGPQQLLGDPFQGMRKPMSPITAQQMSQLELQQAALEGLALPHDLAVQAANFYQPGFGKPQVDRTRDGFRNRQQRVTKSPAPVHRGNSSSPAPAASITSMLSPSFTPTSVIRKMYESKEKSKEEPASGKAALGDSKEDTQKASEENLLSSSSVPSADRDSSPTTNSKLSALQRSSCSTPLSQANRYTKEQDYRPKATGRKTPTLASPVPTTPFLRPVHQVPLVPHVPMVRPAHQLHPGLVQRMLAQGVHPQHLPSLLQTGVLPPGMDLSHLQGISGPILGQPFYPLPAASHPLLNPRPGTPLHLAMVQQQLQRSVLHPPGSGSHAAAVSVQTTPQNVPSRSGLPHMHSQLEHRPSQRSSSPVGLAKWFGSDVLQQPLPSMPAKVISVDELEYRQ

SEQ ID NO: 28904 - protein, 63 aa, Homo sapiens
  Payload ID: 5635
  Gene Symbol: EIF4ENIF1
  Gene Name: eukaryotic translation initiation factor 4E nuclear import factor 1
  ENSP ID: ENSP00000380652
MDRRSMGETESGDAFLDLKKPPASKCPHRYTKEELLDIKELPHSKQRPSCLSEKYDSDGVWDP

SEQ ID NO: 28905 - protein, 63 aa, Homo sapiens; identical to SEQ ID NO: 28904
  Payload ID: 5635
  Gene Symbol: EIF4ENIF1
  Gene Name: eukaryotic translation initiation factor 4E nuclear import factor 1
  ENSP ID: ENSP00000380654

SEQ ID NO: 28906 - protein, 961 aa, Homo sapiens
  Payload ID: 5635
  Gene Symbol: EIF4ENIF1
  Gene Name: eukaryotic translation initiation factor 4E nuclear import factor 1
  ENSP ID: ENSP00000380657
MDRRSMGETESGDAFLDLKKPPASKCPHRYTKEELLDIKELPHSKQRPSCLSEKYDSDGVWDPEKWHASLYPASGRSSPVESLKKELDTDRPSLVRRIVDPRERVKEDDLDVVLSPQRRSFGGGCHVTAAVSSRRSGSPLEKDSDGLRLLGGRRIGSGRIISARTFEKDHRLSDKDLRDLRDRDRERDFKDKRFRREFGDSKRVFGERRRNDSYTEEEPEWFSAGPTSQSETIELTGFDDKILEEDHKGRKRTRRRTASVKEGIVECNGGVAEEDEVEVILAQEPAADQEVPRDAVLPEQSPGDFDFNEFFNLDKVPCLASMIEDVLGEGSVSASRFSRWFSNPSRSGSRSSSLGSTPHEELERLAGLEQAILSPGQNSGNYFAPIPLEDHAENKVDILEMLQKAKVDLKPLLSSLSANKEKLKESSHSGVVLSVEEVEAGLKGLKVDQQVKNSTPFMAEHLEETLSAVTNNRQLKKDGDMTAFNKLVSTMKASGTLPSQPKVSELLGQPVQRPASSNLLSGLMGSLEPTTSLLGQRAPSPPLSQVFQTRAASADYLRPRIPSPIGFTPGPQQLLGDPFQGMRKPMSPITAQMSQLELQQAALEGLALPHDLAVQAANFYQPGFGKPQVDRTRDGFRNRQQRVTKSPAPVHRGNSSSPAPAASITSMLSPSFTPTSVIRKMYESKEKSKEEPASGKAALGDSKEDTQKASEENLLSSSSVPSADRDSSPTTNSKLSALQRSSCSTPLSQANRYTKEQDYRPKATGRKTPTLASPVPTTPFLRPVHQVPLVPHVPMVRPAHQLHPGLVQRMLAQGVHPQHLPSLLQTGVLPPGMDLSHLQGISGPILGQPFYPLPAASHPLLNPRPGTPLHLAMVQQQLQRSVLHPPGSGSHAAAVSVQTTPQNVPSRSGLPHMHSQLEHRPSQRSSSPVGLAKWFGSDVLQQPLPSMPAKVISVDELEYRQ

SEQ ID NO: 28907 - protein, 985 aa, Homo sapiens; identical to SEQ ID NO: 28902
  Payload ID: 5635
  Gene Symbol: EIF4ENIF1
  Gene Name: eukaryotic translation initiation factor 4E nuclear import factor 1
  Uniprot ID: Q9NRA8
  ENSP ID: ENSP00000380659

SEQ ID NO: 28908 - protein, 94 aa, Homo sapiens
  Payload ID: 5635
  Gene Symbol: EIF4ENIF1
  Gene Name: eukaryotic translation initiation factor 4E nuclear import factor 1
  ENSP ID: ENSP00000395293
  MOD_RES (1)..(1): Any amino acid
XDYLRPRIPSPIGFTPGPQQLLGDPFQGMRKPMSPITAQMSQLELQQAALEGLALPHDLAVQAANFYQPGFGKPQVDRTRDGFRNRFNVLIKLP

SEQ ID NO: 28909 - protein, 188 aa, Homo sapiens
  Payload ID: 5635
  Gene Symbol: EIF4ENIF1
  Gene Name: eukaryotic translation initiation factor 4E nuclear import factor 1
  ENSP ID: ENSP00000405086
MDRRSMGETESGDAFLDLKKPPASKCPHRYTKEELLDIKELPHSKQRPSCLSEKYDSDGVWDPEKWHASLYPASGRSSPVESLKKELDTDRPSLVRRIVDPRERVKEDDLDVVLSPQRRSFGGGCHVTAAVSSRRSGSPLEKDSDGLRLLGGRRIGSGRIISARTFEKDHRLSDKDLRDLRDRDRERD

SEQ ID NO: 28910 - protein, 239 aa, Homo sapiens
  Payload ID: 5635
  Gene Symbol: EIF4ENIF1
  Gene Name: eukaryotic translation initiation factor 4E nuclear import factor 1
  ENSP ID: ENSP00000413690
QKAKVDLKPLLSSLSANKEKLKESSHSGVVLSVEEVEAGLKGLKVDQQVKNSTPFMAEHLEETLSAVTNNRQLKKDGDMTAFNKLVSTMKASGTLPSQPKVSRNLESHLMSPAEIPGQPVPKNILQVFQTRAASADYLRPRIPSPIGFTPGPQQLLGDPFQGMRKPMSPITAQMSQLELQQAALEGLALPHDLAVQAANFYQPGFGKPQVDRTRDGFRNRQQRVTKSPAPVHRGNSSSP

SEQ ID NO: 28911 - protein, 248 aa, Homo sapiens
  Payload ID: 5636
  Gene Symbol: EIF4H
  Gene Name: eukaryotic translation initiation factor 4H
  Uniprot ID: Q15056
  ENSP ID: ENSP00000265753
MADFDTYDDRAYSSFGGGRGSRGSAGGHGSRSQKELPTEPPYTAYVGNLPFNTVQGDIDAIFKDLSIRSVRLVRDKDTDKFKGFCYVEFDEVDSLKEALTYDGALLGDRSLRVDIAEGRKQDKGGFGFRKGGPDDRGMGSSRESRGGWDSRDDFNSGFRDDFLGGRGGSRPGDRRTGPPMGSRFRDGPPLRGSNMDFREPTEEERAQRPRLQLKPRTVATPLNQVANPNSAIFGGARPREEVVQKEQE

SEQ ID NO: 28912 - protein, 228 aa, Homo sapiens
  Payload ID: 5636
  Gene Symbol: EIF4H
  Gene Name: eukaryotic translation initiation factor 4H
  Uniprot ID: Q15056
  ENSP ID: ENSP00000265754
MADFDTYDDRAYSSFGGGRGSRGSAGGHGSRSQKELPTEPPYTAYVGNLPFNTVQGDIDAIFKDLSIRSVRLVRDKDTDKFKGFCYVEFDEVDSLKEALTYDGALLGDRSLRVDIAEGRKQDKGGFGFRKGGPDDRGFRDDFLGGRGGSRPGDRRTGPPMGSRFRDGPPLRGSNMDFREPTEEERAQRPRLQLKPRTVATPLNQVANPNSAIFGGARPREEVVQKEQE

SEQ ID NO: 28913 - protein, 431 aa, Homo sapiens
  Payload ID: 5637
  Gene Symbol: EIF5
  Gene Name: eukaryotic translation initiation factor 5
  Uniprot ID: P55010
  ENSP ID: ENSP00000216554
MSVNVNRSVSDQFYRYKMPRLIAKVEGKGNGIKTVIVNMVDVAKALNRPPTYPTKYFGCELGAQTQFDVKNDRYIVNGSHEANKLQDMLDGFIKKFVLCPECENPETDLHVNPKKQTIGNSCKACGYRGMLDTHHKLCTFILKNPPENSDSGTGKKEKEKKNRKGKDKENGSVSSSETPPPPPPPNEINPPPHTMEEEEDDDWGEDTTEEAQRRRMDEISDHAKVLTLSDDLERTIEERVNILFDFVKKKKEEGVIDSSDKEIVAEAERLDVKAMGPLVLTEVLFNEKIREQIKKYRRHFLRFCHNNKKAQRYLLHGLECVVAMHQAQLISKIPHILKEMYDADLLEEEVIISWSEKASKKYVSKELAKEIRVKAEPFIKWLKEAEEESSGGEEEDEDENIEVVYSKAASVPKVETVKSDNKDDDIDIDAI

SEQ ID NO: 28914 - protein, 431 aa, Homo sapiens; identical to SEQ ID NO: 28913
  Payload ID: 5637
  Gene Symbol: EIF5
  Gene Name: eukaryotic translation initiation factor 5
  Uniprot ID: P55010
  ENSP ID: ENSP00000376477

SEQ ID NO: 28915 - protein, 68 aa, Homo sapiens
  Payload ID: 5637
  Gene Symbol: EIF5
  Gene Name: eukaryotic translation initiation factor 5
  ENSP ID: ENSP00000452615
MSVNVNRSVSDQFYRYKMPRLIAKVEGKGNGIKTVIVNMVDVAKALNRPPTYPTKYFGCELGAQTQFD

SEQ ID NO: 28916 - protein, 51 aa, Homo sapiens
  Payload ID: 5637
  Gene Symbol: EIF5
  Gene Name: eukaryotic translation initiation factor 5
  ENSP ID: ENSP00000452636
MSVNVNRSVSDQFYRYKMPRLIAKVEGKGNGIKTVIVNMVDVAKALNRPPT

SEQ ID NO: 28917 - protein, 109 aa, Homo sapiens
  Payload ID: 5637
  Gene Symbol: EIF5
  Gene Name: eukaryotic translation initiation factor 5
  ENSP ID: ENSP00000452883
MSVNVNRSVSDQFYRYKMPRLIAKVEGKGNGIKTVIVNMVDVAKALNRPPTYPTKYFGCELGAQTQFDVKNDRYIVNGSHEANKLQDMLDGFIKKFVLCPECENPETDL

SEQ ID NO: 28918 - protein, 146 aa, Homo sapiens
  Payload ID: 5637
  Gene Symbol: EIF5
  Gene Name: eukaryotic translation initiation factor 5
  ENSP ID: ENSP00000453396
MSVNVNRSVSDQFYRYKMPRLIAKVEGKGNGIKTVIVNMVDVAKALNRPPTYPTKYFGCELGAQTQFDVKNDRYIVNGSHEANKLQDMLDGFIKKFVLCPECENPETDLHVNPKKQTIGNSCKACGYRGMLDTHHKLCTFILKNPP

SEQ ID NO: 28919 - protein, 109 aa, Homo sapiens; identical to SEQ ID NO: 28917
  Payload ID: 5637
  Gene Symbol: EIF5
  Gene Name: eukaryotic translation initiation factor 5
  ENSP ID: ENSP00000453468

SEQ ID NO: 28920 - protein, 101 aa, Homo sapiens
  Payload ID: 5637
  Gene Symbol: EIF5
  Gene Name: eukaryotic translation initiation factor 5
  ENSP ID: ENSP00000453633
MSVNVNRSVSDQFYRYKMPRLIAKVEGKGNGIKTVIVNMVDVAKALNRPPTYPTKYFGCELGAQTQFDVKNDRYIVNGSHEANKLQDMLDGFIKKFVLCPE

SEQ ID NO: 28921 - protein, 431 aa, Homo sapiens; identical to SEQ ID NO: 28913
  Payload ID: 5637
  Gene Symbol: EIF5
  Gene Name: eukaryotic translation initiation factor 5
  Uniprot ID: P55010
  ENSP ID: ENSP00000453743

SEQ ID NO: 28922 - protein, 200 aa, Homo sapiens
  Payload ID: 5637
  Gene Symbol: EIF5
  Gene Name: eukaryotic translation initiation factor 5
  ENSP ID: ENSP00000453856
MSVNVNRSVSDQFYRYKMPRLIAKVEGKGNGIKTVIVNMVDVAKALNRPPTYPTKYFGCELGAQTQFDVKNDRYIVNGSHEANKLQDMLDGFIKKFVLCPECENPETDLHVNPKKQTIGNSCKACGYRGMLDTHHKLCTFILKNPPENSDSGTGKKEKEKKNRKGKDKENGSVSSSETPPPPPPPNEINPPPHTMEEEED

SEQ ID NO: 28923 - protein, 184 aa, Homo sapiens
  Payload ID: 5638
  Gene Symbol: EIF5A
  Gene Name: eukaryotic translation initiation factor 5A
  Uniprot ID: P63241
  ENSP ID: ENSP00000336702
MCGTGGTDSKTRRPPHRASFLKRLESKPLKMADDLDFETGDAGASATFPMQCSALRKNGFVVLKGRPCKIVEMSTSKTGKHGHAKVHLVGIDIFTGKKYEDICPSTHNMDVPNIKRNDFQLIGIQDGYLSLLQDSGEVREDLRLPEGDLGKEIEQKYDCGEEILITVLSAMTEEAAVAIKAMAK

SEQ ID NO: 28924 - protein, 154 aa, Homo sapiens
  Payload ID: 5638
  Gene Symbol: EIF5A
  Gene Name: eukaryotic translation initiation factor 5A
  Uniprot ID: P63241
  ENSP ID: ENSP00000336776
MADDLDFETGDAGASATFPMQCSALRKNGFVVLKGRPCKIVEMSTSKTGKHGHAKVHLVGIDIFTGKKYEDICPSTHNMDVPNIKRNDFQLIGIQDGYLSLLQDSGEVREDLRLPEGDLGKEIEQKYDCGEEILITVLSAMTEEAAVAIKAMAK

SEQ ID NO: 28925 - protein, 154 aa, Homo sapiens; identical to SEQ ID NO: 28924
  Payload ID: 5638
  Gene Symbol: EIF5A
  Gene Name: eukaryotic translation initiation factor 5A
  Uniprot ID: P63241
  ENSP ID: ENSP00000390677

SEQ ID NO: 28926 - protein, 154 aa, Homo sapiens; identical to SEQ ID NO: 28924
  Payload ID: 5638
  Gene Symbol: EIF5A
  Gene Name: eukaryotic translation initiation factor 5A
  Uniprot ID: P63241
  ENSP ID: ENSP00000396073

SEQ ID NO: 28927 - protein, 154 aa, Homo sapiens; identical to SEQ ID NO: 28924
  Payload ID: 5638
  Gene Symbol: EIF5A
  Gene Name: eukaryotic translation initiation factor 5A
  Uniprot ID: P63241
  ENSP ID: ENSP00000458269

SEQ ID NO: 28928 - protein, 154 aa, Homo sapiens; identical to SEQ ID NO: 28924
  Payload ID: 5638
  Gene Symbol: EIF5A
  Gene Name: eukaryotic translation initiation factor 5A
  Uniprot ID: P63241
  ENSP ID: ENSP00000459196

SEQ ID NO: 28929 - protein, 154 aa, Homo sapiens; identical to SEQ ID NO: 28924
  Payload ID: 5638
  Gene Symbol: EIF5A
  Gene Name: eukaryotic translation initiation factor 5A
  Uniprot ID: P63241
  ENSP ID: ENSP00000459611

SEQ ID NO: 28930 - protein, 146 aa, Homo sapiens
  Payload ID: 5638
  Gene Symbol: EIF5A
  Gene Name: eukaryotic translation initiation factor 5A
  ENSP ID: ENSP00000460284
MADDLDFETGDAGASATFPMQCSALRKNGFVVLKGRPCKIVEMSTSKTGKHGHAKVHLVGIDIFTGKKYEDICPSTHNMDVPNIKRNDFQLIGIQDGYLSLLQDSGEVREDLRLPEGDLGKEIEQKYDCGEEILITVLSAMTEEAA

SEQ ID NO: 28931 - protein, 186 aa, Homo sapiens
  Payload ID: 5638
  Gene Symbol: EIF5A
  Gene Name: eukaryotic translation initiation factor 5A
  ENSP ID: ENSP00000461688
MADDLDFETGDAGASATFPMQCSALRKNGFVVLKGRPCKIVEMSTSKTGKHGHAKVHLVGIDIFTGKKYEDICPSTHNMDVPNIKRNDFQLIGIQDGYLSLLQDSGEVREDLRLPEGDLGKEIEQKYDCGEEILVWCLPPCFCAQLCSVRFFLSSDISWLSLLLLQITVLSAMTEEAAVAIKAMAK

SEQ ID NO: 28932 - protein, 153 aa, Homo sapiens
  Payload ID: 5639
  Gene Symbol: EIF5A2
  Gene Name: eukaryotic translation initiation factor 5A2
  Uniprot ID: Q9GZV4
  ENSP ID: ENSP00000295822
MADEIDFTTGDAGASSTYPMQCSALRKNGFVVLKGRPCKIVEMSTSKTGKHGHAKVHLVGIDIFTGKKYEDICPSTHNMDVPNIKRNDYQLICIQDGYLSLLTETGEVREDLKLPEGELGKEIEGKYNAGEDVQVSVMCAMSEEYAVAIKPCK

SEQ ID NO: 28933 - protein, 115 aa, Homo sapiens
  Payload ID: 5639
  Gene Symbol: EIF5A2
  Gene Name: eukaryotic translation initiation factor 5A2
  ENSP ID: ENSP00000417133
MQCSALRKNGFVVLKGRPCKIVEMSTSKTGKHGHAKVHLVGIDIFTGKKYEDICPSTHNMDVPNIKRNDYQLICIQDGYLSLLTETGEVREDLKLPEGELGKEIEGKYNAGEDVQ

SEQ ID NO: 28934 - protein, 109 aa, Homo sapiens
  Payload ID: 5639
  Gene Symbol: EIF5A2
  Gene Name: eukaryotic translation initiation factor 5A2
  ENSP ID: ENSP00000418305
MADEIDFTTGDAGASSTYPMQCSALRKNGFVVLKGRPCKIVEMSTSKTGKHGHAKVHLVGIDIFTGKKYEDICPSTHNMDVPNIKRNDYQVSVMCAMSEEYAVAIKPCK

SEQ ID NO: 28935 - protein, 105 aa, Homo sapiens
  Payload ID: 5639
  Gene Symbol: EIF5A2
  Gene Name: eukaryotic translation initiation factor 5A2
  ENSP ID: ENSP00000418370
MADEIDFTTGDAGASSTYPMQCSALRKNGFVVLKGRPCKIVEMSTSKTGKHGHAKVHLVGIDIFTGKKYEDICPSTHNMDVPNIKRNDYQKLVKFVRILNCQKVN

SEQ ID NO: 28936 - protein, 154 aa, Homo sapiens
  Payload ID: 5640
  Gene Symbol: EIF5AL1
  Gene Name: eukaryotic translation initiation factor 5A-like 1
  Uniprot ID: Q6IS14
  ENSP ID: ENSP00000430706
MADDLDFETGDAGASATFPMQCSALRKNGFVVLKGWPCKIVEMSASKTGKHGHAKVHLVGIDIFTGKKYEDICPSTHNMDVPNIKRNDFQLIGIQDGYLSLLQDSGEVPEDLRLPEGDLGKEIEQKYDCGEEILITVLSAMTEEAAVAIKAMAK

SEQ ID NO: 28937 - protein, 1220 aa, Homo sapiens
  Payload ID: 5641
  Gene Symbol: EIF5B
  Gene Name: eukaryotic translation initiation factor 5B
  Uniprot ID: O60841
  ENSP ID: ENSP00000289371
MGKKQKNKSEDSTKDDIDLDALAAEIEGAGAAKEQEPQKSKGKKKKEKKKQDFDEDDILKELEELSLEAQGIKADRETVAVKPTENNEEEFTSKDKKKKGQKGKKQSFDDNDSEELEDKDSKSKKTAKPKVEMYSGSDDDDDFNKLPKKAKGKAQKSNKKWDGSEEDEDNSKKIKERSRINSSGESGDESDEFLQSRKGQKKNQKNKPGPNIESGNEDDDASFKIKTVAQKKAEKKERERKKRDEEKAKLRKLKEKEELETGKKDQSKQKESQRKFEEETVKSKVTVDTGVIPASEEKAETPTAAEDDNEGDKKKKDKKKKKGEKEEKEKEKKKGPSKATVKAMQEALAKLKEEEERQKREEEERIKRLEELEAKRKEEERLEQEKRERKKQKEKERKERLKKEGKLLTKSQREARARAEATLKLLQAQGVEVPSKDSLPKKRPIYEDKKRKKIPQQLESKEVSESMELCAAVEVMEQGVPEKEETPPPVEPEEEEDTEDAGLDDWEAMASDEETEKVEGNKVHIEVKENPEEEEEEEEEEEEDEESEEEEEEEGESEGSEGDEEDEKVSDEKDSGKTLDKKPSKEMSSDSEYDSDDDRTKEERAYDKAKRRIEKRRLEHSKNVNTEKLRAPIICVLGHVDTGKTKILDKLRHTHVQDGEAGGITQQIGATNVPLEAINEQTKMIKNFDRENVRIPGMLIIDTPGHESFSNLRNRGSSLCDIAILVVDIMHGLEPQTIESINLLKSKKCPFIVALNKIDRLYDWKKSPDSDVAATLKKQKKNTKDEFEERAKAIIVEFAQQGLNAALFYENKDPRTFVSLVPTSAHTGDGMGSLIYLLVELTQTMLSKRLAHCEELRAQVMEVKALPGMGTTIDVILINGRLKEGDTIIVPGVEGPIVTQIRGLLLPPPMKELRVKNQYEKHKEVEAAQGVKILGKDLEKTLAGLPLLVAYKEDEIPVLKDELIHELKQTLNAIKLEEKGVYVQASTLGSLEALLEFLKTSEVPYAGINIGPVHKKDVMKASVMLEHDPQYAVILAFDVRIERDAQEMADSLGVRIFSAEIIYHLFDAFTKYRQDYKKQKQEEFKHIAVFPCKIKILPQYIFNSRDPIVMGVTVEAGQVKQGTPMCVPSKNFVDIGIVTSIEINHKQVDVAKKGQEVCVKIEPIPGESPKMFGRHFEATDILVSKISRQSIDALKDWFRDEMQKSDWQLIVELKKVFEII

SEQ ID NO: 28938 - protein, 1220 aa, Homo sapiens [sequence omitted]

SEQ ID NO: 28939 - protein, 245 aa, Homo sapiens
  Payload ID: 5642
  Gene Symbol: EIF6
  Gene Name: eukaryotic translation initiation factor 6
  Uniprot ID: P56537
  ENSP ID: ENSP00000363559
MAVRASFENNCEIGCFAKLTNTYCLVAIGGSENFYSVFEGELSDTIPVVHASIAGCRIIGRMCVGNRHGLLVPNNTTDQELQHIRNSLPDTVQIRRVEERLSALGNVTTCNDYVALVHPDLDRETEEILADVLKVEVFRQTVADQVLVGSYCVFSNQGGLVHPKTSIEDQDELSSLLQVPLVAGTVNRGSEVIAAGMVVNDWCAFCGLDTTSTELSVVESVFKLNEAQPSTIATSMRDSLIDSLT

SEQ ID NO: 28940 - protein, 226 aa, Homo sapiens
  Payload ID: 5642
  Gene Symbol: EIF6
  Gene Name: eukaryotic translation initiation factor 6
  Uniprot ID: P56537
  ENSP ID: ENSP00000363566
MAVRASFENNCEIGCFAKLTNTYCLVAIGGSENFYRCGGSPGAYGGGEACAGVKSSGSGRVPAPLPRHHRVHVPTVCSRASSPIPSPWCTRLSPAAASSGACVWETEEILADVLKVEVFRQTVADQVLVGSYCVFSNQGGLVHPKTSIEDQDELSSLLQVPLVAGTVNRGSEVIAAGMVVNDWCAFCGLDTTSTELSVVESVFKLNEAQPSTIATSMRDSLIDSLT

SEQ ID NO: 28941 - protein, 245 aa, Homo sapiens; identical to SEQ ID NO: 28939
  Payload ID: 5642
  Gene Symbol: EIF6
  Gene Name: eukaryotic translation initiation factor 6
  Uniprot ID: P56537
  ENSP ID: ENSP00000363574

SEQ ID NO: 28942 - protein, 108 aa, Homo sapiens
  Payload ID: 5642
  Gene Symbol: EIF6
  Gene Name: eukaryotic translation initiation factor 6
  ENSP ID: ENSP00000390897
MAVRASFENNCEIGCFAKLTNTYCLVAIGGSENFYSVFEGELSDTIPVVHASIAGCRIIGRMCVGNRHGLLVPNNTTDQELQHIRNSLPDTVQIRRVEERLSALGNVT

SEQ ID NO: 28943 - protein, 59 aa, Homo sapiens
  Payload ID: 5642
  Gene Symbol: EIF6
  Gene Name: eukaryotic translation initiation factor 6
  ENSP ID: ENSP00000395907
MAVRASFENNCEIGCFAKLTNTYCLVAIGGSENFYRRQKKFWQMCSRWKSSDRQWPTRC

SEQ ID NO: 28944 - protein, 108 aa, Homo sapiens
  Payload ID: 5642
  Gene Symbol: EIF6
  Gene Name: eukaryotic translation initiation factor 6
  ENSP ID: ENSP00000411450
MAVRASFENNCEIGCFAKLTNTYCLVAIGGSENFYSVFEGELSDTIPVVHASIAGCRIIGRMCVGDRRNSGRCAQGGSLQTDSGRPGASRKLLCLQQSGRAGASQDFN

SEQ ID NO: 28945 - protein, 186 aa, Homo sapiens
  Payload ID: 5642
  Gene Symbol: EIF6
  Gene Name: eukaryotic translation initiation factor 6
  ENSP ID: ENSP00000415044
MAVRASFENNCEIGCFAKLTNTYCLVAIGGSENFYRCGGSPGAYGGGEACAGVKSSGSGRVPAPLPRHHRVHVPTVCSRASSPIPSPWCTRLSPAAASSGACVWGTGTVSWYPTIPPTRSCNTFATASQTQCRLGGWRSGSQPWAMSPPAMTTWPWSTQTWTGRQKKFWQMCSRWKSSDRQWPTRC

SEQ ID NO: 28946 - protein, 245 aa, Homo sapiens; identical to SEQ ID NO: 28939
  Payload ID: 5642
  Gene Symbol: EIF6
  Gene Name: eukaryotic translation initiation factor 6
  Uniprot ID: P56537
  ENSP ID: ENSP00000483289

SEQ ID NO: 28947 - protein, 437 aa, Homo sapiens
  Payload ID: 5643
  Gene Symbol: ETF1
  Gene Name: eukaryotic translation termination factor 1
  Uniprot ID: P62495
  ENSP ID: ENSP00000353741
MADDPSAADRNVEIWKIKKLIKSLEAARGNGTSMISLIIPPKDQISRVAKMLADEFGTASNIKSRVNRLSVLGAITSVQQRLKLYNKVPPNGLVVYCGTIVTEEGKEKKVNIDFEPFKPINTSLYLCDNKFHTEALTALLSDDSKFGFIVIDGSGALFGTLQGNTREVLHKFTVDLPKKHGRGGQSALRFARLRMEKRHNYVRKVAETAVQLFISGDKVNVAGLVLAGSADFKTELSQSDMFDQRLQSKVLKLVDISYGGENGFNQAIELSTEVLSNVKFIQEKKLIGRYFDEISQDTGKYCFGVEDTLKALEMGAVEILIVYENLDIMRYVLHCQGTEEEKILYLTPEQEKDKSHFTDKETGQEHELIESMPLLEWFANNYKKFGATLEIVTDKSQEGSQFVKGFGGIGGILRYRVDFQGMEYQGGDDEFFDLDDY

SEQ ID NO: 28948 - protein, 404 aa, Homo sapiens
  Payload ID: 5643
  Gene Symbol: ETF1
  Gene Name: eukaryotic translation termination factor 1
  Uniprot ID: P62495
  ENSP ID: ENSP00000421288
MISLIIPPKDQISRVAKMLADEFGTASNIKSRVNRLSVLGAITSVQQRLKLYNKVPPNGLVVYCGTIVTEEGKEKKVNIDFEPFKPINTSLYLCDNKFHTEALTALLSDDSKFGFIVIDGSGALFGTLQGNTREVLHKFTVDLPKKHGRGGQSALRFARLRMEKRHNYVRKVAETAVQLFISGDKVNVAGLVLAGSADFKTELSQSDMFDQRLQSKVLKLVDISYGGENGFNQAIELSTEVLSNVKFIQEKKLIGRYFDEISQDTGKYCFGVEDTLKALEMGAVEILIVYENLDIMRYVLHCQGTEEEKILYLTPEQEKDKSHFTDKETGQEHELIESMPLLEWFANNYKKFGATLEIVTDKSQEGSQFVKGFGGIGGILRYRVDFQGMEYQGGDDEFFDLDDY

SEQ ID NO: 28949 - protein, 423 aa, Homo sapiens
  Payload ID: 5643
  Gene Symbol: ETF1
  Gene Name: eukaryotic translation termination factor 1
  ENSP ID: ENSP00000422203
MKQDVLNCTEGPIHSNGTSMISLIIPPKDQISRVAKMLADEFGTASNIKSRVNRLSVLGAITSVQQRLKLYNKVPPNGLVVYCGTIVTEEGKEKKVNIDFEPFKPINTSLYLCDNKFHTEALTALLSDDSKFGFIVIDGSGALFGTLQGNTREVLHKFTVDLPKKHGRGGQSALRFARLRMEKRHNYVRKVAETAVQLFISGDKVNVAGLVLAGSADFKTELSQSDMFDQRLQSKVLKLVDISYGGENGFNQAIELSTEVLSNVKFIQEKKLIGRYFDEISQDTGKYCFGVEDTLKALEMGAVEILIVYENLDIMRYVLHCQGTEEEKILYLTPEQEKDKSHFTDKETGQEHELIESMPLLEWFANNYKKFGATLEIVTDKSQEGSQFVKGFGGIGGILRYRVDFQGMEYQGGDDEFFDLDDY

SEQ ID NO: 28950 - protein, 95 aa, Homo sapiens
  Payload ID: 5643
  Gene Symbol: ETF1
  Gene Name: eukaryotic translation termination factor 1
  ENSP ID: ENSP00000422272
MADDPSAADRNVEIWKIKKLIKSLEAARGNGTSMISLIIPPKDQISRVAKMLADEFGTASNIKSRVNRLSVLGAITSVQQRLKLYNKGSYSTTFR

SEQ ID NO: 28951 - protein, 119 aa, Homo sapiens
  Payload ID: 5643
  Gene Symbol: ETF1
  Gene Name: eukaryotic translation termination factor 1
  ENSP ID: ENSP00000425689
MISLIIPPKDQISRVAKMLADEFGTASNIKSRVNRLSVLGAITSVQQRLKLYNKVPPNGLVVYCGTIVTEEGKEKKVNIDFEPFKPINTSLYLCDNKFHTEALTALLSDDSKFGFIVID

SEQ ID NO: 28952 - protein, 208 aa, Homo sapiens
  Payload ID: 5643
  Gene Symbol: ETF1
  Gene Name: eukaryotic translation termination factor 1
  ENSP ID: ENSP00000461082
MISLIIPPKDQISRVAKMLADEFGTASNIKSRVNRLSVLGAITSVQQRLKLYNKVPPNGLVVYCGTIVTEEGKEKKVNIDFEPFKPINTSLYLCDNKFHTEALTALLSDDSKFGFIVIDGSGALFGTLQGNTREVLHKFTVDLPKKHGRGGQSALRFARLRMEKRHNYVRKVAETAVQLFISGDKVNVAGLVLAGSADFKTELSQSDM

SEQ ID NO: 28953 - protein, 152 aa, Homo sapiens
  Payload ID: 5644
  Gene Symbol: EVA1A
  Gene Name: eva-1 homolog A (C. elegans)
  Uniprot ID: Q9H8M9
  ENSP ID: ENSP00000233712
MRLPLSHSPEHVEMALLSNILAAYSFVSENPERAALYFVSGVCIGLVLTLAALVIRISCHTDCRRRPGKKFLQDRESSSDSSDSEDGSEDTVSDLSVRRHRRFERTLNKNVFTSAEELERAQRLEERERIIREIWMNGQPEVPGTRSLNRYY

SEQ ID NO: 28954 - protein, 152 aa, Homo sapiens; identical to SEQ ID NO: 28953
  Payload ID: 5644
  Gene Symbol: EVA1A
  Gene Name: eva-1 homolog A (C. elegans)
  Uniprot ID: Q9H8M9
  ENSP ID: ENSP00000377490

SEQ ID NO: 28955 - protein, 152 aa, Homo sapiens; identical to SEQ ID NO: 28953
  Payload ID: 5644
  Gene Symbol: EVA1A
  Gene Name: eva-1 homolog A (C. elegans)
  Uniprot ID: Q9H8M9
  ENSP ID: ENSP00000386435

SEQ ID NO: 28956 - protein, 140 aa, Homo sapiens
  Payload ID: 5644
  Gene Symbol: EVA1A
  Gene Name: eva-1 homolog A (C. elegans)
  ENSP ID: ENSP00000386835
MKGSKSFVLQKMFSCSKNPERAALYFVSGVCIGLVLTLAALVIRISCHTDCRRRPGKKFLQDRESSSDSSDSEDGSEDTVSDLSVRRHRRFERTLNKNVFTSAEELERAQRLEERERIIREIWMNGQPEVPGTRSLNRYY

SEQ ID NO: 28957 - protein, 152 aa, Homo sapiens; identical to SEQ ID NO: 28953
  Payload ID: 5644
  Gene Symbol: EVA1A
  Gene Name: eva-1 homolog A (C. elegans)
  Uniprot ID: Q9H8M9
  ENSP ID: ENSP00000386930

SEQ ID NO: 28958 - protein, 101 aa, Homo sapiens
  Payload ID: 5644
  Gene Symbol: EVA1A
  Gene Name: eva-1 homolog A (C. elegans)
  ENSP ID: ENSP00000388105
MRLPLSHSPEHVEMALLSNILAAYSFVSENPERAALYFVSGVCIGLVLTLAALVIRISCHTDCRRRPGKKFLQDRESSSDSSDSEDGSEDTVSDLSVRRHR

SEQ ID NO: 28959 - protein, 142 aa, Homo sapiens
  Payload ID: 5644
  Gene Symbol: EVA1A
  Gene Name: eva-1 homolog A (C. elegans)
  ENSP ID: ENSP00000398249
MRLPLSHSPEHVEMALLSNILAAYSFVSENPERAALYFVSGVCIGLVLTLAALVIRISCHTDCRRRPGKKFLQDRESSSDSSDSEDGSEDTVSDLSVRRHRRFERTLNKNVFTSAEELERAQRLEERERIIREIWMNGQPEV

SEQ ID NO: 28960 - protein, 165 aa, Homo sapiens
  Payload ID: 5645
  Gene Symbol: EVA1B
  Gene Name: eva-1 homolog B (C. elegans)
  Uniprot ID: Q9NVM1
  ENSP ID: ENSP00000270824
MDAPRRDMELLSNSLAAYAHIRANPESFGLYFVLGVCFGLLLTLCLLVISISWAPRPRPRGPAQRRDPRSSTLEPEDDDEDEEDTVTRLGPDDTLPGPELSAEPDGPLNVNVFTSAEELERAQRLEERERILREIWRTGQPDLLGTGTLGPSPTATGTLGRMHYY

SEQ ID NO: 28961 - protein, 441 aa, Homo sapiens
  Payload ID: 5646
  Gene Symbol: EVA1C
  Gene Name: eva-1 homolog C (C. elegans)
  Uniprot ID: P58658
  ENSP ID: ENSP00000300255
MLLPGRARQPPTPQPVQHPGLRRQVEPPGQLLRLFYCTVLVCSKEISALTDFSGYLTKLLQNHTTYACDGDYLNLQCPRHSTISVQSAFYGQDYQMCSSQKPASQREDSLTCVAATTFQKVLDECQNQRACHLLVNSRVFGPDLCPGSSKYLLVSFKCQPNELKNKTVCEDQELKLHCHESKFLNIYSATYGRRTQERDICSSKAERLPPFDCLSYSALQVLSRRCYGKQRCKIIVNNHHFGSPCLPGVKKYLTVTYACVPKNILTAIDPAIANLKPSLKQKDGEYGINFDPSGSKVLRKDGILVSNSLAAFAYIRAHPERAALLFVSSVCIGLALTLCALVIRESCAKDFRDLQLGREQLVPGSDKVEEDSEDEEEEEDPSESDFPGELSGFCRTSYPIYSSIEAAELAERIERREQIIQEIWMNSGLDTSLPRNMGQFY

SEQ ID NO: 28962 - protein, 438 aa, Homo sapiens
  Payload ID: 5646
  Gene Symbol: EVA1C
  Gene Name: eva-1 homolog C (C. elegans)
  Uniprot ID: P58658
  ENSP ID: ENSP00000372146
MLLPGRARQPPTPQPVQHPGLRRQVEPPGQLLRLFYCTVLVCSKEISALTDFSGYLTKLLQNHTTYACDGDYLNLQCPRHSTISVQSAFYGQDYQMCSSQKPASQREDSLTCVAATTFQKVLDECQNQRACHLLVNSRVFGPDLCPGSSKYLLVSFKCQPNELKNKTVCEDQELKLHCHESKFLNIYSATYGRRTQERDICSSKAERLPPFDCLSYSALQVLSRRCYGKQRCKIIVNNHHFGSPCLPGVKKYLTVTYACVPKNILTAIDPAIANLKPSLKQKDGINFDPSGSKVLRKDGILVSNSLAAFAYIRAHPERAALLFVSSVCIGLALTLCALVIRESCAKDFRDLQLGREQLVPGSDKVEEDSEDEEEEEDPSESDFPGELSGFCRTSYPIYSSIEAAELAERIERREQIIQEIWMNSGLDTSLPRNMGQFY

SEQ ID NO: 28963 - protein, 393 aa, Homo sapiens
  Payload ID: 5646
  Gene Symbol: EVA1C
  Gene Name: eva-1 homolog C (C. elegans)
  ENSP ID: ENSP00000384594
MLLPGRARQPPTPQPVQHPGLRRQVEPPGQLLRLFYCTVLVCSKEISALTDFSGYLTKLLQNHTTYACDGDYLNLQCPRHSTISVQSAFYGQDYQMCSSQKPASQREDSLTCVAATTFQKVLDECQNQRACHLLVNSRVFGPDLCPGSSKYLLVSFKCQPNELKNKTVCEDQELKLHCHESKFLNIYSATYGRRTQERDICSSKAERLPPFVPKNILTAIDPAIANLKPSLKQKDGEYGINFDPSGSKVLRKDGILVSNSLAAFAYIRAHPERAALLFVSSVCIGLALTLCALVIRESCAKDFRDLQLGREQLVPGSDKVEEDSEDEEEEEDPSESDFPGELSGFCRTSYPIYSSIEAAELAERIERREQIIQEIWMNSGLDTSLPRNMGQFY

SEQ ID NO: 28964 - protein, 153 aa, Homo sapiens
  Payload ID: 5646
  Gene Symbol: EVA1C
  Gene Name: eva-1 homolog C (C. elegans)
  ENSP ID: ENSP00000389269
MCSSQKPASQREDSLTCVAATTFQKVLDECQNQRACHLLVNSRVFGPDLCPGSSKYLLVSFKCQPNELKNKTVCEDQELKLHCHESKFLNIYSATYGRRTQERDICSSKAERLPPFDCLSYSALQVLSRRCYGKQRCKIIVNNHHFGSPCLPG

SEQ ID NO: 28965 - protein, 70 aa, Homo sapiens
  Payload ID: 5646
  Gene Symbol: EVA1C
  Gene Name: eva-1 homolog C (C. elegans)
  ENSP ID: ENSP00000389291
MLLPGRARQPPTPQPVQHPGLRRQVEPPGQLLRLFYCTVLVCSKEISALTDFSEGAGRMPEPAGLPPPGQ

SEQ ID NO: 28966 - protein, 192 aa, Homo sapiens
  Payload ID: 5646
  Gene Symbol: EVA1C
  Gene Name: eva-1 homolog C (C. elegans)
  ENSP ID: ENSP00000401547
MLLPGRARQPPTPQPVQHPGLRRQVEPPGQLLRLFYCTVLVCSKEISALTDFSDELKNKTVCEDQELKLHCHESKFLNIYSATYGRRTQERDICSSKAERLPPFDCLSYSALQVLSRRCYGKQRCKIIVNNHHFGSPCLPGVKKYLTVTYACVPKNILTAIDPAIANLKPSLKQKDGEYGNFYGLLPAFLFK

SEQ ID NO: 28967 - protein, 70 aa, Homo sapiens; identical to SEQ ID NO: 28965
  Payload ID: 5646
  Gene Symbol: EVA1C
  Gene Name: eva-1 homolog C (C. elegans)
  ENSP ID: ENSP00000407190

SEQ ID NO: 28968 - protein, 201 aa, Homo sapiens
  Payload ID: 5647
  Gene Symbol: EVX1
  Gene Name: even-skipped homeobox 1
  ENSP ID: ENSP00000222761
MESRKDMVVFLDGGQLGTLVGKRVSNLSEAVGSPLPEPPEKMVPRGCLSPRAVPPATRERGGGGPEEEPVDGLAGSAAGPGAEPQVAGAAMLGPGPPAPSVDSLSGQGQPSSSDTESDFYEEIEGPAPRRWSAVRTEGARPPRATAAVVGAARKAPWRAAPVTRCVVTAPPSPESRLRGWRRNSTGRTTYPGRGDVSWRPP

SEQ ID NO: 28969 - protein, 407 aa, Homo sapiens
  Payload ID: 5647
  Gene Symbol: EVX1
  Gene Name: even-skipped homeobox 1
  Uniprot ID: P49640
  ENSP ID: ENSP00000419266
MESRKDMVVFLDGGQLGTLVGKRVSNLSEAVGSPLPEPPEKMVPRGCLSPRAVPPATRERGGGGPEEEPVDGLAGSAAGPGAEPQVAGAAMLGPGPPAPSVDSLSGQGQPSSSDTESDFYEEIEVSCTPDCATGNAEYQHSKGSGSEALVGSPNGGSETPKSNGGSGGGGSQGTLACSASDQMRRYRTAFTREQIARLEKEFYRENYVSRPRRCELAAALNLPETTIKVWFQNRRMKDKRQRLAMTWPHPADPAFYTYMMSHAAAAGGLPYPFPSHLPLPYYSPVGLGAASAASAAASPFSGSLRPLDTFRVLSQPYPRPELLCAFRHPPLYPGPAHGLGASAGGPCSCLACHSGPANGLAPRAAAASDFTCASTSRSDSFLTFAPSVLSKASSVALDQREEVPLTR

SEQ ID NO: 28970 - protein, 106 aa, Homo sapiens
  Payload ID: 5647
  Gene Symbol: EVX1
  Gene Name: even-skipped homeobox 1
  ENSP ID: ENSP00000463759
RTPSRISMKKSSLLPITLRTTWTPLTYTKGPAPRRWSAVRTEGARPPRATAAVVGAARKAPWRAAPVTRCVVTAPPSPESRLRGWRRNSTGRTTYPGRGDVSWRPP

SEQ ID NO: 28971 - protein, 476 aa, Homo sapiens
  Payload ID: 5648
  Gene Symbol: EVX2
  Gene Name: even-skipped homeobox 2
  Uniprot ID: Q03828
  ENSP ID: ENSP00000312385
MMERIRKEMILMERGLHSPTAGKRFSNLSNSAGNAVLEALENSQHPARLSPRLPSAPLHSALGELPAKGKFEIDTLFNLQHTGSESTVSSEISSAAESRKKPGHYSEAAAEADMSSDVEVGCSALRSPGGLGAAQLKENNGKGYAESGSAAGTTTSASGSGLGSLHGGSGGSGGSAALGGSGSGADQVRRYRTAFTREQIARLEKEFYRENYVSRPRRCELAAALNLPETTIKVWFQNRRMKDKRQRLAMSWPHPADPSFYTYMMTHAAATGSLPYPFHSHVPLHYYPHVGVTAAAAAAAASGAAAAASSPFATSIRPLDTFRALSHPYSRPELLCSFRHPGLYQAPAAAAGLNSAASAAAAAAAAAAAASSAAAAGAPPSGGSAPCSCLSCHSSQSAAAAAAAAAAALGSRGGGGGGGGGGGGGGGGAGAGGGSDFGCSAAAPRSESGFLPYSAAVLSKTAVSPPDQRDEAPLTR

SEQ ID NO: 28972 - protein, 926 aa, Homo sapiens
  Payload ID: 5649
  Gene Symbol: ETAA1
  Gene Name: Ewing tumor-associated antigen 1
  Uniprot ID: Q9NY74
  ENSP ID: ENSP00000272342
MSRRRKHDDSPSPKKTPHKTVAAEECGSVVEPGRRRLRSARGSWPCGAREGPPGPVRQREQPPTAALCSKSNPEERYETPKRALKMDSLSSSFSSPNDPDGQNDIFWDQNSPLTKQLGKGRKKQIYTTDSDEISHIVNRIAPQDEKPTTNSMLDMWIGETAIPCTPSVAKGKSRAKISCTKLKTQSQEEELMKLAKQFDKNMEELDVIQEQNKRNYDFTQMISETEILSNYKDNIQMWSLHNIVPEIDNATKKPIKGNTKISVANNQNSSQKPFDQIAEAAFNAIFDGSTQKCSGQLSQELPEAFWSTSNTTFVKTNALKEEKIITNETLVIEKLSNKTPRSLSSQVDTPIMTKSCVTSCTKEPETSNKYIDAFTTSDFEDDWENLLGSEPFAMQNIDMPELFPSKTAHVTDQKEICTFNSKTVKNTSRANTSPDARLGDSKVLQDLSSKTYDRELIDAEYRFSPNSNKSNKLSTGNKMKFENSSNKIVIQDEIQNCIVTSNLTKIKEDILTNSTEASERKSALNTRYSNEQKNKCILNQSIKAPVNTDLFGSANLGSKTSVSNPNQTSASKVGSFFDDWNDPSFANEIIKACHQLDNTWEADDVDDDLLYQACDDIERLTQQQDIRKDSKTSESICEINNNSEHGAKLTQQQDIRKDSKTSESICEINNNSEHGAKNMFAISKQGSNLVQSKHLNPGSISVQTSLTNSSQIDKPMKMEKGEMYGNSPRFLGATNLTMYSKISNCQINNLHVSYTNTDVPIQVNSSKLVLPGSSSLNVTSDHMNTEITTYKKKLSTNQPCHKTVTDEAQSNLNTTVGFSKFTFTRMKNSQILSQFNQNCITGSMSDTKITQGVEKKKGVNPLLEEAVGQQSLVKLSESLKQSSKEEEEKNRKCSPEEIQRKRQEALVRRMAKARASSVNAAPTSFL

SEQ ID NO: 28973 - protein, 354 aa, Homo sapiens
  Payload ID: 5650
  Gene Symbol: EWSR1
  Gene Name: EWS RNA-binding protein 1
  Uniprot ID: Q01844
  ENSP ID: ENSP00000327456
MASTDYSTYSQAAAQQGYSAYTAQPTQGYAQTTQAYGQQSYGTYGQPTDVSYTQAQTTATYGQTAYATSYGQPPTGYTTPTAPQAYSQPVQGYGTGAYDTTTATVTTTQASYAAQSAYGTQPAYPAYGQQPAATAPTRPQDGNKPTETSQPQSSTGGYNQPSLGYGQSNYSYPQVPGSYPMQPVTAPPSYPPTSYSSTQPTSYDQSSYSQQNTYGQPSSYGQQSSYGQQSSYGQQPPTSYPPQTGSYSQAPSQYSQQSSSYGQQSSFRQDHPSSMGVYGQESGGFSGPGENRSMSGPDNRGRGRGGFDRGGMSRGGRGGGRGGMGLQSESLVYTSILKKYPYSVLSRQHNEKWD

SEQ ID NO: 28974 - protein, 618 aa, Homo sapiens
  Payload ID: 5650
  Gene Symbol: EWSR1
  Gene Name: EWS RNA-binding protein 1
  ENSP ID: ENSP00000330516
MASTDYSTYSQAAAQQGYSAYTAQPTQGYAQTTQAYGQQSYGTYGQPTDVSYTQAQTTATYGQTAYATSYGQPPTGYTTPTAPQAYSQPVQGYGTGAYDTTTATVTTTQASYAAQSAYGTQPAYPAYGQQPAATAPTRPQDGNKPTETSQPQSSTGGYNQPSLGYGQSNYSYPQVPGSYPMQPVTAPPSYPPTSYSSTQPTSYDQSSYSQQNTYGQPSSYGQQSSYGQQSSYGQQPPTSYPPQTGSYSQAPSQYSQQSSSYGQQSSFRQDHPSSMGVYGQESGGFSGPGENRSMSGPDNRGRGRGGFDRGGMSRDPDEDSDNSAIYVQGLNDSVTLDDLADFFKQCGVVKMNKRTGQPMIHIYLDKETGKPKGDATVSYEDPPTAKAAVEWFDGKDFQGSKLKVSLARKKPPMNSMRGGLPPREGRGMPPPLRGGPGGPGGPGGPMGRMGGRGGDRGGFPPRGPRGSRGNPSGGGNVQHRAGDWQCPNPGCGNQNFAWRTECNQCKAPKPEGFLPPPFPPPGGDRGRGGPGGMRGGRGGLMDRGGPGGMFRGGRGGDRGGFRGGRGMDRGGFGGGRRGGPGGPPGPLMEQMGGRRGGRGGPGKMDKGEHRQERRDRPY

SEQ ID NO: 28975 - protein, 620 aa, Homo sapiens
  Payload ID: 5650
  Gene Symbol: EWSR1
  Gene Name: EWS RNA-binding protein 1
  ENSP ID: ENSP00000330896
MASTDYSTYSQAAAQQGYSAYTAQPTQGYAQTTQAYGQQSYGTYGQPTDVSYTQAQTTATYGQTAYATSYGQPPTGYTTPTAPQAYSQPVQGYGTGAYDTTTATVTTTQASYAAQSAYGTQPAYPAYGQQPAATAPTRPQDGNKPTETSQPQSSTGGYNQPSLGYGQSNYSYPQVPGSYPMQPVTAPPSYPPTSYSSTQPTSYDQSSYSQQNTYGQPSSYGQQSSYGQQSSYGQQPPTSYPPQTGSYSQAPSQYSQQSSSYGQQIYFVGSGRTKNGFETRAFSSLHGFQSAGERGGFNKPGGPMDEGPDLDLGPPVDPDEDSDNSAIYVQGLNDSVTLDDLADFFKQCGVVKMNKRTGQPMIHIYLDKETGKPKGDATVSYEDPPTAKAAVEWFDGKDFQGSKLKVSLARKKPPMNSMRGGLPPREGRGMPPPLRGGPGGPGGPGGPMGRMGGRGGDRGGFPPRGPRGSRGNPSGGGNVQHRAGDWQCPNPGCGNQNFAWRTECNQCKAPKPEGFLPPPFPPPGGDRGRGGPGGMRGGRGGLMDRGGPGGMFRGGRGGDRGGFRGGRGMDRGGFGGGRRGGPGGPPGPLMEQMGGRRGGRGGPGKMDKGEHRQERRDRPY

SEQ ID NO: 28976 - protein, 600 aa, Homo sapiens
  Payload ID: 5650
  Gene Symbol: EWSR1
  Gene Name: EWS RNA-binding protein 1
  Uniprot ID: Q01844
  ENSP ID: ENSP00000331699
MASTDYSTYSQAAAQQGYSAYTAQPTQGYAQTTQAYGQQSYGTYGQPTDVSYTQAQTTATYGQTAYATSYGQPPTGYTTPTAPQAYSQPVQGYGTGAYDTTTATVTTTQASYAAQSAYGTQPAYPAYGQQPAATAPTSYSSTQPTSYDQSSYSQQNTYGQPSSYGQQSSYGQQSSYGQQPPTSYPPQTGSYSQAPSQYSQQSSSYGQQSSFRQDHPSSMGVYGQESGGFSGPGENRSMSGPDNRGRGRGGFDRGGMSRGGRGGGRGGMGSAGERGGFNKPGGPMDEGPDLDLGPPVDPDEDSDNSAIYVQGLNDSVTLDDLADFFKQCGVVKMNKRTGQPMIHIYLDKETGKPKGDATVSYEDPPTAKAAVEWFDGKDFQGSKLKVSLARKKPPMNSMRGGLPPREGRGMPPPLRGGPGGPGGPGGPMGRMGGRGGDRGGFPPRGPRGSRGNPSGGGNVQHRAGDWQCPNPGCGNQNFAWRTECNQCKAPKPEGFLPPPFPPPGGDRGRGGPGGMRGGRGGLMDRGGPGGMFRGGRGGDRGGFRGGRGMDRGGFGGGRRGGPGGPPGPLMEQMGGRRGGRGGPGKMDKGEHRQERRDRPY

SEQ ID NO: 28977 - protein, 308 aa, Homo sapiens
  Payload ID: 5650
  Gene Symbol: EWSR1
  Gene Name: EWS RNA-binding protein 1
  ENSP ID: ENSP00000353204
  MOD_RES (1)..(1): Any amino acid
XLDLGPPVDPDEDSDNSAIYVQGLNDSVTLDDLADFFKQCGVVKMNKRTGQPMIHIYLDKETGKPKGDATVSYEDPPTAKAAVEWFDGKDFQGSKLKVSLARKKPPMNSMRGGLPPREGRGMPPPLRGGPGGPGGPGGPMGRMGGRGGDRGGFPPRGPRGSRGNPSGGGNVQHRAGDWQCPNPSIGDFCCDVIVCRGCGNQNFAWRTECNQCGDRGRGGPGGMRGGRGGLMDRGGPGGMFRGGRGGDRGGFRGGRGMDRGGFGGGRRGGPGGPPGPLMEQMGGRRGGRGGPGKMDKGEHRQERRDRPY

SEQ ID NO: 28978 - protein, 656 aa, Homo sapiens
  Payload ID: 5650
  Gene Symbol: EWSR1
  Gene Name: EWS RNA-binding protein 1
  Uniprot ID: Q01844
  ENSP ID: ENSP00000381031
MASTDYSTYSQAAAQQGYSAYTAQPTQGYAQTTQAYGQQSYGTYGQPTDVSYTQAQTTATYGQTAYATSYGQPPTGYTTPTAPQAYSQPVQGYGTGAYDTTTATVTTTQASYAAQSAYGTQPAYPAYGQQPAATAPTRPQDGNKPTETSQPQSSTGGYNQPSLGYGQSNYSYPQVPGSYPMQPVTAPPSYPPTSYSSTQPTSYDQSSYSQQNTYGQPSSYGQQSSYGQQSSYGQQPPTSYPPQTGSYSQAPSQYSQQSSSYGQQSSFRQDHPSSMGVYGQESGGFSGPGENRSMSGPDNRGRGRGGFDRGGMSRGGRGGGRGGMGSAGERGGFNKPGGPMDEGPDLDLGPPVDPDEDSDNSAIYVQGLNDSVTLDDLADFFKQCGVVKMNKRTGQPMIHIYLDKETGKPKGDATVSYEDPPTAKAAVEWFDGKDFQGSKLKVSLARKKPPMNSMRGGLPPREGRGMPPPLRGGPGGPGGPGGPMGRMGGRGGDRGGFPPRGPRGSRGNPSGGGNVQHRAGDWQCPNPGCGNQNFAWRTECNQCKAPKPEGFLPPPFPPPGGDRGRGGPGGMRGGRGGLMDRGGPGGMFRGGRGGDRGGFRGGRGMDRGGFGGGRRGGPGGPPGPLMEQMGGRRGGRGGPGKMDKGEHRQERRDRPY

SEQ ID NO: 28979 - protein, 655 aa, Homo sapiens
  Payload ID: 5650
  Gene Symbol: EWSR1
  Gene Name: EWS RNA-binding protein 1
  Uniprot ID: Q01844
  ENSP ID: ENSP00000385726
MASTDYSTYSQAAAQQGYSAYTAQPTQGYAQTTQAYGQQSYGTYGQPTDVSYTQAQTTATYGQTAYATSYGQPPTGYTTPTAPQAYSQPVQGYGTGAYDTTTATVTTTQASYAAQSAYGTQPAYPAYGQQPAATAPTRPQDGNKPTETSQPQSSTGGYNQPSLGYGQSNYSYPQVPGSYPMQPVTAPPSYPPTSYSSTQPTSYDQSSYSQQNTYGQPSSYGQQSSYGQQSSYGQQPPTSYPPQTGSYSQAPSQYSQQSSSYGQQSSFRQDHPSSMGVYGQESGGFSGPGENRSMSGPDNRGRGRGGFDRGGMSRGGRGGGRGGMGAGERGGFNKPGGPMDEGPDLDLGPPVDPDEDSDNSAIYVQGLNDSVTLDDLADFFKQCGVVKMNKRTGQPMIHIYLDKETGKPKGDATVSYEDPPTAKAAVEWFDGKDFQGSKLKVSLARKKPPMNSMRGGLPPREGRGMPPPLRGGPGGPGGPGGPMGRMGGRGGDRGGFPPRGPRGSRGNPSGGGNVQHRAGDWQCPNPGCGNQNFAWRTECNQCKAPKPEGFLPPPFPPPGGDRGRGGPGGMRGGRGGLMDRGGPGGMFRGGRGGDRGGFRGGRGMDRGGFGGGRRGGPGGPPGPLMEQMGGRRGGRGGPGKMDKGEHRQERRDRPY

SEQ ID NO: 28980 - protein, 233 aa, Homo sapiens
  Payload ID: 5650
  Gene Symbol: EWSR1
  Gene Name: EWS RNA-binding protein 1
  ENSP ID: ENSP00000393637
MASTDYSTYSQAAAQQGYSAYTAQPTQGYAQTTQAYGQQSYGTYGQPTDVSYTQAQTTATYGQTAYATSYGQPPTGYTTPTAPQAYSQPVQGYGTGAYDTTTATVTTTQASYAAQSAYGTQPAYPAYGQQPAATAPTSYSSTQPTSYDQSSYSQQNTYGQPSSYGQQSSYGQQSSYGQQPPTSYPPQTGSYSQAPSQYSQQSSSYGQQSSFRQDHPSSMGVYGQESGGFSGPG

SEQ ID NO: 28981 - protein, 180 aa, Homo sapiens
  Payload ID: 5650
  Gene Symbol: EWSR1
  Gene Name: EWS RNA-binding protein 1
  ENSP ID: ENSP00000395200
MASTDYSTYSQAAAQQGYSAYTAQPTQGYAQTTQASYAAQSAYGTQPAYPAYGQQPAATAPTRPQDGNKPTETSQPQSSTGGYNQPSLGYGQSNYSYPQVPGSYPMQPVTAPPSYPPTSYSSTQPTSYDQSSYSQQNTYGQPSSYGQQSSYGQQSSYGQQPPTSYPPQTGSYSQAPSQYS

SEQ ID NO: 28982 - protein, 661 aa, Homo sapiens
  Payload ID: 5650
  Gene Symbol: EWSR1
  Gene Name: EWS RNA-binding protein 1
  Uniprot ID: Q01844
  ENSP ID: ENSP00000400142
MASTDYSTYSQAAAQQGYSAYTAQPTQGYAQTTQAYGQQSYGTYGQPTDVSYTQAQTTATYGQTAYATSYGQPPTVEGTSTGYTTPTAPQAYSQPVQGYGTGAYDTTTATVTTTQASYAAQSAYGTQPAYPAYGQQPAATAPTRPQDGNKPTETSQPQSSTGGYNQPSLGYGQSNYSYPQVPGSYPMQPVTAPPSYPPTSYSSTQPTSYDQSSYSQQNTYGQPSSYGQQSSYGQQSSYGQQPPTSYPPQTGSYSQAPSQYSQQSSSYGQQSSFRQDHPSSMGVYGQESGGFSGPGENRSMSGPDNRGRGRGGFDRGGMSRGGRGGGRGGMGAGERGGFNKPGGPMDEGPDLDLGPPVDPDEDSDNSAIYVQGLNDSVTLDDLADFFKQCGVVKMNKRTGQPMIHIYLDKETGKPKGDATVSYEDPPTAKAAVEWFDGKDFQGSKLKVSLARKKPPMNSMRGGLPPREGRGMPPPLRGGPGGPGGPGGPMGRMGGRGGDRGGFPPRGPRGSRGNPSGGGNVQHRAGDWQCPNPGCGNQNFAWRTECNQCKAPKPEGFLPPPFPPPGGDRGRGGPGGMRGGRGGLMDRGGPGGMFRGGRGGDRGGFRGGRGMDRGGFGGGRRGGPGGPPGPLMEQMGGRRGGRGGPGKMDKGEHRQERRDRPY

SEQ ID NO: 28983 - protein, 166 aa, Homo sapiens
  Payload ID: 5650
  Gene Symbol: EWSR1
  Gene Name: EWS RNA-binding protein 1
  ENSP ID: ENSP00000405947
MASTDYSTYSQAAAQQGYSAYTAQPTQGYAQTTQQAYGQQSYGTYGQPTDVSYTQAQTTATYGQTAYATSYGQPPTEGTSTGYTTPTAPQAYSQPVQGYGTGAYDTTTATVTTTQASYAAQSAYGTQPAYPAYGQQPAATAPTRPQDGNKPTETSQPQSSTGGYNQ

SEQ ID NO: 28984 - protein, 156 aa, Homo sapiens
  Payload ID: 5650
  Gene Symbol: EWSR1
  Gene Name: EWS RNA-binding protein 1
  ENSP ID: ENSP00000406824
MASTDYSTYSQAAAQQGYSAYTAQPTQGYAQTTQQAYGQQSYGTYGQPTDVSYTQAQTTATYGQTAYATSYGQPPTVEGTSTGYTTPTAPQAYSQPVQGYGTGAYDTTTATVTTTQASYAAQSAYGTQPAYPAYGQQPAATAPTRPQDGNKPTETS

SEQ ID NO: 28985 - protein, 292 aa, Homo sapiens
  Payload ID: 5650
  Gene Symbol: EWSR1
  Gene Name: EWS RNA-binding protein 1
  ENSP ID: ENSP00000412670
MASTDYSTYSQAAAQQGYSAYTAQPTQGYAQTTQQAYGQQSYGTYGQPTDVSYTQAQTTATYGQTAYATSYGQPPTGYTTPTAPQAYSQPVQGYGTGAYDTTTATVTTTQASYAAQSAYGTQPAYPAYGQQPAATAPTRPQDGNKPTETSQPQSSTGGYNQPSLGYGQSNYSYPQVPGSYPMQPVTAPPSYPPTSYSSTQPTSYDQSSYSQQNTYGQPSSYGQQSSYGQQSSYGQQPPTSYPPQTGSYSQAPSQYSQQSSSYGQQSSFRQDHPSSMGVYGQESGGFSGPGEN

SEQ ID NO: 28986 - protein, 77 aa, Homo sapiens
  Payload ID: 5650
  Gene Symbol: EWSR1
  Gene Name: EWS RNA-binding protein 1
  ENSP ID: ENSP00000416171
MASTDYSTYSQAAAQQGAYTAQPTQGYAQTTQAYGQQSYGTYGQPTDVSYTQAQTTATYGQTAYATSYGQPPTGYTT

SEQ ID NO: 28987 - protein, 584 aa, Homo sapiens
  Payload ID: 5650
  Gene Symbol: EWSR1
  Gene Name: EWS RNA-binding protein 1
  ENSP ID: ENSP00000486709
MASTDYSTYSQAAAQQGYSAYTAQPTQGYAQTTQQAYGQQSYGTYGQPTDVSYTQAQTTATYGQTAYATSYGQPPTGYTTPTAPQAYSQPVQGYGTGAYDTTTATVTTTQASYAAQSAYGTQPAYPAYGQQPAATAPTRPQDGNKPTETSQPQSSTGGYNQPSLGYGQSNYSYPQVPGSYPMQPVTAPPSYPPTSYSSTQPTSYDQSSYSQQNTYGQPSSYGQQSSYGQQSSYGQQPPTSYPPQTGSYSQAPSQYSQQSSSYGQQRPMDEGPDLDLGPPVDPDEDSDNSAIYVQGLNDSVTLDDLADFFKQCGVVKMNKRTGQPMIHIYLDKETGKPKGDATVSYEDPPTAKAAVEWFDGKDFQGSKLKVSLARKKPPMNSMRGGLPPREGRGMPPPLRGGPGGPGGPGGPMGRMGGRGGDRGGFPPRGPRGSRGNPSGGGNVQHRAGDWQCPNPGCGNQNFAWRTECNQCKAPKPEGFLPPPFPPPGGDRGRGGPGGMRGGRGGLMDRGGPGGMFRGGRGGDRGGFRGGRGMDRGGFGGGRRGGPGGPPGPLMEQMGGRRGGRGGPGKMDKGEHRQERRDRPY

SEQ ID NO: 28988 - protein, 323 aa, Homo sapiens
  Payload ID: 5651
  Gene Symbol: ERCC1
  Gene Name: excision repair cross-complementation group 1
  Uniprot ID: P07992
  ENSP ID: ENSP00000013807
MDPGKDKEGVPQPSGPPARKKFVIPLDEDEVPPGVAKPLFRSTQSLPTVDTSAQAAPQTYAEYAISQPLEGAGATCPTGSEPLAGETPNQALKPGAKSNSIIVSPRQRGNPVLKFVRNVPWEFGDVIPDYVLGQSTCALFLSLRYHNLHPDYIHGRLQSLGKNFALRVLLVQVDVKDPQQALKELAKMCILADCTLILAWSPEEAGRYLETYKAYEQKPADLLMEKLEQDFVSRVTECLTTVKSVNKTDSQTLLTTFGSLEQLIAASREDLALCPGLGPQKVRALGKNPRSWGKERAPNKHNLRPQSFKVKKEPKTRHSGFRL

SEQ ID NO: 28989 - protein, 297 aa, Homo sapiens
  Payload ID: 5651
  Gene Symbol: ERCC1
  Gene Name: excision repair cross-complementation group 1
  Uniprot ID: P07992
  ENSP ID: ENSP00000300853
MDPGKDKEGVPQPSGPPARKKFVIPLDEDEVPPGVAKPLFRSTQSLPTVDTSAQAAPQTYAEYAISQPLEGAGATCPTGSEPLAGETPNQALKPGAKSNSIIVSPRQRGNPVLKFVRNVPWEFGDVIPDYVLGQSTCALFLSLRYHNLHPDYIHGRLQSLGKNFALRVLLVQVDVKDPQQALKELAKMCILADCTLILAWSPEEAGRYLETYKAYEQKPADLLMEKLEQDFVSRVTECLTTVKSVNKTDSQTLLTTFGSLEQLIAASREDLALCPGLGPQKARRLFDVLHEPFLKVP

SEQ ID NO: 28990 - protein, 273 aa, Homo sapiens
  Payload ID: 5651
  Gene Symbol: ERCC1
  Gene Name: excision repair cross-complementation group 1
  Uniprot ID: P07992
  ENSP ID: ENSP00000345203
MDPGKDKEGVPQPSGPPARKKFVIPLDEDEVPPGVAKPLFRSTQSLPTVDTSAQAAPQTYAEYAISQPLEGAGATCPTGSEPLAGETPNQALKPGAKSNSIIVSPRQRGNPVLKFVRNVPWEFGDVIPDYVLGQSTCALFLSLRYHNLHPDYIHGRLQSLGKNFALRVLLVQVDVKDPQQALKELAKMCILADCTLILAWSPEEAGRYLETYKAYEQKPADLLMEKLEQDFVSRSLEQLIAASREDLALCPGLGPQKARRLFDVLHEPFLKVP

SEQ ID NO: 28991 - protein, 225 aa, Homo sapiens
  Payload ID: 5651
  Gene Symbol: ERCC1
  Gene Name: excision repair cross-complementation group 1
  Uniprot ID: P07992
  ENSP ID: ENSP00000394875
MDPGKDKEGVPQPSGPPARKKFVIPLDEDEVPPGVRGNPVLKFVRNVPWEFGDVIPDYVLGQSTCALFLSLRYHNLHPDYIHGRLQSLGKNFALRVLLVQVDVKDPQQALKELAKMCILADCTLILAWSPEEAGRYLETYKAYEQKPADLLMEKLEQDFVSRVTECLTTVKSVNKTDSQTLLTTFGSLEQLIAASREDLALCPGLGPQKARRLFDVLHEPFLKVP

SEQ ID NO: 28992 - protein, 45 aa, Homo sapiens
  Payload ID: 5651
  Gene Symbol: ERCC1
  Gene Name: excision repair cross-complementation group 1
  ENSP ID: ENSP00000465225
FGDVIPDYVLGQSTCALFLRAPGTCSPLEAQVSSPLHEEARGLVF

SEQ ID NO: 28993 - protein, 112 aa, Homo sapiens
  Payload ID: 5651
  Gene Symbol: ERCC1
  Gene Name: excision repair cross-complementation group 1
  ENSP ID: ENSP00000465354
  MOD_RES (1)..(1): Any amino acid
XCILADCTLILAWSPEEAGRYLETYKAYEQKPADLLMEKLEQDFVSRSLEQLIAASREDLALCPGLGPQKVRALGKNPRSWGKERAPNKHNLRPQSFKVKKEPKTRHSGFRL

SEQ ID NO: 28994 - protein, 141 aa, Homo sapiens
  Payload ID: 5651
  Gene Symbol: ERCC1
  Gene Name: excision repair cross-complementation group 1
  ENSP ID: ENSP00000465524
MDPGKDKEGVPQPSGPPARKKFVIPLDEDEVPPGVAKPLFRSTQSLPTVDTSAQAAPQTYAEYAISQPLEGAGATCPTGSEPLAGETPNQALKPGAKSNSIIVSPRQRGNPVLKFVRNVPWEFGDVIPDYVLGQSTCALFL

SEQ ID NO: 28995 - protein, 91 aa, Homo sapiens
  Payload ID: 5651
  Gene Symbol: ERCC1
  Gene Name: excision repair cross-complementation group 1
  ENSP ID: ENSP00000466644
  MOD_RES (1)..(1): Any amino acid
XNLHPDYIHGRLQSLGKNFALRVLLVQVDVKDPQQALKELAKMCILADCTLILAWSLWNSSSPHQEKIWPYAQAWALRKPGGCLMSCTSPS

SEQ ID NO: 28996 - protein, 258 aa, Homo sapiens
  Payload ID: 5651
  Gene Symbol: ERCC1
  Gene Name: excision repair cross-complementation group 1
  ENSP ID: ENSP00000467183
MDPGKDKEGVPQPSGPPARKKFVIPLDEDEVPPGVAKPLFRSTQSLPTVDTSAQAAPQTYAEYAISQPLEGAGATCPTGSEPLAGETPNQALKPGAKSNSIIVSPRQRGNPVLKFVRNVPWEFGDVIPDYVLGQSTCALFLSLRYHNLHPDYIHGRLQSLGKNFALRVLLVQVDVKDPQQALKELAKMCILADCTLILAWSPEEAGRYLETYKAYEQKPADLLMEKLEQDFVSRVTECLTTVKSVNKTDSQTLLTTFG

SEQ ID NO: 28997 - protein, 297 aa, Homo sapiens; identical to SEQ ID NO: 28989
  Payload ID: 5651
  Gene Symbol: ERCC1
  Gene Name: excision repair cross-complementation group 1
  Uniprot ID: P07992
  ENSP ID: ENSP00000468035

SEQ ID NO: 28998 - protein, 213 aa, Homo sapiens
  Payload ID: 5651
  Gene Symbol: ERCC1
  Gene Name: excision repair cross-complementation group 1
  ENSP ID: ENSP00000468119
MDPGKDKEGVPQPSGPPARKKFVIPLDEDEVPPGVAKPLFRSTQSLPTVDTSAQAAPQTYAEYAISQPLEGAGATCPTGSEPLAGETPNQALKPGAKSNSIIVSPRQRGNPVLKFVRNVPWEFGDVIPDYVLGQSTCALFLSLRYHNLHPDYIHGRLQSLGKNFALRVLLVQVDVKDPQQALKELAKMCILADCTLILAWRPGGCLMSCTSPS

SEQ ID NO: 28999 - protein, 234 aa, Homo sapiens
  Payload ID: 5651
  Gene Symbol: ERCC1
  Gene Name: excision repair cross-complementation group 1
  ENSP ID: ENSP00000468158
MDPGKDKEGVPQPSGPPARKKFVIPLDEDEVPPGVAKPLFRSTQSLPTVDTSAQAAPQTYAEYAISQPLEGAGATCPTGSEPLAGETPNQALKPGAKSNSIIVSPRQRGNPVLKFVRNVPWEFGDVIPDYVLGQSTCALFLSLRYHNLHPDYIHGRLQSLGKNFALRVLLVQVDVKDPQQALKELAKMCILADCTLILAWSPEEAGRYLETYKAYEQKPADLLMEKLEQDFVSR

SEQ ID NO: 29000 - protein, 209 aa, Homo sapiens
  Payload ID: 5651
  Gene Symbol: ERCC1
  Gene Name: excision repair cross-complementation group 1
  ENSP ID: ENSP00000468548
MDPGKDKEGVPQPSGPPARKKFVIPLDEDEVPPGVRGNPVLKFVRNVPWEFGDVIPDYVLGQSTCALFLSLRYHNLHPDYIHGRLQSLGKNFALRVLLVQVDVKDPQQALKELAKMCILADCTLILAWSPEEAGRYLETYKAYEQKPADLLMEKLEQDFVSRVTECLTTVKSVNKTDSQTLLTTFGSLEQLIAASREDLALCPGLGPQK

SEQ ID NO: 29001 - protein, 706 aa, Homo sapiens
  Payload ID: 5652
  Gene Symbol: ERCC2
  Gene Name: excision repair cross-complementation group 2
  ENSP ID: ENSP00000375805
MRELKRTLDAKGHGVLEMPSGTGKTVSLLALIMAYQRAYPLEVTKLIYCSRTVPEIEKVIEELRKLLNFYEKQEGEKLPFLGLALSSRKNLCIHPEVTPLRFGKDVDGKCHSLTASYVRAQYQHDTSLPHCRFYEEFDAHGREVPLPAGIYNLDDLKALGRRQGWCPYFLARYSILHANVVVYSYHYLLDPKIADLVSKELARKAVVVFDEAHNIDNVCIDSMSVNLTRRTLDRCQGNLETLQKTVLRIKETDEQRLRDEYRRLVEGLREASAARETDAHLANPVLPDEVLQEAVPGSIRTAEHFLGFLRRLLEYVKWRLRVQHVVQESPPAFLSGLAQRVCIQRKPLRFCAERLRSLLHTLEITDLADFSPLTLLANFATLVSTYAKGFTIIIEPFDDRTPTIANPILHFSCMDASLAIKPVFERFQSVIITSGTLSPLDIYPKILDFHPVTMATFTMTLARVCLCPMIIGRGNDQVAISSKFETREDIAVIRNYGNLLLEMSAVVPDGIVAFFTSYQYMESTVASWYEQGILENIQRNKLLFIETQDGAETSVALEKYQEACENGRGAILLSVARGKVSEGIDFVHHYGRAVIMFGVPYVYTQSRILKARLEYLRDQFQIRENDFLTFDAMRHAAQCVGRAIRGKTDYGLMVFADKRFARGDKRGKLPRWIQEHLTDANLNLTVDEGVQVAKYFLRQMAQPFHR

SEQ ID NO: 29002 - protein, 682 aa, Homo sapiens
  Payload ID: 5652
  Gene Symbol: ERCC2
  Gene Name: excision repair cross-complementation group 2
  ENSP ID: ENSP00000375808
MKLNVDGLLVYFPYDYIYPEQFSYMRELKRTLDAKGHGVLEMPSGTGKTVSLLALIMAYQRAYPLEVTKLIYCSRTVPEIEKVIEELRKLLNFYEKQEGEKLPFLGLALSSRKNLCIHPEILHANVVVYSYHYLLDPKIADLVSKELARKAVVVFDEAHNIDNVCIDSMSVNLTRRTLDRCQGNLETLQKTVLRIKETDEQRLRDEYRRLVEGLREASAARETDAHLANPVLPDEVLQEAVPGSIRTAEHFLGFLRRLLEYVKWRLRVQHVVQESPPAFLSGLAQRVCIQRKPLRFCAERLRSLLHTLEITDLADFSPLTLLANFATLVSTYAKGFTIIIEPFDDRTPTIANPILHFSCMDASLAIKPVFERFQSVIITSGTLSPLDIYPKILDFHPVTMATFTMTLARVCLCPMIIGRGNDQVAISSKFETREDIAVIRNYGNLLLEMSAVVPDGIVAFFTSYQYMESTVASWYEQGILENIQRNKLLFIETQDGAETSVALEKYQEACENGRGAILLSVARGKVSEGIDFVHHYGRAVIMFGVPYVYTQSRILKARLEYLRDQFQIRENDFLTFDAMRHAAQCVGRAIRGKTDYGLMVFADKRFARGDKRGKLPRWIQEHLTDANLNLTVDEGVQVAKYFLRQMAQPFHREDQLGLSLLSLEQLESEETLKRIEQIAQQL

SEQ ID NO: 29003 - protein, 760 aa, Homo sapiens
  Payload ID: 5652
  Gene Symbol: ERCC2
  Gene Name: excision repair cross-complementation group 2
  Uniprot ID: P18074
  ENSP ID: ENSP00000375809
MKLNVDGLLVYFPYDYIYPEQFSYMRELKRTLDAKGHGVLEMPSGTGKTVSLLALIMAYQRAYPLEVTKLIYCSRTVPEIEKVIEELRKLLNFYEKQEGEKLPFLGLALSSRKNLCIHPEVTPLRFGKDVDGKCHSLTASYVRAQYQHDTSLPHCRFYEEFDAHGREVPLPAGIYNLDDLKALGRRQGWCPYFLARYSILHANVVVYSYHYLLDPKIADLVSKELARKAVVVFDEAHNIDNVCIDSMSVNLTRRTLDRCQGNLETLQKTVLRIKETDEQRLRDEYRRLVEGLREASAARETDAHLANPVLPDEVLQEAVPGSIRTAEHFLGFLRRLLEYVKWRLRVQHVVQESPPAFLSGLAQRVCIQRKPLRFCAERLRSLLHTLEITDLADFSPLTLLANFATLVSTYAKGFTIIIEPFDDRTPTIANPILHFSCMDASLAIKPVFERFQSVIITSGTLSPLDIYPKILDFHPVTMATFTMTLARVCLCPMIIGRGNDQVAISSKFETREDIAVIRNYGNLLLEMSAVVPDGIVAFFTSYQYMESTVASWYEQGILENIQRNKLLFIETQDGAETSVALEKYQEACENGRGAILLSVARGKVSEGIDFVHHYGRAVIMFGVPYVYTQSRILKARLEYLRDQFQIRENDFLTFDAMRHAAQCVGRAIRGKTDYGLMVFADKRFARGDKRGKLPRWIQEHLTDANLNLTVDEGVQVAKYFLRQMAQPFHREDQLGLSLLSLEQLESEETLKRIEQIAQQL

SEQ ID NO: 29004 - protein, 405 aa, Homo sapiens
  Payload ID: 5652
  Gene Symbol: ERCC2
  Gene Name: excision repair cross-complementation group 2
  Uniprot ID: P18074
  ENSP ID: ENSP00000431229
MRELKRTLDAKGHGVLEMPSGTGKTVSLLALIMAYQRAYPLEVTKLIYCSRTVPEIEKVIEELRKLLNFYEKQEGEKLPFLGLALSSRKNLCIHPEVTPLRFGKDVDGKCHSLTASYVRAQYQHDTSLPHCRFYEEFDAHGREVPLPAGIYNLDDLKALGRRQGWCPYFLARYSILHANVVVYSYHYLLDPKIADLVSKELARKAVVVFDEAHNIDNVCIDSMSVNLTRRTLDRCQGNLETLQKTVLRIKETDEQRLRDEYRRLVEGLREASAARETDAHLANPVLPDEVLQEAVPGSIRTAEHFLGFLRRLLEYVKWRLRVQHVVQESPPAFLSGLAQRVCIQRKPLRFCAERLRSLLHTLEITDLADFSPLTLLANFATLVSTYAKGQAQHCGSSRNQKRSHP

SEQ ID NO: 29005 - protein, 292 aa, Homo sapiens
  Payload ID: 5652
  Gene Symbol: ERCC2
  Gene Name: excision repair cross-complementation group 2
  ENSP ID: ENSP00000464887
MRELKRTLDAKGHGVLEMPSGTGKTVSLLALIMAYQRAYPLEVTKLIYCSRTVPEIEKVIEELRKLLNFYEKQEGEKLPFLGLALSSRKNLCIHPEVTPLRFGKDVDGKCHSLTASYVRAQYQHDTSLPHCRFYEEFDAHGREVPLPAGIYNLDDLKALGRRQGWCPYFLARYSILHANVVVYSYHYLLDPKIADLVSKELARKAVVVFDEAHNIDNVCIDSMSVNLTRRTLDRCQGNLETLQKTVLRIKETDEQRLRDEYRRLVEGLREASAARETDAHLANPVLPDEVLQ

SEQ ID NO: 29006 - protein, 127 aa, Homo sapiens
  Payload ID: 5652
  Gene Symbol: ERCC2
  Gene Name: excision repair cross-complementation group 2
  ENSP ID: ENSP00000465207
MKLNVDGLLVYFPYDYIYPEQFSYMRELKRTLDAKGHGVLEMPSGTGKTVSLLALIMAYQRAYPLEVTKLIYCSRTVPEIEKVIEELRKLLNFYEKQEGEKLPFLGLALSSRKNLCIHPETTSASTP

SEQ ID NO: 29007 - protein, 202 aa, Homo sapiens
  Payload ID: 5652
  Gene Symbol: ERCC2
  Gene Name: excision repair cross-complementation group 2
  ENSP ID: ENSP00000465593
  MOD_RES (1)..(1): Any amino acid
XEASAARETDAHLANPVLPDEVLQEAVPGSIRTAEHFLGFLRRLLEYVKWRLRVQHVVQESPPAFLSGLAQRVCIQRKPLRFCAERLRSLLHTLEITDLADFSPLTLLANFATLVSTYAKGFTIIIEPFDDRTPTIANPILHFSCMDASLAIKPVFERFQSVIITSGTLSPLDIYPKILDFHPVTMATFTMTLARVCLCPML

SEQ ID NO: 29008 - protein, 109 aa, Homo sapiens
  Payload ID: 5652
  Gene Symbol: ERCC2
  Gene Name: excision repair cross-complementation group 2
  ENSP ID: ENSP00000466998
MRELKRTLDAKAYPLEVTKLIYCSRTVPEIEKVIEELRKLLNFYEKQEGEKLPFLGLALSSRKNLCIHPEVTPLRFGKDVDGKCHSLTASYVRAQYQHDTSLPHCRFYE

SEQ ID NO: 29009 - protein, 782 aa, Homo sapiens
  Payload ID: 5653
  Gene Symbol: ERCC3
  Gene Name: excision repair cross-complementation group 3
  Uniprot ID: P19447
  ENSP ID: ENSP00000285398
MGKRDRADRDKKKSRKRHYEDEEDDEEDAPGNDPQEAVPSAAGKQVDESGTKVDEYGAKDYRLQMPLKDDHTSRPLWVAPDGHIFLEAFSPVYKYAQDFLVAIAEPVCRPTHVHEYKLTAYSLYAAVSVGLQTSDITEYLRKLSKTGVPDGIMQFIKLCTVSYGKVKLVLKHNRYFVESCHPDVIQHLLQDPVIRECRLRNSEGEATELITETFTSKSAISKTAESSGGPSTSRVTDPQGKSDIPMDLFDFYEQMDKDEEEEEETQTVSFEVKQEMIEELQKRCIHLEYPLLAEYDFRNDSVNPDINIDLKPTAVLRPYQEKSLRKMFGNGRARSGVIVLPCGAGKSLVGVTAACTVRKRCLVLGNSAVSVEQWKAQFKMWSTIDDSQICRFTSDAKDKPIGCSVAISTYSMLGHTTKRSWEAERVMEWLKTQEWGLMILDEVHTIPAKMFRRVLTIVQAHCKLGLTATLVREDDKIVDLNFLIGPKLYEANWMELQNNGYIAKVQCAEVWCPMSPEFYREYVAIKTKKRILLYTMNPNKFRACQFLIKFHERRNDKIIVFADNVFALKEYAIRLNKPYIYGPTSQGERMQILQNFKHNPKINTIFISKVGDTSFDLPEANVLIQISSHGGSRRQEAQRLGRVLRAKKGMVAEEYNAFFYSLVSQDTQEMAYSTKRQRFLVDQGYSFKVITKLAGMEEEDLAFSTKEEQQQLLQKVLAATDLDAEEEVVAGEFGSRSSQASRRFGTMSSMSGADDTVYMEYHSSRSKAPSKHVHPLFKRFRK

SEQ ID NO: 29010 - protein, 71 aa, Homo sapiens
  Payload ID: 5653
  Gene Symbol: ERCC3
  Gene Name: excision repair cross-complementation group 3
  ENSP ID: ENSP00000390888
MGKRDRADRGETLRGHAQPRLPLPALPPALPRSCSGPLRRPTLLALPRAPRWDRPLGGRDAGPGRSPANSA

SEQ ID NO: 29011 - protein, 188 aa, Homo sapiens
  Payload ID: 5653
  Gene Symbol: ERCC3
  Gene Name: excision repair cross-complementation group 3
  ENSP ID: ENSP00000408901
  MOD_RES (1)..(1): Any amino acid
XLCTVSYGKVKLVLKHNRYFVESCHPDVIQHLLQDPVIRECRLRNSEGEATELITETFTSKSAHLPLSQISKTAESSGGPSTSRVTDPQGKSDIPMDLFDFYEQMDKDEEEEEETQTVSFEVKQEMIEELQKRCIHLEYPLLAEYDFRNDSVNPDINIDLKPTAVLRPYQEKSLRKMFGNGRARSGVI

SEQ ID NO: 29012 - protein, 71 aa, Homo sapiens; identical to SEQ ID NO: 29010
  Payload ID: 5653
  Gene Symbol: ERCC3
  Gene Name: excision repair cross-complementation group 3
  ENSP ID: ENSP00000415335

SEQ ID NO: 29013 - protein, 916 aa, Homo sapiens
  Payload ID: 5654
  Gene Symbol: ERCC4
  Gene Name: excision repair cross-complementation group 4
  Uniprot ID: Q92889
  ENSP ID: ENSP00000310520
MESGQPARRIAMAPLLEYERQLVLELLDTDGLVVCARGLGADRLLYHFLQLHCHPACLVLVLNTQPAEEEYFINQLKIEGVEHLPRRVTNEITSNSRYEVYTQGGVIFATSRILVVDFLTDRIPSDLITGILVYRAHRIIESCQEAFILRLFRQKNKRGFIKAFTDNAVAFDTGFCHVERVMRNLFVRKLYLWPRFHVAVNSFLEQHKPEVVEIHVSMTPTMLAIQTAILDILNACLKELKCHNPSLEVEDLSLENAIGKPFDKTIRHYLDPLWHQLGAKTKSLVQDLKILRTLLQYLSQYDCVTFLNLLESLRATEKAFGQNSGWLFLDSSTSMFINARARVYHLPDAKMSKKEKISEKMEIKEGEETKKELVLESNPKWEALTEVLKEIEAENKESEALGGPGQVLICASDDRTCSQLRDYITLGAEAFLLRLYRKTFEKDSKAEEVWMKFRKEDSSKRIRKSHKRPKDPQNKERASTKERTLKKKKRKLTLTQMVGKPEELEEEGDVEEGYRREISSSPESCPEEIKHEEFDVNLSSDAAFGILKEPLTIIHPLLGCSDPYALTRVLHEVEPRYVVLYDAELTFVRQLEIYRASRPGKPLRVYFLIYGGSTEEQRYLTALRKEKEAFEKLIREKASMVVPEEREGRDETNLDLVRGTASADVSTDTRKAGGQEQNGTQQSIVVDMREFRSELPSLIHRRGIDIEPVTLEVGDYILTPEMCVERKSISDLIGSLNNGRLYSQCISMSRYYKRPVLLIEFDPSKPFSLTSRGALFQEISSNDISSKLTLLTLHFPRLRILWCPSPHATAELFEELKQSKPQPDAATALAITADSETLPESEKYNPGPQDFLLKMPGVNAKNCRSLMHHVKNIAELAALSQDELTSILGNAANAKQLYDFIHTSFAEVVSKGKGKK

SEQ ID NO: 29014 - protein, 372 aa, Homo sapiens
  Payload ID: 5654
  Gene Symbol: ERCC4
  Gene Name: excision repair cross-complementation group 4
  Uniprot ID: Q92889
  ENSP ID: ENSP00000459933
MESGQPARRIAMAPLLEYERQLVLELLDTDGLVVCARGLGADRLLYHFLQLHCHPACLVLVLNTQPAEEEYFINQLKIEGVEHLPRRVTNEITSNSRYEVYTQGGVIFATSRILVVDFLTDRIPSDLITGILVYRAHRIIESCQEAFILRLFRQKNKRGFIKAFTDNAVAFDTGFCHVERVMRNLFVRKLYLWPRFHVAVNSFLEQHKPEVVEIHVSMTPTMLAIQTAILDILNACLKELKCHNPSLEVEDLSLENAIGKPFDKTIRHYLDPLWHQLGAKTKSLVQDLKILRTLLQYLSQYDCVTFLNLLESLRATEKAFGQNSGWLFLDSSTSMFINARARVYHLPDAKMSKKEKISEKMEIKEGEGILWG

SEQ ID NO: 29015 - protein, 35 aa, Homo sapiens
  Payload ID: 5654
  Gene Symbol: ERCC4
  Gene Name: excision repair cross-complementation group 4
  ENSP ID: ENSP00000461322
RVYFLIYGGSTEEQRYLTALRKEKEAFEKLIRSTV

SEQ ID NO: 29016 - protein, 75 aa, Homo sapiens
  Payload ID: 5654
  Gene Symbol: ERCC4
  Gene Name: excision repair cross-complementation group 4
  ENSP ID: ENSP00000461883
  MOD_RES (1)..(1): Any amino acid
XPSGILVYRAHRIIESCQEAFILRLFRQKNKRGFIKAFTDNAVAFDTGFCHVERVMRNLFVRKLYLWPRLLYWTF

SEQ ID NO: 29017 - protein, 1186 aa, Homo sapiens
  Payload ID: 5655
  Gene Symbol: ERCC5
  Gene Name: excision repair cross-complementation group 5
  Uniprot ID: P28715
  ENSP ID: ENSP00000347978
MGVQGLWKLLECSGRQVSPEALEGKILAVDISIWLNQALKGVRDRHGNSIENPHLLTLFHRLCKLLFFRIRPIFVFDGDAPLLKKQTLVKRRQRKDLASSDSRKTTEKLLKTFLKRQAIKTAFRSKRDEALPSLTQVRRENDLYVLPPLQEEEKHSSEEEDEKEWQERMNQKQALQEEFFHNPQAIDIESEDFSSLPPEVKHEILTDMKEFTKRRRTLFEAMPEESDDFSQYQLKGLLKKNYLNQHIEHVQKEMNQQHSGHIRRQYEDEGGFLKEVESRRVVSEDTSHYILIKGIQAKTVAEVDSESLPSSSKMHGMSFDVKSSPCEKLKTEKEPDATPPSPRTLLAMQAALLGSSSEEELESENRRQARGRNAPAAVDEGSISPRTLSAIKRALDDDEDVKVCAGDDVQTGGPGAEEMRINSSTENSDEGLKVRDGKGIPFTATLASSSVNSAEEHVASTNEGREPTDSVPKEQMSLVHVGTEAFPISDESMIKDRKDRLPLESAVVRHSDAPGLPNGRELTPASPTCTNSVSKNETHAEVLEQQNELCPYESKFDSSLLSSDDETKCKPNSASEVIGPVSLQETSSIVSVPSEAVDNVENVVSFNAKEHENFLETIQEQQTTESAGQDLISIPKAVEPMEIDSEESESDGSFIEVQSVISDEELQAEFPETSKPPSEQGEEELVGTREGEAPAESESLLRDNSERDDVDGEPQEAEKDAEDSLHEWQDINLEELETLESNLLAQQNSLKAQKQQQERIAATVTGQMFLESQELLRLFGIPYIQAPMEAEAQCAILDLTDQTSGTITDDSDIWLFGARHVYRNFFNKNKFVEYYQYVDFHNQLGLDRNKLINLAYLLGSDYTEGIPTVGCVTAMEILNEFPGHGLEPLLKFSEWWHEAQKNPKIRPNPHDTKVKKKLRTLQLTPGFPNPAVAEAYLKPVVDDSKGSFLWGKPDLDKIREFCQRYFGWNRTKTDESLFPVLKQLDAQQTQLRIDSFFRLAQQEKEDAKRIKSQRLNRAVTCMLRKEKEAAASEIEAVSVAMEKEFELLDKAKGKTQKRGITNTLEESSSLKRKRLSDSKGKNTCGGFLGETCLSESSDGSSSEDAESSSLMNVQRRTAAKEPKTSASDSQNSVKEAPVKNGGATTSSSSDSDDDGGKEKMVLVTARSVFGKKRRKLRRARGRKRKT

SEQ ID NO: 29018 - protein, 419 aa, Homo sapiens
  Payload ID: 5655
  Gene Symbol: ERCC5
  Gene Name: excision repair cross-complementation group 5
  Uniprot ID: P28715
  ENSP ID: ENSP00000365121
MFLESQELLRLFGIPYIQAPMEAEAQCAILDLTDQTSGTITDDSDIWLFGARHVYRNFFNKNKFVEYYQYVDFHNQLGLDRNKLINLAYLLGSDYTEGIPTVGCVTAMEILNEFPGHGLEPLLKFSEWWHEAQKNPKIRPNPHDTKVKKKLRTLQLTPGFPNPAVAEAYLKPVVDDSKGSFLWGKPDLDKIREFCQRYFGWNRTKTDESLFPVLKQLDAQQTQLRIDSFFRLAQQEKEDAKRIKSQRLNRAVTCMLRKEKEAAASEIEAVSVAMEKEFELLDKAKGKTQKRGITNTLEESSSLKRKRLSDSKGKNTCGGFLGETCLSESSDGSSSEDAESSSLMNVQRRTAAKEPKTSASDSQNSVKEAPVKNGGATTSSSSDSDDDGGKEKMVLVTARSVFGKKRRKLRRARGRKRKT

SEQ ID NO: 29019 - protein, 43 aa, Homo sapiens
  Payload ID: 5655
  Gene Symbol: ERCC5
  Gene Name: excision repair cross-complementation group 5
  ENSP ID: ENSP00000436083
MGVQGLWKLLECSGRQTILVASRNIDLIQDRCTSTPSSTSEIY

SEQ ID NO: 29020 - protein, 232 aa, Homo sapiens
  Payload ID: 5655
  Gene Symbol: ERCC5
  Gene Name: excision repair cross-complementation group 5
  Uniprot ID: P28715
  ENSP ID: ENSP00000442117
MGVQGLWKLLECSGRQVSPEALEGKILAVDISIWLNQALKGVRDRHGNSIENPHLLTLFHRLCKLLFFRIRPIFVFDGDAPLLKKQTLVKRRQRKDLASSDSRKTTEKLLKTFLKRQAIKTAFRSKRDEALPSLTQVRRENDLYVLPPLQEEEKHSSEEEDEKEWQERMNQKQALQEEFFHNPQAIDIESEDFSSLPPEVKHEILTDMKEFTKRRRTLFEAMPEVYLPLLQP

SEQ ID NO: 29021 - protein, 1185 aa, Homo sapiens
  Payload ID: 5655
  Gene Symbol: ERCC5
  Gene Name: excision repair cross-complementation group 5
  ENSP ID: ENSP00000478667
MGVQGLWKLLECSGRQVSPEALEGKILAVDISIWLNQALKGVRDRHGNSIENPHLLTLFHRLCKLLFFRIRPIFVFDGDAPLLKKQTLVKRRQRKDLASSDSRKTTEKLLKTFLKRQAIKTAFRSKRDEALPSLTQVRRENDLYVLPPLQEEEKHSSEEEDEKEWQERMNQKQALQEEFFHNPQAIDIESEDFSSLPPEVKHEILTDMKEFTKRRRTLFEAMPEESDDFSQYQLKGLLKKNYLNQHIEHVQKEMNQQHSGHIRRQYEDEGGFLKEVESRRVVSEDTSHYILIKGIQAKTVAEVDSESLPSSSKMHGMSFDVKSSPCEKLKTEKEPDATPPSPRTLLAMQAALLGSSSEEELESENRRQARGRNAPAAVDEGSISPRTLSAIKRALDDDEDVKVCAGDDVQTGGPGAEEMRINSSTENSDEGLKVRDGKGIPFTATLASSSVNSAEEHVASTNEGREPTDSVPKEQMSLVHVGTEAFPISDESMIKDRKDRLPLESAVVRHSDAPGLPNGRELTPASPTCTNSVSKNETHAEVLEQQNELCPYESKFDSSLLSSDDETKCKPNSASEVIGPVSLQETSSIVSVPSEAVDNVENVVSFNAKEHENFLETIQEQQTTESAGQDLISIPKAVEPMEIDSEESESDGSFIEVQSVISDEELQAEFPETSKPPSEQGEEELVGTREGEAPAESESLLRDNSERDDVDGEPQEAEKDAEDSLHEWQDINLEELETLESNLLAQQNSLKAQKQQQERIAATVTGQMFLESQELLRLFGIPYIQAPMEAEAQCAILDLTDQTSGTITDDSDIWLFGARHVYRNFFNKNKFVEYYQYVDFHNQLGLDRNKLINLAYLLGSDYTRNTNCGLCTAMEILNEFPGHGLEPLLKFSEWWHEAQKNPKIRPNPHDTKVKKKLRTLQLTPGFPNPAVAEAYLKPVVDDSKGSFLWGKPDLDKIREFCQRYFGWNRTKTDESLFPVLKQLDAQQTQLRIDSFFRLAQQEKEDAKRIKSQRLNRAVTCMLRKEKEAAASEIEAVSVAMEKEFELLDKAKGKTQKRGITNTLEESSSLKRKRLSDSKGKNTCGGFLGETCLSESSDGSSSEDAESSSLMNVQRRTAAKEPKTSASDSQNSVKEAPVKNGGATTSSSSDSDDDGGKEKMVLVTARSVFGKKRRKLRRARGRKRKT

SEQ ID NO: 29022 - protein, 1493 aa, Homo sapiens
  Payload ID: 5656
  Gene Symbol: ERCC6
  Gene Name: excision repair cross-complementation group 6
  Uniprot ID: Q03468
  ENSP ID: ENSP00000348089
MPNEGIPHSSQTQEQDCLQSQPVSNNEEMAIKQESGGDGEVEEYLSFRSVGDGLSTSAVGCASAAPRRGPALLHIDRHQIQAVEPSAQALELQGLGVDVYDQDVLEQGVLQQVDNAIHEASRASQLVDVEKEYRSVLDDLTSCTTSLRQINKIIEQLSPQAATSRDINRKLDSVKRQKYNKEQQLKKITAKQKHLQAILGGAEVKIELDHASLEEDAEPGPSSLGSMLMPVQETAWEELIRTGQMTPFGTQIPQKQEKKPRKIMLNEASGFEKYLADQAKLSFERKKQGCNKRAARKAPAPVTPPAPVQNKNKPNKKARVLSKKEERLKKHIKKLQKRALQFQGKVGLPKARRPWESDMRPEAEGDSEGEESEYFPTEEEEEEEDDEVEGAEADLSGDGTDYELKPLPKGGKRQKKVPVQEIDDDFFPSSGEEAEAASVGEGGGGGRKVGRYRDDGDEDYYKQRLRRWNKLRLQDKEKRLKLEDDSEESDAEFDEGFKVPGFLFKKLFKYQQTGVRWLWELHCQQAGGILGDEMGLGKTIQIIAFLAGLSYSKIRTRGSNYRFEGLGPTVIVCPTTVMHQWVKEFHTWWPPFRVAILHETGSYTHKKEKLIRDVAHCHGILITSYSYIRLMQDDISRYDWHYVILDEGHKIRNPNAAVTLACKQFRTPHRIILSGSPMQNNLRELWSLFDFIFPGKLGTLPVFMEQFSVPITMGGYSNASPVQVKTAYKCACVLRDTINPYLLRRMKSDVKMSLSLPDKNEQVLFCRLTDEQHKVYQNFVDSKEVYRILNGEMQIFSGLIALRKICNHPDLFSGGPKNLKGLPDDELEEDQFGYWKRSGKMIVVESLLKIWHKQGQRVLLFSQSRQMLDILEVFLRAQKYTYLKMDGTTTIASRQPLITRYNEDTSIFVFLLTTRVGGLGVNLTGANRVVIYDPDWNPSTDTQARERAWRIGQKKQVTVYRLLTAGTIEEKIYHRQIFKQFLTNRVLKDPKQRRFFKSNDLYELFTLTSPDASQSTETSAIFAGTGSDVQTPKCHLKRRIQPAFGADHDVPKRKKFPASNISVNDATSSEEKSEAKGAEVNAVTSNRSDPLKDDPHMSSNVTSNDRLGEETNAVSGPEELSVISGNGECSNSSGTGKTSMPSGDESIDEKLGLSYKRERPSQAQTEAFWENKQMENNFYKHKSKTKHHSVAEEETLEKHLRPKQKPKNSKHCRDAKFEGTRIPHLVKKRRYQKQDSENKSEAKEQSNDDYVLEKLFKKSVGVHSVMKHDAIMDGASPDYVLVEAEANRVAQDALKALRLSRQRCLGAVSGVPTWTGHRGISGAPAGKKSRFGKKRNSNFSVQHPSSTSPTEKCQDGIMKKEGKDNVPEHFSGRAEDADSSSGPLASSSLLAKMRARNHLILPERLESESGHLQEASALLPTTEHDDLLVEMRNFIAFQAHTDGQASTREILQEFESKLSASQSCVFRELLRNLCTFHRTSGGEGIWKLKPEYC

SEQ ID NO: 29023 - protein, 179 aa, Homo sapiens
  Payload ID: 5656
  Gene Symbol: ERCC6
  Gene Name: excision repair cross-complementation group 6
  ENSP ID: ENSP00000422827
MPNEGIPHSSQTQEQDCLQSQPVSNNEEMAIKQESGGDGEVEEYLSFRSVGDGLSTSAVGCASAAPRRGPALLHIDRHQIQAVEPSAQALELQGLGVDVYDQDVLEQGVLQQVDNAIHEASRASQLVDVEKEYRSVLDDLTSCTTSLRQINKIIEQLSPQAATSRDINRKLDSVKRQKY

SEQ ID NO: 29024 - protein, 77 aa, Homo sapiens
  Payload ID: 5656
  Gene Symbol: ERCC6
  Gene Name: excision repair cross-complementation group 6
  ENSP ID: ENSP00000485163
  MOD_RES (1)..(1): Any amino acid
XDSKEVYRILNGEMQEVLQSFTSIHLHESPLNFFRSFQVRGSRSHYPGKGMQTTLGIVNFLVVTLKRKKRNRFSPDL

SEQ ID NO: 29025 - protein, 863 aa, Homo sapiens
  Payload ID: 5656
  Gene Symbol: ERCC6
  Gene Name: excision repair cross-complementation group 6
  ENSP ID: ENSP00000485321
MQDDISRYDWHYVILDEGHKIRNPNAAVTLACKQFRTPHRIILSGSPMQNNLRELWSLFDFIFPGKLGTLPVFMEQFSVPITMGGYSNASPVQVKTAYKCACVLRDTINPYLLRRMKSDVKMSLSLPDKNEQVLFCRLTDEQHKVYQNFVDSKEVYRILNGEMQIFSGLIALRKICNHPDLFSGGPKNLKGLPDDELEEDQFGYWKRSGKMIVVESLLKIWHKQGQRVLLFSQSRQMLDILEVFLRAQKYTYLKMDGTTTIASRQPLITRYNEDTSIFVFLLTTRVGGLGVNLTGANRVVIYDPDWNPSTDTQARERAWRIGQKKQVTVYRLLTAGTIEEKIYHRQIFKQFLTNRVLKDPKQRRFFKSNDLYELFTLTSPDASQSTETSAIFAGTGSDVQTPKCHLKRRIQPAFGADHDVPKRKKFPASNISVNDATSSEEKSEAKGAEVNAVTSNRSDPLKDDPHMSSNVTSNDRLGEETNAVSGPEELSVISGNGECSNSSGTGKTSMPSGDESIDEKLGLSYKRERPSQAQTEAFWENKQMENNFYKHKSKTKHHSVAEEETLEKHLRPKQKPKNSKHCRDAKFEGTRIPHLVKKRRYQKQDSENKSEAKEQSNDDYVLEKLFKKSVGVHSVMKHDAIMDGASPDYVLVEAEANRVAQDALKALRLSRQRCLGAVSGVPTWTGHRGISGAPAGKKSRFGKKRNSNFSVQHPSSTSPTEKCQDGIMKKEGKDNVPEHFSGRAEDADSSSGPLASSSLLAKMRARNHLILPERLESESGHLQEASALLPTTEHDDLLVEMRNFIAFQAHTDGQASTREILQEFESKLSASQSCVFRELLRNLCTFHRTSGGEGIWKLKPEYC

SEQ ID NO: 29026 - protein, 117 aa, Homo sapiens
  Payload ID: 5656
  Gene Symbol: ERCC6
  Gene Name: excision repair cross-complementation group 6
  ENSP ID: ENSP00000485423
MGLGKTIQIIAFLAGLSYSKIRTRGSNYRFEGLGPTVIVCPTTVMHQWVKEFHTWWPPFRVAILHETGSYTHKKEKLIRDVAHCHGILITSYSYIRLMQDDISRYDWHYVILDEGHK

SEQ ID NO: 29027 - protein, 76 aa, Homo sapiens
  Payload ID: 5656
  Gene Symbol: ERCC6
  Gene Name: excision repair cross-complementation group 6
  ENSP ID: ENSP00000485650
MGLGKTIQIIAFLAGLSYSKIRTRGSNYRFEGLGPTVIVCPTTVMHQWVKEFHTWWPPFRVAILHETGSYTHKKVQ

SEQ ID NO: 29028 - protein, 1250 aa, Homo sapiens
  Payload ID: 5657
  Gene Symbol: ERCC6L
  Gene Name: excision repair cross-complementation group 6-like
  Uniprot ID: Q2NKX8
  ENSP ID: ENSP00000334675
MEASRRFPEAEALSPEQAAHYLRYVKEAKEATKNGDLEEAFKLFNLAKDIFPNEKVLSRIQKIQEALEELAEQGDDEFTDVCNSGLLLYRELHNQLFEHQKEGIAFLYSLYRDGRKGGILADDMGLGKTVQIIAFLSGMFDASLVNHVLLIMPTNLINTWVKEFIKWTPGMRVKTFHGPSKDERTRNLNRIQQRNGVIITTYQMLINNWQQLSSFRGQEFVWDYVILDEAHKIKTSSTKSAICARAIPASNRLLLTGTPIQNNLQELWSLFDFACQGSLLGTLKTFKMEYENPITRAREKDATPGEKALGFKISENLMAIIKPYFLRRTKEDVQKKKSSNPEARLNEKNPDVDAICEMPSLSRKNDLIIWIRLVPLQEEIYRKFVSLDHIKELLMETRSPLAELGVLKKLCDHPRLLSARACCLLNLGTFSAQDGNEGEDSPDVDHIDQVTDDTLMEESGKMIFLMDLLKRLRDEGHQTLVFSQSRQILNIIERLLKNRHFKTLRIDGTVTHLLEREKRINLFQQNKDYSVFLLTTQVGGVGLTLTAATRVVIFDPSWNPATDAQAVDRVYRIGQKENVVVYRLITCGTVEEKIYRRQVFKDSLIRQTTGEKKNPFRYFSKQELRELFTIEDLQNSVTQLQLQSLHAAQRKSDIKLDEHIAYLQSLGIAGISDHDLMYTCDLSVKEELDVVEESHYIQQRVQKAQFLVEFESQNKEFLMEQQRTRNEGAWLREPVFPSSTKKKCPKLNKPQPQPSPLLSTHHTQEEDISSKMASVVIDDLPKEGEKQDLSSIKVNVTTLQDGKGTGSADSIATLPKGFGSVEELCTNSSLGMEKSFATKNEAVQKETLQEGPKQEALQEDPLESFNYVLSKSTKADIGPNLDQLKDDEILRHCNPWPIISITNESQNAESNVSIIEIADDLSASHSALQDAQASEAKLEEEPSASSPQYACDFNLFLEDSADNRQNFSSQSLEHVEKENSLCGSAPNSRAGFVHSKTCLSWEFSEKDDEPEEVVVKAKIRSKARRIVSDGEDEDDSFKDTSSINPFNTSLFQFSSVKQFDASTPKNDISPPGRFFSSQIPSSVNKSMNSRRSLASRRSLINMVLDHVEDMEERLDDSSEAKGPEDYPEEGVEESSGEASKYTEEDPSGETLSSENKSSWLMTSKPSALAQETSLGAPEPLSGEQLVGSPQDKAAEATNDYETLVKRGKELKECGKIQEALNCLVKALDIKSADPEVMLLTLSLYKQLNNN

SEQ ID NO: 29029 - protein, 1127 aa, Homo sapiens
  Payload ID: 5657
  Gene Symbol: ERCC6L
  Gene Name: excision repair cross-complementation group 6-like
  ENSP ID: ENSP00000362761
MGLGKTVQIIAFLSGMFDASLVNHVLLIMPTNLINTWVKEFIKWTPGMRVKTFHGPSKDERTRNLNRIQQRNGVIITTYQMLINNWQQLSSFRGQEFVWDYVILDEAHKIKTSSTKSAICARAIPASNRLLLTGTPIQNNLQELWSLFDFACQGSLLGTLKTFKMEYENPITRAREKDATPGEKALGFKISENLMAIIKPYFLRRTKEDVQKKKSSNPEARLNEKNPDVDAICEMPSLSRKNDLIIWIRLVPLQEEIYRKFVSLDHIKELLMETRSPLAELGVLKKLCDHPRLLSARACCLLNLGTFSAQDGNEGEDSPDVDHIDQVTDDTLMEESGKMIFLMDLLKRLRDEGHQTLVFSQSRQILNIIERLLKNRHFKTLRIDGTVTHLLEREKRINLFQQNKDYSVFLLTTQVGGVGLTLTAATRVVIFDPSWNPATDAQAVDRVYRIGQKENVVVYRLITCGTVEEKIYRRQVFKDSLIRQTTGEKKNPFRYFSKQELRELFTIEDLQNSVTQLQLQSLHAAQRKSDIKLDEHIAYLQSLGIAGISDHDLMYTCDLSVKEELDVVEESHYIQQRVQKAQFLVEFESQNKEFLMEQQRTRNEGAWLREPVFPSSTKKKCPKLNKPQPQPSPLLSTHHTQEEDISSKMASVVIDDLPKEGEKQDLSSIKVNVTTLQDGKGTGSADSIATLPKGFGSVEELCTNSSLGMEKSFATKNEAVQKETLQEGPKQEALQEDPLESFNYVLSKSTKADIGPNLDQLKDDEILRHCNPWPIISITNESQNAESNVSIIEIADDLSASHSALQDAQASEAKLEEEPSASSPQYACDFNLFLEDSADNRQNFSSQSLEHVEKENSLCGSAPNSRAGFVHSKTCLSWEFSEKDDEPEEVVVKAKIRSKARRIVSDGEDEDDSFKDTSSINPFNTSLFQFSSVKQFDASTPKNDISPPGRFFSSQIPSSVNKSMNSRRSLASRRSLINMVLDHVEDMEERLDDSSEAKGPEDYPEEGVEESSGEASKYTEEDPSGETLSSENKSSWLMTSKPSALAQETSLGAPEPLSGEQLVGSPQDKAAEATNDYETLVKRGKELKECGKIQEALNCLVKALDIKSADPEVMLLTLSLYKQLNNN

SEQ ID NO: 29030 - protein, 712 aa, Homo sapiens
  Payload ID: 5658
  Gene Symbol: ERCC6L2
  Gene Name: excision repair cross-complementation group 6-like 2
  Uniprot ID: Q5T890
  ENSP ID: ENSP00000288985
MQPGSAPPPGRMDPSAPQPRAETSGKDIWHPGERCLAPSPDNGKLCEASIKSITVDENGKSFAVVLYADFQERKIPLKQLQEVKFVKDCPRNLIFDDEDLEKPYFPNRKFPSSSVAFKLSDNGDSIPYTINRYLRDYQREGTRFLYGHYIHGGGCILGDDMGLGKTVQVISFLAAVLHKKGTREDIENNMPEFLLRSMKKEPLSSTAKKMFLIVAPLSVLYNWKDELDTWGYFRVTVLHGNRKDNELIRVKQRKCEIALTTYETLRLCLDELNSLEWSAVIVDEAHRIKNPKARVTEVMKALKCNVRIGLTGTILQNNMKELWCVMDWAVPGLLGSGTYFKKQFSDPVEHGQRHTATKRELATGRKAMQRLAKKMSGWFLRRTKTLIKDQLPKKEDRMVYCSLTDFQKAVYQTVLETEDVTLILQSSEPCTCRSGQKRRNCCYKTNSHGETVKTLYLSYLTVLQKVANHVALLQAASTSKQQETLIKRICDQVFSRFPDFVQKSKDAAFETLSDPKYSGKMKVLQQLLNHCRKNRDKVLLFSFSTKLLDVLQQYCMASGLDYRRLDGSTKSEERLKIVKEFNSTQDVNICLVSTMAGGLGLNFVGANVVVLFDPTWNPANDLQAIDRAYRIGQCRDVKVLRLISLGTVEEIMYLRQIYKQQLHCVVVGSENAKRYFEAVQGSKEHQGELFGIHNLFKFRSQGSCLTKDILEV

SEQ ID NO: 29031 - protein, 522 aa, Homo sapiens
  Payload ID: 5658
  Gene Symbol: ERCC6L2
  Gene Name: excision repair cross-complementation group 6-like 2
  ENSP ID: ENSP00000320939
  MOD_RES (1)..(1): Any amino acid
XNEDHNSQFIDDYSSSDESLSVSHFSFSKQSHRPRTIRDRTSFSSKLPSHNKKNSTFIPRKPMKCSNEKVVNQEQSYESMDKFLDGVQEVAYIHSNQNVIGSSKAENHMSRWAAHDVFELKQFSQLPANIAVCSSKTYKEKVDADTLPHTKKGQQPSEGSISLPLYISNPVNQKKKKVYHTNQTTFIIGETPKGIRRKQFEEMASYFNSSSVNEFAKHITNATSEERQKMLRDFYASQYPEVKEFFVDSVSQFNNSSFEKGEQRTRKKSDKRESLIKPRLSDSETLSFKDSTNKISQVCSLKTYKRKSVKFQNHISYREEVFFNDAETKKSPVSSTQEIDSGKNSQASEDTVTSRSLNSESETRERRLENTMKDQQDLTRTGISRKEPLLKLENKKIENPVLENTSVISLLGDTSILDDLFKSHGNSPTQLPKKVLSGPMEKAKQRPKDFWDILNEQNDESLSKLTDLAVIETLCEKAPLAAPFKRREEPATSLWKSNEKFLWKKFSPSDTDENATNTQSTT

SEQ ID NO: 29032 - protein, 182 aa, Homo sapiens
  Payload ID: 5658
  Gene Symbol: ERCC6L2
  Gene Name: excision repair cross-complementation group 6-like 2
  ENSP ID: ENSP00000384215
  MOD_RES (1)..(1): Any amino acid
XGIHNLFKFRSQGSCLTKDILEREGQVEAGIMTATTWLKEGPPAHKLEMPRQPDCQECRGTEQAAEPLAKEACDLCSDFSDEEPVGATGIKTAKNKAPDSSKASSSPGQLTLLQCGFSKLLETKCKAVEDSDGNTASDDESSDEQPTCLSTEAKDAGCEKNQDSLGTSKHQKLDNILNPKEK

SEQ ID NO: 29033 - protein, 82 aa, Homo sapiens
  Payload ID: 5658
  Gene Symbol: ERCC6L2
  Gene Name: excision repair cross-complementation group 6-like 2
  ENSP ID: ENSP00000395345
DPKYSGKMKVLQQLLNHCRKNRDKVLLFSFSTKLLDVLQQYCMASGLDYRRLDGSTKSEERLKIVKEFNSTQDVNICLVSTM

SEQ ID NO: 29034 - protein, 365 aa, Homo sapiens
  Payload ID: 5658
  Gene Symbol: ERCC6L2
  Gene Name: excision repair cross-complementation group 6-like 2
  ENSP ID: ENSP00000409751
MKELWCVMDWAVPGLLGSGTYFKKQFSDPVEHGQRHTATKRELATGRKAMQRLAKKMSGWFLRRTKTLIKDQLPKKEDRMVYCSLTDFQKAVYQTVLETEDVTLILQSSEPCTCRSGQKRRNCCYKTNSHGETVKTLYLSYLTVLQKVANHVALLQAASTSKQQETLIKRICDQVFSRFPDFVQKSKDAAFETLSDPKYSGKMKVLQQLLNHCRKNRDKVLLFSFSTKLLDVLQQYCMASGLDYRRLDGSTKSEERLKIVKEFNSTQDVNICLVSTMAGGLGLNFVGANVVVLFDPTWNPANDLQAIDRTQTHCRRERDAEPLSSAPGLQNGSENAVPYPWWCCVTGASISCWRCEICRIQDVLE

SEQ ID NO: 29035 - protein, 54 aa, Homo sapiens
  Payload ID: 5658
  Gene Symbol: ERCC6L2
  Gene Name: excision repair cross-complementation group 6-like 2
  ENSP ID: ENSP00000473877
  MOD_RES (1)..(1): Any amino acid
XTSKQQETLIKRICDQVFSRFPDFVQKSKDAAFETLSDPKYSGKMKVSSSKVYP

SEQ ID NO: 29036 - protein, 396 aa, Homo sapiens
  Payload ID: 5659
  Gene Symbol: ERCC8
  Gene Name: excision repair cross-complementation group 8
  Uniprot ID: Q13216
  ENSP ID: ENSP00000265038
MLGFLSARQTGLEDPLRLRRAESTRRVLGLELNKDRDVERIHGGGINTLDIEPVEGRYMLSGGSDGVIVLYDLENSSRQSYYTCKAVCSIGRDHPDVHRYSVETVQWYPHDTGMFTSSSFDKTLKVWDTNTLQTADVFNFEETVYSHHMSPVSTKHCLVAVGTRGPKVQLCDLKSGSCSHILQGHRQEILAVSWSPRYDYILATASADSRVKLWDVRRASGCLITLDQHNGKKSQAVESANTAHNGKVNGLCFTSDGLHLLTVGTDNRMRLWNSSNGENTLVNYGKVCNNSKKGLKFTVSCGCSSEFVFVPYGSTIAVYTVYSGEQITMLKGHYKTVDCCVFQSNFQELYSGSRDCNILAWVPSLYEPVPDDDETTTKSQLNPAFEDAWSSSDEEG

SEQ ID NO: 29037 - protein, 57 aa, Homo sapiens
  Payload ID: 5659
  Gene Symbol: ERCC8
  Gene Name: excision repair cross-complementation group 8
  ENSP ID: ENSP00000370510
MLGFLSARQTGLEDPLRLRRAESTRRVLGLELNKDRDVERIHGGGINTLDIEPVEGR

SEQ ID NO: 29038 - protein, 134 aa, Homo sapiens
  Payload ID: 5659
  Gene Symbol: ERCC8
  Gene Name: excision repair cross-complementation group 8
  ENSP ID: ENSP00000408344
MLSGGSDGVIVLYDLENSSRQSYYTCKAVCSIGRDHPDVHRYSVETVQWYPHDTGMFTSSSFDKTLKVWDTNTLQTADVFNFEETVYSHHMSPVSTKHCLVAVGTRGPKVQLCDLKSGSCSHILQGHRQEILAV

SEQ ID NO: 29039 - protein, 894 aa, Homo sapiens
  Payload ID: 5660
  Gene Symbol: EXOC1
  Gene Name: exocyst complex component 1
  Uniprot ID: Q9NV70
  ENSP ID: ENSP00000326514
MTAIKHALQRDIFTPNDERLLSIVNVCKAGKKKKNCFLCATVTTERPVQVKVVKVKKSDKGDFYKRQIAWALRDLAVVDAKDAIKENPEFDLHFEKIYKWVASSTAEKNAFISCIWKLNQRYLRKKIDFVNVSSQLLEESVPSGENQSVTGGDEEVVDEYQELNAREEQDIEIMMEGCEYAISNAEAFAEKLSRELQVLDGANIQSIMASEKQVNILMKLLDEALKEVDQIELKLSSYEEMLQSVKEQMDQISESNHLIHLSNTNNVKLLSEIEFLVNHMDLAKGHIKALQEGDLASSRGIEACTNAADALLQCMNVALRPGHDLLLAVKQQQQRFSDLRELFARRLASHLNNVFVQQGHDQSSTLAQHSVELTLPNHHPFHRDLLRYAKLMEWLKSTDYGKYEGLTKNYMDYLSRLYEREIKDFFEVAKIKMTGTTKESKKFATLPRKESAVKQETESLHGSSGKLTGSTSSLNKLSVQSSGNRRSQSSSLLDMGNMSASDLDVADRTKFDKIFEQVLSELEPLCLAEQDFISKFFKLQQHQSMPGTMAEAEDLDGGTLSRQHNCGTPLPVSSEKDMIRQMMIKIFRCIEPELNNLIALGDKIDSFNSLYMLVKMSHHVWTAQNVDPASFLSTTLGNVLVTVKRNFDKCISNQIRQMEEVKISKKSKVGILPFVAEFEEFAGLAESIFKNAERRGDLDKAYTKLIRGVFVNVEKVANESQKTPRDVVMMENFHHIFATLSRLKISCLEAEKKEAKQKYTDHLQSYVIYSLGQPLEKLNHFFEGVEARVAQGIREEEVSYQLAFNKQELRKVIKEYPGKEVKKGLDNLYKKVDKHLCEEENLLQVVWHSMQDEFIRQYKHFEGLIARCYPGSGVTMEFTIQDILDYCSSIAQSH

SEQ ID NO: 29040 - protein, 879 aa, Homo sapiens
  Payload ID: 5660
  Gene Symbol: EXOC1
  Gene Name: exocyst complex component 1
  Uniprot ID: Q9NV70
  ENSP ID: ENSP00000334431
MTAIKHALQRDIFTPNDERLLSIVNVCKAGKKKKNCFLCATVTTERPVQVKVVKVKKSDKGDFYKRQIAWALRDLAVVDAKDAIKENPEFDLHFEKIYKWVASSTAEKNAFISCIWKLNQRYLRKKIDFVNVSSQLLEESVPSGENQSVTGGDEEVVDEYQELNAREEQDIEIMMEGCEYAISNAEAFAEKLSRELQVLDGANIQSIMASEKQVNILMKLLDEALKEVDQIELKLSSYEEMLQSVKEQMDQISESNHLIHLSNTNNVKLLSEIEFLVNHMDLAKGHIKALQEGDLASSRGIEACTNAADALLQCMNVALRPGHDLLLAVKQQQQRFSDLRELFARRLASHLNNVFVQQGHDQSSTLAQHSVELTLPNHHPFHRDLLRYAKLMEWLKSTDYGKYEGLTKNYMDYLSRLYEREIKDFFEVAKIKMTGTTKESKKFGLHGSSGKLTGSTSSLNKLSVQSSGNRRSQSSSLLDMGNMSASDLDVADRTKFDKIFEQVLSELEPLCLAEQDFISKFFKLQQHQSMPGTMAEAEDLDGGTLSRQHNCGTPLPVSSEKDMIRQMMIKIFRCIEPELNNLIALGDKIDSFNSLYMLVKMSHHVWTAQNVDPASFLSTTLGNVLVTVKRNFDKCISNQIRQMEEVKISKKSKVGILPFVAEFEEFAGLAESIFKNAERRGDLDKAYTKLIRGVFVNVEKVANESQKTPRDVVMMENFHHIFATLSRLKISCLEAEKKEAKQKYTDHLQSYVIYSLGQPLEKLNHFFEGVEARVAQGIREEEVSYQLAFNKQELRKVIKEYPGKEVKKGLDNLYKKVDKHLCEEENLLQVVWHSMQDEFIRQYKHFEGLIARCYPGSGVTMEFTIQDILDYCSSIAQSH

SEQ ID NO: 29041 - protein, 894 aa, Homo sapiens; identical to SEQ ID NO: 29039
  Payload ID: 5660
  Gene Symbol: EXOC1
  Gene Name: exocyst complex component 1
  Uniprot ID: Q9NV70
  ENSP ID: ENSP00000370695

SEQ ID NO: 29042 - protein, 924 aa, Homo sapiens
  Payload ID: 5661
  Gene Symbol: EXOC2
  Gene Name: exocyst complex component 2
  Uniprot ID: Q96KP1
  ENSP ID: ENSP00000230449
MSRSRQPPLVTGISPNEGIPWTKVTIRGENLGTGPTDLIGLTICGHNCLLTAEWMSASKIVCRVGQAKNDKGDIIVTTKSGGRGTSTVSFKLLKPEKIGILDQSAVWVDEMNYYDMRTDRNKGIPPLSLRPANPLGIEIEKSKFSQKDLEMLFHGMSADFTSENFSAAWYLIENHSNTSFEQLKMAVTNLKRQANKKSEGSLAYVKGGLSTFFEAQDALSAIHQKLEADGTEKVEGSMTQKLENVLNRASNTADTLFQEVLGRKDKADSTRNALNVLQRFKFLFNLPLNIERNIQKGDYDVVINDYEKAKSLFGKTEVQVFKKYYAEVETRIEALRELLLDKLLETPSTLHDQKRYIRYLSDLHASGDPAWQCIGAQHKWILQLMHSCKEGYVKDLKGNPGLHSPMLDLDNDTRPSVLGHLSQTASLKRGSSFQSGRDDTWRYKTPHRVAFVEKLTKLVLSQLPNFWKLWISYVNGSLFSETAEKSGQIERSKNVRQRQNDFKKMIQEVMHSLVKLTRGALLPLSIRDGEAKQYGGWEVKCELSGQWLAHAIQTVRLTHESLTALEIPNDLLQTIQDLILDLRVRCVMATLQHTAEEIKRLAEKEDWIVDNEGLTSLPCQFEQCIVCSLQSLKGVLECKPGEASVFQQPKTQEEVCQLSINIMQVFIYCLEQLSTKPDADIDTTHLSVDVSSPDLFGSIHEDFSLTSEQRLLIVLSNCCYLERHTFLNIAEHFEKHNFQGIEKITQVSMASLKELDQRLFENYIELKADPIVGSLEPGIYAGYFDWKDCLPPTGVRNYLKEALVNIIAVHAEVFTISKELVPRVLSKVIEAVSEELSRLMQCVSSFSKNGALQARLEICALRDTVAVYLTPESKSSFKQALEALPQLSSGADKKLLEELLNKFKSSMHLQLTCFQAASSTMMKT

SEQ ID NO: 29043 - protein, 140 aa, Homo sapiens
  Payload ID: 5661
  Gene Symbol: EXOC2
  Gene Name: exocyst complex component 2
  ENSP ID: ENSP00000406400
MSRSRQPPLVTGISPNEGIPWTKVTIRGENLGTGPTDLIGLTICGHNCLLTAEWMSASKIVCRVGQAKNDKGDIIVTTKSGGRGTSTVSFKLLKPEKIGILDQSAVWVDEMNYYDMRTDRNKGIPPLSLRPANPLGIEIE

SEQ ID NO: 29044 - protein, 745 aa, Homo sapiens
  Payload ID: 5662
  Gene Symbol: EXOC3
  Gene Name: exocyst complex component 3
  Uniprot ID: O60645
  ENSP ID: ENSP00000323377
MKETDREAVATAVQRVAGMLQRPDQLDKVEQYRRREARKKASVEARLKAAIQSQLDGVRTGLSQLHNALNDVKDIQQSLADVSKDWRQSINTIESLKDVKDAVVQHSQLAAAVENLKNIFSVPEIVRETQDLIEQGALLQAHRKLMDLECSRDGLMYEQYRMDSGNTRDMTLIHGYFGSTQGLSDELAKQLWMVLQRSLVTVRRDPTLLVSVVRIIEREEKIDRRILDRKKQTGFVPPGRPKNWKEKMFTILERTVTTRIEGTQADTRESDKMWLVRHLEIIRKYVLDDLIVAKNLMVQCFPPHYEIFKNLLNMYHQALSTRMQDLASEDLEANEIVSLLTWVLNTYTSTEMMRNVELAPEVDVGTLEPLLSPHVVSELLDTYMSTLTSNIIAWLRKALETDKKDWVKETEPEADQDGYYQTTLPAIVFQMFEQNLQVAAQISEDLKTKVLVLCLQQMNSFLSRYKDEAQLYKEEHLRNRQHPHCYVQYMIAIINNCQTFKESIVSLKRKYLKNEVEEGVSPSQPSMDGILDAIAKEGCSGLLEEVFLDLEQHLNELMTKKWLLGSNAVDIICVTVEDYFNDFAKIKKPYKKRMTAEAHRRVVVEYLRAVMQKRISFRSPEERKEGAEKMVREAEQLRFLFRKLASGFGEDVDGYCDTIVAVAEVIKLTDPSLLYLEVSTLVSKYPDIRDDHIGALLAVRGDASRDMKQTIMETLEQGPAQASPSYVPLFKDIVVPSLNVAKLLK

SEQ ID NO: 29045 - protein, 68 aa, Homo sapiens
  Payload ID: 5662
  Gene Symbol: EXOC3
  Gene Name: exocyst complex component 3
  ENSP ID: ENSP00000422596
MKETDREAVATAVQRVAGMLQRPDQLDKVEQYRRREARKKASVEARLKAAIQSQLDGVRTGLSQLHNA

SEQ ID NO: 29046 - protein, 473 aa, Homo sapiens
  Payload ID: 5662
  Gene Symbol: EXOC3
  Gene Name: exocyst complex component 3
  ENSP ID: ENSP00000423435
  MOD_RES (1)..(1): Any amino acid
XLIEQGALLQAHRKLMDLECSRDGLMYEQYRMDSGNTRDMTLIHGYFGSTQGLSDELAKQLWMVLQRSLVTVRRDPTLLVSVVRIIEREEKIDRRILDRKKQTGFVPPGRPKNWKEKMFTILERTVTTRIEGTQADTRESDKMWLVRHLEIIRKYVLDDLIVAKNLMVQCFPPHYEIFKNLLNMYHQALSTRMQDLASEDLEANEIVSLLTWVLNTYTSTEMMRNVELAPEVDVGTLEPLLSPHVVSELLDTYMSTLTSNIIAWLRKALETDKKDWVKETEPEADQDGYYQTTLPAIVFQMFEQNLQVAAQISEDLKTKVLVLCLQQMNSFLSRYKDEAQLYKEEHLRNRQHPHCYVQYMIAIINNCQTFKESIVSLKRKYLKNEVEEGVSPSQPSMDGILDAIAKEGCSGLLEEVFLDLEQHLNELMTKKWLLGSNAVDIICVTVEDYFNDFAKIKKPYKKVRRWDLVPSSP

SEQ ID NO: 29047 - protein, 462 aa, Homo sapiens
  Payload ID: 5662
  Gene Symbol: EXOC3
  Gene Name: exocyst complex component 3
  ENSP ID: ENSP00000424404
MKETDREAVATAVQRVAGMLQRPDQLDKVEQYRRREARKKASVEARLKAAIQSQLDGVRTGLSQLHNALNDVKDIQQSLADVSKDWRQSINTIESLKDVKDAVVQHSQLAAAVENLKNIFSVPEIVRETQDLIEQGALLQAHRKLMDLECSRDGLMYEQYRMDSGNTRDMTLIHGYFGSTQGLSDELAKQLWMVLQRSLVTVRRDPTLLVSVVRIIEREEKIDRRILDRKKQTGFVPPGRPKNWKEKMFTILERTVTTRIEGTQADTRESDKMWLVRHLEIIRKYVLDDLIVAKNLMVQCFPPHYEIFKNLLNMYHQALSTRMQDLASEDLEANEIVSLLTWVLNTYTRYKDEAQLYKEEHLRNRQHPHCYVQYMIAIINNCQTFKESIVSLKRKYLKNEVEEGVSPSQPSMDGILDAIAKEGCSGLLEEVFLDLEVGLALSSCRFLGRSPVLPHCPLGHRL

SEQ ID NO: 29048 - protein, 745 aa, Homo sapiens; identical to SEQ ID NO: 29044
  Payload ID: 5662
  Gene Symbol: EXOC3
  Gene Name: exocyst complex component 3
  Uniprot ID: O60645
  ENSP ID: ENSP00000425587

SEQ ID NO: 29049 - protein, 746 aa, Homo sapiens
  Payload ID: 5663
  Gene Symbol: EXOC3L1
  Gene Name: exocyst complex component 3-like 1
  Uniprot ID: Q86VI1
  ENSP ID: ENSP00000325674
MDSAAKDEMQPALSPGPEWPEQERAEQLARGAALKWASGIFYRPEQLARLGQYRSREVQRTCSLESRLKSVMQSYLEGVQTGVWQLAQAIEVVQGTREALSQARGLLQGMSQALQTLEPLRERVAQHKQLQALSHLLPRLRAVPAAVSHTQTLIDGQQFLEAYVSLRELEQLREDTWAPLGGLELPVFQGLDLLFEALGQAVEAAAGAAGKLAREDPALLVAAVRVAEVETGRTTPLGQVPRDWRQRCLRALQEGLEQAHFGSPLLPAPGALPGWLEALRVALPVELATAEALVAPCCPPQYNVVQLWAHTLHSGLRRSLQNLLAGPELEAADAFALLHWALHVYLGQEMMGSLELGPEADVSQLEPLLTLENIEQLEATFVANIQASVSQWLQNALDGEVAEWGREHGPNTDPSGSYYSPMPAIVLQILEENIRVASLVSESLQQRVHGMALSELGTFLRSFSDALIRFSRDHFRGKSMAPHYVPYLLAALNHKSALSSSVSVLQLDGAPSGALAPVEAALDELQRRIYRLVLEALQAELQPLFADLPSRQWLSSPELLQSVCERTGRFCRDFWRVRNPTVQLLLAEAERAVVLQYLSALMQGRLVCRGADERTQAAERLRHDAAQLQQLFLSLGLEENAHCAPVLLALRELLNLRDPALLGLEVAGLRQQFPDVSEDHVSALLGLRGDLSREQHLAALSSLQAALPPSPRASRRVLFSLVPAPALAPASCLPSGSCARALLLAE

SEQ ID NO: 29050 - protein, 679 aa, Homo sapiens
  Payload ID: 5663
  Gene Symbol: EXOC3L1
  Gene Name: exocyst complex component 3-like 1
  ENSP ID: ENSP00000439910
MDSAAKDEMQPALSPGPEWPEQERAEQLARGAALKWASGIFYRPEQLARLGQYRSREVQRTCSLESRLKSVMQSYLEGVQTVPAAVSHTQTLIDGQQFLEAYVSLRELEQLREDTWAPLGGLELPVFQGLDLLFEALGQAVEAAAGAAGKLAREDPALLVAAVRVAEVETGRTTPLGQVPRDWRQRCLRALQEGLEQAHFGSPLLPAPGALPGWLEALRVALPVELATAEALVAPCCPPQYNVVQLWAHTLHSGLRRSLQNLLAGPELEAADAFALLHWALHVYLGQEMMGSLELGPEADVSQLEPLLTLENIEQLEATFVANIQILEENIRVASLVSESLQQRVHGMALSELGTFLRSFSDALIRFSRDHFRGKSMAPHYVPYLLAALNHKSALSSSVSVLQLDGAPSGALAPVEAALDELQRRIYRLVLEALQAELQPLFADLPSRQWLSSPELLQSVCERTGRFCRDFWRVRNPTVQLLLAEAERAVVLQYLSALMQGRLVCRGADERTQAAERLRHDAAQLQQLFLSLVRASWAGRRARVSVAGWERGLARDPTPTCSGPGGERALRAGAARPEGAAKPPRPRAAGPGGGWPAATISRRERGPRLRPLGPARGLVPGAAPGRAQLPAGCAAAVAPREPPRPLQPSARARARAGLLPALGVLRPSPAARRINHGCR

SEQ ID NO: 29051 - protein, 684 aa, Homo sapiens
  Payload ID: 5663
  Gene Symbol: EXOC3L1
  Gene Name: exocyst complex component 3-like 1
  ENSP ID: ENSP00000455223
MDSAAKDEMQPALSPGSSFPGPEWPEQERAEQLARGAALKWASGIFYRPEQLARLGQYRSREVQRTCSLESRLKSVMQSYLEGVQTVPAAVSHTQTLIDGQQFLEAYVSLRELEQLREDTWAPLGGLELPVFQGLDLLFEALGQAVEAAAGAAGKLAREDPALLVAAVRVAEVETGRTTPLGQVPRDWRQRCLRALQEGLEQAHFGSPLLPAPGALPGWLEALRVALPVELATAEALVAPCCPPQYNVVQLWAHTLHSGLRRSLQNLLAGPELEAADAFALLHWALHVYLGQEMMGSLELGPEADVSQLEPLLTLENIEQLEATFVANIQILEENIRVASLVSESLQQRVHGMALSELGTFLRSFSDALIRFSRDHFRGKSMAPHYVPYLLAALNHKSALSSSVSVLQLDGAPSGALAPVEAALDELQRRIYRLVLEALQAELQPLFADLPSRQWLSSPELLQSVCERTGRFCRDFWRVRNPTVQLLLAEAERAVVLQYLSALMQGRLVCRGADERTQAAERLRHDAAQLQQLFLSLVRASWAGRRARVSVAGWERGLARDPTPTCSGPGGERALRAGAARPEGAAKPPRPRAAGPGGGWPAATISRRERGPRLRPLGPARGLVPGAAPGRAQLPAGCAAAVAPREPPRPLQPSARARARAGLLPALGVLRPSPAARRINHGCR

SEQ ID NO: 29052 - protein, 80 aa, Homo sapiens
  Payload ID: 5663
  Gene Symbol: EXOC3L1
  Gene Name: exocyst complex component 3-like 1
  ENSP ID: ENSP00000456435
MDSAAKDEMQPALSPGPEWPEQERAEQLARGAALKWASGIFYRPEQLARLGQYRSREVQRTCSLESRLKAGNDGEPGVGA

SEQ ID NO: 29053 - protein, 181 aa, Homo sapiens
  Payload ID: 5663
  Gene Symbol: EXOC3L1
  Gene Name: exocyst complex component 3-like 1
  ENSP ID: ENSP00000457182
MDSAAKDEMQPALSPGPEWPEQERAEQLARGAALKWASGIFYRPEQLARLGQYRSREVQRTCSLESRLKSVMQSYLEGVQTGVWQLAQAIEVVQGTREALSQARGLLQGMSQALQTLEPLRERVAQHKQLQALSHLLPRLRAVPAAVSHTQTLIDGQQFLEAYVSLRELEQLREDTWAPLG

SEQ ID NO: 29054 - protein, 409 aa, Homo sapiens
  Payload ID: 5664
  Gene Symbol: EXOC3L2
  Gene Name: exocyst complex component 3-like 2
  Uniprot ID: Q2M3D2
  ENSP ID: ENSP00000252482
MAALENGELGPLLSPGTLRGLEDECVTDVKAQTRAALLRVLQEDEEHWGSLEDQPSSLAQDVCELLEEHTERAPRISQEFGERMAHCCLGGLAEFLQSFQQRVERFHENPAVREMLPDTYISKTIALVNCGPPLRALAERLARVGPPESEPAREASASALDHVTRLCHRVVANLLFQELQPHFNKLMRRKWLSSPEALDGIVGTLGAQALALRRMQDEPYQALVAELHRRALVEYVRPLLRGRLRCSSARTRSRVAGRLREDAAQLQRLFRRLESQASWLDAVVPHLAEVMQLEDTPSIQVEVGVLVRDYPDIRQKHVAALLDIRGLRNTAARQEILAVARDLELSEEGALSPPRDRAFFADIPVPRPSFCLSLPLFLGRLPLSRLARPSLACLPRPRPPSLARPRAQR

SEQ ID NO: 29055 - protein, 409 aa, Homo sapiens; identical to SEQ ID NO: 29054
  Payload ID: 5664
  Gene Symbol: EXOC3L2
  Gene Name: exocyst complex component 3-like 2
  Uniprot ID: Q2M3D2
  ENSP ID: ENSP00000400713

SEQ ID NO: 29056 - protein, 722 aa, Homo sapiens
  Payload ID: 5665
  Gene Symbol: EXOC3L4
  Gene Name: exocyst complex component 3-like 4
  Uniprot ID: Q17RC7
  ENSP ID: ENSP00000369409
MPSPQTDTPGPELQSPKEAEEPQTPAQGSRRTSSRKEPNAHRKDGTRLGLGSLRQAFSRASQRALTQVSKEDTGLFRRSSCSLFRSFRQALNDGPATGHSQATPEVPSGVMNGVSQQASTGAASEELKPEAEGKSVADLITERQLLAAFEQLLRLETLLVAEKASRTFEQDPTAFARRAMDVCLLYDGLAAEIGAIVRETLDSDGVDAAALAELARVVSAEEEAHPSPPDDGDFLRTPRRWRQHWEEAVRRSAQERVRRPGAGWAFGEAEGASGLAQLLAELGGLVRRDLQKVRQEVQPAYAAAGFPAWEVYLRAFHSAVAQRLQELARDARGCEQLYILLDWAANVYGSPDFLGAPGLALPAEPLPPLLAPDVWARLESDYTSFLEAKIASCFDSILQLEQSHWAAAEVPEVLQGLYQAPLSMDVHMLVAEHVKAAGAISAELEATTLRICTRALGLFVPRFEKAFLASEAVSEPHLGAYINACEELRTSLLSRFPGTQEELEKPLVTATCSFQKHLLQGLQRELQPLFRVVCTRDWLTQDWLHPLMDKVVTFAGHLQRVARPRAQETLQEVHRFVVREYLARALRPRERFRGMERMHGSQKMSLDAQAISDTFQGLGSEATWLDQAIQCVAEILGETYKDDIQRHLETLIRSYPDIRRDHILAILALRRLGRQRNQHLLQHTQDLLRAAAGAAGAEAPRGRVLFEEIKVPSAMAVLITCV

SEQ ID NO: 29057 - protein, 212 aa, Homo sapiens
  Payload ID: 5665
  Gene Symbol: EXOC3L4
  Gene Name: exocyst complex component 3-like 4
  ENSP ID: ENSP00000454036
  MOD_RES (1)..(1): Any amino acid
XQRVARPRAQETLQEVHRFVVREYLARALRPRERFRGMERMHGSQKMSLDAQAISDTFQGLGSEATWLDQAIQCVAEILGETYKDDIQRHLETLIRSYPDIRRDHILAILALRRLGRQRNQHLLQHTQDLLRAAAGAAGAEAPRGRVLFEEIKPSAAVRPEGAAVQEAFQASLRGVFWGRRALNAAYRAGGGLPPDCPASPSSLKVKSRVFI

SEQ ID NO: 29058 - protein, 153 aa, Homo sapiens
  Payload ID: 5665
  Gene Symbol: EXOC3L4
  Gene Name: exocyst complex component 3-like 4
  ENSP ID: ENSP00000454163
EPNAHRKDGTRLGLGSLRQAFSRASQRALTQVSKEDTGLFRRSSCSLFRSFRQALNDGPATGHSQATPEVPSGVMNGVSQQASTGAASEELKPEAVLTSWAPRGWRCPPSRCLRSWRRTCGPDWRATTPASWRPRSQAASTASCSWSRVTGRP

SEQ ID NO: 29059 - protein, 15 aa, Homo sapiens
  Payload ID: 5665
  Gene Symbol: EXOC3L4
  Gene Name: exocyst complex component 3-like 4
  ENSP ID: ENSP00000454174
  MOD_RES (1)..(1): Any amino acid
XGLYQAPLSMDVHMV

SEQ ID NO: 29060 - protein, 974 aa, Homo sapiens [sequence omitted]

SEQ ID NO: 29061 - protein, 473 aa, Homo sapiens
  Payload ID: 5666
  Gene Symbol: EXOC4
  Gene Name: exocyst complex component 4
  Uniprot ID: Q96A65
  ENSP ID: ENSP00000376868
MAAEAAGGKYRSTVSKSKDPSGLLISVIRTLSTSDDVEDRENEKGRLEEAYEKCDRDLDELIVQHYTELTTAIRTYQSITERITNSRNKIKQVKENLLSCKMLLHCKRDELRKLWIEGIEHKHVLNLLDEIENIKQVPQKLEQCMASKHYLSATDMLVSAVESLEGPLLQVEGLSDLRLELHSKKMNLHLVLIDELHRHLYIKSTSRVVQRNKEKGKISSLVKDASVPLIDVTNLPTPRKFLDTSHYSTAGSSSVREINLQDIKEDLELDPEENSTLFMGILIKGLAKLKKIPETVKAIIERLEQELKQIVKRSTTQVADSGYQRGENVTVENQPRLLLELLELLFDKFNAVAAAHSVVLGYLQDTVVTPLTQQEDIKLYDMADVWVKIQDVLQMLLTEYLDMKNTRTASEPSAQLSYASTGREFAAFFAKKKPQRPKNSLFKFESSSHAISMSAYLREQRRELYSRSGELQG

SEQ ID NO: 29062 - protein, 643 aa, Homo sapiens
  Payload ID: 5667
  Gene Symbol: EXOC5
  Gene Name: exocyst complex component 5
  ENSP ID: ENSP00000342100
MATTAELFEEPFVADEYIERLVWRTPGGGSRGGPEAFDPKRLLEEFVNHIQELQIMDERIQRKVEKLEQQCQKEAKEFAKKVQELQKSNQIKEAADIIQKLHLIAQELPFDRFSEVKSKIASKYHDLECQLIQEFTSAQRRGEISRMREVAAVLLHFKGYSHCVDVYIKQCQEGAYLRNDIFEDAGILCQRVNKQVGDIFSNPETVLAKLIQNVFEIKLQSFVKEQLEECRKSDAEQYLKNLYDLYTRTTNLSSKLMEFNLGTDKQTFLSKLIKSIFISYLENYIEVETGYLKSRSAMILQRYYDSKNHQKRSIGTGGIQDLKERIRQRTNLPLGPSIDTHGETFLSQEVVVNLLQETKQAFERCHRLSDPSDLPRNAFRIFTILVEFLCIEHIDYALETGLAGIPSSDSRNANLYFLDVVQQANTIFHLFDKQFNDHLMPLISSSPKLSECLQKKKEIIEQMEMKLDTGIDRTLNCMIGQMKHILAAEQKKTDFKPEDENNVLIQYTNACVKVCAYVRKQVEKIKNSMDGKNVDTVLMELGVRFHRLIYEHLQQYSYSCMGGMLAICDVAEYRKCAKDFKIPMVLHLFDTLHALCNLLVVAPDNLKQVCSGEQLANLDKNILHSFVQLRADYRSARLARHFS

SEQ ID NO: 29063 - protein, 711 aa, Homo sapiens [sequence omitted]

SEQ ID NO: 29064 - protein, 44 aa, Homo sapiens
  Payload ID: 5667
  Gene Symbol: EXOC5
  Gene Name: exocyst complex component 5
  ENSP ID: ENSP00000451082
MATTAELFEEPFVADEYIERLVWRTPGGGSRGGPEAFDPKRNSR

SEQ ID NO: 29065 - protein, 62 aa, Homo sapiens
  Payload ID: 5667
  Gene Symbol: EXOC5
  Gene Name: exocyst complex component 5
  ENSP ID: ENSP00000452084
MDERIQRKVEKLEQQCQKEAKEFAKKVQELQKSNQVAFQHFQELDEHISYVATKVCHLGDQL

SEQ ID NO: 29066 - protein, 708 aa, Homo sapiens
  Payload ID: 5667
  Gene Symbol: EXOC5
  Gene Name: exocyst complex component 5
  Uniprot ID: O00471
  ENSP ID: ENSP00000484855
MATTAELFEEPFVADEYIERLVWRTPGGGSRGGPEAFDPKRLLEEFVNHIQELQIMDERIQRKVEKLEQQCQKEAKEFAKKVQELQKSNQVAFQHFQELDEHISYVATKVCHLGDQLEGVNTPRQRAVEAQKLMKYFNEFLDGELKSDVFTNSEKIKEAADIIQKLHLIAQELPFDRFSEVKSKIASKYHDLECQLIQEFTSAQRRGEISRMREVAAVLLHFKGYSHCVDVYIKQCQEGAYLRNDIFEDAGILCQRVNKQVGDIFSNPETVLAKLIQNVFEIKLQSFVKEQLEECRKSDAEQYLKNLYDLYTRTTNLSSKLMEFNLGTDKQTFLSKLIKSIFISYLENYIEVETGYLKSRSAMILQRYYDSKNHQKRSIGTGGIQDLKERIRQRTNLPLGPSIDTHGETFLSQEVVVNLLQETKQAFERCHRLSDPSDLPRNAFRIFTILVEFLCIEHIDYALETGLAGIPSSDSRNANLYFLDVVQQANTIFHLFDKQFNDHLMPLISSSPKLSECLQKKKEIIEQMEMKLDTGIDRTLNCMIGQMKHILAAEQKKTDFKPEDENNVLIQYTNACVKVCAYVRKQVEKIKNSMDGKNVDTVLMELGVRFHRLIYEHLQQYSYSCMGGMLAICDVAEYRKCAKDFKIPMVLHLFDTLHALCNLLVVAPDNLKQVCSGEQLANLDKNILHSFVQLRADYRSARLARHFS

SEQ ID NO: 29067 - protein, 804 aa, Homo sapiens
  Payload ID: 5668
  Gene Symbol: EXOC6
  Gene Name: exocyst complex component 6
  Uniprot ID: Q8TAG9
  ENSP ID: ENSP00000260762
MAENSESLGTVPEHERILQEIESTDTACVGPTLRSVYDDQPNAHKKFMEKLDACIRNHDKEIEKMCNFHHQGFVDAITELLKVRTDAEKLKVQVTDTNRRFQDAGKEVIVHTEDIIRCRIQQRNITTVVEKLQLCLPVLEMYSKLKEQMSAKRYYSALKTMEQLENVYFPWVSQYRFCQLMIENLPKLREDIKEISMSDLKDFLESIRKHSDKIGETAMKQAQHQKTFSVSLQKQNKMKFGKNMYINRDRIPEERNETVLKHSLEEEDENEEEILTVQDLVDFSPVYRCLHIYSVLGDEETFENYYRKQRKKQARLVLQPQSNMHETVDGYRRYFTQIVGFFVVEDHILHVTQGLVTRAYTDELWNMALSKIIAVLRAHSSYCTDPDLVLELKNLTVIFADTLQGYGFPVNRLFDLLFEIRDQYNETLLKKWAGVFRDIFEEDNYSPIPVVNEEEYKIVISKFPFQDPDLEKQSFPKKFPMSQSVPHIYIQVKEFIYASLKFSESLHRSSTEIDDMLRKSTNLLLTRTLSSCLLNLIRKPHIGLTELVQIIINTTHLEQACKYLEDFITNITNISQETVHTTRLYGLSTFKDARHAAEGEIYTKLNQKIDEFVQLADYDWTMSEPDGRASGYLMDLINFLRSIFQVFTHLPGKVAQTACMSACQHLSTSLMQMLLDSELKQISMGAVQQFNLDVIQCELFASSEPVPGFQGDTLQLAFIDLRQLLDLFMVWDWSTYLADYGQPASKYLRVNPNTALTLLEKMKDTSKKNNIFAQFRKNDRDKQKLIETVVKQLRSLVNGMSQHM

SEQ ID NO: 29068 - protein, 153 aa, Homo sapiens
  Payload ID: 5668
  Gene Symbol: EXOC6
  Gene Name: exocyst complex component 6
  ENSP ID: ENSP00000360598
MAENSESLGTVPEHERILQEIESTDTACVGPTLRSVYDDQPNAHKKFMEKLDACIRNHDKEIEKMCNFHHQGFVDAITELLKVRTDAEKLKVQVTDTNRRFQDAGKEVIVHTEDIIRCRIQQRNITTVVEKLQLCLPVLEMYSKLKEQMSAKR

SEQ ID NO: 29069 - protein, 799 aa, Homo sapiens
  Payload ID: 5668
  Gene Symbol: EXOC6
  Gene Name: exocyst complex component 6
  Uniprot ID: Q8TAG9
  ENSP ID: ENSP00000360607
MLEEETDQTYENVLAEIQSFELPVEATLRSVYDDQPNAHKKFMEKLDACIRNHDKEIEKMCNFHHQGFVDAITELLKVRTDAEKLKVQVTDTNRRFQDAGKEVIVHTEDIIRCRIQQRNITTVVEKLQLCLPVLEMYSKLKEQMSAKRYYSALKTMEQLENVYFPWVSQYRFCQLMIENLPKLREDIKEISMSDLKDFLESIRKHSDKIGETAMKQAQHQKTFSVSLQKQNKMKFGKNMYINRDRIPEERNETVLKHSLEEEDENEEEILTVQDLVDFSPVYRCLHIYSVLGDEETFENYYRKQRKKQARLVLQPQSNMHETVDGYRRYFTQIVGFFVVEDHILHVTQGLVTRAYTDELWNMALSKIIAVLRAHSSYCTDPDLVLELKNLTVIFADTLQGYGFPVNRLFDLLFEIRDQYNETLLKKWAGVFRDIFEEDNYSPIPVVNEEEYKIVISKFPFQDPDLEKQSFPKKFPMSQSVPHIYIQVKEFIYASLKFSESLHRSSTEIDDMLRKSTNLLLTRTLSSCLLNLIRKPHIGLTELVQIIINTTHLEQACKYLEDFITNITNISQETVHTTRLYGLSTFKDARHAAEGEIYTKLNQKIDEFVQLADYDWTMSEPDGRASGYLMDLINFLRSIFQVFTHLPGKVAQTACMSACQHLSTSLMQMLLDSELKQISMGAVQQFNLDVIQCELFASSEPVPGFQGDTLQLAFIDLRQLLDLFMVWDWSTYLADYGQPASKYLRVNPNTALTLLEKMKDTSKKNNIFAQFRKNDRDKQKLIETVVKQLRSLVNGMSQHM

SEQ ID NO: 29070 - protein, 701 aa, Homo sapiens
  Payload ID: 5668
  Gene Symbol: EXOC6
  Gene Name: exocyst complex component 6
  ENSP ID: ENSP00000396206
MAENSESLGTVPEHERILQEIESTDTACVGPTLRSVYDDQPNAHKKFMEKLDACIRNHDKEIEKMCNFHHQGFVDAITELLKVRTDAEKLKVQVTDTNRRFQDAGKEVIVHTEDIIRCRIQQRNITTVVEKLQLCLPVLEMYSKLKEQMSAKRYYSALKTMEQLENVYFPWVSQYRFCQLMIENLPKLREDIKEISMSDLKDFLESIRKHSDKIGETAMKQAQHQKTFSVSLQKQNKMKFGKNMYINRDRIPEERNETVLKHSLEEEDENEEEGDEETFENYYRKQRKKQARLVLQPQSNMGYGFPVNRLFDLLFEIRDQYNETLLKKWAGVFRDIFEEDNYSPIPVVNEEEYKIVISKFPFQDPDLEKQSFPKKFPMSQSVPHIYIQVKEFIYASLKFSESLHRSSTEIDDMLRKSTNLLLTRTLSSCLLNLIRKPHIGLTELVQIIINTTHLEQACKYLEDFITNITNISQETVHTTRLYGLSTFKDARHAAEGEIYTKLNQKIDEFVQLADYDWTMSEPDGRASGYLMDLINFLRSIFQVFTHLPGKVAQTACMSACQHLSTSLMQMLLDSELKQISMGAVQQFNLDVIQCELFASSEPVPGFQGDTLQLAFIDLRQLLDLFMVWDWSTYLADYGQPASKYLRVNPNTALTLLEKMKDTSKKNNIFAQFRKNDRDKQKLIETVVKQLRSLVNGMSQHM

SEQ ID NO: 29071 - protein, 72 aa, Homo sapiens
  Payload ID: 5668
  Gene Symbol: EXOC6
  Gene Name: exocyst complex component 6
  ENSP ID: ENSP00000398982
GKVAQTACMSACQHLSTSLMQMLLDSELKQISMGAVQQFNLDVIQCELFASSEPVPGFQGDTLQLAFIDLRQ

SEQ ID NO: 29072 - protein, 404 aa, Homo sapiens
  Payload ID: 5668
  Gene Symbol: EXOC6
  Gene Name: exocyst complex component 6
  ENSP ID: ENSP00000435649
MHETVDGYRRYFTQIVGFFVVEDHILHVTQGLVTRAYTDELWNMALSKIIAVLRAHSSYCTDPDLVLELKNLTVIFADTLQGYGFPVNRLFDLLFEIRDQYNETLLKKWAGVFRDIFEEDNYSPIPVVNEEEYKIVISKFPFQDPDLEKQSFPKKFPMSQSVPHIYIQVKEFIYASLKFSESLHRSSTEIDDMLRKSTNLLLTRTLSSCLLNLIRKPHIGLTELVQIIINTTHLEQACKYLEDFITNITNISQETVHTTRLYGLSTFKDARHAAEGEIYTKLNQKIDEFVQLADYDWTMSEPDGRASGYLMDLINFLRSIFQVFTHLPGKVAQTACMSACQHLSTSLMQMLLDSELKQISMGAVQQFNLDVIQCEYEVLLCCPDWSQTPGLKSSSCLGIPKCWN

SEQ ID NO: 29073 - protein, 811 aa, Homo sapiens
  Payload ID: 5669
  Gene Symbol: EXOC6B
  Gene Name: exocyst complex component 6B
  Uniprot ID: Q9Y2D4
  ENSP ID: ENSP00000272427
MERGKMAEAESLETAAEHERILREIESTDTACIGPTLRSVYDGEEHGRFMEKLETRIRNHDREIEKMCNFHYQGFVDSITELLKVRGEAQKLKNQVTDTNRKLQHEGKELVIAMEELKQCRLQQRNISATVDKLMLCLPVLEMYSKLRDQMKTKRHYPALKTLEHLEHTYLPQVSHYRFCKVMVDNIPKLREEIKDVSMSDLKDFLESIRKHSDKIGETAMKQAQQQRNLDNIVLQQPRIGSKRKSKKDAYIIFDTEIESTSPKSEQDSGILDVEDEEDDEEVPGAQDLVDFSPVYRCLHIYSVLGARETFENYYRKQRRKQARLVLQPPSNMHETLDGYRKYFNQIVGFFVVEDHILHTTQGLVNRAYIDELWEMALSKTIAALRTHSSYCSDPNLVLDLKNLIVLFADTLQVYGFPVNQLFDMLLEIRDQYSETLLKKWAGIFRNILDSDNYSPIPVTSEEMYKKVVGQFPFQDIELEKQPFPKKFPFSEFVPKVYNQIKEFIYACLKFSEDLHLSSTEVDDMIRKSTNLLLTRTLSNSLQNVIKRKNIGLTELVQIIINTTHLEKSCKYLEEFITNITNVLPETVHTTKLYGTTTFKDARHAAEEEIYTNLNQKIDQFLQLADYDWMTGDLGNKASDYLVDLIAFLRSTFAVFTHLPGKVAQTACMSACKHLATSLMQLLLEAEVRQLTLGALQQFNLDVRECEQFARSGPVPGFQEDTLQLAFIDLRQLLDLFIQWDWSTYLADYGQPNCKYLRVNPVTALTLLEKMKDTSRKNNMFAQFRKNERDKQKLIDTVAKQLRGLISSHHS

SEQ ID NO: 29074 - protein, 40 aa, Homo sapiens
  Payload ID: 5669
  Gene Symbol: EXOC6B
  Gene Name: exocyst complex component 6B
  ENSP ID: ENSP00000386634
MERGKMAEAESLETAAEHERILREIESTDTACIGPTLRIK

SEQ ID NO: 29075 - protein, 681 aa, Homo sapiens
  Payload ID: 5669
  Gene Symbol: EXOC6B
  Gene Name: exocyst complex component 6B
  ENSP ID: ENSP00000386698
MERGKMAEAESLETAAEHERILREIESTDTACIGPTLRSVYDGEEHGRFMEKLETRIRNHDREIEKMCNFHYQGFVDSITELLKVRGEAQKLKNQVTDTNRKLQHEGKELVIAMEELKQCRLQQRNISATVDKLMLCLPVLEMYSKLRDQMKTKRHYPALKTLEHLEHTYLPQVSHYRFCKVMVDNIPKLREEIKDVSMSDLKDFLESIRKHSDKIGETAMKQAQQQRNLDNIVLQQPRIGSKRKSKKDAYIIFDTEIESTSPKSEQDSGILDVEDEEDDEEVPGAQDLVDFSPVYRCLHIYSVLGARETFENYYRKQRRKQARLVLQPPSNMHETLDGYRKYFNQIVGFFVVEDHILHTTQGLVNRAYIDELWEMALSKTIAALRTHSSYCSDPNLVLDLKNLIVLFADTLQVYGFPVNQLFDMLLEIRDQYSETLLKKWAGIFRNILDSDNYSPIPVTSEEMYKKVVGQFPFQDIELEKQPFPKKFPFSEFVPKVYNQIKEFIYACLKFSEDLHLSSTEVDDMIRKSTNLLLTRTLSNSLQNVIKRKNIGLTELVQIIINTTHLEKSCKYLEEFITNITNVLPETVHTTKLYGTTTFKDARHAAEEEIYTNLNQKIDQFLQLADYDWMTGDLGNKASDYLVDLIAFLRSTFAVFTHLPVSGSCLLCPLYIKRFPYNLVW

SEQ ID NO: 29076 - protein, 815 aa, Homo sapiens
  Payload ID: 5669
  Gene Symbol: EXOC6B
  Gene Name: exocyst complex component 6B
  ENSP ID: ENSP00000489442
MERGKMAEAESLETAAEHERILREIESTDTACIGPTLRSVYDGEEHGRFMEKLETRIRNHDREIEKMCNFHYQGFVDSITELLKVRGEAQKLKNQVTDTNRKLQHEGKELVIAMEELKQCRLQQRNISATVDKLMLCLPVLEMYSKLRDQMKTKRHYPALKTLEHLEHTYLPQVSHYRFCKVMVDNIPKLREEIKDVSMSDLKDFLESIRKHSDKIGETAMKQAQQQRNLDNIVLQQPRIGSKRKSKKDAYIIFDTEIESTSPKSEQDSGILDVEDEEDDEEVPGAQDLVDFSPVYRCLHIYSVLGARETFENYYRKQRRKQARLVLQPPSNMHETLDGYRKYFNQIVGFFVVEDHILHTTQGLVNRAYIDELWEMALSKTIAALRTHSSYCSDPNLVLDLKNLIVLFADTLQVYGFPVNQLFDMLLEIRDQYSETLLKKWAGIFRNILDSDNYSPIPVTSEEMYKKVVGQFPFQDIELEKQPFPKKFPFSEFVPKVYNQIKEFIYACLKFSEDLHLSSTEVDDMIRKSTNLLLTRTLSNSLQNVIKRKNIGLTELVQIIINTTHLEKSCKYLEEFITNITNVLPETVHTTKLYGTTTFKDARHAAEEEIYTNLNQKIDQFLQLADYDWMTGDLGNKASDYLVDLIAFLRSTFAVFTHLPGKVAQTACMSACKHLATSLMQLLLEAEVRQLTLGALQQFNLDVRECEQFARSGPVPGFQEDTLQLAFIDLRQLLDLFIQWDWSTYLADYGQPNCKYLRVNPVTALTLLEKISREMKDTSRKNNMFAQFRKNERDKQKLIDTVAKQLRGLISSHHS

SEQ ID NO: 29077 - protein, 653 aa, Homo sapiens
  Payload ID: 5670
  Gene Symbol: EXOC7
  Gene Name: exocyst complex component 7
  Uniprot ID: Q9UPT5
  ENSP ID: ENSP00000333806
MIPPQEASARRREIEDKLKQEEETLSFIRDSLEKSDQLTKNMVSILSSFESRLMKLENSIIPVHKQTENLQRLQENVEKTLSCLDHVISYYHVASDTEKIIREGPTGRLEEYLGSMAKIQKAVEYFQDNSPDSPELNKVKLLFERGKEALESEFRSLMTRHSKVVSPVLILDLISGDDDLEAQEDVTLEHLPESVLQDVIRISRWLVEYGRNQDFMNVYYQIRSSQLDRSIKGLKEHFHKSSSSSGVPYSPAIPNKRKDTPTKKPVKRPGRDDMLDVETDAYIHCVSAFVKLAQSEYQLLADIIPEHHQKKTFDSLIQDALDGLMLEGENIVSAARKAIVRHDFSTVLTVFPILRHLKQTKPEFDQVLQGTAASTKNKLPGLITSMETIGAKALEDFADNIKNDPDKEYNMPKDGTVHELTSNAILFLQQLLDFQETAGAMLASQETSSSATSYSSEFSKRLLSTYICKVLGNLQLNLLSKSKVYEDPALSAIFLHNNYNYILKSLEKSELIQLVAVTQKTAERSYREHIEQQIQTYQRSWLKVTDYIAEKNLPVFQPGVKLRDKERQIIKERFKGFNDGLEELCKIQKAWAIPDTEQRDRIRQAQKTIVKETYGAFLQKFGSVPFTKNPEKYIKYGVEQVGDMIDRLFDTSA

SEQ ID NO: 29078 - protein, 735 aa, Homo sapiens
  Payload ID: 5670
  Gene Symbol: EXOC7
  Gene Name: exocyst complex component 7
  Uniprot ID: Q9UPT5
  ENSP ID: ENSP00000334100
MIPPQEASARRREIEDKLKQEEETLSFIRDSLEKSDQLTKNMVSILSSFESRLMKLENSIIPVHKQTENLQRLQENVEKTLSCLDHVISYYHVASDTEKIIREGPTGRLEEYLGSMAKIQKAVEYFQDNSPDSPELNKVKLLFERGKEALESEFRSLMTRHSKVVSPVLILDLISGDDDLEAQEDVTLEHLPESVLQDVIRISRWLVEYGRNQDFMNVYYQIRSSQLDRSIKGLKEHFHKSSSSSGVPYSPAIPNKRKDTPTKKPVKRPGTIRKAQNLLKQYSQHGLDGKKGGSNLIPLEGLLPCTPRGGLPGPWINAACVCAADISPGHEHDFRVKHLSEALNDKHGPLAGRDDMLDVETDAYIHCVSAFVKLAQSEYQLLADIIPEHHQKKTFDSLIQDALDGLMLEGENIVSAARKAIVRHDFSTVLTVFPILRHLKQTKPEFDQVLQGTAASTKNKLPGLITSMETIGAKALEDFADNIKNDPDKEYNMPKDGTVHELTSNAILFLQQLLDFQETAGAMLASQETSSSATSYSSEFSKRLLSTYICKVLGNLQLNLLSKSKVYEDPALSAIFLHNNYNYILKSLEKSELIQLVAVTQKTAERSYREHIEQQIQTYQRSWLKVTDYIAEKNLPVFQPGVKLRDKERQIIKERFKGFNDGLEELCKIQKAWAIPDTEQRDRIRQAQKTIVKETYGAFLQKFGSVPFTKNPEKYIKYGVEQVGDMIDRLFDTSA

SEQ ID NO: 29079 - protein, 617 aa, Homo sapiens
  Payload ID: 5670
  Gene Symbol: EXOC7
  Gene Name: exocyst complex component 7
  ENSP ID: ENSP00000349767
  MOD_RES (1)..(1): Any amino acid
XSSFESRLMKLENSIIPVHKQTENLQRLQENVEKTLSCLDHVISYYHVASDTEKIIREGPTGRLEEYLGSMAKIQKAVEYFQDNSPDSPELNKVKLLFERGKEALESEFRSLMTRHSKVVSPVLILDLISGDDDLEAQEDVTLEHLPESVLQDVIRISRWLVEYGRNQDFMNVYYQIRSSQLDRSIKGLKEHFHKSSSSSGVPYSPAIPNKRKDTPTKKPVKRPGTIRKAQNLLKQYSQHGLDGKKGGSNLIPLEGRDDMLDVETDAYIHCVSAFVKLAQSEYQLLADIIPEHHQKKTFDSLIQDALDGLMLEGENIVSAARKAIVRHDFSTVLTVFPILRHLKQTKPEFDQVLQGTAASTKNKLPGLITSMETIGAKALEDFADNIKNDPDKEYNMPKDGTVHELTSNAILFLQQLLDFQETAGAMLASQGKVLGNLQLNLLSKSKVYEDPALSAIFLHNNYNYILKSLEKSELIQLVAVTQKTAERSYREHIEQQIQTYQRSWLKVTDYIAEKNLPVFQPGVKLRDKERQIIKERFKGFNDGLEELCKIQKAWAIPDTEQRDRIRQAQKTIVKETYGAFLQKFGSVPFTKNPEKYIKYGVEQVGDMIDRLFDTSA

SEQ ID NO: 29080 - protein, 693 aa, Homo sapiens
  Payload ID: 5670
  Gene Symbol: EXOC7
  Gene Name: exocyst complex component 7
  ENSP ID: ENSP00000384368
MIPPQEASARRREIEDKLKQEEETLSFIRDSLEKSDQLTKNMVSILSSFESRLMKLENSIIPVHKQTENLQRLQENVEKTLSCLDHVISYYHVASDTEKIIREGPTGRLEEYLGSMAKIQKAVEYFQDNSPDSPELNKVKLLFERGKEALESEFRSLMTRHSKVVSPVLILDLISGDDDLEAQEDVTLEHLPESVLQDVIRISRWLVEYGRNQDFMNVYYQIRSSQLDRSIKGLKEHFHKSSSSSGVPYSPAIPNKRKDTPTKKPVKRPGTIRKAQNLLKQYSQHGLDGKKGGSNLIPLEGHEHDFRVKHLSEALNDKHGPLAGRDDMLDVETDAYIHCVSAFVKLAQSEYQLLADIIPEHHQKKTFDSLIQDALDGLMLEGENIVSAARKAIVRHDFSTVLTVFPILRHLKQTKPEFDQVLQGTAASTKNKLPGLITSMETIGAKALEDFADNIKNDPDKEYNMPKDGTVHELTSNAILFLQQLLDFQETAGAMLASQETSSSATSYSSEFSKRLLSTYICKVLGNLQLNLLSKSKVYEDPALSAIFLHNNYNYILKSLEKSELIQLVAVTQKTAERSYREHIEQQIQTYQRSWLKVTDYIAEKNLPVFQPGVKGFNDGLEELCKIQKAWAIPDTEQRDRIRQAQKTIVKETYGAFLQKFGSVPFTKNPEKYIKYGVEQVGDMIDRLFDTSA

SEQ ID NO: 29081 - protein, 159 aa, Homo sapiens
  Payload ID: 5670
  Gene Symbol: EXOC7
  Gene Name: exocyst complex component 7
  ENSP ID: ENSP00000385066
MIPPQEASARRREIEDKLKQEEETLSFIRDSLEKSDQLTKNMVSILSSFESRLMKLENSIIPVHKQTENLQRLQENVEKTLSCLDHVISYYHVASDTEKIIREGPTGRLEEYLGSMAKIQKAVEYFQDNSPDSPELNKVVRGPQNNVRSLGISVSALVS

SEQ ID NO: 29082 - protein, 121 aa, Homo sapiens
  Payload ID: 5670
  Gene Symbol: EXOC7
  Gene Name: exocyst complex component 7
  ENSP ID: ENSP00000389723
MKLENSIIPVHKQTENLQRLQENVEKTLSCLDHVISYYHVASDTEKIIREGPTGRLEEYLGSMAKIQKAVEYFQDNSPDSPELNKVKLLFERGKEALESEFRSLMTRHSKVVSPVLILDLI

SEQ ID NO: 29083 - protein, 122 aa, Homo sapiens
  Payload ID: 5670
  Gene Symbol: EXOC7
  Gene Name: exocyst complex component 7
  ENSP ID: ENSP00000389950
MAKIQKAVEYFQDNSPDSPELNKVKLLFERGKEALESEFRSLMTRHSKVVSPVLILDLISGDDDLEAQEDVTLEHLPESVLQDVIRISRWLVEYGRNQDFMNVYYQIRSSQLDRSIKGLKEH

SEQ ID NO: 29084 - protein, 676 aa, Homo sapiens
  Payload ID: 5670
  Gene Symbol: EXOC7
  Gene Name: exocyst complex component 7
  Uniprot ID: Q9UPT5
  ENSP ID: ENSP00000404322
MIPPQEASARRREIEDKLKQEEETLSFIRDSLEKSDQLTKNMVSILSSFESRLMKLENSIIPVHKQTENLQRLQENVEKTLSCLDHVISYYHVASDTEKIIREGPTGRLEEYLGSMAKIQKAVEYFQDNSPDSPELNKVKLLFERGKEALESEFRSLMTRHSKVVSPVLILDLISGDDDLEAQEDVTLEHLPESVLQDVIRISRWLVEYGRNQDFMNVYYQIRSSQLDRSIKGLKEHFHKSSSSSGVPYSPAIPNKRKDTPTKKPVKRPGHEHDFRVKHLSEALNDKHGPLAGRDDMLDVETDAYIHCVSAFVKLAQSEYQLLADIIPEHHQKKTFDSLIQDALDGLMLEGENIVSAARKAIVRHDFSTVLTVFPILRHLKQTKPEFDQVLQGTAASTKNKLPGLITSMETIGAKALEDFADNIKNDPDKEYNMPKDGTVHELTSNAILFLQQLLDFQETAGAMLASQETSSSATSYSSEFSKRLLSTYICKVLGNLQLNLLSKSKVYEDPALSAIFLHNNYNYILKSLEKSELIQLVAVTQKTAERSYREHIEQQIQTYQRSWLKVTDYIAEKNLPVFQPGVKLRDKERQIIKERFKGFNDGLEELCKIQKAWAIPDTEQRDRIRQAQKTIVKETYGAFLQKFGSVPFTKNPEKYIKYGVEQVGDMIDRLFDTSA

SEQ ID NO: 29085 - protein, 656 aa, Homo sapiens
  Payload ID: 5670
  Gene Symbol: EXOC7
  Gene Name: exocyst complex component 7
  ENSP ID: ENSP00000466682
MVSILSSFESRLMKLENSIIPVHKQTENLQRLQENVEKTLSCLDHVISYYHVASDTEKIIREGPTGRLEEYLGSMAKIQKAVEYFQDNSPDSPELNKVKLLFERGKEALESEFRSLMTRHSKVVSPVLILDLISGDDDLEAQEDVTLEHLPESVLQDVIRISRWLVEYGRNQDFMNVYYQIRSSQLDRSIKGLKEHFHKSSSSSGVPYSPAIPNKRKDTPTKKPVKRPGTIRKAQNLLKQYSQHGLDGKKGGSNLIPLEGRDDMLDVETDAYIHCVSAFVKLAQSEYQLLADIIPEHHQKKTFDSLIQDALDGLMLEGENIVSAARKAIVRHDFSTVLTVFPILRHLKQTKPEFDQVLQGTAASTKNKLPGLITSMETIGAKALEDFADNIKNDPDKEYNMPKDGTVHELTSNAILFLQQLLDFQETAGAMLASQVLGDTYNIPLDPRETSSSATSYSSEFSKRLLSTYICKVLGNLQLNLLSKSKVYEDPALSAIFLHNNYNYILKSLEKSELIQLVAVTQKTAERSYREHIEQQIQTYQRSWLKVTDYIAEKNLPVFQPGVKLRDKERQIIKERFKGFNDGLEELCKIQKAWAIPDTEQRDRIRQAQKTIVKETYGAFLQKFGSVPFTKNPEKYIKYGVEQVGDMIDRLFDTSA

SEQ ID NO: 29086 - protein, 33 aa, Homo sapiens
  Payload ID: 5670
  Gene Symbol: EXOC7
  Gene Name: exocyst complex component 7
  ENSP ID: ENSP00000467042
SGVPYSPAIPNKRKDTPTKKPVKRPGCPGWADA

SEQ ID NO: 29087 - protein, 168 aa, Homo sapiens
  Payload ID: 5670
  Gene Symbol: EXOC7
  Gene Name: exocyst complex component 7
  ENSP ID: ENSP00000468364
MCPQYLSQSPNPSCPTAFSWNLPWEASARRREIEDKLKQEEETLSFIRDSLEKSDQLTKNMVSILSSFESRLMKLENSIIPVHKQTENLQRLQENVEKTLSCLDHVISYYHVASDTEKIIREGPTGRLEEYLGSMAKIQKAVEYFQDNSPDSPELNKVKLLFERGKEA

SEQ ID NO: 29088 - protein, 684 aa, Homo sapiens
  Payload ID: 5670
  Gene Symbol: EXOC7
  Gene Name: exocyst complex component 7
  Uniprot ID: Q9UPT5
  ENSP ID: ENSP00000468404
MIPPQEASARRREIEDKLKQEEETLSFIRDSLEKSDQLTKNMVSILSSFESRLMKLENSIIPVHKQTENLQRLQENVEKTLSCLDHVISYYHVASDTEKIIREGPTGRLEEYLGSMAKIQKAVEYFQDNSPDSPELNKVKLLFERGKEALESEFRSLMTRHSKVVSPVLILDLISGDDDLEAQEDVTLEHLPESVLQDVIRISRWLVEYGRNQDFMNVYYQIRSSQLDRSIKGLKEHFHKSSSSSGVPYSPAIPNKRKDTPTKKPVKRPGTIRKAQNLLKQYSQHGLDGKKGGSNLIPLEGRDDMLDVETDAYIHCVSAFVKLAQSEYQLLADIIPEHHQKKTFDSLIQDALDGLMLEGENIVSAARKAIVRHDFSTVLTVFPILRHLKQTKPEFDQVLQGTAASTKNKLPGLITSMETIGAKALEDFADNIKNDPDKEYNMPKDGTVHELTSNAILFLQQLLDFQETAGAMLASQETSSSATSYSSEFSKRLLSTYICKVLGNLQLNLLSKSKVYEDPALSAIFLHNNYNYILKSLEKSELIQLVAVTQKTAERSYREHIEQQIQTYQRSWLKVTDYIAEKNLPVFQPGVKLRDKERQIIKERFKGFNDGLEELCKIQKAWAIPDTEQRDRIRQAQKTIVKETYGAFLQKFGSVPFTKNPEKYIKYGVEQVGDMIDRLFDTSA

SEQ ID NO: 29089 - protein, 656 aa, Homo sapiens; identical to SEQ ID NO: 29085
  Payload ID: 5670
  Gene Symbol: EXOC7
  Gene Name: exocyst complex component 7
  ENSP ID: ENSP00000475431

SEQ ID NO: 29090 - protein, 707 aa, Homo sapiens
  Payload ID: 5670
  Gene Symbol: EXOC7
  Gene Name: exocyst complex component 7
  ENSP ID: ENSP00000489266
MIPPQEASARRREIEDKLKQEEETLSFIRDSLEKSDQLTKNMVSILSSFESRLMKLENSIIPVHKQTENLQRLQENVEKTLSCLDHVISYYHVASDTEKIIREGPTGRLEEYLGSMAKIQKAVEYFQDNSPDSPELNKVKLLFERGKEALESEFRSLMTRHSKVVSPVLILDLISGDDDLEAQEDVTLEHLPESVLQDVIRISRWLVEYGRNQDFMNVYYQIRSSQLDRSIKGLKEHFHKSSSSSGVPYSPAIPNKRKDTPTKKPVKRPGTIRKAQNLLKQYSQHGLDGKKGGSNLIPLEGHEHDFRVKHLSEALNDKHGPLAGRDDMLDVETDAYIHCVSAFVKLAQSEYQLLADIIPEHHQKKTFDSLIQDALDGLMLEGENIVSAARKAIVRHDFSTVLTVFPILRHLKQTKPEFDQVLQGTAASTKNKLPGLITSMETIGAKALEDFADNIKNDPDKEYNMPKDGTVHELTSNAILFLQQLLDFQETAGAMLASQETSSSATSYSSEFSKRLLSTYICKVLGNLQLNLLSKSKVYEDPALSAIFLHNNYNYILKSLEKSELIQLVAVTQKTAERSYREHIEQQIQTYQRSWLKVTDYIAEKNLPVFQPGVKLRDKERQIIKERFKGFNDGLEELCKIQKAWAIPDTEQRDRIRQAQKTIVKETYGAFLQKFGSVPFTKNPEKYIKYGVEQVGDMIDRLFDTSA

SEQ ID NO: 29091 - protein, 725 aa, Homo sapiens
  Payload ID: 5671
  Gene Symbol: EXOC8
  Gene Name: exocyst complex component 8
  Uniprot ID: Q8IYI6
  ENSP ID: ENSP00000355605
MAMAMSDSGASRLRRQLESGGFEARLYVKQLSQQSDGDRDLQEHRQRIQALAEETAQNLKRNVYQNYRQFIETAREISYLESEMYQLSHLLTEQKSSLESIPLTLLPAAAAAGAAAASGGEEGVGGAGGRDHLRGQAGFFSTPGGASRDGSGPGEEGKQRTLTTLLEKVEGCRHLLETPGQYLVYNGDLVEYDADHMAQLQRVHGFLMNDCLLVATWLPQRRGMYRYNALYSLDGLAVVNVKDNPPMKDMFKLLMFPESRIFQAENAKIKREWLEVLEDTKRALSEKRRREQEEAAAPRGPPQVTSKATNPFEDDEEEEPAVPEVEEEKVDLSMEWIQELPEDLDVCIAQRDFEGAVDLLDKLNHYLEDKPSPPPVKELRAKVEERVRQLTEVLVFELSPDRSLRGGPKATRRAVSQLIRLGQCTKACELFLRNRAAAVHTAIRQLRIEGATLLYIHKLCHVFFTSLLETAREFEIDFAGTDSGCYSAFVVWARSAMGMFVDAFSKQVFDSKESLSTAAECVKVAKEHCQQLGDIGLDLTFIIHALLVKDIQGALHSYKEIIIEATKHRNSEEMWRRMNLMTPEALGKLKEEMKSCGVSNFEQYTGDDCWVNLSYTVVAFTKQTMGFLEEALKLYFPELHMVLLESLVEIILVAVQHVDYSLRCEQDPEKKAFIRQNASFLYETVLPVVEKRFEEGVGKPAKQLQDLRNASRLIRVNPESTTSVV

SEQ ID NO: 29092 - protein, 846 aa, Homo sapiens
  Payload ID: 5672
  Gene Symbol: EXO1
  Gene Name: exonuclease 1
  Uniprot ID: Q9UQ84
  ENSP ID: ENSP00000311873
MGIQGLLQFIKEASEPIHVRKYKGQVVAVDTYCWLHKGAIACAEKLAKGEPTDRYVGFCMKFVNMLLSHGIKPILVFDGCTLPSKKEVERSRRERRQANLLKGKQLLREGKVSEARECFTRSINITHAMAHKVIKAARSQGVDCLVAPYEADAQLAYLNKAGIVQAIITEDSDLLAFGCKKVILKMDQFGNGLEIDQARLGMCRQLGDVFTEEKFRYMCILSGCDYLSSLRGIGLAKACKVLRLANNPDIVKVIKKIGHYLKMNITVPEDYINGFIRANNTFLYQLVFDPIKRKLIPLNAYEDDVDPETLSYAGQYVDDSIALQIALGNKDINTFEQIDDYNPDTAMPAHSRSHSWDDKTCQKSANVSSIWHRNYSPRPESGTVSDAPQLKENPSTVGVERVISTKGLNLPRKSSIVKRPRSAELSEDDLLSQYSLSFTKKTKKNSSEGNKSLSFSEVFVPDLVNGPTNKKSVSTPPRTRNKFATFLQRKNEESGAVVVPGTRSRFFCSSDSTDCVSNKVSIQPLDETAVTDKENNLHESEYGDQEGKRLVDTDVARNSSDDIPNNHIPGDHIPDKATVFTDEESYSFESSKFTRTISPPTLGTLRSCFSWSGGLGDFSRTPSPSPSTALQQFRRKSDSPTSLPENNMSDVSQLKSEESSDDESHPLREEACSSQSQESGEFSLQSSNASKLSQCSSKDSDSEESDCNIKLLDSQSDQTSKLRLSHFSKKDTPLRNKVPGLYKSSSADSLSTTKIKPLGPARASGLSKKPASIQKRKHHNAENKPGLQIKLNELWKNFGFKKDSEKLPPCKKPLSPVRDNIQLTPEAEEDIFNKPECGRVQRAIFQ

SEQ ID NO: 29093 - protein, 846 aa, Homo sapiens; identical to SEQ ID NO: 29092
  Payload ID: 5672
  Gene Symbol: EXO1
  Gene Name: exonuclease 1
  Uniprot ID: Q9UQ84
  ENSP ID: ENSP00000355506

SEQ ID NO: 29094 - protein, 135 aa, Homo sapiens
  Payload ID: 5672
  Gene Symbol: EXO1
  Gene Name: exonuclease 1
  ENSP ID: ENSP00000406652
MGIQGLLQFIKEASEPIHVRKYKGQVVAVDTYCWLHKGAIACAEKLAKGEPTDRYVGFCMKFVNMLLSHGIKPILVFDGCTLPSKKEVERSRRERRQANLLKGKQLLREGKVSEARECFTRSINITHAMAHKVIK

SEQ ID NO: 29095 - protein, 166 aa, Homo sapiens
  Payload ID: 5672
  Gene Symbol: EXO1
  Gene Name: exonuclease 1
  ENSP ID: ENSP00000412041
MGIQGLLQFIKEASEPIHVRKYKGQVVAVDTYCWLHKGAIACAEKLAKGEPTDRRRQANLLKGKQLLREGKVSEARECFTRSINITHAMAHKAARSQGVDCLVAPYEADAQLAYLNKAGIVQAIITEDSDLLAFGCKKVILKMDQFGNGLEIDQARLGMCRQLGDV

SEQ ID NO: 29096 - protein, 169 aa, Homo sapiens
  Payload ID: 5672
  Gene Symbol: EXO1
  Gene Name: exonuclease 1
  ENSP ID: ENSP00000415531
MGIQGLLQFIKEASEPIHVRKYKGQVVAVDTYCWLHKGAIACAEKLAKGEPTDRRRQANLLKGKQLLREGKVSEARECFTRSINITHAMAHKVIKAARSQGVDCLVAPYEADAQLAYLNKAGIVQAIITEDSDLLAFGCKKVILKMDQFGNGLEIDQARLGMCRQLGDV

SEQ ID NO: 29097 - protein, 208 aa, Homo sapiens
  Payload ID: 5672
  Gene Symbol: EXO1
  Gene Name: exonuclease 1
  ENSP ID: ENSP00000428326
  MOD_RES (1)..(1): Any amino acid
XGTLRSCFSWSGGLGDFSRTPSPSPSTALQQFRRKSDSPTSLPENNMSDVSQLKSEESSDDESHPLREEACSSQSQESGEFSLQSSNASKLSQCSSKDSDSEVPGLYKSSSADSLSTTKIKPLGPARASGLSKKPASIQKRKHHNAENKPGLQIKLNELWKNFGFKKDSEKLPPCKKPLSPVRDNIQLTPEAEEDIFNKPECGRVQRA

SEQ ID NO: 29098 - protein, 11 aa, Homo sapiens
  Payload ID: 5672
  Gene Symbol: EXO1
  Gene Name: exonuclease 1
  ENSP ID: ENSP00000429720
MGIQGLLQFIK

SEQ ID NO: 29099 - protein, 95 aa, Homo sapiens
  Payload ID: 5672
  Gene Symbol: EXO1
  Gene Name: exonuclease 1
  ENSP ID: ENSP00000430082
MGIQGLLQFIKEASEPIHVRKYKGQVVAVDTYCWLHKGAIACAEKLAKGEPTDRRRQANLLKGKQLLREGKVSEARECFTRSINITHAMAHKVIK

SEQ ID NO: 29100 - protein, 803 aa, Homo sapiens
  Payload ID: 5672
  Gene Symbol: EXO1
  Gene Name: exonuclease 1
  Uniprot ID: Q9UQ84
  ENSP ID: ENSP00000430251
MGIQGLLQFIKEASEPIHVRKYKGQVVAVDTYCWLHKGAIACAEKLAKGEPTDRYVGFCMKFVNMLLSHGIKPILVFDGCTLPSKKEVERSRRERRQANLLKGKQLLREGKVSEARECFTRSINITHAMAHKVIKAARSQGVDCLVAPYEADAQLAYLNKAGIVQAIITEDSDLLAFGCKKVILKMDQFGNGLEIDQARLGMCRQLGDVFTEEKFRYMCILSGCDYLSSLRGIGLAKACKVLRLANNPDIVKVIKKIGHYLKMNITVPEDYINGFIRANNTFLYQLVFDPIKRKLIPLNAYEDDVDPETLSYAGQYVDDSIALQIALGNKDINTFEQIDDYNPDTAMPAHSRSHSWDDKTCQKSANVSSIWHRNYSPRPESGTVSDAPQLKENPSTVGVERVISTKGLNLPRKSSIVKRPRSAELSEDDLLSQYSLSFTKKTKKNSSEGNKSLSFSEVFVPDLVNGPTNKKSVSTPPRTRNKFATFLQRKNEESGAVVVPGTRSRFFCSSDSTDCVSNKVSIQPLDETAVTDKENNLHESEYGDQEGKRLVDTDVARNSSDDIPNNHIPGDHIPDKATVFTDEESYSFESSKFTRTISPPTLGTLRSCFSWSGGLGDFSRTPSPSPSTALQQFRRKSDSPTSLPENNMSDVSQLKSEESSDDESHPLREEACSSQSQESGEFSLQSSNASKLSQCSSKDSDSEESDCNIKLLDSQSDQTSKLRLSHFSKKDTPLRNKVPGLYKSSSADSLSTTKIKPLGPARASGLSKKPASIQKRKHHNAENKPGLQIKLNELWKNFGFKKF

SEQ ID NO: 29101 - protein, 514 aa, Homo sapiens
  Payload ID: 5673
  Gene Symbol: EXD1
  Gene Name: exonuclease 3'-5' domain containing 1
  Uniprot ID: Q8NHP7
  ENSP ID: ENSP00000321029
MEDSEFLAYVELLDEVEQGSVRAKASSVSLHAERTWMEKMKVEDLNVCEPASPAPEAPATSLLNDLKYSPSEEEEVTYTVINQFQQKFGAAILHIKKQNVLSVAAEGANVCRHGKLCWLQVATNCRVYLFDIFLLGSRAFHNGLQMILEDKRILKVIHDCRWLSDCLSHQYGILLNNVFDTQVADVLQFSMETGGYLPNCITTLQESLIKHLQVAPKYLSFLEKRQKLIQENPEVWFIRPVSPSLLKILALEATYLLPLRLALLDEMMSDLTTLVDGYLNTYREGSADRLGGTEPTCMELPEELLQLKDFQKQRREKAAREYRVNAQGLLIRTVLQPKKLVTETAGKEEKVKGFLFGKNFRIDKAPSFTSQDFHGDVNLLKEESLNKQATNPQHLPPTEEGETSEDSSNKLICTKSKGSEDQRITQKEHFMTPKHEFQASLSLKEETEQLLMVENKEDLKCTKQAVSMSSFPQETRVSPSDTFYPIRKTVVSTLPPCPALEKIDSWISPFLNLP

SEQ ID NO: 29102 - protein, 572 aa, Homo sapiens
  Payload ID: 5673
  Gene Symbol: EXD1
  Gene Name: exonuclease 3'-5' domain containing 1
  Uniprot ID: Q8NHP7
  ENSP ID: ENSP00000415056
MDPSSDYHFLSQILWKRVKLTLVCGVFEGVLQHVDPNKIVVLKKVKNVETGRSVPGVKLFFGHEIVNVELLDEVEQGSVRAKASSVSLHAERTWMEKMKVEDLNVCEPASPAPEAPATSLLNDLKYSPSEEEEVTYTVINQFQQKFGAAILHIKKQNVLSVAAEGANVCRHGKLCWLQVATNCRVYLFDIFLLGSRAFHNGLQMILEDKRILKVIHDCRWLSDCLSHQYGILLNNVFDTQVADVLQFSMETGGYLPNCITTLQESLIKHLQVAPKYLSFLEKRQKLIQENPEVWFIRPVSPSLLKILALEATYLLPLRLALLDEMMSDLTTLVDGYLNTYREGSADRLGGTEPTCMELPEELLQLKDFQKQRREKAAREYRVNAQGLLIRTVLQPKKLVTETAGKEEKVKGFLFGKNFRIDKAPSFTSQDFHGDVNLLKEESLNKQATNPQHLPPTEEGETSEDSSNKLICTKSKGSEDQRITQKEHFMTPKHEFQASLSLKEETEQLLMVENKEDLKCTKQAVSMSSFPQETRVSPSDTFYPIRKTVVSTLPPCPALEKIDSWISPFLNLP

SEQ ID NO: 29103 - protein, 55 aa, Homo sapiens
  Payload ID: 5673
  Gene Symbol: EXD1
  Gene Name: exonuclease 3'-5' domain containing 1
  ENSP ID: ENSP00000452678
MDPSSDYHFLSQILWKRVKLTLVCGVFEGVLQHVDPNKIVVLKKVELLDEVEQGS

SEQ ID NO: 29104 - protein, 621 aa, Homo sapiens
  Payload ID: 5674
  Gene Symbol: EXD2
  Gene Name: exonuclease 3'-5' domain containing 2
  Uniprot ID: Q9NVH0
  ENSP ID: ENSP00000313140
MSRQNLVALTVTTLLGVAVGGFVLWKGIQRRRRSKTSPVTQQPQQKVLGSRELPPPEDDQLHSSAPRSSWKERILKAKVVTVSQEAEWDQIEPLLRSELEDFPVLGIDCEWVNLEGKASPLSLLQMASPSGLCVLVRLPKLICGGKTLPRTLLDILADGTILKVGVGCSEDASKLLQDYGLVVRGCLDLRYLAMRQRNNLLCNGLSLKSLAETVLNFPLDKSLLLRCSNWDAETLTEDQVIYAARDAQISVALFLHLLGYPFSRNSPGEKNDDHSSWRKVLEKCQGVVDIPFRSKGMSRLGEEVNGEATESQQKPRNKKSKMDGMVPGNHQGRDPRKHKRKPLGVGYSARKSPLYDNCFLHAPDGQPLCTCDRRKAQWYLDKGIGELVSEEPFVVKLRFEPAGRPESPGDYYLMVKENLCVVCGKRDSYIRKNVIPHEYRKHFPIEMKDHNSHDVLLLCTSCHAISNYYDNHLKQQLAKEFQAPIGSEEGLRLLEDPERRQVRSGARALLNAESLPTQRKEELLQALREFYNTDVVTEEMLQEAASLETRISNENYVPHGLKVVQCHSQGGLRSLMQLESRWRQHFLDSMQPKHLPQQWSVDHNHQKLLRKFGEDLPIQLS

SEQ ID NO: 29105 - protein, 496 aa, Homo sapiens
  Payload ID: 5674
  Gene Symbol: EXD2
  Gene Name: exonuclease 3'-5' domain containing 2
  Uniprot ID: Q9NVH0
  ENSP ID: ENSP00000386632
MASPSGLCVLVRLPKLICGGKTLPRTLLDILADGTILKVGVGCSEDASKLLQDYGLVVRGCLDLRYLAMRQRNNLLCNGLSLKSLAETVLNFPLDKSLLLRCSNWDAETLTEDQVIYAARDAQISVALFLHLLGYPFSRNSPGEKNDDHSSWRKVLEKCQGVVDIPFRSKGMSRLGEEVNGEATESQQKPRNKKSKMDGMVPGNHQGRDPRKHKRKPLGVGYSARKSPLYDNCFLHAPDGQPLCTCDRRKAQWYLDKGIGELVSEEPFVVKLRFEPAGRPESPGDYYLMVKENLCVVCGKRDSYIRKNVIPHEYRKHFPIEMKDHNSHDVLLLCTSCHAISNYYDNHLKQQLAKEFQAPIGSEEGLRLLEDPERRQVRSGARALLNAESLPTQRKEELLQALREFYNTDVVTEEMLQEAASLETRISNENYVPHGLKVVQCHSQGGLRSLMQLESRWRQHFLDSMQPKHLPQQWSVDHNHQKLLRKFGEDLPIQLS

SEQ ID NO: 29106 - protein, 496 aa, Homo sapiens; identical to SEQ ID NO: 29105
  Payload ID: 5674
  Gene Symbol: EXD2
  Gene Name: exonuclease 3'-5' domain containing 2
  Uniprot ID: Q9NVH0
  ENSP ID: ENSP00000386762

SEQ ID NO: 29107 - protein, 496 aa, Homo sapiens; identical to SEQ ID NO: 29105
  Payload ID: 5674
  Gene Symbol: EXD2
  Gene Name: exonuclease 3'-5' domain containing 2
  Uniprot ID: Q9NVH0
  ENSP ID: ENSP00000386839

SEQ ID NO: 29108 - protein, 496 aa, Homo sapiens; identical to SEQ ID NO: 29105
  Payload ID: 5674
  Gene Symbol: EXD2
  Gene Name: exonuclease 3'-5' domain containing 2
  Uniprot ID: Q9NVH0
  ENSP ID: ENSP00000386915

SEQ ID NO: 29109 - protein, 621 aa, Homo sapiens; identical to SEQ ID NO: 29104
  Payload ID: 5674
  Gene Symbol: EXD2
  Gene Name: exonuclease 3'-5' domain containing 2
  Uniprot ID: Q9NVH0
  ENSP ID: ENSP00000387331

SEQ ID NO: 29110 - protein, 114 aa, Homo sapiens
  Payload ID: 5674
  Gene Symbol: EXD2
  Gene Name: exonuclease 3'-5' domain containing 2
  ENSP ID: ENSP00000409089
MASPSGLCVLVRLPKLICGGKTLPRTLLDILADGTILKVGVGCSEDASKLLQDYGLVVRGCLDLRYLAMRQRNNLLCNGLSLKSLAETVLNFPLDKSLLLRCSNWDAETLTEDQ

SEQ ID NO: 29111 - protein, 876 aa, Homo sapiens
  Payload ID: 5675
  Gene Symbol: EXD3
  Gene Name: exonuclease 3'-5' domain containing 3
  Uniprot ID: Q8N9H8
  ENSP ID: ENSP00000340474
MDPGDPAGDPAAGERHRMGRDPLLLLQALQTLWSTRERKQLREEAWRGFAALDDPLAGLLDMLESCRGQRGEGPSLAAWISHQLQCWLQAQPCPSLAQHSLRLKQLQARAVKVLTESPPSLAAPLASIFQLQDADRSCLLAHVHRLHHEGRFREAATLGATLKLQSELGVEKMSIPLLLQDKVALVERYVAGFPDLQRRLLVLMDSWCQPGFDIKDVARRYPEVTSLSLEKLSPKALSRQVLRLQERYGVAPALCPNAAIQQRLAALRHLCHKRFVEKSLSQENWTDHVQGLVGQSPWLQEQLSQLLVSHSDPVTAAQCAMELLLPEERLPAAVAVELRRFRLQGRATEADSRLEVKDMKDRYYQLPIPRENVHLLASWEDLTRHEGALLQCHQVVGVDVEWTPVFVAGGRPRPSLLQVAVEGHVFLLDVLALSQPPTGQGAQAFSRLVAQLLSDPSITKLGYGMVGDLQKLGTSCPALAHVEKQILGGMDLLLVHRQMRVASVPAPAVDRARELRGLSLLVQQVLGTALDKTQQLSNWDRRPLCEEQVIYAAADAYCLLEVHQALCREPARFHLSEDLAGSRRPRHRERPGARKPPGLQKASAPAAPRQVPVAVAVSEGAAPQIPARAFRVVCDNMLQGLARSLRCLGVDARMLGNGEDHRRAAEVARQEGRIILTSGQPFHKLRAQVGAGRCLSVDCSLKAQQQAKAVLKHFNVRVTHADIFSRCQACNCDQYLKVSRDMMKQLMWLSSHQEGPRSSGDEATQSQAVQEPGPAPDAAPEGCTYDRPCRWLQMADLRAETPDMLADGTRLQLAGVPVGVLRTPGLRCFYCCTGCGKVFWDGSHLGRVATHFRDMLESAPSPCEPSPAPSPASSPF

SEQ ID NO: 29112 - protein, 246 aa, Homo sapiens
  Payload ID: 5675
  Gene Symbol: EXD3
  Gene Name: exonuclease 3'-5' domain containing 3
  Uniprot ID: Q8N9H8
  ENSP ID: ENSP00000431859
MDPGDPAGDPAAGERHRMGRDPLLLLQALQTLWSTRERKQLREEAWRGFAALDDPLAGLLDMLESCRGQRGEGPSLAAWISHQLQCWLQAQPCPSLAQHSLRLKQLQARAVKVLTESPPSLAAPLASIFQLQDADRSCLLAHVHRLHHEGRFREAATLGATLKLQSELGVEKMSIPLLLQDKVALVERYVAGFPDLQRRLLVLMDSWCQPGFDIKDVASCHVTAAGAAASGEERLGLAGAQPSSPE

SEQ ID NO: 29113 - protein, 56 aa, Homo sapiens
  Payload ID: 5675
  Gene Symbol: EXD3
  Gene Name: exonuclease 3'-5' domain containing 3
  ENSP ID: ENSP00000432895
MDPGDPAGDPAAGERHRMGTHRLLQPLLHLSRVGCFQSATPQLAGPLEQPRRPLEH

SEQ ID NO: 29114 - protein, 36 aa, Homo sapiens
  Payload ID: 5675
  Gene Symbol: EXD3
  Gene Name: exonuclease 3'-5' domain containing 3
  ENSP ID: ENSP00000433010
  MOD_RES (1)..(1): Any amino acid
XMDSWCQPGFDIKDVASFWKHLVCDVCQQLQRKGST

SEQ ID NO: 29115 - protein, 140 aa, Homo sapiens
  Payload ID: 5675
  Gene Symbol: EXD3
  Gene Name: exonuclease 3'-5' domain containing 3
  ENSP ID: ENSP00000435830
MSIPLLLQDKVALVERYVAGFPDLQRRLLVLMDSWCQPGFDIKDVARRYPEVTSLSLEKLSPKALSRQVLRLQERYGVAPALCPNAAIQQRLAALRHLCHKRFVEVREQEGVLGAASRGLSHRVWPGILTAHCRVHRHIK

SEQ ID NO: 29116 - protein, 40 aa, Homo sapiens
  Payload ID: 5675
  Gene Symbol: EXD3
  Gene Name: exonuclease 3'-5' domain containing 3
  ENSP ID: ENSP00000436717
MDPGDPAGDPAAGERHRMGRDPLLLLQALQTLWSTRERKQ

SEQ ID NO: 29117 - protein, 373 aa, Homo sapiens
  Payload ID: 5676
  Gene Symbol: EXO5
  Gene Name: exonuclease 5
  Uniprot ID: Q9H790
  ENSP ID: ENSP00000296380
MAETREEETVSAEASGFSDLSDSEFLEFLDLEDAQESKALVNMPGPSSESLGKDDKPISLQNWKRGLDILSPMERFHLKYLYVTDLATQNWCELQTAYGKELPGFLAPEKAAVLDTGASIHLARELELHDLVTVPVTTKEDAWAIKFLNILLLIPTLQSEGHIREFPVFGEGEGVLLVGVIDELHYTAKGELELAELKTRRRPMLPLEAQKKKDCFQVSLYKYIFDAMVQGKVTPASLIHHTKLCLEKPLGPSVLRHAQQGGFSVKSLGDLMELVFLSLTLSDLPVIDILKIEYIHQETATVLGTEIVAFKEKEVRAKVQHYMAYWMGHREPQGVDVEEAWKCRTCTYADICEWRKGSGVLSSTLAPQVKKAK

SEQ ID NO: 29118 - protein, 373 aa, Homo sapiens; identical to SEQ ID NO: 29117
  Payload ID: 5676
  Gene Symbol: EXO5
  Gene Name: exonuclease 5
  Uniprot ID: Q9H790
  ENSP ID: ENSP00000351328

SEQ ID NO: 29119 - protein, 373 aa, Homo sapiens; identical to SEQ ID NO: 29117
  Payload ID: 5676
  Gene Symbol: EXO5
  Gene Name: exonuclease 5
  Uniprot ID: Q9H790
  ENSP ID: ENSP00000361788

SEQ ID NO: 29120 - protein, 224 aa, Homo sapiens
  Payload ID: 5676
  Gene Symbol: EXO5
  Gene Name: exonuclease 5
  ENSP ID: ENSP00000391240
MAETREEETVSAEASGFSDLSDSEFLEFLDLEDAQESKALVNMPGPSSESLGKDDKPISLQNWKRGLDILSPMERFHLKYLYVTDLATQNWCELQTAYGKELPGFLAPEKAAVLDTGASIHLARELELHDLVTVPVTTKEDAWAIKFLNILLLIPTLQSEGHIREFPVFGEGEGVLLVGVIDELHYTAKGELELAELKTRRRPMLPLEAQKKKDCFQVSLYKYI

SEQ ID NO: 29121 - protein, 247 aa, Homo sapiens
  Payload ID: 5676
  Gene Symbol: EXO5
  Gene Name: exonuclease 5
  ENSP ID: ENSP00000392115
MAETREEETVSAEASGFSDLSDSEFLEFLDLEDAQESKALVNMPGPSSESLGKDDKPISLQNWKRGLDILSPMERFHLKYLYVTDLATQNWCELQTAYGKELPGFLAPEKAAVLDTGASIHLARELELHDLVTVPVTTKEDAWAIKFLNILLLIPTLQSEGHIREFPVFGEGEGVLLVGVIDELHYTAKGELELAELKTRRRPMLPLEAQKKKDCFQVSLYKYIFDAMVQGKVTPASLIHHTKLCLE

SEQ ID NO: 29122 - protein, 226 aa, Homo sapiens
  Payload ID: 5676
  Gene Symbol: EXO5
  Gene Name: exonuclease 5
  ENSP ID: ENSP00000398437
MAETREEETVSAEASGFSDLSDSEFLEFLDLEDAQESKALVNMPGPSSESLGKDDKPISLQNWKRGLDILSPMERFHLKYLYVTDLATQNWCELQTAYGKELPGFLAPEKAAVLDTGASIHLARELELHDLVTVPVTTKEDAWAIKFLNILLLIPTLQSEGHIREFPVFGEGEGVLLVGVIDELHYTAKGELELAELKTRRRPMLPLEAQKKKDCFQVSLYKYIFD

SEQ ID NO: 29123 - protein, 247 aa, Homo sapiens; identical to SEQ ID NO: 29121
  Payload ID: 5676
  Gene Symbol: EXO5
  Gene Name: exonuclease 5
  ENSP ID: ENSP00000409715

SEQ ID NO: 29124 - protein, 161 aa, Homo sapiens
  Payload ID: 5676
  Gene Symbol: EXO5
  Gene Name: exonuclease 5
  ENSP ID: ENSP00000413565
MAETREEETVSAEASGFSDLSDSEFLEFLDLEDAQESKALVNMPGPSSESLGKDDKPISLQNWKRGLDILSPMERFHLKYLYVTDLATQNWCELQTAYGKELPGFLAPEKAAVLDTGASIHLARELELHDLVTVPVTTKEDAWAIKFLNILLLIPTLQSEG

SEQ ID NO: 29125 - protein, 100 aa, Homo sapiens
  Payload ID: 5676
  Gene Symbol: EXO5
  Gene Name: exonuclease 5
  ENSP ID: ENSP00000416857
MAETREEETVSAEASGFSDLSDSEFLEFLDLEDAQESKALVNMPGPSSESLGKDDKPISLQNWKRGLDILSPMERFHLKYLYVTDLATQNWCELQTAYGK

SEQ ID NO: 29126 - protein, 1989 aa, Homo sapiens
  Payload ID: 5677
  Gene Symbol: EXPH5
  Gene Name: exophilin 5
  Uniprot ID: Q8NEV8
  ENSP ID: ENSP00000265843
MTKVPPAFDFSFLNDEEARKILQVLERNEELQRAEKDRISKLQKTKRDIRWLQGVTGEWFEEIQRKKFCNETDVSQMLKQPLTYRLSKEMAKNDPIELPTSRSKNVTNQKKPTPFSSRMSFRSSFASLFSFRKSGKETSKLPSLGQKGCDGHAGPPMPVRGAAVQAKIYNSPLENHLVDSTFVPKPAVMREESGMPPPWDASLLENEFFQVLDDLDSKLAQEQSASSVNTRTPLNYGSRTQFGHFYSSGNRHGNITERHKKHYNETSNMSIYDILRPGTPREGFKTFSPRTSTIYDMYRTREPRVFKEDYVQKNTFGSTSLCFDSRQRSALPATGHFTARSLHFPATTQSKSGFIPPRHQQSPKRTPLSSIIWNRSDSSRDRENQEEFLRAPSPMEIDPADKYVYPRGFQENKRYESYHSQNVYQRVSLNAPMENAMSPDTFENSENMPFYHQSNTFTRSFFSNTFGRSGEQRRFGQGPFWGQEKGHSFWSDFHRSRKSFSSSDRDFEMISMEANSVSAIHGHNVSSEHWESFSSGYGTDVSRGQEEPHPWQFDFQRSTLDSMVVSHGNETQLTPHFGTPNVCSMTGSSYHVKSSELVSQQDSSPVEVHINKEASSFGIAQTLASSFKTSFSQISDDRRNPQSPNLQNPTVTLQKIFPNKPASHPMRSHTEVTVTSSNSVDSLPLAKSQPNILVTEVNNEKDLNESISEEDKQLSKMDQTNKAGEIPQPVSQTGISNSLPDFQNPLSQDSAKSNGFGFNASTIISSKKSPRVFSRKDTSKMYIPHTDKSNDIKQDKRFTENRKLGSTASLPFIQEHRTPPSFPRTDQGCHQELTVNNEDISRIITNNHWSSALTDTQNAQYSKCKLTPGHKTSCDSLDLSSAALPDSSPSKNSSLDAPVVPSTTVFSRRSPSDKDPSLGEREEKDNAGKNQKNQFIVSHSENQERNDSPVPTHDEVVDVKCHSHSPFRNERGKGKIRHHISCIEKLSKTESISVPTSDHRSLIEANQSNSKVSELDTIYCTLPRKSSSFLIHGRQSGSKIMAASLRNGPPPFQIKNNVEDAMGNYMLNKFSPSSPESANECSKVLSDSALEAPEATERMTNVKSSGSTSVRKGPLPFLINRAMSCPSGEPHASTGREGRKKPLTSGMDASELTPRAWERIISPVESDSSVRDCSLTKRQHQKENFQEYTEKEGKMAASRRSVFALSNEDPLPFCSDLSGKERGKTLHKVKTTSTFSVSGDEDNVKCLEVVSIYYTLPRKPSKKFCNLLQQYTQNTNLLIESPQVETETFPNALEKDKQNYSTREQSGTPSCENLKMSVNSDQTLTTENMTAFRLSNRGPLAPTLQEMASVEAAVSLPEEESKAREIFSDNLAKTPLGDSENKKERGKKLQSETLHTSLMLQRKNVSEEKSENCQQSINSSNSGPSSLPALSEVNIGNSQTRRSSWECTGSGRAIPFTGSGKCPQKDHTSTAVGDGSSGSQPREGRGDIGTNCQKMTNKTLSHSESQVFALTPALHKLQLGEETQSDEPNLESLQSEPRELPQRSQEANMTESRKAEDEMQKSAWDQPSLPEGNKNKTNLDDLVKGENRSSVKHRLAAMSKASRKFPAKDVSPRRHVATIFPQSGSRSGFDHLSLGTVECNPLFPEPTPKSAESIGESRLSENGKHVKKSENLLPITVLPNREPSTHVSNQKSNSISQRHQNEFKNVSESPSKHENSKDVTAAQNLVRESGAPSPITFTSLREAEFSDNQRRLSPPFPLEPAQKSRVSSPLASFLQQQRSASSLEWEPEPHLYRSKSLKSINVHGDLLRKSHPPKVRERHFSESTSIDNALSRLTLGNEFSVNNGYSRRFRSFSELPSCDGNESWAYRSGTKTGPRSAISIYRPIDYGIFGKEQQLAFLENVKRSLTQGRLWKPSFLKNPGFLKDDLRNPPNPSESLSSNSPSSQVPEDGLSPSEPLNIYEDDPVDSDCDTDTTTDDEYYLDENDKESEL

SEQ ID NO: 29127 - protein, 1982 aa, Homo sapiens
  Payload ID: 5677
  Gene Symbol: EXPH5
  Gene Name: exophilin 5
  Uniprot ID: Q8NEV8
  ENSP ID: ENSP00000432546
MSLSFLNDEEARKILQVLERNEELQRAEKDRISKLQKTKRDIRWLQGVTGEWFEEIQRKKFCNETDVSQMLKQPLTYRLSKEMAKNDPIELPTSRSKNVTNQKKPTPFSSRMSFRSSFASLFSFRKSGKETSKLPSLGQKGCDGHAGPPMPVRGAAVQAKIYNSPLENHLVDSTFVPKPAVMREESGMPPPWDASLLENEFFQVLDDLDSKLAQEQSASSVNTRTPLNYGSRTQFGHFYSSGNRHGNITERHKKHYNETSNMSIYDILRPGTPREGFKTFSPRTSTIYDMYRTREPRVFKEDYVQKNTFGSTSLCFDSRQRSALPATGHFTARSLHFPATTQSKSGFIPPRHQQSPKRTPLSSIIWNRSDSSRDRENQEEFLRAPSPMEIDPADKYVYPRGFQENKRYESYHSQNVYQRVSLNAPMENAMSPDTFENSENMPFYHQSNTFTRSFFSNTFGRSGEQRRFGQGPFWGQEKGHSFWSDFHRSRKSFSSSDRDFEMISMEANSVSAIHGHNVSSEHWESFSSGYGTDVSRGQEEPHPWQFDFQRSTLDSMVVSHGNETQLTPHFGTPNVCSMTGSSYHVKSSELVSQQDSSPVEVHINKEASSFGIAQTLASSFKTSFSQISDDRRNPQSPNLQNPTVTLQKIFPNKPASHPMRSHTEVTVTSSNSVDSLPLAKSQPNILVTEVNNEKDLNESISEEDKQLSKMDQTNKAGEIPQPVSQTGISNSLPDFQNPLSQDSAKSNGFGFNASTIISSKKSPRVFSRKDTSKMYIPHTDKSNDIKQDKRFTENRKLGSTASLPFIQEHRTPPSFPRTDQGCHQELTVNNEDISRIITNNHWSSALTDTQNAQYSKCKLTPGHKTSCDSLDLSSAALPDSSPSKNSSLDAPVVPSTTVFSRRSPSDKDPSLGEREEKDNAGKNQKNQFIVSHSENQERNDSPVPTHDEVVDVKCHSHSPFRNERGKGKIRHHISCIEKLSKTESISVPTSDHRSLIEANQSNSKVSELDTIYCTLPRKSSSFLIHGRQSGSKIMAASLRNGPPPFQIKNNVEDAMGNYMLNKFSPSSPESANECSKVLSDSALEAPEATERMTNVKSSGSTSVRKGPLPFLINRAMSCPSGEPHASTGREGRKKPLTSGMDASELTPRAWERIISPVESDSSVRDCSLTKRQHQKENFQEYTEKEGKMAASRRSVFALSNEDPLPFCSDLSGKERGKTLHKVKTTSTFSVSGDEDNVKCLEVVSIYYTLPRKPSKKFCNLLQQYTQNTNLLIESPQVETETFPNALEKDKQNYSTREQSGTPSCENLKMSVNSDQTLTTENMTAFRLSNRGPLAPTLQEMASVEAAVSLPEEESKAREIFSDNLAKTPLGDSENKKERGKKLQSETLHTSLMLQRKNVSEEKSENCQQSINSSNSGPSSLPALSEVNIGNSQTRRSSWECTGSGRAIPFTGSGKCPQKDHTSTAVGDGSSGSQPREGRGDIGTNCQKMTNKTLSHSESQVFALTPALHKLQLGEETQSDEPNLESLQSEPRELPQRSQEANMTESRKAEDEMQKSAWDQPSLPEGNKNKTNLDDLVKGENRSSVKHRLAAMSKASRKFPAKDVSPRRHVATIFPQSGSRSGFDHLSLGTVECNPLFPEPTPKSAESIGESRLSENGKHVKKSENLLPITVLPNREPSTHVSNQKSNSISQRHQNEFKNVSESPSKHENSKDVTAAQNLVRESGAPSPITFTSLREAEFSDNQRRLSPPFPLEPAQKSRVSSPLASFLQQQRSASSLEWEPEPHLYRSKSLKSINVHGDLLRKSHPPKVRERHFSESTSIDNALSRLTLGNEFSVNNGYSRRFRSFSELPSCDGNESWAYRSGTKTGPRSAISIYRPIDYGIFGKEQQLAFLENVKRSLTQGRLWKPSFLKNPGFLKDDLRNPPNPSESLSSNSPSSQVPEDGLSPSEPLNIYEDDPVDSDCDTDTTTDDEYYLDENDKESEL

SEQ ID NO: 29128 - protein, 1733 aa, Homo sapiens
  Payload ID: 5677
  Gene Symbol: EXPH5
  Gene Name: exophilin 5
  ENSP ID: ENSP00000432683
MLKQPLTYRLSKEMAKNDPIELPTSRSKNVTNQKKPTPFSSRMSFRSSFASLFSFRKSGKETSKLPSLGQKGCDGHAGPPMPVRGAAVQAKIYNSPLENHLVDSTFVPKPAVMREESGMPPPWDASLLENEFFQVLDDLDSKLAQEQSASSVNTRTPLNYGSRTQFGHFYSSGNRHGNITERHKKHYNETSNMSIYDILRPGTPREGFKTFSPRTSTIYDMYRTREPRVFKEDYVQKNTFGSTSLCFDSRQRSALPATGHFTARSLHFPATTQSKSGFIPPRHQQSPKRTPLSSIIWNRSDSSRDRENQEEFLRAPSPMEIDPADKYVYPRGFQENKRYESYHSQNVYQRVSLNAPMENAMSPDTFENSENMPFYHQSNTFTRSFFSNTFGRSGEQRRFGQGPFWGQEKGHSFWSDFHRSRKSFSSSDRDFEMISMEANSVSAIHGHNVSSEHWESFSSGYGTDVSRGQEEPHPWQFDFQRSTLDSMVVSHGNETQLTPHFGTPNVCSMTGSSYHVKSSELVSQQDSSPVEVHINKEASSFGIAQTLASSFKTSFSQISDDRRNPQSPNLQNPTVTLQKIFPNKPASHPMRSHTEVTVTSSNSVDSLPLAKSQPNILVTEVNNEKDLNESISEEDKQLSKMDQTNKAGEIPQPVSQTGISNSLPDFQNPLSQDSAKSNGFGFNASTIISSKKSPRVFSRKDTSKMYIPHTDKSNDIKQDKRFTENRKLGSTASLPFIQEHRTPPSFPRTDQGCHQELTVNNEDISRIITNNHWSSALTDTQNAQYSKCKLTPGHKTSCDSLDLSSAALPDSSPSKNSSLDAPVVPSTTVFSRRSPSDKDPSLGEREEKDNAGKNQKNQFIVSHSENQERNDSPVPTHDEVVDVKCHSHSPFRNERGKGKIRHHISCIEKLSKTESISVPTSDHRSLIEANQSNSKVSELDTIYCTLPRKSSSFLIHGRQSGSKIMAASLRNGPPPFQIKNNVEDAMGNYMLNKFSPSSPESANECSKVLSDSALEAPEATERMTNVKSSGSTSVRKGPLPFLINRAMSCPSGEPHASTGREGRKKPLTSGMDASELTPRAWERIISPVESDSSVRDCSLTKRQHQKENFQEYTEKEGKMAASRRSVFALSNEDPLPFCSDLSGKERGKTLHKVKTTSTFSVSGDEDNVKCLEVVSIYYTLPRKPSKKFCNLLQQYTQNTNLLIESPQVETETFPNALEKDKQNYSTREQSGTPSCENLKMSVNSDQTLTTENMTAFRLSNRGPLAPTLQEMASVEAAVSLPEEESKAREIFSDNLAKTPLGDSENKKERGKKLQSETLHTSLMLQRKNVSEEKSENCQQSINSSNSGPSSLPALSEVNIGNSQTRRSSWECTGSGRAIPFTGSGKCPQKDHTSTAVGDGSSGSQPREGRGDIGTNCQKMTNKTLSHSESQVFALTPALHKLQLGEETQSDEPNLESLQSEPRELPQRSQEANMTESRKAEDEMQKSAWDQPSLPEGNKNKTNLDDLVKGENRSSVKHRLAAMSKASRKFPAKDVSPRRHVATIFPQSGSRSGFDHLSLGTVECNPLFPEPTPKSAESIGESRLSENGKHVKKSENLLPITVLPNREPSTHVSNQKSNSISQRHQNEFKNVSESPSKHENSKDVTAAQNLVRESGAPSPITFTSLREAEFSDNQRRLSPPFPLEPAQKSRVSSPLASFLQQQRSASSLEWEPEPHLYRSKSLKSINVHGDLLRK

SEQ ID NO: 29129 - protein, 79 aa, Homo sapiens
  Payload ID: 5677
  Gene Symbol: EXPH5
  Gene Name: exophilin 5
  ENSP ID: ENSP00000433909
MLKQPLTYRLSKEMAKNDPIELPTSRSKNVTNQKKPTPFSSRMSFRSSFASLFSFRKSGKETSKLPSLGQKGCDGHAGP

SEQ ID NO: 29130 - protein, 1192 aa, Homo sapiens
  Payload ID: 5677
  Gene Symbol: EXPH5
  Gene Name: exophilin 5
  ENSP ID: ENSP00000446434
MREESGMPPPWDASLLENEFFQVLDDLDSKLAQEQSASSVNTRTPLNYGSRTQFGHFYSSGNRHGNITERHKKHYNETSNMSIYDILRPGTPREGFKTFSPRTSTIYDMYRTREPRVFKEDYVQKNTFGSTSLCFDSRQRSALPATGHFTARSLHFPATTQSKSGFIPPRHQQSPKRTPLSSIIWNRSDSSRDRENQEEFLRAPSPMEIDPADKYVYPRGFQENKRYESYHSQNVYQRVSLNAPMENAMSPDTFENSENMPFYHQSNTFTRSFFSNTFGRSGEQRRFGQGPFWGQEKGHSFWSDFHRSRKSFSSSDRDFEMISMEANSVSAIHGHNVSSEHWESFSSGYGTDVSRGQEEPHPWQFDFQRSTLDSMVVSHGNETQLTPHFGTPNVCSMTGSSYHVKSSELVSQQDSSPVEVHINKEASSFGIAQTLASSFKTSFSQISDDRRNPQSPNLQNPTVTLQKIFPNKPASHPMRSHTEVTVTSSNSVDSLPLAKSQPNILVTEVNNEKDLNESISEEDKQLSKMDQTNKAGEIPQPVSQTGISNSLPDFQNPLSQDSAKSNGFGFNASTIISSKKSPRVFSRKDTSKMYIPHTDKSNDIKQDKRFTENRKLGSTASLPFIQEHRTPPSFPRTDQGCHQELTVNNEDISRIITNNHWSSALTDTQNAQYSKCKLTPGHKTSCDSLDLSSAALPDSSPSKNSSLDAPVVPSTTVFSRRSPSDKDPSLGEREEKDNAGKNQKNQFIVSHSENQERNDSPVPTHDEVVDVKCHSHSPFRNERGKGKIRHHISCIEKLSKTESISVPTSDHRSLIEANQSNSKVSELDTIYCTLPRKSSSFLIHGRQSGSKIMAASLRNGPPPFQIKNNVEDAMGNYMLNKFSPSSPESANECSKVLSDSALEAPEATERMTNVKSSGSTSVRKGPLPFLINRAMSCPSGEPHASTGREGRKKPLTSGMDASELTPRAWERIISPVESDSSVRDCSLTKRQHQKENFQEYTEKEGKMAASRRSVFALSNEDPLPFCSDLSGKERGKTLHKVKTTSTFSVSGDEDNVKCLEVVSIYYTLPRKPSKKFCNLLQQYTQNTNLLIESPQVETETFPNALEKDKQNYSTREQSGTPSCENLKMSVNSDQTLTTENMTAFRLSNRGPLAPTLQEMASVEAAVSLPEEESKAREIFSDNLAKTPLGDSE

SEQ ID NO: 29131 - protein, 544 aa, Homo sapiens
  Payload ID: 5677
  Gene Symbol: EXPH5
  Gene Name: exophilin 5
  ENSP ID: ENSP00000482691
MPVRGAAVQAKIYNSPLENHLVDSTFVPKPAVMREESGMPPPWDASLLENEFFQVLDDLDSKLAQEQSASSVNTRTPLNYGSRTQFGHFYSSGNRHGNITERHKKHYNETSNMSIYDILRPGTPREGFKTFSPRTSTIYDMYRTREPRVFKEDYVQKNTFGSTSLCFDSRQRSALPATGHFTARSLHFPATTQSKSGFIPPRHQQSPKRTPLSSIIWNRSDSSRDRENQEEFLRAPSPMEIDPADKYVYPRGFQENKRYESYHSQNVYQRVSLNAPMENAMSPDTFENSENMPFYHQSNTFTRSFFSNTFGRSGEQRRFGQGPFWGQEKGHSFWSDFHRSRKSFSSSDRDFEMISMEANSVSAIHGHNVSSEHWESFSSGYGTDVSRGQEEPHPWQFDFQRSTLDSMVVSHGNETQLTPHFGTPNVCSMTGSSYHVKSSELVSQQDSSPVEVHINKEASSFGIAQTLASSFKTSFSQISDDRRNPQSPNLQNPTVTLQKIFPNKPASHPMRSHTEVTVTSSNSVDSLPLAKSQPNILVTEVNNE

SEQ ID NO: 29132 - protein, 349 aa, Homo sapiens
  Payload ID: 5678
  Gene Symbol: ERI1
  Gene Name: exoribonuclease 1
  Uniprot ID: Q8IV48
  ENSP ID: ENSP00000250263
MEDPQSKEPAGEAVALALLESPRPEGGEEPPRPSPEETQQCKFDGQETKGSKFITSSASDFSDPVYKEIAITNGCINRMSKEELRAKLSEFKLETRGVKDVLKKRLKNYYKKQKLMLKESNFADSYYDYICIIDFEATCEEGNPPEFVHEIIEFPVVLLNTHTLEIEDTFQQYVRPEINTQLSDFCISLTGITQDQVDRADTFPQVLKKVIDWMKLKELGTKYKYSLLTDGSWDMSKFLNIQCQLSRLKYPPFAKKWINIRKSYGNFYKVPRSQTKLTIMLEKLGMDYDGRPHCGLDDSKNIARIAVRMLQDGCELRINEKMHAGQLMSVSSSLPIEGTPPPQMPHFRK

SEQ ID NO: 29133 - protein, 44 aa, Homo sapiens
  Payload ID: 5678
  Gene Symbol: ERI1
  Gene Name: exoribonuclease 1
  ENSP ID: ENSP00000429043
MEDPQSKEPAGEAVALALLESPRPEGGEEPPRPSPECPSLPCVL

SEQ ID NO: 29134 - protein, 349 aa, Homo sapiens; identical to SEQ ID NO: 29132
  Payload ID: 5678
  Gene Symbol: ERI1
  Gene Name: exoribonuclease 1
  Uniprot ID: Q8IV48
  ENSP ID: ENSP00000429615

SEQ ID NO: 29135 - protein, 349 aa, Homo sapiens; identical to SEQ ID NO: 29132
  Payload ID: 5678
  Gene Symbol: ERI1
  Gene Name: exoribonuclease 1
  Uniprot ID: Q8IV48
  ENSP ID: ENSP00000430190

SEQ ID NO: 29136 - protein, 99 aa, Homo sapiens
  Payload ID: 5678
  Gene Symbol: ERI1
  Gene Name: exoribonuclease 1
  ENSP ID: ENSP00000430651
MEDPQSKEPAGEAVALALLESPRPEGGEEPPRPSPEETQQCKFDGQETKGSKFITSSASDFSDPVYKEIAITNGCINRMSKEELRAKLSEFKLETRYNL

SEQ ID NO: 29137 - protein, 165 aa, Homo sapiens
  Payload ID: 5679
  Gene Symbol: EXOSC1
  Gene Name: exosome component 1
  ENSP ID: ENSP00000359921
  MOD_RES (1)..(1): Any amino acid
XFHPGFGTAAIMAPPVRYCIPGERLCNLEEGSPGSGTYTRHGYIFSSLAGCLMKSSENGALPVVSVVRETESQLLPDVGAIVTCKVEIYKSFRPGDIVLAKVISLGDAQSNYLLTTAENELGVVVAHSESGIQMVPISWCEMQCPKTHTKEFRKVARVQPEFLQT

SEQ ID NO: 29138 - protein, 170 aa, Homo sapiens
  Payload ID: 5679
  Gene Symbol: EXOSC1
  Gene Name: exosome component 1
  ENSP ID: ENSP00000359922
MAPPVRYCIPGERLCNLEEGSPGSGTYTRHGYIFSSLAGCLMKSSENGAVSSINSRFAKVHILYVGSMPLKNSFRGTIRKEDVRATEKDKVEIYKSFRPGDIVLAKVISLGDAQSNYLLTTAENELGVVVAHSESGIQMVPISWCEMQCPKTHTKEFRKVARVQPEFLQT

SEQ ID NO: 29139 - protein, 178 aa, Homo sapiens
  Payload ID: 5679
  Gene Symbol: EXOSC1
  Gene Name: exosome component 1
  ENSP ID: ENSP00000359923
MAPPVRYCIPGERLCNLEEGSPGSGTYTRHGYIFSSLAGCLMKSSENGALPVVSVVRETESQLLPDVGAIVTCKVSSINSRFAKVHILYVGSMPLKNSFRGTIRKEDVRATEKDKISLGDAQSNYLLTTAENELGVVVAHSESGIQMVPISWCEMQCPKTHTKEFRKVARVQPEFLQT

SEQ ID NO: 29140 - protein, 195 aa, Homo sapiens
  Payload ID: 5679
  Gene Symbol: EXOSC1
  Gene Name: exosome component 1
  Uniprot ID: Q9Y3B2
  ENSP ID: ENSP00000359939
MAPPVRYCIPGERLCNLEEGSPGSGTYTRHGYIFSSLAGCLMKSSENGALPVVSVVRETESQLLPDVGAIVTCKVSSINSRFAKVHILYVGSMPLKNSFRGTIRKEDVRATEKDKVEIYKSFRPGDIVLAKVISLGDAQSNYLLTTAENELGVVVAHSESGIQMVPISWCEMQCPKTHTKEFRKVARVQPEFLQT

SEQ ID NO: 29141 - protein, 143 aa, Homo sapiens
  Payload ID: 5679
  Gene Symbol: EXOSC1
  Gene Name: exosome component 1
  ENSP ID: ENSP00000473303
  MOD_RES (1)..(1): Any amino acid
XGERLCNLEEGSPGSGTYTRHGYIFSSLAGCLMKSSENGALPVVSVVRETESQLLPDVGAIVTCKVSSINSRFAKVHILYVGSMPLKNSFRGTIRKEDVRATEKDKVVGIQMVPISWCEMQCPKTHTKEFRKVARVQPEFLQT

SEQ ID NO: 29142 - protein, 139 aa, Homo sapiens
  Payload ID: 5679
  Gene Symbol: EXOSC1
  Gene Name: exosome component 1
  ENSP ID: ENSP00000473660
MAPPVRYCIPGERLCNLEEGSPGSGTYTRHGYIFSSLAGCLMKSSENGALPVVSVVRETESQLLPDVGAIVTCKVSSINSRFAKVHILYVGSMPLKNSFRGTIRKEDVRATEKDKVSRWFPSAGVRCSALRPTLKNSGK

SEQ ID NO: 29143 - protein, 860 aa, Homo sapiens
  Payload ID: 5680
  Gene Symbol: EXOSC10
  Gene Name: exosome component 10
  Uniprot ID: Q01780
  ENSP ID: ENSP00000307307
MAPPSTREPRVLSATSATKSDGEMVLPGFPDADSFVKFALGSVVAVTKASGGLPQFGDEYDFYRSFPGFQAFCETQGDRLLQCMSRVMQYHGCRSNIKDRSKVTELEDKFDLLVDANDVILERVGILLDEASGVNKNQQPVLPAGLQVPKTVVSSWNRKAAEYGKKAKSETFRLLHAKNIIRPQLKFREKIDNSNTPFLPKIFIKPNAQKPLPQALSKERRERPQDRPEDLDVPPALADFIHQQRTQQVEQDMFAHPYQYELNHFTPADAVLQKPQPQLYRPIEETPCHFISSLDELVELNEKLLNCQEFAVDLEHHSYRSFLGLTCLMQISTRTEDFIIDTLELRSDMYILNESLTDPAIVKVFHGADSDIEWLQKDFGLYVVNMFDTHQAARLLNLGRHSLDHLLKLYCNVDSNKQYQLADWRIRPLPEEMLSYARDDTHYLLYIYDKMRLEMWERGNGQPVQLQVVWQRSRDICLKKFIKPIFTDESYLELYRKQKKHLNTQQLTAFQLLFAWRDKTARREDESYGYVLPNHMMLKIAEELPKEPQGIIACCNPVPPLVRQQINEMHLLIQQAREMPLLKSEVAAGVKKSGPLPSAERLENVLFGPHDCSHAPPDGYPIIPTSGSVPVQKQASLFPDEKEDNLLGTTCLIATAVITLFNEPSAEDSKKGPLTVAQKKAQNIMESFENPFRMISNRWKLAQVQVQKDSKEAVKKKAAEQTAAREQAKEACKAAAEQAISVRQQVVLENAAKKRERATSDPRTTEQKQEKKRLKISKKPKDPEPPEKEFTPYDYSQSDFKAFAGNSKSKVSSQFDPNKQTPSGKKCIAAKKIKQSVGNKSMSFPTGKSDRGFRYNWPQR

SEQ ID NO: 29144 - protein, 885 aa, Homo sapiens
  Payload ID: 5680
  Gene Symbol: EXOSC10
  Gene Name: exosome component 10
  Uniprot ID: Q01780
  ENSP ID: ENSP00000366135
MAPPSTREPRVLSATSATKSDGEMVLPGFPDADSFVKFALGSVVAVTKASGGLPQFGDEYDFYRSFPGFQAFCETQGDRLLQCMSRVMQYHGCRSNIKDRSKVTELEDKFDLLVDANDVILERVGILLDEASGVNKNQQPVLPAGLQVPKTVVSSWNRKAAEYGKKAKSETFRLLHAKNIIRPQLKFREKIDNSNTPFLPKIFIKPNAQKPLPQALSKERRERPQDRPEDLDVPPALADFIHQQRTQQVEQDMFAHPYQYELNHFTPADAVLQKPQPQLYRPIEETPCHFISSLDELVELNEKLLNCQEFAVDLEHHSYRSFLGLTCLMQISTRTEDFIIDTLELRSDMYILNESLTDPAIVKVFHGADSDIEWLQKDFGLYVVNMFDTHQAARLLNLGRHSLDHLLKLYCNVDSNKQYQLADWRIRPLPEEMLSYARDDTHYLLYIYDKMRLEMWERGNGQPVQLQVVWQRSRDICLKKFIKPIFTDESYLELYRKQKKHLNTQQLTAFQLLFAWRDKTARREDESYGYVLPNHMMLKIAEELPKEPQGIIACCNPVPPLVRQQINEMHLLIQQAREMPLLKSEVAAGVKKSGPLPSAERLENVLFGPHDCSHAPPDGYPIIPTSGSVPVQKQASLFPDEKEDNLLGTTCLIATAVITLFNEPSAEDSKKGPLTVAQKKAQNIMESFENPFRMFLPSLGHRAPVSQAAKFDPSTKIYEISNRWKLAQVQVQKDSKEAVKKKAAEQTAAREQAKEACKAAAEQAISVRQQVVLENAAKKRERATSDPRTTEQKQEKKRLKISKKPKDPEPPEKEFTPYDYSQSDFKAFAGNSKSKVSSQFDPNKQTPSGKKCIAAKKIKQSVGNKSMSFPTGKSDRGFRYNWPQR

SEQ ID NO: 29145 - protein, 124 aa, Homo sapiens
  Payload ID: 5680
  Gene Symbol: EXOSC10
  Gene Name: exosome component 10
  ENSP ID: ENSP00000465008
MAPPSTREPRVLSATSATKSDGEMVLPGFPDADSFVKFALGSVVAVTKASGGLPQFGDEYDFYRSFPGFQAFCETQGDRLLQCMSRVMQYHGCRSNIKDRSKVTELEDKFDLLVDANDVILERV

SEQ ID NO: 29146 - protein, 200 aa, Homo sapiens
  Payload ID: 5681
  Gene Symbol: EXOSC2
  Gene Name: exosome component 2
  ENSP ID: ENSP00000361425
MAMEMRLPVARKPLSERLGRDTKKHLVVPGDTITTDTGFMRGHGTYMGEEKLIASVAGSVERVNKLICVKALKTRYIGEVGDIVVGRITEVQQKRWKVETNSRLDSVLLLSSMNLPGGELRRRSAEDELAMRGFLQEGDLISAEVQAVFSDGAVSLHTRSLKYGKTHFHDLPCGASVILGNNGFIWIYPTPEHKEEEAGG

SEQ ID NO: 29147 - protein, 263 aa, Homo sapiens
  Payload ID: 5681
  Gene Symbol: EXOSC2
  Gene Name: exosome component 2
  Uniprot ID: Q13868
  ENSP ID: ENSP00000361426
MAMEMRLPVARKPLSERLGRDTKKHLVVPGDTITTDTGFMRGHGTYMGEEKLIASVAGSVERVNKLICVKALKTRYIGEVGDIVVGRITERRRSAEDELAMRGFLQEGDLISAEVQAVFSDGAVSLHTRSLKYGKLGQGVLVQVSPSLVKRQKTHFHDLPCGASVILGNNGFIWIYPTPEHKEEEAGGFIANLEPVSLADREVISRLRNCIISLVTQRMMLYDTSILYCYEASLPHQIKDILKPEIMEEIVMETRQRLLEQEG

SEQ ID NO: 29148 - protein, 285 aa, Homo sapiens
  Payload ID: 5681
  Gene Symbol: EXOSC2
  Gene Name: exosome component 2
  ENSP ID: ENSP00000361427
MAMEMRLPVARKPLSERLGRDTKKHLVVPGDTITTDTGFMRGHGTYMGEEKLIASVAGSVERVNKLICVKALKTRYIGEVGDIVVGRITEVQQKRWKVETNSRLDSVLLLSSMNLPGGELRRRSAEDELAMRGFLQEGDLISAEVQAVFSDGAVSLHTRSLKYGKVSPSLVKRQKTHFHDLPCGASVILGNNGFIWIYPTPEHKEEEAGGFIANLEPVSLADREVISRLRNCIISLVTQRMMLYDTSILYCYEASLPHQIKDILKPEIMEEIVMETRQRLLEQEG

SEQ ID NO: 29149 - protein, 293 aa, Homo sapiens
  Payload ID: 5681
  Gene Symbol: EXOSC2
  Gene Name: exosome component 2
  Uniprot ID: Q13868
  ENSP ID: ENSP00000361433
MAMEMRLPVARKPLSERLGRDTKKHLVVPGDTITTDTGFMRGHGTYMGEEKLIASVAGSVERVNKLICVKALKTRYIGEVGDIVVGRITEVQQKRWKVETNSRLDSVLLLSSMNLPGGELRRRSAEDELAMRGFLQEGDLISAEVQAVFSDGAVSLHTRSLKYGKLGQGVLVQVSPSLVKRQKTHFHDLPCGASVILGNNGFIWIYPTPEHKEEEAGGFIANLEPVSLADREVISRLRNCIISLVTQRMMLYDTSILYCYEASLPHQIKDILKPEIMEEIVMETRQRLLEQEG

SEQ ID NO: 29150 - protein, 237 aa, Homo sapiens
  Payload ID: 5681
  Gene Symbol: EXOSC2
  Gene Name: exosome component 2
  ENSP ID: ENSP00000418463
  MOD_RES (1)..(1): Any amino acid
XRLPVARKPLSERLGRDTKKHLVVPGDTITTDTGFMRGHGTYMGEEKLIASVAGSVERVNKLICVKALKTRYIGEVGDIVVGRITEVQQKRWKVETNSRLDSVLLLSSMNLPGGELRRRSAEDELAMRGFLQEGDLISGVLVQVSPSLVKRQKTHFHDLPCGASVILGNNGFIWIYPTPEHKEEEAGGFIANLEPVSLADREVISRLRNCIISLVTQRMMLYDTSILYCYEASLPHQ

SEQ ID NO: 29151 - protein, 267 aa, Homo sapiens
  Payload ID: 5681
  Gene Symbol: EXOSC2
  Gene Name: exosome component 2
  Uniprot ID: Q13868
  ENSP ID: ENSP00000444917
MAMEMRLPVARKPLSERLGRDTKKHLVVPGDTITTDTGFMRGHGTYMGEEKLIASVAGSVERVNKLICVKALKTRYIGEVGDIVVGRITEVQQKRWKVETNSRLDSVLLLSSMNLPGGELRRRSAEDELAMRGFLQEGDLISGVLVQVSPSLVKRQKTHFHDLPCGASVILGNNGFIWIYPTPEHKEEEAGGFIANLEPVSLADREVISRLRNCIISLVTQRMMLYDTSILYCYEASLPHQIKDILKPEIMEEIVMETRQRLLEQEG

SEQ ID NO: 29152 - protein, 275 aa, Homo sapiens
  Payload ID: 5682
  Gene Symbol: EXOSC3
  Gene Name: exosome component 3
  Uniprot ID: Q9NQT5
  ENSP ID: ENSP00000323046
MAEPASVAAESLAGSRARAARTVLGQVVLPGEELLLPEQEDAEGPGGAVERPLSLNARACSRVRVVCGPGLRRCGDRLLVTKCGRLRHKEPGSGSGGGVYWVDSQQKRYVPVKGDHVIGIVTAKSGDIFKVDVGGSEPASLSYLSFEGATKRNRPNVQVGDLIYGQFVVANKDMEPEMVCIDSCGRANGMGVIGQDGLLFKVTLGLIRKLLAPDCEIIQEVGKLYPLEIVFGMNGRIWVKAKTIQQTLILANILEACEHMTSDQRKQIFSRLAES

SEQ ID NO: 29153 - protein, 164 aa, Homo sapiens
  Payload ID: 5682
  Gene Symbol: EXOSC3
  Gene Name: exosome component 3
  Uniprot ID: Q9NQT5
  ENSP ID: ENSP00000379775
MAEPASVAAESLAGSRARAARTVLGQVVLPGEELLLPEQEDAEGPGGAVERPLSLNARACSRVRVVCGPGLRRCGDRLLVTKCGRLRHKEPGSGSGGGVYWVDSQQKRYVPVKGDHVIGIVTAKSGDIFKVDVGGSEPASLSYLSFEGATKRNRPNVQAISSRL

SEQ ID NO: 29154 - protein, 164 aa, Homo sapiens; identical to SEQ ID NO: 29153
  Payload ID: 5682
  Gene Symbol: EXOSC3
  Gene Name: exosome component 3
  Uniprot ID: Q9NQT5
  ENSP ID: ENSP00000418422

SEQ ID NO: 29155 - protein, 245 aa, Homo sapiens
  Payload ID: 5683
  Gene Symbol: EXOSC4
  Gene Name: exosome component 4
  Uniprot ID: Q9NPD3
  ENSP ID: ENSP00000315476
MAGLELLSDQGYRVDGRRAGELRKIQARMGVFAQADGSAYIEQGNTKALAVVYGPHEIRGSRARALPDRALVNCQYSSATFSTGERKRRPHGDRKSCEMGLQLRQTFEAAILTQLHPRSQIDIYVQVLQADGGTYAACVNAATLAVLDAGIPMRDFVCACSAGFVDGTALADLSHVEEAAGGPQLALALLPASGQIALLEMDARLHEDHLERVLEAAAQAARDVHTLLDRVVRQHVREASILLGD

SEQ ID NO: 29156 - protein, 156 aa, Homo sapiens
  Payload ID: 5683
  Gene Symbol: EXOSC4
  Gene Name: exosome component 4
  ENSP ID: ENSP00000432661
MAGLELLSDQGYRVDGRRAGELRKIQARMGVFAQADGSAYIEQGNTKALAVVYGPHEIRGSRARALPDRALVNCQYSSATFSTGATGRWWDLCSLCECSHAGSAGCRDTHERLCVCVLSWLRGRHSPGGPQPCGGSSWWPPAGPGPAASLRTDCAA

SEQ ID NO: 29157 - protein, 261 aa, Homo sapiens
  Payload ID: 5683
  Gene Symbol: EXOSC4
  Gene Name: exosome component 4
  ENSP ID: ENSP00000436539
MFVNLGWQGMGQGWTQGSQLKGARGRHMQDRERKTGGFVLEVTQLPLAEALKVEGEADPQRTVECELEGVGLAHVSVLFQIRGSRARALPDRALVNCQYSSATFSTGERKRRPHGDRKSCEMGLQLRQTFEAAILTQLHPRSQIDIYVQVLQADGGTYAACVNAATLAVLDAGIPMRDFVCACSAGFVDGTALADLSHVEEAAGGPQLALALLPASGQIALLEMDARLHEDHLERVLEAAAQAARDVHTLLDRVVRQHVRE

SEQ ID NO: 29158 - protein, 235 aa, Homo sapiens
  Payload ID: 5684
  Gene Symbol: EXOSC5
  Gene Name: exosome component 5
  Uniprot ID: Q9NQT4
  ENSP ID: ENSP00000221233
MEEETHTDAKIRAENGTGSSPRGPGCSLRHFACEQNLLSRPDGSASFLQGDTSVLAGVYGPAEVKVSKEIFNKATLEVILRPKIGLPGVAEKSRERLIRNTCEAVVLGTLHPRTSITVVLQVVSDAGSLLACCLNAACMALVDAGVPMRALFCGVACALDSDGTLVLDPTSKQEKEARAVLTFALDSVERKLLMSSTKGLYSDTELQQCLAAAQAASQHVFRFYRESLQRRYSKS

SEQ ID NO: 29159 - protein, 197 aa, Homo sapiens
  Payload ID: 5684
  Gene Symbol: EXOSC5
  Gene Name: exosome component 5
  ENSP ID: ENSP00000471002
MEEETHTDAKIRAENGTGSSPRGPGCSLRHFACEQNLLSRPDGSASFLQGVAEKSRERLIRNTCEAVVLGTLHPRTSITVVLQVVSDAGSLLACCLNAACMALVDAGVPMRALFCGVACALDSDGTLVLDPTSKQEKEARAVLTFALDSVERKLLMSSTKGLYSDTELQQCLAAAQAASQHVFRFYRESLQRRYSKS

SEQ ID NO: 29160 - protein, 133 aa, Homo sapiens
  Payload ID: 5684
  Gene Symbol: EXOSC5
  Gene Name: exosome component 5
  ENSP ID: ENSP00000471557
MEEETHTDAKIRAENGTGSSPRGPGCSLRHFACEQNLLSRPDGSASFLQGDTSVLAGVYGPAEVKVSKEIFNKATLEVILRPKIGLPAGVSGWQSGLAFFPLESSIIPAGVAEKSRERLIRNTCEAVVLGTLH

SEQ ID NO: 29161 - protein, 62 aa, Homo sapiens
  Payload ID: 5684
  Gene Symbol: EXOSC5
  Gene Name: exosome component 5
  ENSP ID: ENSP00000472396
GCSLRHFACEQNLLSRPDGSASFLQGDTSVLAGVYGPAEVKVSKEIFNKATLEVILSPALPL

SEQ ID NO: 29162 - protein, 272 aa, Homo sapiens
  Payload ID: 5685
  Gene Symbol: EXOSC6
  Gene Name: exosome component 6
  Uniprot ID: Q5RKV6
  ENSP ID: ENSP00000398597
MPGDHRRIRGPEESQPPQLYAADEEEAPGTRDPTRLRPVYARAGLLSQAKGSAYLEAGGTKVLCAVSGPRQAEGGERGGGPAGAGGEAPAALRGRLLCDFRRAPFAGRRRRAPPGGCEERELALALQEALEPAVRLGRYPRAQLEVSALLLEDGGSALAAALTAAALALADAGVEMYDLVVGCGLSLAPGPAPTWLLDPTRLEEERAAAGLTVALMPVLNQVAGLLGSGEGGLTESWAEAVRLGLEGCQRLYPVLQQSLVRAARRRGAAAQP

SEQ ID NO: 29163 - protein, 291 aa, Homo sapiens [sequence omitted]

SEQ ID NO: 29164 - protein, 37 aa, Homo sapiens
  Payload ID: 5687
  Gene Symbol: EXOSC8
  Gene Name: exosome component 8
  ENSP ID: ENSP00000239893
MAAGFKKRTAVLMEENLVNSEPQLSTSVQLVPQMVLL

SEQ ID NO: 29165 - protein, 276 aa, Homo sapiens
  Payload ID: 5687
  Gene Symbol: EXOSC8
  Gene Name: exosome component 8
  Uniprot ID: Q96B26
  ENSP ID: ENSP00000374354
MAAGFKTVEPLEYYRRFLKENCRPDGRELGEFRTTTVNIGSISTADGSALVKLGNTTVICGVKAEFAAPSTDAPDKGYVVPNVDLPPLCSSRFRSGPPGEEAQVASQFIADVIENSQIIQKEDLCISPGKLVWVLYCDLICLDYDGNILDACTFALLAALKNVQLPEVTINEETALAEVNLKKKSYLNIRTHPVATSFAVFDDTLLIVDPTGEEEHLATGTLTIVMDEEGKLCCLHKPGGSGLTGAKLQDCMSRAVTRHKEVKKLMDEVIKSMKPK

SEQ ID NO: 29166 - protein, 69 aa, Homo sapiens
  Payload ID: 5687
  Gene Symbol: EXOSC8
  Gene Name: exosome component 8
  ENSP ID: ENSP00000419203
VWVLYCDLICLDYDGNILDACTFALLAALKNGGSGLTGAKLQDCMSRAVTRHKEVKKLMDEVIKSMKPK

SEQ ID NO: 29167 - protein, 439 aa, Homo sapiens
  Payload ID: 5688
  Gene Symbol: EXOSC9
  Gene Name: exosome component 9
  Uniprot ID: Q06265
  ENSP ID: ENSP00000243498
MKETPLSNCERRFLLRAIEEKKRLDGRQTYDYRNIRISFGTDYGCCIVELGKTRVLGQVSCELVSPKLNRATEGILFFNLELSQMAAPAFEPGRQSDLLVKLNRLMERCLRNSKCIDTESLCVVAGEKVWQIRVDLHLLNHDGNIIDAASIAAIVALCHFRRPDVSVQGDEVTLYTPEERDPVPLSIHHMPICVSFAFFQQGTYLLVDPNEREERVMDGLLVIAMNKHREICTIQSSGGIMLLKDQVLRCSKIAGVKVAEITELILKALENDQKVRKEGGKFGFAESIANQRITAFKMEKAPIDTSDVEEKAEEIIAEAEPPSEVVSTPVLWTPGTAQIGEGVENSWGDLEDSEKEDDEGGGDQAIILDGIKMDTGVEVSDIGSQDAPIILSDSEEEEMIILEPDKNPKKIRTQTTSAKQEKAPSKKPVKRRKKKRAAN

SEQ ID NO: 29168 - protein, 456 aa, Homo sapiens
  Payload ID: 5688
  Gene Symbol: EXOSC9
  Gene Name: exosome component 9
  Uniprot ID: Q06265
  ENSP ID: ENSP00000368984
MKETPLSNCERRFLLRAIEEKKRLDGRQTYDYRNIRISFGTDYGCCIVELGKTRVLGQVSCELVSPKLNRATEGILFFNLELSQMAAPAFEPGRQSDLLVKLNRLMERCLRNSKCIDTESLCVVAGEKVWQIRVDLHLLNHDGNIIDAASIAAIVALCHFRRPDVSVQGDEVTLYTPEERDPVPLSIHHMPICVSFAFFQQGTYLLVDPNEREERVMDGLLVIAMNKHREICTIQSSGGIMLLKDQVLRCSKIAGVKVAEITELILKALENDQKVRKEGGKFGFAESIANQRITAFKMEKAPIDTSDVEEKAEEIIAEAEPPSEVVSTPVLWTPGTAQIGEGVENSWGDLEDSEKEDDEGGGDQAIILDGIKMDTGVEVSDIGSQELGFHHVGQTGLEFLTSDAPIILSDSEEEEMIILEPDKNPKKIRTQTTSAKQEKAPSKKPVKRRKKKRAAN

SEQ ID NO: 29169 - protein, 86 aa, Homo sapiens
  Payload ID: 5688
  Gene Symbol: EXOSC9
  Gene Name: exosome component 9
  ENSP ID: ENSP00000421845
MKETPLSNCERRFLLRAIEEKKRLDGRQTYDYRNIRISFGTDYGCCIVELGKTRVLGQVSCELVSPKLNRATEGLANTCRPTFIKS

SEQ ID NO: 29170 - protein, 226 aa, Homo sapiens
  Payload ID: 5688
  Gene Symbol: EXOSC9
  Gene Name: exosome component 9
  ENSP ID: ENSP00000422205
MKETPLSNCERRFLLRAIEEKKRLDGRQTYDYRNIRISFGTDYGCCIVELGKTRVLGQVSCELVSPKLNRATEGILFFNLELSQMAAPAFEPGRQSDLLVKLNRLMERCLRNSKCIDTESLCVVAGEKYTPEERDPVPLSIHHMPICVSFAFFQQGTYLLVDPNEREERVMDGLLVIAMNKHREICTIQSSGGIMLLKDQVLRCSKIAGVKVAEITELILKALEND

SEQ ID NO: 29171 - protein, 242 aa, Homo sapiens
  Payload ID: 5688
  Gene Symbol: EXOSC9
  Gene Name: exosome component 9
  ENSP ID: ENSP00000423476
MKETPLSNCERRFLLRAIEEKKRLDGRQTYDYRNIRISFGTDYGCCIVELGKTRVLGQVSCELVSPKLNRATEGILFFNLELSQMAAPAFEPGRQSDLLVKLNRLMERCLRNSKCIDTESLCVVAGEKVWQIRVDLHLLNHDGNIIDAASIAAIVALCHFRRPDVSVQGDEVTLYTPEERDPVPLSIHHMPICVSFAFFQQGTYLLVDPNEREERVMDGLLVIAMNKHREICTIQSSGSEMQ

SEQ ID NO: 29172 - protein, 172 aa, Homo sapiens
  Payload ID: 5688
  Gene Symbol: EXOSC9
  Gene Name: exosome component 9
  ENSP ID: ENSP00000424504
  MOD_RES (1)..(1): Any amino acid
XSVQGDEVTLYTPEERDPVPLSIHHMPICVSFAFFQQGTYLLVDPNEREERVMDGLLVIAMNKHREICTIQSSGGIMLLKDQVLRCSKIAGVKVAEITELILKALENDQKVSVSTPVLWTPGTAQIGEGVENSWGDLEDSEKEDDEGGGDQAIILDGIKMDTGVEVSDIGSQ

SEQ ID NO: 29173 - protein, 423 aa, Homo sapiens
  Payload ID: 5688
  Gene Symbol: EXOSC9
  Gene Name: exosome component 9
  ENSP ID: ENSP00000425782
MNLCLQRLDGRQTYDYRNIRISFGTDYGCCIVELGKTRVLGQVSCELVSPKLNRATEGILFFNLELSQMAAPAFEPGRQSDLLVKLNRLMERCLRNSKCIDTESLCVVAGEKVWQIRVDLHLLNHDGNIIDAASIAAIVALCHFRRPDVSVQGDEVTLYTPEERDPVPLSIHHMPICVSFAFFQQGTYLLVDPNEREERVMDGLLVIAMNKHREICTIQSSGGIMLLKDQVLRCSKIAGVKVAEITELILKALENDQKVRKEGGKFGFAESIANQRITAFKMEKAPIDTSDVEEKAEEIIAEAEPPSEVVSTPVLWTPGTAQIGEGVENSWGDLEDSEKEDDEGGGDQAIILDGIKMDTGVEVSDIGSQDAPIILSDSEEEEMIILEPDKNPKKIRTQTTSAKQEKAPSKKPVKRRKKKRAAN

SEQ ID NO: 29174 - protein, 746 aa, Homo sapiens
  Payload ID: 5689
  Gene Symbol: EXT1
  Gene Name: exostosin glycosyltransferase 1
  Uniprot ID: Q16394
  ENSP ID: ENSP00000367446
MQAKKRYFILLSAGSCLALLFYFGGLQFRASRSHSRREEHSGRNGLHHPSPDHFWPRFPDALRPFVPWDQLENEDSSVHISPRQKRDANSSIYKGKKCRMESCFDFTLCKKNGFKVYVYPQQKGEKIAESYQNILAAIEGSRFYTSDPSQACLFVLSLDTLDRDQLSPQYVHNLRSKVQSLHLWNNGRNHLIFNLYSGTWPDYTEDVGFDIGQAMLAKASISTENFRPNFDVSIPLFSKDHPRTGGERGFLKFNTIPPLRKYMLVFKGKRYLTGIGSDTRNALYHVHNGEDVVLLTTCKHGKDWQKHKDSRCDRDNTEYEKYDYREMLHNATFCLVPRGRRLGSFRFLEALQAACVPVMLSNGWELPFSEVINWNQAAVIGDERLLLQIPSTIRSIHQDKILALRQQTQFLWEAYFSSVEKIVLTTLEIIQDRIFKHISRNSLIWNKHPGGLFVLPQYSSYLGDFPYYYANLGLKPPSKFTAVIHAVTPLVSQSQPVLKLLVAAAKSQYCAQIIVLWNCDKPLPAKHRWPATAVPVVVIEGESKVMSSRFLPYDNIITDAVLSLDEDTVLSTTEVDFAFTVWQSFPERIVGYPARSHFWDNSKERWGYTSKWTNDYSMVLTGAAIYHKYYHYLYSHYLPASLKNMVDQLANCEDILMNFLVSAVTKLPPIKVTQKKQYKETMMGQTSRASRWADPDHFAQRQSCMNTFASWFGYMPLIHSQMRLDPVLFKDQVSILRKKYRDIERL

SEQ ID NO: 29175 - protein, 207 aa, Homo sapiens
  Payload ID: 5689
  Gene Symbol: EXT1
  Gene Name: exostosin glycosyltransferase 1
  ENSP ID: ENSP00000400372
  MOD_RES (1)..(1): Any amino acid
XGQAMLAKASISTENFRPNFDVSIPLFSKDHPRTGGERGFLKFNTIPPLRKYMLVFKGKRYLTGIGSDTRNALYHVHNGEDVVLLTTCKHGKDWQKHKDSRCDRDNTEYEKYDYREMLHNATFCLVPRGRRLGSFRFLEALQAACVPVMLSNGWELPFSEVINWNQAAVIGDERLLLQTPISVGLVICYGGKHAERDSFYNQVYSSG

SEQ ID NO: 29176 - protein, 41 aa, Homo sapiens
  Payload ID: 5689
  Gene Symbol: EXT1
  Gene Name: exostosin glycosyltransferase 1
  ENSP ID: ENSP00000407299
MQAKKRYFILLSAGSCLALLFYFGGCLRPCDAQQWMGVAIL

SEQ ID NO: 29177 - protein, 718 aa, Homo sapiens
  Payload ID: 5690
  Gene Symbol: EXT2
  Gene Name: exostosin glycosyltransferase 2
  Uniprot ID: Q93063
  ENSP ID: ENSP00000342656
MCASVKYNIRGPALIPRMKTKHRIYYITLFSIVLLGLIATGMFQFWPHSIESSNDWNVEKRSIRDVPVVRLPADSPIPERGDLSCRMHTCFDVYRCGFNPKNKIKVYIYALKKYVDDFGVSVSNTISREYNELLMAISDSDYYTDDINRACLFVPSIDVLNQNTLRIKETAQAMAQLSRWDRGTNHLLFNMLPGGPPDYNTALDVPRDRALLAGGGFSTWTYRQGYDVSIPVYSPLSAEVDLPEKGPGPRQYFLLSSQVGLHPEYREDLEALQVKHGESVLVLDKCTNLSEGVLSVRKRCHKHQVFDYPQVLQEATFCVVLRGARLGQAVLSDVLQAGCVPVVIADSYILPFSEVLDWKRASVVVPEEKMSDVYSILQSIPQRQIEEMQRQARWFWEAYFQSIKAIALATLQIINDRIYPYAAISYEEWNDPPAVKWGSVSNPLFLPLIPPQSQGFTAIVLTYDRVESLFRVITEVSKVPSLSKLLVVWNNQNKNPPEDSLWPKIRVPLKVVRTAENKLSNRFFPYDEIETEAVLAIDDDIIMLTSDELQFGYEVWREFPDRLVGYPGRLHLWDHEMNKWKYESEWTNEVSMVLTGAAFYHKYFNYLYTYKMPGDIKNWVDAHMNCEDIAMNFLVANVTGKAVIKVTPRKKFKCPECTAIDGLSLDQTHMVERSECINKFASVFGTMPLKVVEHRADPVLYKDDFPEKLKSFPNIGSL

SEQ ID NO: 29178 - protein, 728 aa, Homo sapiens
  Payload ID: 5690
  Gene Symbol: EXT2
  Gene Name: exostosin glycosyltransferase 2
  Uniprot ID: Q93063
  ENSP ID: ENSP00000351509
MCASVKYNIRGPALIPRMKTKHRIYYITLFSIVLLGLIATGMFQFWPHSIESSNDWNVEKRSIRDVPVVRLPADSPIPERGDLSCRMHTCFDVYRCGFNPKNKIKVYIYALKKYVDDFGVSVSNTISREYNELLMAISDSDYYTDDINRACLFVPSIDVLNQNTLRIKETAQAMAQLSRWDRGTNHLLFNMLPGGPPDYNTALDVPRDRALLAGGGFSTWTYRQGYDVSIPVYSPLSAEVDLPEKGPGPRQYFLLSSQVGLHPEYREDLEALQVKHGESVLVLDKCTNLSEGVLSVRKRCHKHQVFDYPQVLQEATFCVVLRGARLGQAVLSDVLQAGCVPVVIADSYILPFSEVLDWKRASVVVPEEKMSDVYSILQSIPQRQIEEMQRQLFMEPARRENWSAANHQMNSLIWPREQWDSQIINDRIYPYAAISYEEWNDPPAVKWGSVSNPLFLPLIPPQSQGFTAIVLTYDRVESLFRVITEVSKVPSLSKLLVVWNNQNKNPPEDSLWPKIRVPLKVVRTAENKLSNRFFPYDEIETEAVLAIDDDIIMLTSDELQFGYEVWREFPDRLVGYPGRLHLWDHEMNKWKYESEWTNEVSMVLTGAAFYHKYFNYLYTYKMPGDIKNWVDAHMNCEDIAMNFLVANVTGKAVIKVTPRKKFKCPECTAIDGLSLDQTHMVERSECINKFASVFGTMPLKVVEHRADPVLYKDDFPEKLKSFPNIGSL

SEQ ID NO: 29179 - protein, 751 aa, Homo sapiens
  Payload ID: 5690
  Gene Symbol: EXT2
  Gene Name: exostosin glycosyltransferase 2
  Uniprot ID: Q93063
  ENSP ID: ENSP00000379032
MSCASGSGGGLRHPLRCQKPWDEECEEEAVCVIMCASVKYNIRGPALIPRMKTKHRIYYITLFSIVLLGLIATGMFQFWPHSIESSNDWNVEKRSIRDVPVVRLPADSPIPERGDLSCRMHTCFDVYRCGFNPKNKIKVYIYALKKYVDDFGVSVSNTISREYNELLMAISDSDYYTDDINRACLFVPSIDVLNQNTLRIKETAQAMAQLSRWDRGTNHLLFNMLPGGPPDYNTALDVPRDRALLAGGGFSTWTYRQGYDVSIPVYSPLSAEVDLPEKGPGPRQYFLLSSQVGLHPEYREDLEALQVKHGESVLVLDKCTNLSEGVLSVRKRCHKHQVFDYPQVLQEATFCVVLRGARLGQAVLSDVLQAGCVPVVIADSYILPFSEVLDWKRASVVVPEEKMSDVYSILQSIPQRQIEEMQRQARWFWEAYFQSIKAIALATLQIINDRIYPYAAISYEEWNDPPAVKWGSVSNPLFLPLIPPQSQGFTAIVLTYDRVESLFRVITEVSKVPSLSKLLVVWNNQNKNPPEDSLWPKIRVPLKVVRTAENKLSNRFFPYDEIETEAVLAIDDDIIMLTSDELQFGYEVWREFPDRLVGYPGRLHLWDHEMNKWKYESEWTNEVSMVLTGAAFYHKYFNYLYTYKMPGDIKNWVDAHMNCEDIAMNFLVANVTGKAVIKVTPRKKFKCPECTAIDGLSLDQTHMVERSECINKFASVFGTMPLKVVEHRADPVLYKDDFPEKLKSFPNIGSL

SEQ ID NO: 29180 - protein, 718 aa, Homo sapiens; identical to SEQ ID NO: 29177
  Payload ID: 5690
  Gene Symbol: EXT2
  Gene Name: exostosin glycosyltransferase 2
  Uniprot ID: Q93063
  ENSP ID: ENSP00000431173

SEQ ID NO: 29181 - protein, 49 aa, Homo sapiens
  Payload ID: 5690
  Gene Symbol: EXT2
  Gene Name: exostosin glycosyltransferase 2
  ENSP ID: ENSP00000433827
MCASVKYNIRGPALIPRMKTKHRIYYITLFSIVLLGLIATGMFQFWPHS

SEQ ID NO: 29182 - protein, 112 aa, Homo sapiens
  Payload ID: 5690
  Gene Symbol: EXT2
  Gene Name: exostosin glycosyltransferase 2
  ENSP ID: ENSP00000434716
MCASVKYNIRGPALIPRMKTKHRIYYITLFSIVLLGLIATGMFQFWPHSIESSNDWNVEKRSIRDVPVVRLPADSPIPERGDLSCRMHTCFDVYRCGFNPKNKIKVYIYALK

SEQ ID NO: 29183 - protein, 676 aa, Homo sapiens
  Payload ID: 5691
  Gene Symbol: EXTL1
  Gene Name: exostosin-like glycosyltransferase 1
  Uniprot ID: Q92935
  ENSP ID: ENSP00000363398
MQSWRRRKSLWLALSASWLLLVLLGGFSLLRLALPPRPRPGASQGWPRWLDAELLQSFSQPGELPEDAVSPPQAPHGGSCNWESCFDTSKCRGDGLKVFVYPAVGTISETHRRILASIEGSRFYTFSPAGACLLLLLSLDAQTGECSSMPLQWNRGRNHLVLRLHPAPCPRTFQLGQAMVAEASPTVDSFRPGFDVALPFLPEAHPLRGGAPGQLRQHSPQPGVALLALEEERGGWRTADTGSSACPWDGRCEQDPGPGQTQRQETLPNATFCLISGHRPEAASRFLQALQAGCIPVLLSPRWELPFSEVIDWTKAAIVADERLPLQVLAALQEMSPARVLALRQQTQFLWDAYFSSVEKVIHTTLEVIQDRIFGTSAHPSLLWNSPPGALLALSTFSTSPQDFPFYYLQQGSRPEGRFSALIWVGPPGQPPLKLIQAVAGSQHCAQILVLWSNERPLPSRWPETAVPLTVIDGHRKVSDRFYPYSTIRTDAILSLDARSSLSTSEVDFAFLVWQSFPERMVGFLTSSHFWDEAHGGWGYTAERTNEFSMVLTTAAFYHRYYHTLFTHSLPKALRTLADEAPTCVDVLMNFIVAAVTKLPPIKVPYGKQRQEAAPLAPGGPGPRPKPPAPAPDCINQIAAAFGHMPLLSSRLRLDPVLFKDPVSVQRKKYRSLEKP

SEQ ID NO: 29184 - protein, 330 aa, Homo sapiens
  Payload ID: 5692
  Gene Symbol: EXTL2
  Gene Name: exostosin-like glycosyltransferase 2
  Uniprot ID: Q9UBQ6
  ENSP ID: ENSP00000359131
MRCCHICKLPGRVMGIRVLRLSLVVILVLLLVAGALTALLPSVKEDKMLMLRREIKSQGKSTMDSFTLIMQTYNRTDLLLKLLNHYQAVPNLHKVIVVWNNIGEKAPDELWNSLGPHPIPVIFKQQTANRMRNRLQVFPELETNAVLMVDDDTLISTPDLVFAFSVWQQFPDQIVGFVPRKHVSTSSGIYSYGSFEMQAPGSGNGDQYSMVLIGASFFNSKYLELFQRQPAAVHALIDDTQNCDDIAMNFIIAKHIGKTSGIFVKPVNMDNLEKETNSGYSGMWHRAEHALQRSYCINKLVNIYDSMPLRYSNIMISQFGFPYANYKRKI

SEQ ID NO: 29185 - protein, 330 aa, Homo sapiens; identical to SEQ ID NO: 29184
  Payload ID: 5692
  Gene Symbol: EXTL2
  Gene Name: exostosin-like glycosyltransferase 2
  Uniprot ID: Q9UBQ6
  ENSP ID: ENSP00000359132

SEQ ID NO: 29186 - protein, 117 aa, Homo sapiens
  Payload ID: 5692
  Gene Symbol: EXTL2
  Gene Name: exostosin-like glycosyltransferase 2
  ENSP ID: ENSP00000392255
MGIRVLRLSLVVILVLLLVAGALTALLPSVKEDKMLMLRREIKSQGKSTMDSFTLIMQTYNRTDLLLKLLNHYQAVPNLHKVIVVWNNIGEKAPDELWNSLGPHPIPVIFKQQTANR

SEQ ID NO: 29187 - protein, 266 aa, Homo sapiens
  Payload ID: 5692
  Gene Symbol: EXTL2
  Gene Name: exostosin-like glycosyltransferase 2
  ENSP ID: ENSP00000403363
MRTWNSGGTKCCHICKLPGRVMGIRVLRLSLVVILVLLLVAGALTALLPSVKEDKMLMLRREIKSQGKSTMDSFTLIMQTYNRTDLLLKLLNHYQAVPNLHKVIVVWNNIGEKAPDELWNSLGPHPIPVIFKQQTANRMRNRLQVFPELETNAVLMVDDDTLISTPDLVFAFSVWQQFPDQIVGFVPRKHVSTSSGIYSYGSFEMQAPGSGNGDQYSMVLIGASFFNSKYLELFQRQPAAVHALIDDTQNCDDIAMNFIIAKHIGK

SEQ ID NO: 29188 - protein, 147 aa, Homo sapiens
  Payload ID: 5692
  Gene Symbol: EXTL2
  Gene Name: exostosin-like glycosyltransferase 2
  ENSP ID: ENSP00000444385
MRCCHICKLPGRVMGIRVLRLSLVVILVLLLVAGALTALLPSVKEDKMLMLRREIKSQGKSTMDSFTLIMQTYNRTDLLLKLLNHYQAVPNLHKVIVVWNNIGEKAPDELWNSLGPHPIPVIFKQQTANRMRNRLQVFPELETNAIS

SEQ ID NO: 29189 - protein, 919 aa, Homo sapiens
  Payload ID: 5693
  Gene Symbol: EXTL3
  Gene Name: exostosin-like glycosyltransferase 3
  Uniprot ID: O43909
  ENSP ID: ENSP00000220562
MTGYTMLRNGGAGNGGQTCMLRWSNRIRLTWLSFTLFVILVFFPLIAHYYLTTLDEADEAGKRIFGPRVGNELCEVKHVLDLCRIRESVSEELLQLEAKRQELNSEIAKLNLKIEACKKSIENAKQDLLQLKNVISQTEHSYKELMAQNQPKLSLPIRLLPEKDDAGLPPPKATRGCRLHNCFDYSRCPLTSGFPVYVYDSDQFVFGSYLDPLVKQAFQATARANVYVTENADIACLYVILVGEMQEPVVLRPAELEKQLYSLPHWRTDGHNHVIINLSRKSDTQNLLYNVSTGRAMVAQSTFYTVQYRPGFDLVVSPLVHAMSEPNFMEIPPQVPVKRKYLFTFQGEKIESLRSSLQEARSFEEEMEGDPPADYDDRIIATLKAVQDSKLDQVLVEFTCKNQPKPSLPTEWALCGEREDRLELLKLSTFALIITPGDPRLVISSGCATRLFEALEVGAVPVVLGEQVQLPYQDMLQWNEAALVVPKPRVTEVHFLLRSLSDSDLLAMRRQGRFLWETYFSTADSIFNTVLAMIRTRIQIPAAPIREEAAAEIPHRSGKAAGTDPNMADNGDLDLGPVETEPPYASPRYLRNFTLTVTDFYRSWNCAPGPFHLFPHTPFDPVLPSEAKFLGSGTGFRPIGGGAGGSGKEFQAALGGNVPREQFTVVMLTYEREEVLMNSLERLNGLPYLNKVVVVWNSPKLPSEDLLWPDIGVPIMVVRTEKNSLNNRFLPWNEIETEAILSIDDDAHLRHDEIMFGFRVWREARDRIVGFPGRYHAWDIPHQSWLYNSNYSCELSMVLTGAAFFHKYYAYLYSYVMPQAIRDMVDEYINCEDIAMNFLVSHITRKPPIKVTSRWTFRCPGCPQALSHDDSHFHERHKCINFFVKVYGYMPLLYTQFRVDSVLFKTRLPHDKTKCFKFI

SEQ ID NO: 29190 - protein, 75 aa, Homo sapiens
  Payload ID: 5693
  Gene Symbol: EXTL3
  Gene Name: exostosin-like glycosyltransferase 3
  ENSP ID: ENSP00000428352
  MOD_RES (1)..(1): Any amino acid
XLDPLVKQAFQATARANVYVTENADIACLYVILVGEMQEPVVLRPAELEKQLYSLPHWRTDGHNHVIINLSRGPY

SEQ ID NO: 29191 - protein, 535 aa, Homo sapiens
  Payload ID: 5693
  Gene Symbol: EXTL3
  Gene Name: exostosin-like glycosyltransferase 3
  ENSP ID: ENSP00000428691
MLHKSEEGRVLVEFTCKNQPKPSLPTEWALCGEREDRLELLKLSTFALIITPGDPRLVISSGCATRLFEALEVGAVPVVLGEQVQLPYQDMLQWNEAALVVPKPRVTEVHFLLRSLSDSDLLAMRRQGRFLWETYFSTADSIFNTVLAMIRTRIQIPAAPIREEAAAEIPHRSGKAAGTDPNMADNGDLDLGPVETEPPYASPRYLRNFTLTVTDFYRSWNCAPGPFHLFPHTPFDPVLPSEAKFLGSGTGFRPIGGGAGGSGKEFQAALGGNVPREQFTVVMLTYEREEVLMNSLERLNGLPYLNKVVVVWNSPKLPSEDLLWPDIGVPIMVVRTEKNSLNNRFLPWNEIETEAILSIDDDAHLRHDEIMFGFRVWREARDRIVGFPGRYHAWDIPHQSWLYNSNYSCELSMVLTGAAFFHKYYAYLYSYVMPQAIRDMVDEYINCEDIAMNFLVSHITRKPPIKVTSRWTFRCPGCPQALSHDDSHFHERHKCINFFVKVYGYMPLLYTQFRVDSVLFKTRLPHDKTKCFKFI

SEQ ID NO: 29192 - protein, 201 aa, Homo sapiens
  Payload ID: 5693
  Gene Symbol: EXTL3
  Gene Name: exostosin-like glycosyltransferase 3
  ENSP ID: ENSP00000429627
  MOD_RES (1)..(1): Any amino acid
XLTYEREEVLMNSLERLNGLPYLNKVVVVWNSPKLPSEDLLWPDIGVPIMVVRTEKNSLNNRFLPWNEIETEAILSIDDDAHLRHDEIMFGFRVWREARDRIVGFPGRYHAWDIPHQSWLYNSNYSCELSMVLTGAAFFHKVTSRWTFRCPGCPQALSHDDSHFHERHKCINFFVKVYGYMPLLYTQFRVDSVLFKTRLPH

SEQ ID NO: 29193 - protein, 118 aa, Homo sapiens
  Payload ID: 5693
  Gene Symbol: EXTL3
  Gene Name: exostosin-like glycosyltransferase 3
  ENSP ID: ENSP00000430652
MFGFRVWREARDRIVGFPGRYHAWDIPHQSWLYNSNYSCELSMVLTGAAFFHKYYAYLYSYVMPQAIRDMVDEYINCEDIAMNFLVSHITRKPPIKVTSRWTFRCPGCPQALSHDDSH

SEQ ID NO: 29194 - protein, 137 aa, Homo sapiens
  Payload ID: 5693
  Gene Symbol: EXTL3
  Gene Name: exostosin-like glycosyltransferase 3
  ENSP ID: ENSP00000431013
MGENARHFDRRNEGVVRTEKNSLNNRFLPWNEIETEAILSIDDDAHLRHDEIMFGFRVWREARDRIVGFPGRYHAWDIPHQSWLYNSNYSCELSMVLTGAAFFHKYYAYLYSYVMPQAIRDMVDEYINCEDIAMNFL

SEQ ID NO: 29195 - protein, 1071 aa, Homo sapiens
  Payload ID: 5694
  Gene Symbol: XPO1
  Gene Name: exportin 1
  Uniprot ID: O14980
  ENSP ID: ENSP00000384863
MPAIMTMLADHAARQLLDFSQKLDINLLDNVVNCLYHGEGAQQRMAQEVLTHLKEHPDAWTRVDTILEFSQNMNTKYYGLQILENVIKTRWKILPRNQCEGIKKYVVGLIIKTSSDPTCVEKEKVYIGKLNMILVQILKQEWPKHWPTFISDIVGASRTSESLCQNNMVILKLLSEEVFDFSSGQITQVKSKHLKDSMCNEFSQIFQLCQFVMENSQNAPLVHATLETLLRFLNWIPLGYIFETKLISTLIYKFLNVPMFRNVSLKCLTEIAGVSVSQYEEQFVTLFTLTMMQLKQMLPLNTNIRLAYSNGKDDEQNFIQNLSLFLCTFLKEHDQLIEKRLNLRETLMEALHYMLLVSEVEETEIFKICLEYWNHLAAELYRESPFSTSASPLLSGSQHFDVPPRRQLYLPMLFKVRLLMVSRMAKPEEVLVVENDQGEVVREFMKDTDSINLYKNMRETLVYLTHLDYVDTERIMTEKLHNQVNGTEWSWKNLNTLCWAIGSISGAMHEEDEKRFLVTVIKDLLGLCEQKRGKDNKAIIASNIMYIVGQYPRFLRAHWKFLKTVVNKLFEFMHETHDGVQDMACDTFIKIAQKCRRHFVQVQVGEVMPFIDEILNNINTIICDLQPQQVHTFYEAVGYMIGAQTDQTVQEHLIEKYMLLPNQVWDSIIQQATKNVDILKDPETVKQLGSILKTNVRACKAVGHPFVIQLGRIYLDMLNVYKCLSENISAAIQANGEMVTKQPLIRSMRTVKRETLKLISGWVSRSNDPQMVAENFVPPLLDAVLIDYQRNVPAAREPEVLSTMAIIVNKLGGHITAEIPQIFDAVFECTLNMINKDFEEYPEHRTNFFLLLQAVNSHCFPAFLAIPPTQFKLVLDSIIWAFKHTMRNVADTGLQILFTLLQNVAQEEAAAQSFYQTYFCDILQHIFSVVTDTSHTAGLTMHASILAYMFNLVEEGKISTSLNPGNPVNNQIFLQEYVANLLKSAFPHLQDAQVKLFVTGLFSLNQDIPAFKEHLRDFLVQIKEFAGEDTSDLFLEEREIALRQADEEKHKRQMSVPGIFNPHEIPEEMCD

SEQ ID NO: 29196 - protein, 1071 aa, Homo sapiens; identical to SEQ ID NO: 29195
  Payload ID: 5694
  Gene Symbol: XPO1
  Gene Name: exportin 1
  Uniprot ID: O14980
  ENSP ID: ENSP00000385559

SEQ ID NO: 29197 - protein, 1071 aa, Homo sapiens; identical to SEQ ID NO: 29195
  Payload ID: 5694
  Gene Symbol: XPO1
  Gene Name: exportin 1
  Uniprot ID: O14980
  ENSP ID: ENSP00000385942

SEQ ID NO: 29198 - protein, 72 aa, Homo sapiens
  Payload ID: 5694
  Gene Symbol: XPO1
  Gene Name: exportin 1
  ENSP ID: ENSP00000388927
RMAQEVLTHLKEHPDAWTRVDTILEFSQNMNTKYYGLQILENVIKTRWKILPRNQCEDTETRMAQTLANFYQ

SEQ ID NO: 29199 - protein, 59 aa, Homo sapiens
  Payload ID: 5694
  Gene Symbol: XPO1
  Gene Name: exportin 1
  ENSP ID: ENSP00000390843
MPAIMTMLADHAARQLLDFSQKLDINLLDNVVNCLYHGEGAQQRMAQEVLTHLKEHPDA

SEQ ID NO: 29200 - protein, 100 aa, Homo sapiens
  Payload ID: 5694
  Gene Symbol: XPO1
  Gene Name: exportin 1
  ENSP ID: ENSP00000393484
MPAIMTMLADHAARQLLDFSQKLDINLLDNVVNCLYHGEGAQQRMAQEVLTHLKEHPDAWTRVDTILEFSQNMNTKYYGLQILENVIKTRWKILPRNQCE

SEQ ID NO: 29201 - protein, 94 aa, Homo sapiens
  Payload ID: 5694
  Gene Symbol: XPO1
  Gene Name: exportin 1
  ENSP ID: ENSP00000394951
MPAIMTMLADHAARQLLDFSQKLDINLLDNVVNCLYHGEGAQQRMAQEVLTHLKEHPDAWTRVDTILEFSQNMNTKYYGLQILENVIKTRWKIL

SEQ ID NO: 29202 - protein, 132 aa, Homo sapiens
  Payload ID: 5694
  Gene Symbol: XPO1
  Gene Name: exportin 1
  ENSP ID: ENSP00000406428
MPAIMTMLADHAARQLLDFSQKLDINLLDNVVNCLYHGEGAQQRMAQEVLTHLKEHPDAWTRVDTILEFSQNMNTKYYGLQILENVIKTRWKILPRNQCEGIKKYVVGLIIKTSSDPTCVEKEKVYIGKLNM

SEQ ID NO: 29203 - protein, 62 aa, Homo sapiens
  Payload ID: 5694
  Gene Symbol: XPO1
  Gene Name: exportin 1
  ENSP ID: ENSP00000406819
MPAIMTMLADHAARQLLDFSQKLDINLLDNVVNCLYHGEGAQQRMAQEVLTHLKEHPDAWTR

SEQ ID NO: 29204 - protein, 82 aa, Homo sapiens
  Payload ID: 5694
  Gene Symbol: XPO1
  Gene Name: exportin 1
  ENSP ID: ENSP00000407170
MPAIMTMLADHAARQLLDFSQKLDINLLDNVVNCLYHGEGAQQRMAQEVLTHLKEHPDAWTRVDTILEFSQNMNTKVSKWWF

SEQ ID NO: 29205 - protein, 95 aa, Homo sapiens
  Payload ID: 5694
  Gene Symbol: XPO1
  Gene Name: exportin 1
  ENSP ID: ENSP00000408190
MPAIMTMLADHAARQLLDFSQKLDINLLDNVVNCLYHGEGAQQRMAQEVLTHLKEHPDAWTRVDTILEFSQNMNTKYYGLQILENVIKTRWKILP

SEQ ID NO: 29206 - protein, 179 aa, Homo sapiens
  Payload ID: 5694
  Gene Symbol: XPO1
  Gene Name: exportin 1
  ENSP ID: ENSP00000413853
MPAIMTMLADHAARQLLDFSQKLDINLLDNVVNCLYHGEGAQQRMAQEVLTHLKEHPDAWTRVDTILEFSQNMNTKYYGLQILENVIKTRWKILPRNQCEGIKKYVVGLIIKTSSDPTCVEKEKVYIGKLNMILVQILKQEWPKHWPTFISDIVGASRTSESLCQNNMVILKLLSEEVF

SEQ ID NO: 29207 - protein, 1151 aa, Homo sapiens
  Payload ID: 5695
  Gene Symbol: XPO4
  Gene Name: exportin 4
  Uniprot ID: Q9C0E2
  ENSP ID: ENSP00000255305
MMAAALGPPEVIAQLENAAKVLMAPPSMVNNEQRQHAEHIFLSFRKSKSPFAVCKHILETSKVDYVLFQAATAIMEAVVREWILLEKGSIESLRTFLLTYVLQRPNLQKYVREQILLAVAVIVKRGSLDKSIDCKSIFHEVSQLISSGNPTVQTLACSILTALLSEFSSSSKTSNIGLSMEFHGNCKRVFQEEDLRQIFMLTVEVLQEFSRRENLNAQMSSVFQRYLALANQVLSWNFLPPNLGRHYIAMFESSQNVLLKPTESWRETLLDSRVMELFFTVHRKIREDSDMAQDSLQCLAQLASLHGPIFPDEGSQVDYLAHFIEGLLNTINGIEIEDSEAVGISSIISNLITVFPRNVLTAIPSELFSSFVNCLTHLTCSFGRSAALEEVLDKDDMVYMEAYDKLLESWLTLVQDDKHFHKGFFTQHAVQVFNSYIQCHLAAPDGTRNLTANGVASREEEEISELQEDDRDQFSDQLASVGMLGRIAAEHCIPLLTSLLEERVTRLHGQLQRHQQQLLASPGSSTVDNKMLDDLYEDIHWLILVTGYLLADDTQGETPLIPPEIMEYSIKHSSEVDINTTLQILGSPGEKASSIPGYNRTDSVIRLLSAILRVSEVESRAIRADLTHLLSPQMGKDIVWFLKRWAKTYLLVDEKLYDQISLPFSTAFGADTEGSQWIIGYLLQKVISNLSVWSSEQDLANDTVQLLVTLVERRERANLVIQCENWWNLAKQFASRSPPLNFLSSPVQRTLMKALVLGGFAHMDTETKQQYWTEVLQPLQQRFLRVINQENFQQMCQQEEVKQEITATLEALCGIAEATQIDNVAILFNFLMDFLTNCIGLMEVYKNTPETVNLIIEVFVEVAHKQICYLGESKAMNLYEACLTLLQVYSKNNLGRQRIDVTAEEEQYQDLLLIMELLTNLLSKEFIDFSDTDEVFRGHEPGQAANRSVSAADVVLYGVNLILPLMSQDLLKFPTLCNQYYKLITFICEIFPEKIPQLPEDLFKSLMYSLELGMTSMSSEVCQLCLEALTPLAEQCAKAQETDSPLFLATRHFLKLVFDMLVLQKHNTEMTTAAGEAFYTLVCLHQAEYSELVETLLSSQQDPVIYQRLADAFNKLTASSTPPTLDRKQKMAFLKSLEEFMANVGGLLCVK

SEQ ID NO: 29208 - protein, 1151 aa, Homo sapiens [sequence omitted]

SEQ ID NO: 29209 - protein, 1204 aa, Homo sapiens
  Payload ID: 5696
  Gene Symbol: XPO5
  Gene Name: exportin 5
  Uniprot ID: Q9HAV4
  ENSP ID: ENSP00000265351
MAMDQVNALCEQLVKAVTVMMDPNSTQRYRLEALKFCEEFKEKCPICVPCGLRLAEKTQVAIVRHFGLQILEHVVKFRWNGMSRLEKVYLKNSVMELIANGTLNILEEENHIKDALSRIVVEMIKREWPQHWPDMLIELDTLSKQGETQTELVMFILLRLAEDVVTFQTLPPQRRRDIQQTLTQNMERIFSFLLNTLQENVNKYQQVKTDTSQESKAQANCRVGVAALNTLAGYIDWVSMSHITAENCKLLEILCLLLNEQELQLGAAECLLIAVSRKGKLEDRKPLMVLFGDVAMHYILSAAQTADGGGLVEKHYVFLKRLCQVLCALGNQLCALLGADSDVETPSNFGKYLESFLAFTTHPSQFLRSSTQMTWGALFRHEILSRDPLLLAIIPKYLRASMTNLVKMGFPSKTDSPSCEYSRFDFDSDEDFNAFFNSSRAQQGEVMRLACRLDPKTSFQMAGEWLKYQLSTFLDAGSVNSCSAVGTGEGSLCSVFSPSFVQWEAMTLFLESVITQMFRTLNREEIPVNDGIELLQMVLNFDTKDPLILSCVLTNVSALFPFVTYRPEFLPQVFSKLFSSVTFETVEESKAPRTRAVRNVRRHACSSIIKMCRDYPQLVLPNFDMLYNHVKQLLSNELLLTQMEKCALMEALVLISNQFKNYERQKVFLEELMAPVASIWLSQDMHRVLSDVDAFIAYVGTDQKSCDPGLEDPCGLNRARMSFCVYSILGVVKRTCWPTDLEEAKAGGFVVGYTSSGNPIFRNPCTEQILKLLDNLLALIRTHNTLYAPEMLAKMAEPFTKALDMLDAEKSAILGLPQPLLELNDSPVFKTVLERMQRFFSTLYENCFHILGKAGPSMQQDFYTVEDLATQLLSSAFVNLNNIPDYRLRPMLRVFVKPLVLFCPPEHYEALVSPILGPLFTYLHMRLSQKWQVINQRSLLCGEDEAADENPESQEMLEEQLVRMLTREVMDLITVCCVSKKGADHSSAPPADGDDEEMMATEVTPSAMAELTDLGKCLMKHEDVCTALLITAFNSLAWKDTLSCQRTTSQLCWPLLKQVLSGTLLADAVTWLFTSVLKGLQMHGQHDGCMASLVHLAFQIYEALRPRYLEIRAVMEQIPEIQKDSLDQFDCKLLNPSLQKVADKRRKDQFKRLIAGCIGKPLGEQFRKEVHIKNLPSLFKKTKPMLETEVLDNDGGGLATIFEP

SEQ ID NO: 29210 - protein, 76 aa, Homo sapiens
  Payload ID: 5696
  Gene Symbol: XPO5
  Gene Name: exportin 5
  ENSP ID: ENSP00000381779
MAMDQVNALCEQLVKAVTVMMDPNSTQRYRLEALKFCEEFKEKCPICVPCGLRLAEKTQVAIVRHFGLQILEHVVK

SEQ ID NO: 29211 - protein, 24 aa, Homo sapiens
  Payload ID: 5696
  Gene Symbol: XPO5
  Gene Name: exportin 5
  ENSP ID: ENSP00000381816
  MOD_RES (1)..(1): Any amino acid
XVGTDQKSCDPGLEDPCGLNRARS

SEQ ID NO: 29212 - protein, 253 aa, Homo sapiens
  Payload ID: 5696
  Gene Symbol: XPO5
  Gene Name: exportin 5
  ENSP ID: ENSP00000387384
  MOD_RES (1)..(1): Any amino acid
XPLVLFCPPEHYEALVSPILGPLFTYLHMRLSQKWQVINQRSLLCGEDEAADENPESQEMLEEQLVRMLTREVMDLITVCCVSKKGADHSSAPPADGDGWSLTFYSLITDEEMMATEVTPSAMAELTDLGKCLMKHEDVCTALLITAFNSLAWKDTLSCQRTTSQLCWPLLKQVLSGTLLADAVTWLFTSVLKGLQMHGQHDGCMASLVHLAFQIYEALRPRYLEIRAVMEQIPEIQKDSLDQFDCKLLNPSL

SEQ ID NO: 29213 - protein, 107 aa, Homo sapiens
  Payload ID: 5696
  Gene Symbol: XPO5
  Gene Name: exportin 5
  ENSP ID: ENSP00000424196
GGLVEKHYVFLKRLCQVLCALGNQLCALLGADSDVETPSNFGKYLESFLAFTTHPSQFLRSSTQMTWGALFRHEILSRDPLLLAIIPKYLRASMTNLVKPPEHNKER

SEQ ID NO: 29214 - protein, 60 aa, Homo sapiens
  Payload ID: 5696
  Gene Symbol: XPO5
  Gene Name: exportin 5
  ENSP ID: ENSP00000426185
  MOD_RES (1)..(1): Any amino acid
XLSQKWQVINQRSLLCGEDEAADENPESQEMLEEQLRFAVFQRRVLTTVVLPQQMETMKK

SEQ ID NO: 29215 - protein, 1125 aa, Homo sapiens
  Payload ID: 5697
  Gene Symbol: XPO6
  Gene Name: exportin 6
  Uniprot ID: Q96QU8
  ENSP ID: ENSP00000302790
MASEEASLRALESLMTEFFHDCTTNERKREIEELLNNFAQQIGAWRFCLYFLSSTRNDYVMMYSLTVFENLINKMWLGVPSQDKMEIRSCLPKLLLAHHKTLPYFIRNKLCKVIVDIGRQDWPMFYHDFFTNILQLIQSPVTTPLGLIMLKTTSEELACPREDLSVARKEELRKLLLDQVQTVLGLLTGILETVWDKHSVTAATPPPSPTSGESGDLLSNLLQSPSSAKLLNQPIPILDVESEYICSLALECLAHLFSWIPLSASITPSLLTTIFHFARFGCDIRARKMASVNGSSQNCVSGQERGRLGVLAMSCINELMSKNCVPMEFEEYLLRMFQQTFYLLQKITKDNNAHTVKSRLEELDESYIEKFTDFLRLFVSVHLRRIESYSQFPVVEFLTLLFKYTFHQPTHEGYFSCLDIWTLFLDYLTSKIKSRLGDKEAVLNRYEDALVLLLTEVLNRIQFRYNQAQLEELDDETLDDDQQTEWQRYLRQSLEVVAKVMELLPTHAFSTLFPVLQDNLEVYLGLQQFIVTSGSGHRLNITAENDCRRLHCSLRDLSSLLQAVGRLAEYFIGDVFAARFNDALTVVERLVKVTLYGSQIKLYNIETAVPSVLKPDLIDVHAQSLAALQAYSHWLAQYCSEVHRQNTQQFVTLISTTMDAITPLISTKVQDKLLLSACHLLVSLATTVRPVFLISIPAVQKVFNRITDASALRLVDKAQVLVCRALSNILLLPWPNLPENEQQWPVRSINHASLISALSRDYRNLKPSAVAPQRKMPLDDTKLIIHQTLSVLEDIVENISGESTKSRQICYQSLQESVQVSLALFPAFIHQSDVTDEMLSFFLTLFRGLRVQMGVPFTEQIIQTFLNMFTREQLAESILHEGSTGCRVVEKFLKILQVVVQEPGQVFKPFLPSIIALCMEQVYPIIAERPSPDVKAELFELLFRTLHHNWRYFFKSTVLASVQRGIAEEQMENEPQFSAIMQAFGQSFLQPDIHLFKQNLFYLETLNTKQKLYHKKIFRTAMLFQFVNVLLQVLVHKSHDLLQEEIGIAIYNMASVDFDGFFAAFLPEFLTSCDGVDANQKSVLGRNFKMDRDLPSFTQNVHRLVNDLRYYRLCNDSLPPGTVKL

SEQ ID NO: 29216 - protein, 153 aa, Homo sapiens
  Payload ID: 5697
  Gene Symbol: XPO6
  Gene Name: exportin 6
  ENSP ID: ENSP00000454586
IHLFKQNLFYLETLNTKQKLYHKKIFRTAMLFQFVNVLLQVLVHKSHDLLQEEIGIAIYNMASVDFDGFFAAFLPEFLTSCDGVDANQKSVLGRNFKMDRVRRERGRAKRRAEWARKPGTCAARRGHIEASGRGLCPPCSLAAAHEMPADLVL

SEQ ID NO: 29217 - protein, 161 aa, Homo sapiens
  Payload ID: 5697
  Gene Symbol: XPO6
  Gene Name: exportin 6
  ENSP ID: ENSP00000455310
  MOD_RES (1)..(1): Any amino acid
XEWQRYLRQSLEVVAKVMELLPTHAFSTLFPVLQDNLEVYLGLQQFIVTSGSGHRLNITAENDCRRLHCSLRDLSSLLQAVGRLAEYFIGDVFAARFNDALTVVERLVKVTLYGSQIKLYNIETAVPSVLKPDLIDVSKTSCCYLRATYWSHWPPPCGPSF

SEQ ID NO: 29218 - protein, 142 aa, Homo sapiens
  Payload ID: 5697
  Gene Symbol: XPO6
  Gene Name: exportin 6
  ENSP ID: ENSP00000456066
MTEFFHDCTTNERKREIEELLNNFAQQIGAWRFCLYFLSSTRNDYVMMYSLTVFENLINKMWLGVPSQDKMEIRSCLPKLLLAHHKTLPYFIRNKLCKVIVDIGRQDWPMFYHDFFTNILQLIQSPVTTPLGLIMLKTTSEE

SEQ ID NO: 29219 - protein, 17 aa, Homo sapiens
  Payload ID: 5697
  Gene Symbol: XPO6
  Gene Name: exportin 6
  ENSP ID: ENSP00000456273
MTEFFHDCTTNERKREI

SEQ ID NO: 29220 - protein, 132 aa, Homo sapiens
  Payload ID: 5697
  Gene Symbol: XPO6
  Gene Name: exportin 6
  ENSP ID: ENSP00000456422
SFLQPDIHLFKQNLFYLETLNTKQKLYHKKIFRTAMLFQFVNVLLQVLVHKSHDLLQEEIGIAIYNMASVDFDGFFAAFLPEFLTSCDGVDANQKSVLGRNFKMDRNVHRLVNDLRYYRLCNDSLPPGTVKL

SEQ ID NO: 29221 - protein, 1111 aa, Homo sapiens
  Payload ID: 5697
  Gene Symbol: XPO6
  Gene Name: exportin 6
  Uniprot ID: Q96QU8
  ENSP ID: ENSP00000457341
MTEFFHDCTTNERKREIEELLNNFAQQIGAWRFCLYFLSSTRNDYVMMYSLTVFENLINKMWLGVPSQDKMEIRSCLPKLLLAHHKTLPYFIRNKLCKVIVDIGRQDWPMFYHDFFTNILQLIQSPVTTPLGLIMLKTTSEELACPREDLSVARKEELRKLLLDQVQTVLGLLTGILETVWDKHSVTAATPPPSPTSGESGDLLSNLLQSPSSAKLLNQPIPILDVESEYICSLALECLAHLFSWIPLSASITPSLLTTIFHFARFGCDIRARKMASVNGSSQNCVSGQERGRLGVLAMSCINELMSKNCVPMEFEEYLLRMFQQTFYLLQKITKDNNAHTVKSRLEELDESYIEKFTDFLRLFVSVHLRRIESYSQFPVVEFLTLLFKYTFHQPTHEGYFSCLDIWTLFLDYLTSKIKSRLGDKEAVLNRYEDALVLLLTEVLNRIQFRYNQAQLEELDDETLDDDQQTEWQRYLRQSLEVVAKVMELLPTHAFSTLFPVLQDNLEVYLGLQQFIVTSGSGHRLNITAENDCRRLHCSLRDLSSLLQAVGRLAEYFIGDVFAARFNDALTVVERLVKVTLYGSQIKLYNIETAVPSVLKPDLIDVHAQSLAALQAYSHWLAQYCSEVHRQNTQQFVTLISTTMDAITPLISTKVQDKLLLSACHLLVSLATTVRPVFLISIPAVQKVFNRITDASALRLVDKAQVLVCRALSNILLLPWPNLPENEQQWPVRSINHASLISALSRDYRNLKPSAVAPQRKMPLDDTKLIIHQTLSVLEDIVENISGESTKSRQICYQSLQESVQVSLALFPAFIHQSDVTDEMLSFFLTLFRGLRVQMGVPFTEQIIQTFLNMFTREQLAESILHEGSTGCRVVEKFLKILQVVVQEPGQVFKPFLPSIIALCMEQVYPIIAERPSPDVKAELFELLFRTLHHNWRYFFKSTVLASVQRGIAEEQMENEPQFSAIMQAFGQSFLQPDIHLFKQNLFYLETLNTKQKLYHKKIFRTAMLFQFVNVLLQVLVHKSHDLLQEEIGIAIYNMASVDFDGFFAAFLPEFLTSCDGVDANQKSVLGRNFKMDRDLPSFTQNVHRLVNDLRYYRLCNDSLPPGTVKL

SEQ ID NO: 29222 - protein, 21 aa, Homo sapiens
  Payload ID: 5697
  Gene Symbol: XPO6
  Gene Name: exportin 6
  ENSP ID: ENSP00000457742
MMYSLTVFENLINKMWLGVPS

SEQ ID NO: 29223 - protein, 135 aa, Homo sapiens
  Payload ID: 5697
  Gene Symbol: XPO6
  Gene Name: exportin 6
  ENSP ID: ENSP00000458314
  MOD_RES (1)..(1): Any amino acid
XALSRDYRNLKPSAVAPQRKMPLDDTKLIIHQTLSVLEDIVENISGESTKSRQICYQSLQESVQVSLALFPAFIHQSGLRVQMGVPFTEQIIQTFLNMFTREQLAESILHEGSTGCRVVEKFLKILQVVVQEPGQ

SEQ ID NO: 29224 - protein, 19 aa, Homo sapiens
  Payload ID: 5697
  Gene Symbol: XPO6
  Gene Name: exportin 6
  ENSP ID: ENSP00000459591
NAHTVKSRLEELDERWLME

SEQ ID NO: 29225 - protein, 255 aa, Homo sapiens
  Payload ID: 5697
  Gene Symbol: XPO6
  Gene Name: exportin 6
  ENSP ID: ENSP00000459736
  MOD_RES (1)..(1): Any amino acid
XSPVTTPLGLIMLKTTSEELACPREDLSVARKEELRKLLLDQVQTVLGLLTGDLLSNLLQSPSSAKLLNQPIPILDVESEYICSLALECLAHLFSWIPLSASITPSLLTTIFHFARFGCDIRARKMASVNGSSQNCVSGQERGRLGVLAMSCINELMSKNCVPMEFEEYLLRMFQQTFYLLQKITKDNNAHTVKSRLEELDESYIEKFTDFLRLFVSVHLRRIESYSQFPVVEFLTLLFKYTFHQPTHEGYFSCL

SEQ ID NO: 29226 - protein, 1087 aa, Homo sapiens
  Payload ID: 5698
  Gene Symbol: XPO7
  Gene Name: exportin 7
  Uniprot ID: Q9UIA9
  ENSP ID: ENSP00000252512
MADHVQSLAQLENLCKQLYETTDTTTRLQAEKALVEFTNSPDCLSKCQLLLERGSSSYSQLLAATCLTKLVSRTNNPLPLEQRIDIRNYVLNYLATRPKLATFVTQALIQLYARITKLGWFDCQKDDYVFRNAITDVTRFLQDSVEYCIIGVTILSQLTNEINQADTTHPLTKHRKIASSFRDSSLFDIFTLSCNLLKQASGKNLNLNDESQHGLLMQLLKLTHNCLNFDFIGTSTDESSDDLCTVQIPTSWRSAFLDSSTLQLFFDLYHSIPPSFSPLVLSCLVQIASVRRSLFNNAERAKFLSHLVDGVKRILENPQSLSDPNNYHEFCRLLARLKSNYQLGELVKVENYPEVIRLIANFTVTSLQHWEFAPNSVHYLLSLWQRLAASVPYVKATEPHMLETYTPEVTKAYITSRLESVHIILRDGLEDPLEDTGLVQQQLDQLSTIGRCEYEKTCALLVQLFDQSAQSYQELLQSASASPMDIAVQEGRLTWLVYIIGAVIGGRVSFASTDEQDAMDGELVCRVLQLMNLTDSRLAQAGNEKLELAMLSFFEQFRKIYIGDQVQKSSKLYRRLSEVLGLNDETMVLSVFIGKIITNLKYWGRCEPITSKTLQLLNDLSIGYSSVRKLVKLSAVQFMLNNHTSEHFSFLGINNQSNLTDMRCRTTFYTALGRLLMVDLGEDEDQYEQFMLPLTAAFEAVAQMFSTNSFNEQEAKRTLVGLVRDLRGIAFAFNAKTSFMMLFEWIYPSYMPILQRAIELWYHDPACTTPVLKLMAELVHNRSQRLQFDVSSPNGILLFRETSKMITMYGNRILTLGEVPKDQVYALKLKGISICFSMLKAALSGSYVNFGVFRLYGDDALDNALQTFIKLLLSIPHSDLLDYPKLSQSYYSLLEVLTQDHMNFIASLEPHVIMYILSSISEGLTALDTMVCTGCCSCLDHIVTYLFKQLSRSTKKRTTPLNQESDRFLHIMQQHPEMIQQMLSTVLNIIIFEDCRNQWSMSRPLLGLILLNEKYFSDLRNSIVNSQPPEKQQAMHLCFENLMEGIERNLLTKNRDRFTQNLSAFRREVNDSMKNSTYGVNSNDMMS

SEQ ID NO: 29227 - protein, 1088 aa, Homo sapiens
  Payload ID: 5698
  Gene Symbol: XPO7
  Gene Name: exportin 7
  ENSP ID: ENSP00000410249
MRDPGRKSLAQLENLCKQLYETTDTTTRLQAEKALVEFTNSPDCLSKCQLLLERGSSSYSQLLAATCLTKLVSRTNNPLPLEQRIDIRNYVLNYLATRPKLATFVTQALIQLYARITKLGWFDCQKDDYVFRNAITDVTRFLQDSVEYCIIGVTILSQLTNEINQADTTHPLTKHRKIASSFRDSSLFDIFTLSCNLLKQASGKNLNLNDESQHGLLMQLLKLTHNCLNFDFIGTSTDESSDDLCTVQIPTSWRSAFLDSSTLQLFFDLYHSIPPSFSPLVLSCLVQIASVRRSLFNNAERAKFLSHLVDGVKRILENPQSLSDPNNYHEFCRLLARLKSNYQLGELVKVENYPEVIRLIANFTVTSLQHWEFAPNSVHYLLSLWQRLAASVPYVKATEPHMLETYTPEVTKAYITSRLESVHIILRDGLEDPLEDTGLVQQQLDQLSTIGRCEYEKTCALLVQLFDQSAQSYQELLQSASASPMDIAVQEGRLTWLVYIIGAVIGGRVSFASTDEQDAMDGELVCRVLQLMNLTDSRLAQAGNEKLELAMLSFFEQFRKIYIGDQVQKSSKLYRRLSEVLGLNDETMVLSVFIGKIITNLKYWGRCEPITSKTLQLLNDLSIGYSSVRKLVKLSAVQFMLNNHTSEHFSFLGINNQSNLTDMRCRTTFYTALGRLLMVDLGEDEDQYEQFMLPLTAAFEAVAQMFSTNSFNEQEAKRTLVGLVRDLRGIAFAFNAKTSFMMLFEWIYPSYMPILQRAIELWYHDPACTTPVLKLMAELVHNRSQRLQFDVSSPNGILLFRETSKMITMYGNRILTLGEVPKDQVYALKLKGISICFSMLKAALSGSYVNFGVFRLYGDDALDNALQTFIKLLLSIPHSDLLDYPKLSQSYYSLLEVLTQDHMNFIASLEPHVIMYILSSISEGLTALDTMVCTGCCSCLDHIVTYLFKQLSRSTKKRTTPLNQESDRFLHIMQQHPEMIQQMLSTVLNIIIFEDCRNQWSMSRPLLGLILLNEKYFSDLRNSIVNSQPPEKQQAMHLCFENLMEGIERNLLTKNRDRFTQNLSAFRREVNDSMKNSTYGVNSNDMMS

SEQ ID NO: 29228 - protein, 190 aa, Homo sapiens
  Payload ID: 5698
  Gene Symbol: XPO7
  Gene Name: exportin 7
  ENSP ID: ENSP00000429290
  MOD_RES (1)..(1): Any amino acid
XEWSKMADHVQSLAQLENLCKQLYETTDTTTRLQAEKALVEFTNSPDCLSKCQLLLERGSSSYSQLLAATCLTKLVSRTNNPLPLEQRIDIRNYVLNYLATRPKLATFVTQALIQLYARITKLGWFDCQKDDYVFRNAITDVTRFLQDSVEYCIIGVTILSQLTNEINQVSATAFLIEADTTHPLTKHRK

SEQ ID NO: 29229 - protein, 237 aa, Homo sapiens
  Payload ID: 5698
  Gene Symbol: XPO7
  Gene Name: exportin 7
  ENSP ID: ENSP00000429317
MLPLTAAFEAVAQMFSTNSFNEQEAKRTLVGLVRDLRGIAFAFNAKTSFMMLFEWIYPSYMPILQRAIELWYHDPACTTPVLKLMAELVHNRSQRLQFDVSSPNGILLFRETSKMITMYGNRILTLGEVPKDQVYALKLKGISICFSMLKAALSGSYVNFGVFRLYGDDALDNALQTFIKLLLSIPHSDLLDYPKLSQSYYSLLEVLTQDHMNFIASLEPHVIMYILSSISEGLTAL

SEQ ID NO: 29230 - protein, 962 aa, Homo sapiens
  Payload ID: 5699
  Gene Symbol: XPOT
  Gene Name: exportin, tRNA
  Uniprot ID: O43592
  ENSP ID: ENSP00000327821
MDEQALLGLNPNADSDFRQRALAYFEQLKISPDAWQVCAEALAQRTYSDDHVKFFCFQVLEHQVKYKYSELTTVQQQLIRETLISWLQAQMLNPQPEKTFIRNKAAQVFALLFVTEYLTKWPKFFFDILSVVDLNPRGVDLYLRILMAIDSELVDRDVVHTSEEARRNTLIKDTMREQCIPNLVESWYQILQNYQFTNSEVTCQCLEVVGAYVSWIDLSLIANDRFINMLLGHMSIEVLREEACDCLFEVVNKGMDPVDKMKLVESLCQVLQSAGFFSIDQEEDVDFLARFSKLVNGMGQSLIVSWSKLIKNGDIKNAQEALQAIETKVALMLQLLIHEDDDISSNIIGFCYDYLHILKQLTVLSDQQKANVEAIMLAVMKKLTYDEEYNFENEGEDEAMFVEYRKQLKLLLDRLAQVSPELLLASVRRVFSSTLQNWQTTRFMEVEVAIRLLYMLAEALPVSHGAHFSGDVSKASALQDMMRTLVTSGVSSYQHTSVTLEFFETVVRYEKFFTVEPQHIPCVLMAFLDHRGLRHSSAKVRSRTAYLFSRFVKSLNKQMNPFIEDILNRIQDLLELSPPENGHQSLLSSDDQLFIYETAGVLIVNSEYPAERKQALMRNLLTPLMEKFKILLEKLMLAQDEERQASLADCLNHAVGFASRTSKAFSNKQTVKQCGCSEVYLDCLQTFLPALSCPLQKDILRSGVRTFLHRMIICLEEEVLPFIPSASEHMLKDCEAKDLQEFIPLINQITAKFKIQVSPFLQQMFMPLLHAIFEVLLRPAEENDQSAALEKQMLRRSYFAFLQTVTGSGMSEVIANQGAENVERVLVTVIQGAVEYPDPIAQKTCFIILSKLVELWGGKDGPVGFADFVYKHIVPACFLAPLKQTFDLADAQTVLALSECAVTLKTIHLKRGPECVQYLQQEYLPSLQVAPEIIQEFCQALQQPDAKVFKNYLKVFFQRAKP

SEQ ID NO: 29231 - protein, 201 aa, Homo sapiens
  Payload ID: 5699
  Gene Symbol: XPOT
  Gene Name: exportin, tRNA
  ENSP ID: ENSP00000383722
MDEQALLGLNPNADSDFRQRALAYFEQLKISPDAWQVCAEALAQRTYSDDHVKFFCFQVLEHQVKYKYSELTTVQQQLIRETLISWLQAQMLNPQPEKTFIRNKAAQVFALLFVTEYLTKWPKFFFDILSVVDLNPRGVDLYLRILMAIDSELVDRDVVHTSEEARRNTLIKDTMREQCIPNLVESWYQILQNYQFTNSEV

SEQ ID NO: 29232 - protein, 60 aa, Homo sapiens
  Payload ID: 5699
  Gene Symbol: XPOT
  Gene Name: exportin, tRNA
  ENSP ID: ENSP00000441376
MDEQALLGLNPNADSDFRQRALAYFEQLKISPDAWQVCAEALAQRTYSDDHVKFFCFQVL

SEQ ID NO: 29233 - protein, 63 aa, Homo sapiens
  Payload ID: 5699
  Gene Symbol: XPOT
  Gene Name: exportin, tRNA
  ENSP ID: ENSP00000444345
VFSSTLQNWQTTRFMEVEVAIRLLYMLAEALPVSHGAHFSAGNIRSQFLSAYICDIGVLRNCC

SEQ ID NO: 29234 - protein, 1114 aa, Homo sapiens
  Payload ID: 5700
  Gene Symbol: ESYT1
  Gene Name: extended synaptotagmin-like protein 1
  Uniprot ID: Q9BSJ8
  ENSP ID: ENSP00000267113
MERSPGEGPSPSPMDQPSAPSDPTDQPPAAHAKPDPGSGGQPAGPGAAGEALAVLTSFGRRLLVLIPVYLAGAVGLSVGFVLFGLALYLGWRRVRDEKERSLRAARQLLDDEEQLTAKTLYMSHRELPAWVSFPDVEKAEWLNKIVAQVWPFLGQYMEKLLAETVAPAVRGSNPHLQTFTFTRVELGEKPLRIIGVKVHPGQRKEQILLDLNISYVGDVQIDVEVKKYFCKAGVKGMQLHGVLRVILEPLIGDLPFVGAVSMFFIRRPTLDINWTGMTNLLDIPGLSSLSDTMIMDSIAAFLVLPNRLLVPLVPDLQDVAQLRSPLPRGIIRIHLLAARGLSSKDKYVKGLIEGKSDPYALVRLGTQTFCSRVIDEELNPQWGETYEVMVHEVPGQEIEVEVFDKDPDKDDFLGRMKLDVGKVLQASVLDDWFPLQGGQGQVHLRLEWLSLLSDAEKLEQVLQWNWGVSSRPDPPSAAILVVYLDRAQDLPMVTSELYPPQLKKGNKEPNPMVQLSIQDVTQESKAVYSTNCPVWEEAFRFFLQDPQSQELDVQVKDDSRALTLGALTLPLARLLTAPELILDQWFQLSSSGPNSRLYMKLVMRILYLDSSEICFPTVPGCPGAWDVDSENPQRGSSVDAPPRPCHTTPDSQFGTEHVLRIHVLEAQDLIAKDRFLGGLVKGKSDPYVKLKLAGRSFRSHVVREDLNPRWNEVFEVIVTSVPGQELEVEVFDKDLDKDDFLGRCKVRLTTVLNSGFLDEWLTLEDVPSGRLHLRLERLTPRPTAAELEEVLQVNSLIQTQKSAELAAALLSIYMERAEDLPLRKGTKHLSPYATLTVGDSSHKTKTISQTSAPVWDESASFLIRKPHTESLELQVRGEGTGVLGSLSLPLSELLVADQLCLDRWFTLSSGQGQVLLRAQLGILVSQHSGVEAHSHSYSHSSSSLSEEPELSGGPPHITSSAPELRQRLTHVDSPLEAPAGPLGQVKLTLWYYSEERKLVSIVHGCRSLRQNGRDPPDPYVSLLLLPDKNRGTKRRTSQKKRTLSPEFNERFEWELPLDEAQRRKLDVSVKSNSSFMSRERELLGKVQLDLAETDLSQGVARWYDLMDNKDKGSS

SEQ ID NO: 29235 - protein, 1104 aa, Homo sapiens
  Payload ID: 5700
  Gene Symbol: ESYT1
  Gene Name: extended synaptotagmin-like protein 1
  Uniprot ID: Q9BSJ8
  ENSP ID: ENSP00000377612
MERSPGEGPSPSPMDQPSAPSDPTDQPPAAHAKPDPGSGGQPAGPGAAGEALAVLTSFGRRLLVLIPVYLAGAVGLSVGFVLFGLALYLGWRRVRDEKERSLRAARQLLDDEEQLTAKTLYMSHRELPAWVSFPDVEKAEWLNKIVAQVWPFLGQYMEKLLAETVAPAVRGSNPHLQTFTFTRVELGEKPLRIIGVKVHPGQRKEQILLDLNISYVGDVQIDVEVKKYFCKAGVKGMQLHGVLRVILEPLIGDLPFVGAVSMFFIRRPTLDINWTGMTNLLDIPGLSSLSDTMIMDSIAAFLVLPNRLLVPLVPDLQDVAQLRSPLPRGIIRIHLLAARGLSSKDKYVKGLIEGKSDPYALVRLGTQTFCSRVIDEELNPQWGETYEVMVHEVPGQEIEVEVFDKDPDKDDFLGRMKLDVGKVLQASVLDDWFPLQGGQGQVHLRLEWLSLLSDAEKLEQVLQWNWGVSSRPDPPSAAILVVYLDRAQDLPLKKGNKEPNPMVQLSIQDVTQESKAVYSTNCPVWEEAFRFFLQDPQSQELDVQVKDDSRALTLGALTLPLARLLTAPELILDQWFQLSSSGPNSRLYMKLVMRILYLDSSEICFPTVPGCPGAWDVDSENPQRGSSVDAPPRPCHTTPDSQFGTEHVLRIHVLEAQDLIAKDRFLGGLVKGKSDPYVKLKLAGRSFRSHVVREDLNPRWNEVFEVIVTSVPGQELEVEVFDKDLDKDDFLGRCKVRLTTVLNSGFLDEWLTLEDVPSGRLHLRLERLTPRPTAAELEEVLQVNSLIQTQKSAELAAALLSIYMERAEDLPLRKGTKHLSPYATLTVGDSSHKTKTISQTSAPVWDESASFLIRKPHTESLELQVRGEGTGVLGSLSLPLSELLVADQLCLDRWFTLSSGQGQVLLRAQLGILVSQHSGVEAHSHSYSHSSSSLSEEPELSGGPPHITSSAPELRQRLTHVDSPLEAPAGPLGQVKLTLWYYSEERKLVSIVHGCRSLRQNGRDPPDPYVSLLLLPDKNRGTKRRTSQKKRTLSPEFNERFEWELPLDEAQRRKLDVSVKSNSSFMSRERELLGKVQLDLAETDLSQGVARWYDLMDNKDKGSS

SEQ ID NO: 29236 - protein, 88 aa, Homo sapiens
  Payload ID: 5700
  Gene Symbol: ESYT1
  Gene Name: extended synaptotagmin-like protein 1
  ENSP ID: ENSP00000447756
MSHRELPAWVSFPDVEKAEWLNKIVAQVWPFLGQYMEKLLAETVAPAVRGSNPHLQTFTFTRVELGEKPLRIIGVKVHPGQRKEQILL

SEQ ID NO: 29237 - protein, 893 aa, Homo sapiens
  Payload ID: 5701
  Gene Symbol: ESYT2
  Gene Name: extended synaptotagmin-like protein 2
  Uniprot ID: A0FGR8
  ENSP ID: ENSP00000251527
MTPPSRAEAGVRRSRVPSEGRWRGAEPPGISASTQPASAGRAARHCGAMSGARGEGPEAGAGGAGGRAAPENPGGVLSVELPGLLAQLARSFALLLPVYALGYLGLSFSWVLLALALLAWCRRSRGLKALRLCRALALLEDEERVVRLGVRACDLPAWVHFPDTERAEWLNKTVKHMWPFICQFIEKLFRETIEPAVRGANTHLSTFSFTKVDVGQQPLRINGVKVYTENVDKRQIILDLQISFVGNCEIDLEIKRYFCRAGVKSIQIHGTMRVILEPLIGDMPLVGALSIFFLRKPLLEINWTGLTNLLDVPGLNGLSDTIILDIISNYLVLPNRITVPLVSEVQIAQLRFPVPKGVLRIHFIEAQDLQGKDTYLKGLVKGKSDPYGIIRVGNQIFQSRVIKENLSPKWNEVYEALVYEHPGQELEIELFDEDPDKDDFLGSLMIDLIEVEKERLLDEWFTLDEVPKGKLHLRLEWLTLMPNASNLDKVLTDIKADKDQANDGLSSALLILYLDSARNLPSGKKISSNPNPVVQMSVGHKAQESKIRYKTNEPVWEENFTFFIHNPKRQDLEVEVRDEQHQCSLGNLKVPLSQLLTSEDMTVSQRFQLSNSGPNSTIKMKIALRVLHLEKRERPPDHQHSAQVKRPSVSKEGRKTSIKSHMSGSPGPGGSNTAPSTPVIGGSDKPGMEEKAQPPEAGPQGLHDLGRSSSSLLASPGHISVKEPTPSIASDISLPIATQELRQRLRQLENGTTLGQSPLGQIQLTIRHSSQRNKLIVVVHACRNLIAFSEDGSDPYVRMYLLPDKRRSGRRKTHVSKKTLNPVFDQSFDFSVSLPEVQRRTLDVAVKNSGGFLSKDKGLLGKVLVALASEELAKGWTQWYDLTEDGTRPQAMT

SEQ ID NO: 29238 - protein, 884 aa, Homo sapiens
  Payload ID: 5701
  Gene Symbol: ESYT2
  Gene Name: extended synaptotagmin-like protein 2
  ENSP ID: ENSP00000275418
SASTQPASAGRAARHCGAMSGARGEGPEAGAGGAGGRAAPENPGGVLSVELPGLLAQLARSFALLLPVYALGYLGLSFSWVLLALALLAWCRRSRGLKALRLCRALALLEDEERVVRLGVRACDLPAWVHFPDTERAEWLNKTVKHMWPFICQFIEKLFRETIEPAVRGANTHLSTFSFTKVDVGQQPLRINGVKVYTENVDKRQIILDLQISFVGNCEIDLEIKRYFCRAGVKSIQIHGTMRVILEPLIGDMPLVGALSIFFLRKPLLEINWTGLTNLLDVPGLNGLSDTIILDIISNYLVLPNRITVPLVSEVQIAQLRFPVPKGVLRIHFIEAQDLQGKDTYLKGLVKGKSDPYGIIRVGNQIFQSRVIKENLSPKWNEVYEALVYEHPGQELEIELFDEDPDKDDFLGSLMIDLIEVEKERLLDEWFTLDEVPKGKLHLRLEWLTLMPNASNLDKVLTDIKADKDQANDGLSSALLILYLDSARNLPSNPLEFNPDVLKKTAVQRALKSGKKISSNPNPVVQMSVGHKAQESKIRYKTNEPVWEENFTFFIHNPKRQDLEVEVRDEQHQCSLGNLKVPLSQLLTSEDMTVSQRFQLSNSGPNSTIKMKIALRVLHLEKRERPPDHQHSAQVKRPSVSKEGRKTSIKSHMSGSPGPGGSNTAPSTPVIGGSDKPGMEEKAQPPEAGPQGLHDLGRSSSSLLASPGHISVKEPTPSIASDISLPIATQELRQRLRQLENGTTLGQSPLGQIQLTIRHSSQRNKLIVVVHACRNLIAFSEDGSDPYVRMYLLPDKRRSGRRKTHVSKKTLNPVFDQSFDFSVSLPEVQRRTLDVAVKNSGGFLSKDKGLLGKVLVALASEELAKGWTQWYDLTEDGTRPQAMT

SEQ ID NO: 29239 - protein, 921 aa, Homo sapiens
  Payload ID: 5701
  Gene Symbol: ESYT2
  Gene Name: extended synaptotagmin-like protein 2
  ENSP ID: ENSP00000481296
MTANRDAALSSHRHPGCAQRPRTPTFASSSQRRSAFGFDDGNFPGLGERSHAPGSRLGARRRAKTARGLRGHRQRGAGAGLSRPGSARAPSPPRPGAPENPGGVLSVELPGLLAQLARSFALLLPVYALGYLGLSFSWVLLALALLAWCRRSRGLKALRLCRALALLEDEERVVRLGVRACDLPAWVHFPDTERAEWLNKTVKHMWPFICQFIEKLFRETIEPAVRGANTHLSTFSFTKVDVGQQPLRINGVKVYTENVDKRQIILDLQISFVGNCEIDLEIKRYFCRAGVKSIQIHGTMRVILEPLIGDMPLVGALSIFFLRKPLLEINWTGLTNLLDVPGLNGLSDTIILDIISNYLVLPNRITVPLVSEVQIAQLRFPVPKGVLRIHFIEAQDLQGKDTYLKGLVKGKSDPYGIIRVGNQIFQSRVIKENLSPKWNEVYEALVYEHPGQELEIELFDEDPDKDDFLGSLMIDLIEVEKERLLDEWFTLDEVPKGKLHLRLEWLTLMPNASNLDKVLTDIKADKDQANDGLSSALLILYLDSARNLPSGKKISSNPNPVVQMSVGHKAQESKIRYKTNEPVWEENFTFFIHNPKRQDLEVEVRDEQHQCSLGNLKVPLSQLLTSEDMTVSQRFQLSNSGPNSTIKMKIALRVLHLEKRERPPDHQHSAQVKRPSVSKEGRKTSIKSHMSGSPGPGGSNTAPSTPVIGGSDKPGMEEKAQPPEAGPQGLHDLGRSSSSLLASPGHISVKEPTPSIASDISLPIATQELRQRLRQLENGTTLGQSPLGQIQLTIRHSSQRNKLIVVVHACRNLIAFSEDGSDPYVRMYLLPDKRRSGRRKTHVSKKTLNPVFDQSFDFSVSLPEVQRRTLDVAVKNSGGFLSKDKGLLGKVLVALASEELAKGWTQWYDLTEDGTRPQAMT

SEQ ID NO: 29240 - protein, 310 aa, Homo sapiens
  Payload ID: 5702
  Gene Symbol: ESYT3
  Gene Name: extended synaptotagmin-like protein 3
  ENSP ID: ENSP00000289135
MRAEEPCAPGAPSALGAQRTPGPELRLSSQLLPELCTFVVRVLFYLGPVYLAGYLGLSITWLLLGALLWMWWRRNRRGKLGRLAAAFEFLDNEREFISRELRGQHLPAWIHFPDVERVEWANKIISQTWPYLSMIMESKFREKLEPKIREKSIHLRTFTFTKLYFGQKCPRVNGVKAHTNTCNRRRVTVDLQICYIGDCEISVELQKIQAGVNGIQLQGTLRVILEPLLVDKPFVGAVTVFFLQKPHLQINWTGLTNLLDAPGINDVSDSLLEDLIATHLVLPNRVTVPVKKGLDLTNLRFPLPCVSTQY

SEQ ID NO: 29241 - protein, 886 aa, Homo sapiens
  Payload ID: 5702
  Gene Symbol: ESYT3
  Gene Name: extended synaptotagmin-like protein 3
  Uniprot ID: A0FGR9
  ENSP ID: ENSP00000374218
MRAEEPCAPGAPSALGAQRTPGPELRLSSQLLPELCTFVVRVLFYLGPVYLAGYLGLSITWLLLGALLWMWWRRNRRGKLGRLAAAFEFLDNEREFISRELRGQHLPAWIHFPDVERVEWANKIISQTWPYLSMIMESKFREKLEPKIREKSIHLRTFTFTKLYFGQKCPRVNGVKAHTNTCNRRRVTVDLQICYIGDCEISVELQKIQAGVNGIQLQGTLRVILEPLLVDKPFVGAVTVFFLQKPHLQINWTGLTNLLDAPGINDVSDSLLEDLIATHLVLPNRVTVPVKKGLDLTNLRFPLPCGVIRVHLLEAEQLAQKDNFLGLRGKSDPYAKVSIGLQHFRSRTIYRNLNPTWNEVFEFMVYEVPGQDLEVDLYDEDTDRDDFLGSLQICLGDVMTNRVVDEWFVLNDTTSGRLHLRLEWLSLLTDQEVLTEDHGGLSTAILVVFLESACNLPRNPFDYLNGEYRAKKLSRFARNKVSKDPSSYVKLSVGKKTHTSKTCPHNKDPVWSQVFSFFVHNVATERLHLKVLDDDQECALGMLEVPLCQILPYADLTLEQRFQLDHSGLDSLISMRLVLRFLQVEERELGSPYTGPEALKKGPLLIKKVATNQGPKAQPQEEGPTDLPCPPDPASDTKDVSRSTTTTTSATTVATEPTSQETGPEPKGKDSAKRFCEPIGEKKSPATIFLTVPGPHSPGPIKSPRPMKCPASPFAWPPKRLAPSMSSLNSLASSCFDLADISLNIEGGDLRRRQLGEIQLTVRYVCLRRCLSVLINGCRNLTPCTSSGADPYVRVYLLPERKWACRKKTSVKRKTLEPLFDETFEFFVPMEEVKKRSLDVAVKNSRPLGSHRRKELGKVLIDLSKEDLIKGFSQWYELTPNGQPRS

SEQ ID NO: 29242 - protein, 501 aa, Homo sapiens
  Payload ID: 5702
  Gene Symbol: ESYT3
  Gene Name: extended synaptotagmin-like protein 3
  Uniprot ID: A0FGR9
  ENSP ID: ENSP00000417388
MRAEEPCAPGAPSALGAQRTPGPELRLSSQLLPELCTFVVRVLFYLGPVYLAGYLGLSITWLLLGALLWMWWRRNRRGKLGRLAAAFEFLDNEREFISRELRGQHLPAWIHFPDVERVEWANKIISQTWPYLSMIMESKFREKLEPKIREKSIHLRTFTFTKLYFGQKCPRVNGVKAHTNTCNRRRVTVDLQICYIGDCEISVELQKIQAGVNGIQLQGTLRVILEPLLVDKPFVGAVTVFFLQKPHLQINWTGLTNLLDAPGINDVSDSLLEDLIATHLVLPNRVTVPVKKGLDLTNLRFPLPCGVIRVHLLEAEQLAQKDNFLGLRGKSDPYAKVSIGLQHFRSRTIYRNLNPTWNEVFEFMVYEVPGQDLEVDLYDEDTDRDDFLGSLQICLGDVMTNRVVDEWFVLNDTTSGRLHLRLEWLSLLTDQEVLTEDHGGLSTAILVVFLESACNLPRNPFDYLNGEYRAKKLSRFARVKQGQQRPFFLCQTICRQEDTYK

SEQ ID NO: 29243 - protein, 2120 aa, Homo sapiens
  Payload ID: 5703
  Gene Symbol: ESPL1
  Gene Name: extra spindle pole bodies like 1, separase
  Uniprot ID: Q14674
  ENSP ID: ENSP00000257934
MRSFKRVNFGTLLSSQKEAEELLPALKEFLSNPPAGFPSSRSDAERRQACDAILRACNQQLTAKLACPRHLGSLLELAELACDGYLVSTPQRPPLYLERILFVLLRNAAAQGSPEATLRLAQPLHACLVQCSREAAPQDYEAVARGSFSLLWKGAEALLERRAAFAARLKALSFLVLLEDESTPCEVPHFASPTACRAVAAHQLFDASGHGLNEADADFLDDLLSRHVIRALVGERGSSSGLLSPQRALCLLELTLEHCRRFCWSRHHDKAISAVEKAHSYLRNTNLAPSLQLCQLGVKLLQVGEEGPQAVAKLLIKASAVLSKSMEAPSPPLRALYESCQFFLSGLERGTKRRYRLDAILSLFAFLGGYCSLLQQLRDDGVYGGSSKQQQSFLQMYFQGLHLYTVVVYDFAQGCQIVDLADLTQLVDSCKSTVVWMLEALEGLSGQELTDHMGMTASYTSNLAYSFYSHKLYAEACAISEPLCQHLGLVKPGTYPEVPPEKLHRCFRLQVESLKKLGKQAQGCKMVILWLAALQPCSPEHMAEPVTFWVRVKMDAARAGDKELQLKTLRDSLSGWDPETLALLLREELQAYKAVRADTGQERFNIICDLLELSPEETPAGAWARATHLVELAQVLCYHDFTQQTNCSALDAIREALQLLDSVRPEAQARDQLLDDKAQALLWLYICTLEAKMQEGIERDRRAQAPGNLEEFEVNDLNYEDKLQEDRFLYSNIAFNLAADAAQSKCLDQALALWKELLTKGQAPAVRCLQQTAASLQILAALYQLVAKPMQALEVLLLLRIVSERLKDHSKAAGSSCHITQLLLTLGCPSYAQLHLEEAASSLKHLDQTTDTYLLLSLTCDLLRSQLYWTHQKVTKGVSLLLSVLRDPALQKSSKAWYLLRVQVLQLVAAYLSLPSNNLSHSLWEQLCAQGWQTPEIALIDSHKLLRSIILLLMGSDILSTQKAAVETSFLDYGENLVQKWQVLSEVLSCSEKLVCHLGRLGSVSEAKAFCLEALKLTTKLQIPRQCALFLVLKGELELARNDIDLCQSDLQQVLFLLESCTEFGGVTQHLDSVKKVHLQKGKQQAQVPCPPQLPEEELFLRGPALELVATVAKEPGPIAPSTNSSPVLKTKPQPIPNFLSHSPTCDCSLCASPVLTAVCLRWVLVTAGVRLAMGHQAQGLDLLQVVLKGCPEAAERLTQALQASLNHKTPPSLVPSLLDEILAQAYTLLALEGLNQPSNESLQKVLQSGLKFVAARIPHLEPWRASLLLIWALTKLGGLSCCTTQLFASSWGWQPPLIKSVPGSEPSKTQGQKRSGRGRQKLASAPLRLNNTSQKGLEGRGLPCTPKPPDRIRQAGPHVPFTVFEEVCPTESKPEVPQAPRVQQRVQTRLKVNFSDDSDLEDPVSAEAWLAEEPKRRGTASRGRGRARKGLSLKTDAVVAPGSAPGNPGLNGRSRRAKKVASRHCEERRPQRASDQARPGPEIMRTIPEEELTDNWRKMSFEILRGSDGEDSASGGKTPAPGPEAASGEWELLRLDSSKKKLPSPCPDKESDKDLGPRLRLPSAPVATGLSTLDSICDSLSVAFRGISHCPPSGLYAHLCRFLALCLGHRDPYATAFLVTESVSITCRHQLLTHLHRQLSKAQKHRGSLEIADQLQGLSLQEMPGDVPLARIQRLFSFRALESGHFPQPEKESFQERLALIPSGVTVCVLALATLQPGTVGNTLLLTRLEKDSPPVSVQIPTGQNKLHLRSVLNEFDAIQKAQKENSSCTDKREWWTGRLALDHRMEVLIASLEKSVLGCWKGLLLPSSEEPGPAQEASRLQELLQDCGWKYPDRTLLKIMLSGAGALTPQDIQALAYGLCPTQPERAQELLNEAVGRLQGLTVPSNSHLVLVLDKDLQKLPWESMPSLQALPVTRLPSFRFLLSYSIIKEYGASPVLSQGVDPRSTFYVLNPHNNLSSTEEQFRANFSSEAGWRGVVGEVPRPEQVQEALTKHDLYIYAGHGAGARFLDGQAVLRLSCRAVALLFGCSSAALAVRGNLEGAGIVLKYIMAGCPLFLGNLWDVTDRDIDRYTEALLQGWLGAGPGAPLLYYVNQARQAPRLKYLIGAAPIAYGLPVSLR

SEQ ID NO: 29244 - protein, 49 aa, Homo sapiens
  Payload ID: 5703
  Gene Symbol: ESPL1
  Gene Name: extra spindle pole bodies like 1, separase
  ENSP ID: ENSP00000447054
MRSFKRVNFGTLLSSQKEAEELLPALKVGVLPGSGYTWLSKLSCFVFAF

SEQ ID NO: 29245 - protein, 2120 aa, Homo sapiens; identical to SEQ ID NO: 29243
  Payload ID: 5703
  Gene Symbol: ESPL1
  Gene Name: extra spindle pole bodies like 1, separase
  Uniprot ID: Q14674
  ENSP ID: ENSP00000449831

SEQ ID NO: 29246 - protein, 207 aa, Homo sapiens
  Payload ID: 5703
  Gene Symbol: ESPL1
  Gene Name: extra spindle pole bodies like 1, separase
  ENSP ID: ENSP00000456450
MRSFKRVNFGTLLSSQKEAEELLPALKEFLSNPPAGFPSSRSDAERRQACDAILRACNQQLTAKLACPRHLGSLLELAELACDGYLVSTPQRPPLYLERILFVLLRNAAAQGSPEATLRLAQPLHACLVQCSREAAPQDYEAVARGSFSLLWKGAEALLERRAAFAARLKALSFLVLLEDESTPCEVPHFASPTACRAVAAHQLFDA

SEQ ID NO: 29247 - protein, 828 aa, Homo sapiens
  Payload ID: 5704
  Gene Symbol: ELFN1
  Gene Name: extracellular leucine-rich repeat and fibronectin type III domain containing 1
  Uniprot ID: P0C7U0
  ENSP ID: ENSP00000456548
MAGRGWGALWVCVAAATLLHAGGLARADCWLIEGDKGFVWLAICSQNQPPYEAIPQQINSTIVDLRLNENRIRSVQYASLSRFGNLTYLNLTKNEIGYIEDGAFSGQFNLQVLQLGYNRLRNLTEGMLRGLGKLEYLYLQANLIEVVMASSFWECPNIVNIDLSMNRIQQLNSGTFAGLAKLSVCELYSNPFYCSCELLGFLRWLAAFTNATQTYDRMQCESPPVYSGYYLLGQGRRGHRSILSKLQSVCTEDSYAAEVVGPPRPASGRSQPGRSPPPPPPPEPSDMPCADDECFSGDGTTPLVALPTLATQAEARPLIKVKQLTQNSATITVQLPSPFHRMYTLEHFNNSKASTVSRLTKAQEEIRLTNLFTLTNYTYCVVSTSAGLRHNHTCLTICLPRLPSPPGPVPSPSTATHYIMTILGCLFGMVLVLGAVYYCLRRRRRQEEKHKKAASAAAAGSLKKTIIELKYGPELEAPGLAPLSQGPLLGPEAVTRIPYLPAAGEVEQYKLVESADTPKASKGSYMEVRTGDPPERRDCELGRPGPDSQSSVAEISTIAKEVDKVNQIINNCIDALKSESTSFQGVKSGPVSVAEPPLVLLSEPLAAKHGFLAPGYKDAFGHSLQRHHSVEAAGPPRASTSSSGSVRSPRAFRAEAVGVHKAAAAEAKYIEKGSPAADAILTVTPAAAVLRAEAEKGRQYGEHRHSYPGSHPAEPPAPPGPPPPPPHEGLGRKASILEPLTRPRPRDLAYSQLSPQYHSLSYSSSPEYTCRASQSIWERFRLSRRRHKEEEEFMAAGHALRKKVQFAKDEDLHDILDYWKGVSAQHKS

SEQ ID NO: 29248 - protein, 828 aa, Homo sapiens; identical to SEQ ID NO: 29247
  Payload ID: 5704
  Gene Symbol: ELFN1
  Gene Name: extracellular leucine-rich repeat and fibronectin type III domain containing 1
  Uniprot ID: P0C7U0
  ENSP ID: ENSP00000457193

SEQ ID NO: 29249 - protein, 820 aa, Homo sapiens
  Payload ID: 5705
  Gene Symbol: ELFN2
  Gene Name: extracellular leucine-rich repeat and fibronectin type III domain containing 2
  Uniprot ID: Q5R3F8
  ENSP ID: ENSP00000385277
MLRLGLCAAALLCVCRPGAVRADCWLIEGDKGYVWLAICSQNQPPYETIPQHINSTVHDLRLNENKLKAVLYSSLNRFGNLTDLNLTKNEISYIEDGAFLGQSSLQVLQLGYNKLSNLTEGMLRGMSRLQFLFVQHNLIEVVTPTAFSECPSLISIDLSSNRLSRLDGATFASLASLMVCELAGNPFNCECDLFGFLAWLVVFNNVTKNYDRLQCESPREFAGYPLLVPRPYHSLNAITVLQAKCRNGSLPARPVSHPTPYSTDAQREPDENSGFNPDEILSVEPPASSTTDASAGPAIKLHHVTFTSATLVVIIPHPYSKMYILVQYNNSYFSDVMTLKNKKEIVTLDKLRAHTEYTFCVTSLRNSRRFNHTCLTFTTRDPVPGDLAPSTSTTTHYIMTILGCLFGMVIVLGAVYYCLRKRRMQEEKQKSVNVKKTILEMRYGADVDAGSIVHAAQKLGEPPVLPVSRMASIPSMIGEKLPTAKGLEAGLDTPKVATKGNYIEVRTGAGGDGLARPEDDLPDLENGQGSAAEISTIAKEVDKVNQIINNCIDALKLDSASFLGGGSSSGDPELAFECQSLPAAAAASSATGPGALERPSFLSPPYKESSHHPLQRQLSADAAVTRKTCSVSSSGSIKSAKVFSLDVPDHPAATGLAKGDSKYIEKGSPLNSPLDRLPLVPAGSGGGSGGGGGIHHLEVKPAYHCSEHRHSFPALYYEEGADSLSQRVSFLKPLTRSKRDSTYSQLSPRHYYSGYSSSPEYSSESTHKIWERFRPYKKHHREEVYMAAGHALRKKVQFAKDEDLHDILDYWKGVSAQQKL

SEQ ID NO: 29250 - protein, 820 aa, Homo sapiens; identical to SEQ ID NO: 29249
  Payload ID: 5705
  Gene Symbol: ELFN2
  Gene Name: extracellular leucine-rich repeat and fibronectin type III domain containing 2
  Uniprot ID: Q5R3F8
  ENSP ID: ENSP00000480338

SEQ ID NO: 29251 - protein, 415 aa, Homo sapiens
  Payload ID: 5706
  Gene Symbol: ECM1
  Gene Name: extracellular matrix protein 1
  Uniprot ID: Q16610
  ENSP ID: ENSP00000271630
MGTTARAALVLTYLAVASAASEGGFTATGQRQLRPEHFQEVGYAAPPSPPLSRSLPMDHPDSSQHGPPFEGQSQVQPPPSQEATPLQQEKLLPAQLPAEKEVGPPLPQEAVPLQKELPSLQHPNEQKEGTPAPFGDQSHPEPESWNAAQHCQQDRSQGGWGHRLDGFPPGRPSPDNLNQICLPNRQHVVYGPWNLPQSSYSHLTRQGETLNFLEIGYSRCCHCRSHTNRLECAKLVWEDTLDKYCDREYAVKTHHHLCCRHPPSPTRDECFARRAPYPNYDRDILTIDIGRVTPNLMGHLCGNQRVLTKHKHIPGLIHNMTARCCDLPFPEQACCAEEEKLTFINDLCGPRRNIWRDPALCCYLSPGDEQVNCFNINYLRNVALVSGDTENAKGQGEQGSTGGTNISSTSEPKEE

SEQ ID NO: 29252 - protein, 540 aa, Homo sapiens
  Payload ID: 5706
  Gene Symbol: ECM1
  Gene Name: extracellular matrix protein 1
  Uniprot ID: Q16610
  ENSP ID: ENSP00000358043
MGTTARAALVLTYLAVASAASEGGFTATGQRQLRPEHFQEVGYAAPPSPPLSRSLPMDHPDSSQHGPPFEGQSQVQPPPSQEATPLQQEKLLPAQLPAEKEVGPPLPQEAVPLQKELPSLQHPNEQKEGTPAPFGDQSHPEPESWNAAQHCQQDRSQGGWGHRLDGFPPGRPSPDNLNQICLPNRQHVVYGPWNLPQSSYSHLTRQGETLNFLEIGYSRCCHCRSHTNRLECAKLVWEEAMSRFCEAEFSVKTRPHWCCTRQGEARFSCFQEEAPQPHYQLRACPSHQPDISSGLELPFPPGVPTLDNIKNICHLRRFRSVPRNLPATDPLQRELLALIQLEREFQRCCRQGNNHTCTWKAWEDTLDKYCDREYAVKTHHHLCCRHPPSPTRDECFARRAPYPNYDRDILTIDIGRVTPNLMGHLCGNQRVLTKHKHIPGLIHNMTARCCDLPFPEQACCAEEEKLTFINDLCGPRRNIWRDPALCCYLSPGDEQVNCFNINYLRNVALVSGDTENAKGQGEQGSTGGTNISSTSEPKEE

SEQ ID NO: 29253 - protein, 567 aa, Homo sapiens
  Payload ID: 5706
  Gene Symbol: ECM1
  Gene Name: extracellular matrix protein 1
  Uniprot ID: Q16610
  ENSP ID: ENSP00000358045
MGTTARAALVLTYLAVASAASEGGFTATGQRQLRPEHFQEVGYAAPPSPPLSRSLPMDHPDSSQHGPPFEGQSGKEGRGPRPHSQPWLGERVGCSHIPPSIVQPPPSQEATPLQQEKLLPAQLPAEKEVGPPLPQEAVPLQKELPSLQHPNEQKEGTPAPFGDQSHPEPESWNAAQHCQQDRSQGGWGHRLDGFPPGRPSPDNLNQICLPNRQHVVYGPWNLPQSSYSHLTRQGETLNFLEIGYSRCCHCRSHTNRLECAKLVWEEAMSRFCEAEFSVKTRPHWCCTRQGEARFSCFQEEAPQPHYQLRACPSHQPDISSGLELPFPPGVPTLDNIKNICHLRRFRSVPRNLPATDPLQRELLALIQLEREFQRCCRQGNNHTCTWKAWEDTLDKYCDREYAVKTHHHLCCRHPPSPTRDECFARRAPYPNYDRDILTIDIGRVTPNLMGHLCGNQRVLTKHKHIPGLIHNMTARCCDLPFPEQACCAEEEKLTFINDLCGPRRNIWRDPALCCYLSPGDEQVNCFNINYLRNVALVSGDTENAKGQGEQGSTGGTNISSTSEPKEE

SEQ ID NO: 29254 - protein, 699 aa, Homo sapiens
  Payload ID: 5707
  Gene Symbol: ECM2
  Gene Name: extracellular matrix protein 2, female organ and adipocyte specific
  Uniprot ID: O94769
  ENSP ID: ENSP00000344758
MKIAVLFCFFLLIIFQTDFGKNEEIPRKQRRKIYHRRLRKSSTSHKHRSNRQLGIQQTTVFTPVARLPIVNFDYSMEEKFESFSSFPGVESSYNVLPGKKGHCLVKGITMYNKAVWSPEPCTTCLCSDGRVLCDETMCHPQRCPQTVIPEGECCPVCSATVSYSLLSGIALNDRNEFSGDSSEQREPTNLLHKQLPPPQVGMDRIVRKEALQSEEDEEVKEEDTEQKRETPESRNQGQLYSEGDSRGGDRKQRPGEERRLAHQQQRQGREEEEDEEEEGEEGEEDEEDEEDPVRGDMFRMPSRSPLPAPPRGTLRLPSGCSLSYRTISCINAMLTQIPPLTAPQITSLELTGNSIASIPDEAFNGLPNLERLDLSKNNITSSGIGPKAFKLLKKLMRLNMDGNNLIQIPSQLPSTLEELKVNENNLQAIDEESLSDLNQLVTLELEGNNLSEANVNPLAFKPLKSLAYLRLGKNKFRIIPQGLPGSIEELYLENNQIEEITEICFNHTRKINVIVLRYNKIEENRIAPLAWINQENLESIDLSYNKLYHVPSYLPKSLLHLVLLGNQIERIPGYVFGHMEPGLEYLYLSFNKLADDGMDRVSFYGAYHSLRELFLDHNDLKSIPPGIQEMKALHFLRLNNNKIRNILPEEICNAEEDDDSNLEHLHLENNYIKIREIPSYTFSCIRSYSSIVLKPQNIK

SEQ ID NO: 29255 - protein, 164 aa, Homo sapiens
  Payload ID: 5707
  Gene Symbol: ECM2
  Gene Name: extracellular matrix protein 2, female organ and adipocyte specific
  ENSP ID: ENSP00000364690
MKIAVLFCFFLLIIFQTDFGKNEEIPRKQRRKIYHRRLRKSSTSHKHRSNRQLGIQQTTVFTPVARLPIVNFDYSMEEKFESFSSFPGVESSYNVLPGKKGHCLVKGITMYNKAVWSPEPCTTCLCSDGRVLCDETMCHPQRCPQTVIPEGECCPVCSATGTEI

SEQ ID NO: 29256 - protein, 160 aa, Homo sapiens
  Payload ID: 5707
  Gene Symbol: ECM2
  Gene Name: extracellular matrix protein 2, female organ and adipocyte specific
  ENSP ID: ENSP00000378905
MKIAVLFCFFLLIIFQTDFGKNEEIPRKQRRKIYHRRLRKSSTSHKHRSNRQLGIQQTTVFTPVARLPIVNFDYSMEEKFESFSSFPGVESSYNVLPGKKGHCLVKGITMYNKAVWSPEPCTTCLCSDGRVLCDETMCHPQRCPQTVIPEGECCPVCSAT

SEQ ID NO: 29257 - protein, 643 aa, Homo sapiens
  Payload ID: 5707
  Gene Symbol: ECM2
  Gene Name: extracellular matrix protein 2, female organ and adipocyte specific
  Uniprot ID: O94769
  ENSP ID: ENSP00000393971
MKIAVLFCFFLLIIFQTDFGKNEEIPRKQRRKIYHRRLRKSSTSHKHRSNRQLGIQQTTVFTPVARLPIVNFDYSMEEKFESFSSFPGVESSYNVLPGKKGHCLVKGITMYNKAVWSPEPCTTCLCSDGRVLCDETMCHPQRCPQTVIPEGECCPVCSATEQREPTNLLHKQLPPPQVGMDRIVRKEALQSEEDEEVKEEDTEQKRETPESRNQGQLYSEGDSRGGDRKQRPGEERRLAHQQQRQGREEEEDEEEEGEEGEEDEEDEEDPVRGDMFRMPSRSPLPAPPRGTLRLPSGCSLSYRTISCINAMLTQIPPLTAPQITSLELTGNSIASIPDEAFNGLPNLERLDLSKNNITSSGIGPKAFKLLKKLMRLNMDGNNLIQIPSQLPSTLEELKVNENNLQAIDEESLSDLNQLVTLELEGNNLSEANVNPLAFKPLKSLAYLRLGKNKFRIIPQGLPGSIEELYLENNQIEEITEICFNHTRKINVIVLRYNKIEENRIAPLAWINQENLESIDLSYNKLYHVPSYLPKSLLHLVLLGNQIERIPGYVFGHMEPGLEYLYLSFNKLADDGMDRVSFYGAYHSLRELFLDHNDLKSIPPGIQEMKALHFLRLNNNKIRCVSDAVLETVTNRSDVAFPLW

SEQ ID NO: 29258 - protein, 586 aa, Homo sapiens
  Payload ID: 5708
  Gene Symbol: EYA1
  Gene Name: EYA transcriptional coactivator and phosphatase 1
  ENSP ID: ENSP00000303221
MEMQDLTSPHSRLSGSSESPSGPKLGNSHINSNSMTPNGTEVKTEPMSSSETASTTADGSLNNFSGSAIGSSSFSPRPTHQFSPPQIYPSKPYPHILPTPSSQTMAAYGQTQFTTGMQQATAYATYPQPGQPYGISSYGIKTEGGLSQSQSPGQTGFLSYGTSFSTPQPGQAPYSYQMQGSSFTTSSGIYTGNNSLTNSSGFNSSQQDYPSYPSFGQGQYAQYYNSSPYPAHYMTSSNTSPTTPSTNATYQLQEPPSGITSQAVTDPTAEYSTIHSPSTPIKDSDSDRLRRGSDGKSRGRGRRNNNPSPPPDSDLERVFIWDLDETIIVFHSLLTGSYANRYGRDPPTSVSLGLRMEEMIFNLADTHLFFNDLEECDQVHIDDVSSDDNGQDLSTYNFGTDGFPAAATSANLCLATGVRGGVDWMRKLAFRYRRVKEIYNTYKNNVGGLLGPAKREAWLQLRAEIEALTDSWLTLALKALSLIHSRTNCVNILVTTTQLIPALAKVLLYGLGIVFPIENIYSATKIGKESCFERIIQRFGRKVVYVVIGDGVEEEQGAKKHAMPFWRISSHSDLMALHHALELEYL

SEQ ID NO: 29259 - protein, 592 aa, Homo sapiens
  Payload ID: 5708
  Gene Symbol: EYA1
  Gene Name: EYA transcriptional coactivator and phosphatase 1
  Uniprot ID: Q99502
  ENSP ID: ENSP00000342626
MEMQDLTSPHSRLSGSSESPSGPKLGNSHINSNSMTPNGTEVKTEPMSSSETASTTADGSLNNFSGSAIGSSSFSPRPTHQFSPPQIYPSNRPYPHILPTPSSQTMAAYGQTQFTTGMQQATAYATYPQPGQPYGISSYGALWAGIKTEGGLSQSQSPGQTGFLSYGTSFSTPQPGQAPYSYQMQGSSFTTSSGIYTGNNSLTNSSGFNSSQQDYPSYPSFGQGQYAQYYNSSPYPAHYMTSSNTSPTTPSTNATYQLQEPPSGITSQAVTDPTAEYSTIHSPSTPIKDSDSDRLRRGSDGKSRGRGRRNNNPSPPPDSDLERVFIWDLDETIIVFHSLLTGSYANRYGRDPPTSVSLGLRMEEMIFNLADTHLFFNDLEECDQVHIDDVSSDDNGQDLSTYNFGTDGFPAAATSANLCLATGVRGGVDWMRKLAFRYRRVKEIYNTYKNNVGGLLGPAKREAWLQLRAEIEALTDSWLTLALKALSLIHSRTNCVNILVTTTQLIPALAKVLLYGLGIVFPIENIYSATKIGKESCFERIIQRFGRKVVYVVIGDGVEEEQGAKKHAMPFWRISSHSDLMALHHALELEYL

SEQ ID NO: 29260 - protein, 559 aa, Homo sapiens
  Payload ID: 5708
  Gene Symbol: EYA1
  Gene Name: EYA transcriptional coactivator and phosphatase 1
  Uniprot ID: Q99502
  ENSP ID: ENSP00000373392
MLLFPQVAVKTEPMSSSETASTTADGSLNNFSGSAIGSSSFSPRPTHQFSPPQIYPSNRPYPHILPTPSSQTMAAYGQTQFTTGMQQATAYATYPQPGQPYGISSYGALWAGIKTEGGLSQSQSPGQTGFLSYGTSFSTPQPGQAPYSYQMQGSSFTTSSGIYTGNNSLTNSSGFNSSQQDYPSYPSFGQGQYAQYYNSSPYPAHYMTSSNTSPTTPSTNATYQLQEPPSGITSQAVTDPTAEYSTIHSPSTPIKDSDSDRLRRGSDGKSRGRGRRNNNPSPPPDSDLERVFIWDLDETIIVFHSLLTGSYANRYGRDPPTSVSLGLRMEEMIFNLADTHLFFNDLEECDQVHIDDVSSDDNGQDLSTYNFGTDGFPAAATSANLCLATGVRGGVDWMRKLAFRYRRVKEIYNTYKNNVGGLLGPAKREAWLQLRAEIEALTDSWLTLALKALSLIHSRTNCVNILVTTTQLIPALAKVLLYGLGIVFPIENIYSATKIGKESCFERIIQRFGRKVVYVVIGDGVEEEQGAKKHAMPFWRISSHSDLMALHHALELEYL

SEQ ID NO: 29261 - protein, 558 aa, Homo sapiens
  Payload ID: 5708
  Gene Symbol: EYA1
  Gene Name: EYA transcriptional coactivator and phosphatase 1
  ENSP ID: ENSP00000373393
MLLFPQVAVKTEPMSSSETASTTADGSLNNFSGSAIGSSSFSPRPTHQFSPPQIYPSKPYPHILPTPSSQTMAAYGQTQFTTGMQQATAYATYPQPGQPYGISSYGALWAGIKTEGGLSQSQSPGQTGFLSYGTSFSTPQPGQAPYSYQMQGSSFTTSSGIYTGNNSLTNSSGFNSSQQDYPSYPSFGQGQYAQYYNSSPYPAHYMTSSNTSPTTPSTNATYQLQEPPSGITSQAVTDPTAEYSTIHSPSTPIKDSDSDRLRRGSDGKSRGRGRRNNNPSPPPDSDLERVFIWDLDETIIVFHSLLTGSYANRYGRDPPTSVSLGLRMEEMIFNLADTHLFFNDLEECDQVHIDDVSSDDNGQDLSTYNFGTDGFPAAATSANLCLATGVRGGVDWMRKLAFRYRRVKEIYNTYKNNVGGLLGPAKREAWLQLRAEIEALTDSWLTLALKALSLIHSRTNCVNILVTTTQLIPALAKVLLYGLGIVFPIENIYSATKIGKESCFERIIQRFGRKVVYVVIGDGVEEEQGAKKHAMPFWRISSHSDLMALHHALELEYL

SEQ ID NO: 29262 - protein, 592 aa, Homo sapiens; identical to SEQ ID NO: 29259
  Payload ID: 5708
  Gene Symbol: EYA1
  Gene Name: EYA transcriptional coactivator and phosphatase 1
  Uniprot ID: Q99502
  ENSP ID: ENSP00000373394

SEQ ID NO: 29263 - protein, 591 aa, Homo sapiens
  Payload ID: 5708
  Gene Symbol: EYA1
  Gene Name: EYA transcriptional coactivator and phosphatase 1
  ENSP ID: ENSP00000373395
MEMQDLTSPHSRLSGSSESPSGPKLGNSHINSNSMTPNGTEVKTEPMSSSETASTTADGSLNNFSGSAIGSSSFSPRPTHQFSPPQIYPSKPYPHILPTPSSQTMAAYGQTQFTTGMQQATAYATYPQPGQPYGISSYGALWAGIKTEGGLSQSQSPGQTGFLSYGTSFSTPQPGQAPYSYQMQGSSFTTSSGIYTGNNSLTNSSGFNSSQQDYPSYPSFGQGQYAQYYNSSPYPAHYMTSSNTSPTTPSTNATYQLQEPPSGITSQAVTDPTAEYSTIHSPSTPIKDSDSDRLRRGSDGKSRGRGRRNNNPSPPPDSDLERVFIWDLDETIIVFHSLLTGSYANRYGRDPPTSVSLGLRMEEMIFNLADTHLFFNDLEECDQVHIDDVSSDDNGQDLSTYNFGTDGFPAAATSANLCLATGVRGGVDWMRKLAFRYRRVKEIYNTYKNNVGGLLGPAKREAWLQLRAEIEALTDSWLTLALKALSLIHSRTNCVNILVTTTQLIPALAKVLLYGLGIVFPIENIYSATKIGKESCFERIIQRFGRKVVYVVIGDGVEEEQGAKKHAMPFWRISSHSDLMALHHALELEYL

SEQ ID NO: 29264 - protein, 557 aa, Homo sapiens
  Payload ID: 5708
  Gene Symbol: EYA1
  Gene Name: EYA transcriptional coactivator and phosphatase 1
  Uniprot ID: Q99502
  ENSP ID: ENSP00000410176
MEMQDLTSPHSRLSGSSESPSGPKLGNSHINSNSMTPNGTEVKTEPMSSSETASTTADGSLNNFSGSAIGSSSFSPRPTHQFSPPQIYPSNRPYPHILPTPSSQTMAAYGQTQFTTGMQQATAYATYPQPGQPYGISSYGIKTEGGLSQSQSPGQTGFLSYGTSFSTPQPGQAPYSYQMQGSSFTTSSGIYTGNNSLTNSSGFNSSQQDYPSYPSFGQGQYAQYYNSSPYPAHYMTSSNTSPTTPSTNATYQLQEPPSGITSQAVTDPTAEYSTIHSPSTPIKDSDSDRLRRGSDGKSRGRGRRNNNPSPPPDSDLERVFIWDLDETIIVFHSLLTGSYANRYGRECDQVHIDDVSSDDNGQDLSTYNFGTDGFPAAATSANLCLATGVRGGVDWMRKLAFRYRRVKEIYNTYKNNVGGLLGPAKREAWLQLRAEIEALTDSWLTLALKALSLIHSRTNCVNILVTTTQLIPALAKVLLYGLGIVFPIENIYSATKIGKESCFERIIQRFGRKVVYVVIGDGVEEEQGAKKHAMPFWRISSHSDLMALHHALELEYL

SEQ ID NO: 29265 - protein, 212 aa, Homo sapiens
  Payload ID: 5708
  Gene Symbol: EYA1
  Gene Name: EYA transcriptional coactivator and phosphatase 1
  ENSP ID: ENSP00000428391
MEMQDLTSPHSRLSGSSESPSGPKLGNSHINSNSMTPNGTEVKTEPMSSSETASTTADGSLNNFSGSAIGSSSFSPRPTHQFSPPQIYPSNLPQECNKLQPMPRTHSQDSRTAFPHMASRLKVDCHSLSHLDRQDFSAMAQASVPLNLDRHHTATRCKVAVLQHHQEYIQEIIHSQIPLDLIVHSRTIRLIPVLARVSTHSIITAHRIQHII

SEQ ID NO: 29266 - protein, 41 aa, Homo sapiens
  Payload ID: 5708
  Gene Symbol: EYA1
  Gene Name: EYA transcriptional coactivator and phosphatase 1
  ENSP ID: ENSP00000428517
MEEMIFNLADTHLFFNDLEESRASRESMMLVKLGRRKPSSA

SEQ ID NO: 29267 - protein, 508 aa, Homo sapiens
  Payload ID: 5709
  Gene Symbol: EYA2
  Gene Name: EYA transcriptional coactivator and phosphatase 2
  ENSP ID: ENSP00000321590
MVELVISPSLTVNSDCLDKLKFNRADAAVWTLSDRQGITKSAPLRVSQLFSRSCPRVLPRQPSTAMAAYGQTQYSAGIQQATPYTAYPPPAQAYGIPSYSIKTEDSLNHSPGQSGFLSYGSSFSTSPTGQSPYTYQMHGTTGFYQGGNGLGNAAGFGSVHQDYPSYPGFPQSQYPQYYGSSYNPPYVPASSICPSPLSTSTYVLQEASHNVPNQSSESLAGEYNTHNGPSTPAKEGDTDRPHRASDGKLRGRSKRSSDPSPAGDNEIERVFVWDLDETIIIFHSLLTGTFASRYGKDCDQIHVDDVSSDDNGQDLSTYNFSADGFHSSAPGANLCLGSGVHGGVDWMRKLAFRYRRVKEMYNTYKNNVGGLIGTPKRETWLQLRAELEALTDLWLTHSLKALNLINSRPNCVNVLVTTTQLIPALAKVLLYGLGSVFPIENIYSATKTGKESCFERIMQRFGRKAVYVVIGDGVEEEQGAKKHNMPFWRISCHADLEALRHALELEYL

SEQ ID NO: 29268 - protein, 538 aa, Homo sapiens
  Payload ID: 5709
  Gene Symbol: EYA2
  Gene Name: EYA transcriptional coactivator and phosphatase 2
  Uniprot ID: O00167
  ENSP ID: ENSP00000333640
MVELVISPSLTVNSDCLDKLKFNRADAAVWTLSDRQGITKSAPLRVSQLFSRSCPRVLPRQPSTAMAAYGQTQYSAGIQQATPYTAYPPPAQAYGIPSYSIKTEDSLNHSPGQSGFLSYGSSFSTSPTGQSPYTYQMHGTTGFYQGGNGLGNAAGFGSVHQDYPSYPGFPQSQYPQYYGSSYNPPYVPASSICPSPLSTSTYVLQEASHNVPNQSSESLAGEYNTHNGPSTPAKEGDTDRPHRASDGKLRGRSKRSSDPSPAGDNEIERVFVWDLDETIIIFHSLLTGTFASRYGKDTTTSVRIGLMMEEMIFNLADTHLFFNDLEDCDQIHVDDVSSDDNGQDLSTYNFSADGFHSSAPGANLCLGSGVHGGVDWMRKLAFRYRRVKEMYNTYKNNVGGLIGTPKRETWLQLRAELEALTDLWLTHSLKALNLINSRPNCVNVLVTTTQLIPALAKVLLYGLGSVFPIENIYSATKTGKESCFERIMQRFGRKAVYVVIGDGVEEEQGAKKHNMPFWRISCHADLEALRHALELEYL

SEQ ID NO: 29269 - protein, 459 aa, Homo sapiens
  Payload ID: 5709
  Gene Symbol: EYA2
  Gene Name: EYA transcriptional coactivator and phosphatase 2
  Uniprot ID: O00167
  ENSP ID: ENSP00000349986
MVELVISPSLTVNSDCLDKLKFNRADAAVWTLSDRQGITKSAPLRVSQLFSRSCPRVLPRQPSTAMAAYGQTQYSAGIQQATPYTAYPPPAQAYGIPSYSIKTEDSLNHSPGQSGFLSYGSSFSTSPTGQSPYTYQMHGTTGFYQGGNGLGNAAGFGSVHQDYPSYPGFPQSQYPQYYGSSYNPPYVPASSICPSPLSTSTYVLQEASHNVPNQSSESLAGEYNTHNGPSTPAKEGDTDRPHRASDGKLRGRSKRSSDPSPAGDNEIERVFVWDLDETIIIFHSLLTGTFASRYGKDTTTSVRIGLMMEEMIFNLADTHLFFNDLEDCDQIHVDDVSSDDNGQDLSTYNFSADGFHSSAPGANLCLGSGVHGGVDWMRKLAFRYRRVKEMYNTYKNNVGGKESCFERIMQRFGRKAVYVVIGDGVEEEQGAKKHNMPFWRISCHADLEALRHALELEYL

SEQ ID NO: 29270 - protein, 197 aa, Homo sapiens
  Payload ID: 5709
  Gene Symbol: EYA2
  Gene Name: EYA transcriptional coactivator and phosphatase 2
  ENSP ID: ENSP00000395427
QLFSRSCPRVLPRQPSTAMAAYGQTQYSAGIQQATPYTAYPPPAQAYGIPSYSIKTEDSLNHSPGQSGFLSYGSSFSTSPTGQSPYTYQMHGEYNTHNGPSTPAKEGDTDRPHRASDGKLRGRSKRSSDPSPAGDNEIERVFVWDLDETIIIFHSLLTGTFASRYGKDTTTSVRIGLMMEEMIFNLADTHLFFNDLE

SEQ ID NO: 29271 - protein, 514 aa, Homo sapiens
  Payload ID: 5709
  Gene Symbol: EYA2
  Gene Name: EYA transcriptional coactivator and phosphatase 2
  Uniprot ID: O00167
  ENSP ID: ENSP00000417105
MVELVISPSLTVNSDCLDKLKFNRADAAVWTLSDRQGITKSAPLRVSQLFSRSCPRVLPRQPSTAMAAYGQTQYSAGIQQATPYTAYPPPAQAYGIPSFSTSPTGQSPYTYQMHGTTGFYQGGNGLGNAAGFGSVHQDYPSYPGFPQSQYPQYYGSSYNPPYVPASSICPSPLSTSTYVLQEASHNVPNQSSESLAGEYNTHNGPSTPAKEGDTDRPHRASDGKLRGRSKRSSDPSPAGDNEIERVFVWDLDETIIIFHSLLTGTFASRYGKDTTTSVRIGLMMEEMIFNLADTHLFFNDLEDCDQIHVDDVSSDDNGQDLSTYNFSADGFHSSAPGANLCLGSGVHGGVDWMRKLAFRYRRVKEMYNTYKNNVGGLIGTPKRETWLQLRAELEALTDLWLTHSLKALNLINSRPNCVNVLVTTTQLIPALAKVLLYGLGSVFPIENIYSATKTGKESCFERIMQRFGRKAVYVVIGDGVEEEQGAKKHNMPFWRISCHADLEALRHALELEYL

SEQ ID NO: 29272 - protein, 508 aa, Homo sapiens; identical to SEQ ID NO: 29267
  Payload ID: 5709
  Gene Symbol: EYA2
  Gene Name: EYA transcriptional coactivator and phosphatase 2
  ENSP ID: ENSP00000483392

SEQ ID NO: 29273 - protein, 536 aa, Homo sapiens
  Payload ID: 5710
  Gene Symbol: EYA3
  Gene Name: EYA transcriptional coactivator and phosphatase 3
  Uniprot ID: Q99504
  ENSP ID: ENSP00000362970
MEEEQDLPEQPVKKAKMQESGEQTISQVSNPDVSDQKPETSSLASNLPMSEEIMTCTDYIPRSSNDYTSQMYSAKPYAHILSVPVSETAYPGQTQYQTLQQTQPYAVYPQATQTYGLPPFASSTNASLISTSSTIANIPAAAVASISNQDYPTYTILGQNQYQACYPSSSFGVTGQTNSDAESTTLAATTYQSEKPSVMAPAPAAQRLSSGDPSTSPSLSQTTPSKDTDDQSRKNMTSKNRGKRKADATSSQDSELERVFLWDLDETIIIFHSLLTGSYAQKYGKDPTVVIGSGLTMEEMIFEVADTHLFFNDLEECDQVHVEDVASDDNGQDLSNYSFSTDGFSGSGGSGSHGSSVGVQGGVDWMRKLAFRYRKVREIYDKHKSNVGGLLSPQRKEALQRLRAEIEVLTDSWLGTALKSLLLIQSRKNCVNVLITTTQLVPALAKVLLYGLGEIFPIENIYSATKIGKESCFERIVSRFGKKVTYVVIGDGRDEEIAAKQQLYFLDMEALGCQLEPTALILFIQLSGNLSNYNKL

SEQ ID NO: 29274 - protein, 416 aa, Homo sapiens
  Payload ID: 5710
  Gene Symbol: EYA3
  Gene Name: EYA transcriptional coactivator and phosphatase 3
  ENSP ID: ENSP00000362971
MIIPHKCILQTSSTNASLISTSSTIANIPAAAVASISNQDYPTYTILGQNQYQACYPSSSFGVTGQTNSDAESTTLAATTYQSEKPSVMAPAPAAQRLSSDPSTSPSLSQTTPSKDTDDQSRKNMTSKNRGKRKADATSSQDSELERVFLWDLDETIIIFHSLLTGSYAQKYGKDPTVVIGSGLTMEEMIFEVADTHLFFNDLEECDQVHVEDVASDDNGQDLSNYSFSTDGFSGSGGSGSHGSSVGVQGGVDWMRKLAFRYRKVREIYDKHKSNVGGLLSPQRKEALQRLRAEIEVLTDSWLGTALKSLLLIQSRKNCVNVLITTTQLVPALAKVLLYGLGEIFPIENIYSATKIGKESCFERIVSRFGKKVTYVVIGDGRDEEIAAKQHNMPFWRITNHGDLVSLHQALELDFL

SEQ ID NO: 29275 - protein, 573 aa, Homo sapiens
  Payload ID: 5710
  Gene Symbol: EYA3
  Gene Name: EYA transcriptional coactivator and phosphatase 3
  Uniprot ID: Q99504
  ENSP ID: ENSP00000362978
MEEEQDLPEQPVKKAKMQESGEQTISQVSNPDVSDQKPETSSLASNLPMSEEIMTCTDYIPRSSNDYTSQMYSAKPYAHILSVPVSETAYPGQTQYQTLQQTQPYAVYPQATQTYGLPPFGALWPGMKPESGLIQTPSPSQHSVLTCTTGLTTSQPSPAHYSYPIQASSTNASLISTSSTIANIPAAAVASISNQDYPTYTILGQNQYQACYPSSSFGVTGQTNSDAESTTLAATTYQSEKPSVMAPAPAAQRLSSGDPSTSPSLSQTTPSKDTDDQSRKNMTSKNRGKRKADATSSQDSELERVFLWDLDETIIIFHSLLTGSYAQKYGKDPTVVIGSGLTMEEMIFEVADTHLFFNDLEECDQVHVEDVASDDNGQDLSNYSFSTDGFSGSGGSGSHGSSVGVQGGVDWMRKLAFRYRKVREIYDKHKSNVGGLLSPQRKEALQRLRAEIEVLTDSWLGTALKSLLLIQSRKNCVNVLITTTQLVPALAKVLLYGLGEIFPIENIYSATKIGKESCFERIVSRFGKKVTYVVIGDGRDEEIAAKQHNMPFWRITNHGDLVSLHQALELDFL

SEQ ID NO: 29276 - protein, 520 aa, Homo sapiens
  Payload ID: 5710
  Gene Symbol: EYA3
  Gene Name: EYA transcriptional coactivator and phosphatase 3
  Uniprot ID: Q99504
  ENSP ID: ENSP00000405587
MTCTDYIPRSSNDYTSQMYSAKPYAHILSVPVSETAYPGQTQYQTLQQTQPYAVYPQATQTYGLPPFGALWPGMKPESGLIQTPSPSQHSVLTCTTGLTTSQPSPAHYSYPIQASSTNASLISTSSTIANIPAAAVASISNQDYPTYTILGQNQYQACYPSSSFGVTGQTNSDAESTTLAATTYQSEKPSVMAPAPAAQRLSSGDPSTSPSLSQTTPSKDTDDQSRKNMTSKNRGKRKADATSSQDSELERVFLWDLDETIIIFHSLLTGSYAQKYGKDPTVVIGSGLTMEEMIFEVADTHLFFNDLEECDQVHVEDVASDDNGQDLSNYSFSTDGFSGSGGSGSHGSSVGVQGGVDWMRKLAFRYRKVREIYDKHKSNVGGLLSPQRKEALQRLRAEIEVLTDSWLGTALKSLLLIQSRKNCVNVLITTTQLVPALAKVLLYGLGEIFPIENIYSATKIGKESCFERIVSRFGKKVTYVVIGDGRDEEIAAKQHNMPFWRITNHGDLVSLHQALELDFL

SEQ ID NO: 29277 - protein, 527 aa, Homo sapiens
  Payload ID: 5710
  Gene Symbol: EYA3
  Gene Name: EYA transcriptional coactivator and phosphatase 3
  Uniprot ID: Q99504
  ENSP ID: ENSP00000442558
MEEEQDLPEQPVKKAKMQESGEQTISQVSNPDVSDQKPETSSLASNLPMSEEIMTCTDYIPRSSNDYTSQMYSAKPYAHILSVPVSETAYPGQTQYQTLQQTQPYAVYPQATQTYGLPPFASSTNASLISTSSTIANIPAAAVASISNQDYPTYTILGQNQYQACYPSSSFGVTGQTNSDAESTTLAATTYQSEKPSVMAPAPAAQRLSSGDPSTSPSLSQTTPSKDTDDQSRKNMTSKNRGKRKADATSSQDSELERVFLWDLDETIIIFHSLLTGSYAQKYGKDPTVVIGSGLTMEEMIFEVADTHLFFNDLEECDQVHVEDVASDDNGQDLSNYSFSTDGFSGSGGSGSHGSSVGVQGGVDWMRKLAFRYRKVREIYDKHKSNVGGLLSPQRKEALQRLRAEIEVLTDSWLGTALKSLLLIQSRKNCVNVLITTTQLVPALAKVLLYGLGEIFPIENIYSATKIGKESCFERIVSRFGKKVTYVVIGDGRDEEIAAKQHNMPFWRITNHGDLVSLHQALELDFL

SEQ ID NO: 29278 - protein, 639 aa, Homo sapiens
  Payload ID: 5711
  Gene Symbol: EYA4
  Gene Name: EYA transcriptional coactivator and phosphatase 4
  Uniprot ID: O95677
  ENSP ID: ENSP00000347294
MEDSQDLNEQSVKKTCTESDVSQSQNSRSMEMQDLASPHTLVGGGDTPGSSKLEKSNLSSTSVTTNGTGGENMTVLNTADWLLSCNTPSSATMSLLAVKTEPLNSSETTATTGDGALDTFTGSVITSSGYSPRSAHQYSPQLYPSKPYPHILSTPAAQTMSAYAGQTQYSGMQQPAVYTAYSQTGQPYSLPTYDLGVMLPAIKTESGLSQTQSPLQSGCLSYSPGFSTPQPGQTPYSYQMPGSSFAPSSTIYANNSVSNSTNFSGSQQDYPSYTAFGQNQYAQYYSASTYGAYMTSNNTADGTPSSTSTYQLQESLPGLTNQPGEFDTMQSPSTPIKDLDERTCRSSGSKSRGRGRKNNPSPPPDSDLERVFVWDLDETIIVFHSLLTGSYAQKYGKDPPMAVTLGLRMEEMIFNLADTHLFFNDLEECDQVHIDDVSSDDNGQDLSTYSFATDGFHAAASSANLCLPTGVRGGVDWMRKLAFRYRRVKELYNTYKNNVGGLLGPAKRDAWLQLRAEIEGLTDSWLTNALKSLSIISTRSNCINVLVTTTQLIPALAKVLLYSLGGAFPIENIYSATKIGKESCFERIVSRFGTNITYVVIGDGRDEEHAANQHNMPFWRISSHSDLLALHQALELEYL

SEQ ID NO: 29279 - protein, 616 aa, Homo sapiens
  Payload ID: 5711
  Gene Symbol: EYA4
  Gene Name: EYA transcriptional coactivator and phosphatase 4
  Uniprot ID: O95677
  ENSP ID: ENSP00000347434
MEDSQDLNEQSVKKTCTESDVSQSQNSRSMEMQDLASPHTLVGGGDTPGSSKLEKSNLSSTSVTTNGTGVSLLAVKTEPLNSSETTATTGDGALDTFTGSVITSSGYSPRSAHQYSPQLYPSKPYPHILSTPAAQTMSAYAGQTQYSGMQQPAVYTAYSQTGQPYSLPTYDLGVMLPAIKTESGLSQTQSPLQSGCLSYSPGFSTPQPGQTPYSYQMPGSSFAPSSTIYANNSVSNSTNFSGSQQDYPSYTAFGQNQYAQYYSASTYGAYMTSNNTADGTPSSTSTYQLQESLPGLTNQPGEFDTMQSPSTPIKDLDERTCRSSGSKSRGRGRKNNPSPPPDSDLERVFVWDLDETIIVFHSLLTGSYAQKYGKDPPMAVTLGLRMEEMIFNLADTHLFFNDLEECDQVHIDDVSSDDNGQDLSTYSFATDGFHAAASSANLCLPTGVRGGVDWMRKLAFRYRRVKELYNTYKNNVGGLLGPAKRDAWLQLRAEIEGLTDSWLTNALKSLSIISTRSNCINVLVTTTQLIPALAKVLLYSLGGAFPIENIYSATKIGKESCFERIMQRFGRKVVYVVIGDGVEEEQAAKKHNMPFWRISSHSDLLALHQALELEYL

SEQ ID NO: 29280 - protein, 639 aa, Homo sapiens
  Payload ID: 5711
  Gene Symbol: EYA4
  Gene Name: EYA transcriptional coactivator and phosphatase 4
  Uniprot ID: O95677
  ENSP ID: ENSP00000356870
MEDSQDLNEQSVKKTCTESDVSQSQNSRSMEMQDLASPHTLVGGGDTPGSSKLEKSNLSSTSVTTNGTGGENMTVLNTADWLLSCNTPSSATMSLLAVKTEPLNSSETTATTGDGALDTFTGSVITSSGYSPRSAHQYSPQLYPSKPYPHILSTPAAQTMSAYAGQTQYSGMQQPAVYTAYSQTGQPYSLPTYDLGVMLPAIKTESGLSQTQSPLQSGCLSYSPGFSTPQPGQTPYSYQMPGSSFAPSSTIYANNSVSNSTNFSGSQQDYPSYTAFGQNQYAQYYSASTYGAYMTSNNTADGTPSSTSTYQLQESLPGLTNQPGEFDTMQSPSTPIKDLDERTCRSSGSKSRGRGRKNNPSPPPDSDLERVFVWDLDETIIVFHSLLTGSYAQKYGKDPPMAVTLGLRMEEMIFNLADTHLFFNDLEECDQVHIDDVSSDDNGQDLSTYSFATDGFHAAASSANLCLPTGVRGGVDWMRKLAFRYRRVKELYNTYKNNVGGLLGPAKRDAWLQLRAEIEGLTDSWLTNALKSLSIISTRSNCINVLVTTTQLIPALAKVLLYSLGGAFPIENIYSATKIGKESCFERIMQRFGRKVVYVVIGDGVEEEQAAKKHNMPFWRISSHSDLLALHQALELEYL

SEQ ID NO: 29281 - protein, 570 aa, Homo sapiens
  Payload ID: 5711
  Gene Symbol: EYA4
  Gene Name: EYA transcriptional coactivator and phosphatase 4
  ENSP ID: ENSP00000388670
MEDSQDLNEQSVKKTCTESDVSQSQNSRSMEMQDLASPHTLVGGGDTPGSSKLEKSNLSSTSVTTNGTGVITSSGYSPRSAHQYSPQLYPSKPYPHILSTPAAQTMSAYAGQTQYSGMQQPAVYTAYSQTGQPYSLPTYDLGVMLPAIKTESGLSQTQSPLQSGCLSYSPGFSTPQPGQTPYSYQMPGSSFAPSSTIYANNSVSNSTNFSGSQQDYPSYTAFGQNQYAQYYSASTYGAYMTSNNTADGTPSSTSTYQLQESLPGLTNQPGTDLHPGEFDTMQSPSTPIKDLDERTCRSSGSKSRGRGRKNNPSPPPDSDLERVFVWDLDETIIVFHSLLTGSYAQKYGKDPPMAVTLGLRMEEMIFNLADTHLFFNDLEECDQVHIDDVSSDDNGQDLSTYSFATDGFHAAASSANLCLPTGVRGGVDWMRKLAFRYRRVKELYNTYKNNVGGLLGPAKRDAWLQLRAEIEGLTDSWLTNALKSLSIISTRSNCINVLVTTTQLIPALAKVLLYSLGGAFPIENIYSATKIGKESCFERIVSRFGTNITYVVIGDGRDEEHAANQKRLPA

SEQ ID NO: 29282 - protein, 585 aa, Homo sapiens
  Payload ID: 5711
  Gene Symbol: EYA4
  Gene Name: EYA transcriptional coactivator and phosphatase 4
  Uniprot ID: O95677
  ENSP ID: ENSP00000395916
MEDSQDLNEQSVKKTCTESDVSQSQNSRSMEMQDLASPHTLVGGGDTPGSSKLEKSNLSSTSVTTNGTGVITSSGYSPRSAHQYSPQLYPSKPYPHILSTPAAQTMSAYAGQTQYSGMQQPAVYTAYSQTGQPYSLPTYDLGVMLPAIKTESGLSQTQSPLQSGCLSYSPGFSTPQPGQTPYSYQMPGSSFAPSSTIYANNSVSNSTNFSGSQQDYPSYTAFGQNQYAQYYSASTYGAYMTSNNTADGTPSSTSTYQLQESLPGLTNQPGEFDTMQSPSTPIKDLDERTCRSSGSKSRGRGRKNNPSPPPDSDLERVFVWDLDETIIVFHSLLTGSYAQKYGKDPPMAVTLGLRMEEMIFNLADTHLFFNDLEECDQVHIDDVSSDDNGQDLSTYSFATDGFHAAASSANLCLPTGVRGGVDWMRKLAFRYRRVKELYNTYKNNVGGLLGPAKRDAWLQLRAEIEGLTDSWLTNALKSLSIISTRSNCINVLVTTTQLIPALAKVLLYSLGGAFPIENIYSATKIGKESCFERIVSRFGTNITYVVIGDGRDEEHAANQHNMPFWRISSHSDLLALHQALELEYL

SEQ ID NO: 29283 - protein, 639 aa, Homo sapiens; identical to SEQ ID NO: 29278
  Payload ID: 5711
  Gene Symbol: EYA4
  Gene Name: EYA transcriptional coactivator and phosphatase 4
  Uniprot ID: O95677
  ENSP ID: ENSP00000404558

SEQ ID NO: 29284 - protein, 645 aa, Homo sapiens
  Payload ID: 5711
  Gene Symbol: EYA4
  Gene Name: EYA transcriptional coactivator and phosphatase 4
  ENSP ID: ENSP00000432770
MEDSQDLNEQSVKKTCTESDVSQSQNSRSMEMQDLASPHTLVGGGDTPGSSKLEKSNLSSTSVTTNGTGGENMTVLNTADWLLSCNTPSSATMSLLAVKTEPLNSSETTATTGDGALDTFTGSVITSSGYSPRSAHQYSPQLYPSKPYPHILSTPAAQTMSAYAGQTQYSGMQQPAVYTAYSQTGQPYSLPTYDLGVMLPAIKTESGLSQTQSPLQSGCLSYSPGFSTPQPGQTPYSYQMPGSSFAPSSTIYANNSVSNSTNFSGSQQDYPSYTAFGQNQYAQYYSASTYGAYMTSNNTADGTPSSTSTYQLQESLPGLTNQPGTDLHPGEFDTMQSPSTPIKDLDERTCRSSGSKSRGRGRKNNPSPPPDSDLERVFVWDLDETIIVFHSLLTGSYAQKYGKDPPMAVTLGLRMEEMIFNLADTHLFFNDLEECDQVHIDDVSSDDNGQDLSTYSFATDGFHAAASSANLCLPTGVRGGVDWMRKLAFRYRRVKELYNTYKNNVGGLLGPAKRDAWLQLRAEIEGLTDSWLTNALKSLSIISTRSNCINVLVTTTQLIPALAKVLLYSLGGAFPIENIYSATKIGKESCFERIMQRFGRKVVYVVIGDGVEEEQAAKKHNMPFWRISSHSDLLALHQALELEYL

SEQ ID NO: 29285 - protein, 616 aa, Homo sapiens
  Payload ID: 5711
  Gene Symbol: EYA4
  Gene Name: EYA transcriptional coactivator and phosphatase 4
  ENSP ID: ENSP00000433219
MEDSQDLNEQSVKKTCTESDVSQSQNSRSMEMQDLASPHTLVGGGDTPGSSKLEKSNLSSTSVTTNGTGVSLLAVKTEPLNSSETTATTGDGALDTFTGSVITSSGYSPRSAHQYSPQLYPSKPYPHILSTPAAQTMSAYAGQTQYSGMQQPAVYTAYSQTGQPYSLPTYDLGVMLPAIKTESGLSQTQSPLQSGCLSYSPGFSTPQPGQTPYSYQMPGSSFAPSSTIYANNSVSNSTNFSGSQQDYPSYTAFGQNQYAQYYSASTYGAYMTSNNTADGTPSSTSTYQLQESLPGLTNQPGEFDTMQSPSTPIKDLDERTCRSSGSKSRGRGRKNNPSPPPDSDLERVFVWDLDETIIVFHSLLTGSYAQKYGKDPPMAVTLGLRMEEMIFNLADTHLFFNDLEECDQVHIDDVSSDDNGQDLSTYSFATDGFHAAASSANLCLPTGVRGGVDWMRKLAFRYRRVKELYNTYKNNVGGLLGPAKRDAWLQLRAEIEGLTDSWLTNALKSLSIISTRSNCINVLVTTTQLIPALAKVLLYSLGGAFPIENIYSATKIGKESCFERIVSRFGTNITYVVIGDGRDEEHAANQHNMPFWRISSHSDLLALHQALELEYL

SEQ ID NO: 29286 - protein, 594 aa, Homo sapiens
  Payload ID: 5712
  Gene Symbol: EYS
  Gene Name: eyes shut homolog (Drosophila)
  Uniprot ID: Q5T1H1
  ENSP ID: ENSP00000341818
MTDKSIVILSLMVFHSSFINGKTCRRQLVEEWHPQPSSYVVNWTLTENICLDFYRDCWFLGVNTKIDTSGNQAVPQICPLQIQLGDILVISSEPSLQFPEINLMNVSETSFVGCVQNTTTEDQLLFGCRLKGMHTVNSKWLSVGTHYFITVMASGPSPCPLGLRLNVTVKQQFCQESLSSEFCSGHGKCLSEAWSKTYSCHCQPPFSGKYCQELDACSFKPCKNNGSCINKRENWDEQAYECVCHPPFTGKNCSEIIGQCQPHVCFHGNCSNITSNSFICECDEQFSGPFCEVSAKPCVSLLFWKRGICPNSSSAYTYECPKGSSSQNGETDVSEFSLVPCQNGTDCIKISNDVMCICSPIFTDLLCKSIQTSCESFPLRNNATCKKCEKDYPCSCISGFTEKNCEKAIDHCKLLSINCLNEEWCFNIIGRFKYVCIPGCTKNPCWFLKNVYLIHQHLCYCGVTFHGICQDKGPAQFEYVWQLGFAGSEGEKCQGVIDAYFFLAANCTEDATYVNDPEDNNSSCWFPHEGTKEICANGCSCLSEEDSQEYRYLCFLRWAGNMYLENTTDDQENECQHEAVCKDEINRPRYLCII

SEQ ID NO: 29287 - protein, 3165 aa, Homo sapiens
  Payload ID: 5712
  Gene Symbol: EYS
  Gene Name: eyes shut homolog (Drosophila)
  Uniprot ID: Q5T1H1
  ENSP ID: ENSP00000359650
MTDKSIVILSLMVFHSSFINGKTCRRQLVEEWHPQPSSYVVNWTLTENICLDFYRDCWFLGVNTKIDTSGNQAVPQICPLQIQLGDILVISSEPSLQFPEINLMNVSETSFVGCVQNTTTEDQLLFGCRLKGMHTVNSKWLSVGTHYFITVMASGPSPCPLGLRLNVTVKQQFCQESLSSEFCSGHGKCLSEAWSKTYSCHCQPPFSGKYCQELDACSFKPCKNNGSCINKRENWDEQAYECVCHPPFTGKNCSEIIGQCQPHVCFHGNCSNITSNSFICECDEQFSGPFCEVSAKPCVSLLFWKRGICPNSSSAYTYECPKGSSSQNGETDVSEFSLVPCQNGTDCIKISNDVMCICSPIFTDLLCKSIQTSCESFPLRNNATCKKCEKDYPCSCISGFTEKNCEKAIDHCKLLSINCLNEEWCFNIIGRFKYVCIPGCTKNPCWFLKNVYLIHQHLCYCGVTFHGICQDKGPAQFEYVWQLGFAGSEGEKCQGVIDAYFFLAANCTEDATYVNDPEDNNSSCWFPHEGTKEICANGCSCLSEEDSQEYRYLCFLRWAGNMYLENTTDDQENECQHEAVCKDEINRPRCSCSLSYIGRLCVVNVDYCLGNHSISVHGLCLALSHNCNCSGLQRYERNICEIDTEDCKSASCKNGTTSTHLRGYFFRKCVPGFKGTQCEIDIDECASHPCKNGATCIDQPGNYFCQCVPPFKVVDGFSCLCNPGYVGIRCEQDIDDCILNACEHNSTCKDLHLSYQCVCLSDWEGNFCEQESNECKMNPCKNNSTCTDLYKSYRCECTSGWTGQNCSEEINECDSDPCMNGGLCHESTIPGQFVCLCPPLYTGQFCHQRYNLCDLLHNPCRNNSTCLALVDANQHCICREEFEGKNCEIDVKDCLFLSCQDYGDCEDMVNNFRCICRPGFSGSLCEIEINECSSEPCKNNGTCVDLTNRFFCNCEPEYHGPFCELDVNKCKISPCLDEENCVYRTDGYNCLCAPGYTGINCEINLDECLSEPCLHDGVCIDGINHYTCDCKSGFFGTHCETNANDCLSNPCLHGRCTELINEYPCSCDADGTSTQCKIKINDCTSIPCMNEGFCQKSAHGFTCICPRGYTGAYCEKSIDNCAEPELNSVICLNGGICVDGPGHTFDCRCLPGFSGQFCEININECSSSPCLHGADCEDHINGYVCKCQPGWSGHHCENELECIPNSCVHELCMENEPGSTCLCTPGFMTCSIGLLCGDEIRRITCLTPIFQRTDPISTQTYTIPPSETLVSSFPSIKATRIPAIMDTYPVDQGPKQTGIVKHDILPTTGLATLRISTPLESYLLQELIVTRELSAKHSLLSSADVSSSRFLNFGIRDPAQIVQDKTSVSHMPIRTSAATLGFFFPDRRARTPFIMSSLMSDFIFPTQSLLFENCQTVALSATPTTSVIRSIPGADIELNRQSLLSRGFLLIAASISATPVVSRGAQEDIEEYSADSLISRREHWRLLSPSMSPIFPAKVIISKQVTILNSSALHRFSTKAFNPSEYQAITEASSNQRLTNIKSQAADSLRELSQTCATCSMTEIKSSREFSDQVLHSKQSHFYETFWMNSAILASWYALMGAQTITSGHSFSSATEITPSVAFTEVPSLFPSKKSAKRTILSSSLEESITLSSNLDVNLCLDKTCLSIVPSQTISSDLMNSDLTSKMTTDELSVSENILKLLKIRQYGITMGPTEVLNQESLLDMEKSKGSHTLFKLHPSDSSLDFELNLQIYPDVTLKTYSEITHANDFKNNLPPLTGSVPDFSEVTTNVAFYTVSATPALSIQTSSSMSVIRPDWPYFTDYMTSLKKEVKTSSEWSKWELQPSVQYQEFPTASRHLPFTRSLTLSSLESILAPQRLMISDFSCVRYYGDSYLEFQNVALNPQNNISLEFQTFSSYGLLLYVKQDSNLVDGFFIQLFIENGTLKYHFYCPGEAKFKSINTTVRVDNGQKYTLLIRQELDPCNAELTILGRNTQICESINHVLGKPLPKSGSVFIGGFPDLHGKIQMPVPVKNFTGCIEVIEINNWRSFIPSKAVKNYHINNCRSQGFMLSPTASFVDASDVTQGVDTMWTSVSPSVAAPSVCQQDVCHNGGTCHAIFLSSGIVSFQCDCPLHFTGRFCEKDAGLFFPSFNGNSYLELPFLKFVLEKEHNRTVTIYLTIKTNSLNGTILYSNGNNCGKQFLHLFLVEGRPSVKYGCGNSQNILTVSANYSINTNAFTPITIRYTTPVGSPGVVCMIEMTADGKPPVQKKDTEISHASQAYFESMFLGHIPANVQIHKKAGPVYGFRGCILDLQVNNKEFFIIDEARHGKNIENCHVPWCAHHLCRNNGTCISDNENLFCECPRLYSGKLCQFASCENNPCGNGATCVPKSGTDIVCLCPYGRSGPLCTDAINITQPRFSGTDAFGYTSFLAYSRISDISFHYEFHLKFQLANNHSALQNNLIFFTGQKGHGLNGDDFLAVGLLNGSVVYSYNLGSGIASIRSEPLNLSLGVHTVHLGKFFQEGWLKVDDHKNKSIIAPGRLVGLNVFSQFYVGGYSEYTPDLLPNGADFKNGFQGCIFTLQVRTEKDGHFRGLGNPEGHPNAGRSVGQCHASPCSLMKCGNGGTCIESGTSVYCNCTTGWKGSFCTETVSTCDPEHDPPHHCSRGATCISLPHGYTCFCPLGTTGIYCEQALILIVILEKPKPAERKVKKEALSISDPSFRSNELSWMSFASFHVRKKTHIQLQFQPLAADGILFYAAQHLKAQSGDFLCISLVNSSVQLRYNLGDRTIILETLQKVTINGSTWHIIKAGRVGAEGYLDLDGINVTEKASTKMSSLDTNTDFYIGGVSSLNLVNPMAIENEPVGFQGCIRQVIINNQELQLTEFGAKGGSNVGDCDGTACGYNTCRNGGECTVNGTTFSCRCLPDWAGNTCNQSVSCLNNLCLHQSLCIPDQSFSYSCLCTLGWVGRYCENKTSFSTAKFMGNSYIKYIDPNYRMRNLQFTTISLNFSTTKTEGLIVWMGIAQNEENDFLAIGLHNQTLKIAVNLGERISVPMSYNNGTFCCNKWHHVVVIQNQTLIKAYINNSLILSEDIDPHKNFVALNYDGICYLGGFEYGRKVNIVTQEIFKTNFVGKIKDVVFFQEPKNIELIKLEGYNVYDGDEQNEVT

SEQ ID NO: 29288 - protein, 3144 aa, Homo sapiens
  Payload ID: 5712
  Gene Symbol: EYS
  Gene Name: eyes shut homolog (Drosophila)
  Uniprot ID: Q5T1H1
  ENSP ID: ENSP00000359652
MTDKSIVILSLMVFHSSFINGKTCRRQLVEEWHPQPSSYVVNWTLTENICLDFYRDCWFLGVNTKIDTSGNQAVPQICPLQIQLGDILVISSEPSLQFPEINLMNVSETSFVGCVQNTTTEDQLLFGCRLKGMHTVNSKWLSVGTHYFITVMASGPSPCPLGLRLNVTVKQQFCQESLSSEFCSGHGKCLSEAWSKTYSCHCQPPFSGKYCQELDACSFKPCKNNGSCINKRENWDEQAYECVCHPPFTGKNCSEIIGQCQPHVCFHGNCSNITSNSFICECDEQFSGPFCEVSAKPCVSLLFWKRGICPNSSSAYTYECPKGSSSQNGETDVSEFSLVPCQNGTDCIKISNDVMCICSPIFTDLLCKSIQTSCESFPLRNNATCKKCEKDYPCSCISGFTEKNCEKAIDHCKLLSINCLNEEWCFNIIGRFKYVCIPGCTKNPCWFLKNVYLIHQHLCYCGVTFHGICQDKGPAQFEYVWQLGFAGSEGEKCQGVIDAYFFLAANCTEDATYVNDPEDNNSSCWFPHEGTKEICANGCSCLSEEDSQEYRYLCFLRWAGNMYLENTTDDQENECQHEAVCKDEINRPRCSCSLSYIGRLCVVNVDYCLGNHSISVHGLCLALSHNCNCSGLQRYERNICEIDTEDCKSASCKNGTTSTHLRGYFFRKCVPGFKGTQCEIDIDECASHPCKNGATCIDQPGNYFCQCVPPFKVVDGFSCLCNPGYVGIRCEQDIDDCILNACEHNSTCKDLHLSYQCVCLSDWEGNFCEQESNECKMNPCKNNSTCTDLYKSYRCECTSGWTGQNCSEEINECDSDPCMNGGLCHESTIPGQFVCLCPPLYTGQFCHQRYNLCDLLHNPCRNNSTCLALVDANQHCICREEFEGKNCEIDVKDCLFLSCQDYGDCEDMVNNFRCICRPGFSGSLCEIEINECSSEPCKNNGTCVDLTNRFFCNCEPEYHGPFCELDVNKCKISPCLDEENCVYRTDGYNCLCAPGYTGINCEINLDECLSEPCLHDGVCIDGINHYTCDCKSGFFGTHCETNANDCLSNPCLHGRCTELINEYPCSCDADGTSTQCKIKINDCTSIPCMNEGFCQKSAHGFTCICPRGYTGAYCEKSIDNCAEPELNSVICLNGGICVDGPGHTFDCRCLPGFSGQFCEININECSSSPCLHGADCEDHINGYVCKCQPGWSGHHCENELECIPNSCVHELCMENEPGSTCLCTPGFMTCSIGLLCGDEIRRITCLTPIFQRTDPISTQTYTIPPSETLVSSFPSIKATRIPAIMDTYPVDQGPKQTGIVKHDILPTTGLATLRISTPLESYLLQELIVTRELSAKHSLLSSADVSSSRFLNFGIRDPAQIVQDKTSVSHMPIRTSAATLGFFFPDRRARTPFIMSSLMSDFIFPTQSLLFENCQTVALSATPTTSVIRSIPGADIELNRQSLLSRGFLLIAASISATPVVSRGAQEDIEEYSADSLISRREHWRLLSPSMSPIFPAKVIISKQVTILNSSALHRFSTKAFNPSEYQAITEASSNQRLTNIKSQAADSLRELSQTCATCSMTEIKSSREFSDQVLHSKQSHFYETFWMNSAILASWYALMGAQTITSGHSFSSATEITPSVAFTEVPSLFPSKKSAKRTILSSSLEESITLSSNLDVNLCLDKTCLSIVPSQTISSDLMNSDLTSKMTTDELSVSENILKLLKIRQYGITMGPTEVLNQESLLDMEKSKGSHTLFKLHPSDSSLDFELNLQIYPDVTLKTYSEITHANDFKNNLPPLTGSVPDFSEVTTNVAFYTVSATPALSIQTSSSMSVIRPDWPYFTDYMTSLKKEVKTSSEWSKWELQPSVQYQEFPTASRHLPFTRSLTLSSLESILAPQRLMISDFSCVRYYGDSYLEFQNVALNPQNNISLEFQTFSSYGLLLYVKQDSNLVDGFFIQLFIENGTLKYHFYCPGEAKFKSINTTVRVDNGQKYTLLIRQELDPCNAELTILGRNTQICESINHVLGKPLPKSGSVFIGGFPDLHGKIQMPVPVKNFTGCIEVIEINNWRSFIPSKAVKNYHINNCRSQGFMLSPTASFVDASDVTQGVDTMWTSVSPSVAAPSVCQQDVCHNGGTCHAIFLSSGIVSFQCDCPLHFTGRFCEKDAGLFFPSFNGNSYLELPFLKFVLEKEHNRTVTIYLTIKTNSLNGTILYSNGNNCGKQFLHLFLVEGRPSVKYGCGNSQNILTVSANYSINTNAFTPITIRYTTPVGSPGVVCMIEMTADGKPPVQKKDTEISHASQAYFESMFLGHIPANVQIHKKAGPVYGFRGCILDLQVNNKEFFIIDEARHGKNIENCHVPWCAHHLCRNNGTCISDNENLFCECPRLYSGKLCQFASCENNPCGNGATCVPKSGTDIVCLCPYGRSGPLCTDAINITQPRFSGTDAFGYTSFLAYSRISDISFHYEFHLKFQLANNHSALQNNLIFFTGQKGHGLNGDDFLAVGLLNGSVVYSYNLGSGIASIRSEPLNLSLGVHTVHLGKFFQEGWLKVDDHKNKSIIAPGRLVGLNVFSQFYVGGYSEYTPDLLPNGADFKNGFQGCIFTLQVRTEKDGHFRGLGNPEGHPNAGRSVGQCHASPCSLMKCGNGGTCIESGTSVYCNCTTGWKGSFCTETVSTCDPEHDPPHHCSRGATCISLPHGYTCFCPLGTTGIYCEQALSISDPSFRSNELSWMSFASFHVRKKTHIQLQFQPLAADGILFYAAQHLKAQSGDFLCISLVNSSVQLRYNLGDRTIILETLQKVTINGSTWHIIKAGRVGAEGYLDLDGINVTEKASTKMSSLDTNTDFYIGGVSSLNLVNPMAIENEPVGFQGCIRQVIINNQELQLTEFGAKGGSNVGDCDGTACGYNTCRNGGECTVNGTTFSCRCLPDWAGNTCNQSVSCLNNLCLHQSLCIPDQSFSYSCLCTLGWVGRYCENKTSFSTAKFMGNSYIKYIDPNYRMRNLQFTTISLNFSTTKTEGLIVWMGIAQNEENDFLAIGLHNQTLKIAVNLGERISVPMSYNNGTFCCNKWHHVVVIQNQTLIKAYINNSLILSEDIDPHKNFVALNYDGICYLGGFEYGRKVNIVTQEIFKTNFVGKIKDVVFFQEPKNIELIKLEGYNVYDGDEQNEVT

SEQ ID NO: 29289 - protein, 3165 aa, Homo sapiens; identical to SEQ ID NO: 29287
  Payload ID: 5712
  Gene Symbol: EYS
  Gene Name: eyes shut homolog (Drosophila)
  Uniprot ID: Q5T1H1
  ENSP ID: ENSP00000359655

SEQ ID NO: 29290 - protein, 619 aa, Homo sapiens
  Payload ID: 5712
  Gene Symbol: EYS
  Gene Name: eyes shut homolog (Drosophila)
  Uniprot ID: Q5T1H1
  ENSP ID: ENSP00000377042
MTDKSIVILSLMVFHSSFINGKTCRRQLVEEWHPQPSSYVVNWTLTENICLDFYRDCWFLGVNTKIDTSGNQAVPQICPLQIQLGDILVISSEPSLQFPEINLMNVSETSFVGCVQNTTTEDQLLFGCRLKGMHTVNSKWLSVGTHYFITVMASGPSPCPLGLRLNVTVKQQFCQESLSSEFCSGHGKCLSEAWSKTYSCHCQPPFSGKYCQELDACSFKPCKNNGSCINKRENWDEQAYECVCHPPFTGKNCSEIIGQCQPHVCFHGNCSNITSNSFICECDEQFSGPFCEVSAKPCVSLLFWKRGICPNSSSAYTYECPKGSSSQNGETDVSEFSLVPCQNGTDCIKISNDVMCICSPIFTDLLCKSIQTSCESFPLRNNATCKKCEKDYPCSCISGFTEKNCEKAIDHCKLLSINCLNEEWCFNIIGRFKYVCIPGCTKNPCWFLKNVYLIHQHLCYCGVTFHGICQDKGPAQFEYVWQLGFAGSEGEKCQGVIDAYFFLAANCTEDATYVNDPEDNNSSCWFPHEGTKEICANGCSCLSEEDSQEYRYLCFLRWAGNMYLENTTDDQENECQHEAVCKDEINRPRRILNTVIPHQIQQHIERFIQHDQVGFIVRI

SEQ ID NO: 29291 - protein, 473 aa, Homo sapiens
  Payload ID: 5712
  Gene Symbol: EYS
  Gene Name: eyes shut homolog (Drosophila)
  ENSP ID: ENSP00000381585
  MOD_RES (1)..(1): Any amino acid
XSINTNAFTPITIRYTTPVGSPGVVCMIEMTADGKPPVQKKDTEISHASQAYFESMFLGHIPANVQIHKKAGPVYGFRGCILDLQVNNKEFFIIDEARHGKNIENCHVPWCAHHLCRNNGTCISDNENLFCECPRLYSGKLCQFASCENNPCGNGATCVPKSGTDIVCLCPYGRSGPLCTDAINITQPRFSGTDAFGYTSFLAYSRISDISFHYEFHLKFQLANNHSALQNNLIFFTGQKGHGLNGDDFLAVGLLNGSVVYSYNLGSGIASIRSEPLNLSLGVHTVHLGKFFQEGWLKVDDHKNKSIIAPGRLVGLNVFSQFYVGGYSEYTPDLLPNGADFKNGFQGCIFTLQVRTEKDGHFRGLGNPEGHPNAGRSVGQCHASPCSLMKCGNGGTCIESGTSVYCNCTTGWKGSFCTETVSTCDPEHDPPHHCSRGATCISLPHGYTCFCPLGTTGIYCEQGHQFIGKDVFK

SEQ ID NO: 29292 - protein, 152 aa, Homo sapiens
  Payload ID: 5712
  Gene Symbol: EYS
  Gene Name: eyes shut homolog (Drosophila)
  ENSP ID: ENSP00000420530
MNVSETSFVGCVQNTTTEDQLLFGCRLKGMHTVNSKWLSVGTHYFITVMASGPSPCPLGLRLNVTVKQQFCQESLSSEFCSGHGKCLSEAWSKTYSCHCQPPFSGKYCQELDACSFKPCKNNGSCINKRENWDEQAYECVCHPPFTGLLGGK

SEQ ID NO: 29293 - protein, 3144 aa, Homo sapiens; identical to SEQ ID NO: 29288
  Payload ID: 5712
  Gene Symbol: EYS
  Gene Name: eyes shut homolog (Drosophila)
  Uniprot ID: Q5T1H1
  ENSP ID: ENSP00000424243

SEQ ID NO: 29294 - protein, 586 aa, Homo sapiens
  Payload ID: 5713
  Gene Symbol: EZR
  Gene Name: ezrin
  Uniprot ID: P15311
  ENSP ID: ENSP00000338934
MPKPINVRVTTMDAELEFAIQPNTTGKQLFDQVVKTIGLREVWYFGLHYVDNKGFPTWLKLDKKVSAQEVRKENPLQFKFRAKFYPEDVAEELIQDITQKLFFLQVKEGILSDEIYCPPETAVLLGSYAVQAKFGDYNKEVHKSGYLSSERLIPQRVMDQHKLTRDQWEDRIQVWHAEHRGMLKDNAMLEYLKIAQDLEMYGINYFEIKNKKGTDLWLGVDALGLNIYEKDDKLTPKIGFPWSEIRNISFNDKKFVIKPIDKKAPDFVFYAPRLRINKRILQLCMGNHELYMRRRKPDTIEVQQMKAQAREEKHQKQLERQQLETEKKRRETVEREKEQMMREKEELMLRLQDYEEKTKKAERELSEQIQRALQLEEERKRAQEEAERLEADRMAALRAKEELERQAVDQIKSQEQLAAELAEYTAKIALLEEARRRKEDEVEEWQHRAKEAQDDLVKTKEELHLVMTAPPPPPPPVYEPVSYHVQESLQDEGAEPTGYSAELSSEGIRDDRNEEKRITEAEKNERVQRQLLTLSSELSQARDENKRTHNDIIHNENMRQGRDKYKTLRQIRQGNTKQRIDEFEAL

SEQ ID NO: 29295 - protein, 586 aa, Homo sapiens; identical to SEQ ID NO: 29294
  Payload ID: 5713
  Gene Symbol: EZR
  Gene Name: ezrin
  Uniprot ID: P15311
  ENSP ID: ENSP00000356042

SEQ ID NO: 29296 - protein, 586 aa, Homo sapiens [sequence omitted]

SEQ ID NO: 29297 - protein, 299 aa, Homo sapiens
  Payload ID: 5714
  Gene Symbol: F11R
  Gene Name: F11 receptor
  Uniprot ID: Q9Y624
  ENSP ID: ENSP00000357005
MGTKAQVERKLLCLFILAILLCSLALGSVTVHSSEPEVRIPENNPVKLSCAYSGFSSPRVEWKFDQGDTTRLVCYNNKITASYEDRVTFLPTGITFKSVTREDTGTYTCMVSEEGGNSYGEVKVKLIVLVPPSKPTVNIPSSATIGNRAVLTCSEQDGSPPSEYTWFKDGIVMPTNPKSTRAFSNSSYVLNPTTGELVFDPLSASDTGEYSCEARNGYGTPMTSNAVRMEAVERNVGVIVAAVLVTLILLGILVFGIWFAYSRGHFDRTKKGTSSKKVIYSQPSARSEGEFKQTSSFLV

SEQ ID NO: 29298 - protein, 250 aa, Homo sapiens
  Payload ID: 5714
  Gene Symbol: F11R
  Gene Name: F11 receptor
  Uniprot ID: Q9Y624
  ENSP ID: ENSP00000440812
MGTKAQVERKLLCLFILAILLCSLALGSVTVHSSEPEVRIPENNPVKLSCAYSGFSSPRVEWKFDQGDTTRLVCYNNKITVPPSKPTVNIPSSATIGNRAVLTCSEQDGSPPSEYTWFKDGIVMPTNPKSTRAFSNSSYVLNPTTGELVFDPLSASDTGEYSCEARNGYGTPMTSNAVRMEAVERNVGVIVAAVLVTLILLGILVFGIWFAYSRGHFDRTKKGTSSKKVIYSQPSARSEGEFKQTSSFLV

SEQ ID NO: 29299 - protein, 279 aa, Homo sapiens [sequence omitted]

SEQ ID NO: 29300 - protein, 520 aa, Homo sapiens
  Payload ID: 5715
  Gene Symbol: FIP1L1
  Gene Name: factor interacting with PAPOLA and CPSF1
  Uniprot ID: Q6UN15
  ENSP ID: ENSP00000302993
MSAGEVERLVSELSGGTGGDEEEEWLYGDENEVERPEEENASANPPSGIEDETAENGVPKPKVTETEDDSDSDSDDDEDDVHVTIGDIKTGAPQYGSYGTAPVNLNIKTGGRVYGTTGTKVKGVDLDAPGSINGVPLLEVDLDSFEDKPWRKPGADLSDYFNYGFNEDTWKAYCEKQKRIRMGLEVIPVTSTTNKITVQQGRTGNSEKETALPSTKAEFTSPPSLFKTGLPPSRRLPGAIDVIGQTITISRVEGRRRANENSNIQVLSERSATEVDNNFSKPPPFFPPGAPPTHLPPPPFLPPPPTVSTAPPLIPPPGFPPPPGAPPPSLIPTIESGHSSGYDSRSARAFPYGNVAFPHLPGSAPSWPSLVDTSKQWDYYARREKDRDRERDRDRERDRDRDRERERTRERERERDHSPTPSVFNSDEERYRYREYAERGYERHRASREKEERHRERRHREKEETRHKSSRSNSRRRHESEEGDSHRRHKHKKSKRSKEGKEAGSEPAPEQESTEATPAE

SEQ ID NO: 29301 - protein, 594 aa, Homo sapiens
  Payload ID: 5715
  Gene Symbol: FIP1L1
  Gene Name: factor interacting with PAPOLA and CPSF1
  Uniprot ID: Q6UN15
  ENSP ID: ENSP00000336752
MSAGEVERLVSELSGGTGGDEEEEWLYGGPWDVHVHSDLAKDLDENEVERPEEENASANPPSGIEDETAENGVPKPKVTETEDDSDSDSDDDEDDVHVTIGDIKTGAPQYGSYGTAPVNLNIKTGGRVYGTTGTKVKGVDLDAPGSINGVPLLEVDLDSFEDKPWRKPGADLSDYFNYGFNEDTWKAYCEKQKRIRMGLEVIPVTSTTNKITAEDCTMEVTPGAEIQDGRFNLFKVQQGRTGNSEKETALPSTKAEFTSPPSLFKTGLPPSRNSTSSQSQTSTASRKANSSVGKWQDRYGRAESPDLRRLPGAIDVIGQTITISRVEGRRRANENSNIQVLSERSATEVDNNFSKPPPFFPPGAPPTHLPPPPFLPPPPTVSTAPPLIPPPGFPPPPGAPPPSLIPTIESGHSSGYDSRSARAFPYGNVAFPHLPGSAPSWPSLVDTSKQWDYYARREKDRDRERDRDRERDRDRDRERERTRERERERDHSPTPSVFNSDEERYRYREYAERGYERHRASREKEERHRERRHREKEETRHKSSRSNSRRRHESEEGDSHRRHKHKKSKRSKEGKEAGSEPAPEQESTEATPAE

SEQ ID NO: 29302 - protein, 588 aa, Homo sapiens
  Payload ID: 5715
  Gene Symbol: FIP1L1
  Gene Name: factor interacting with PAPOLA and CPSF1
  Uniprot ID: Q6UN15
  ENSP ID: ENSP00000351383
MSAGEVERLVSELSGGTGGDEEEEWLYGDENEVERPEEENASANPPSGIEDETAENGVPKPKVTETEDDSDSDSDDDEDDVHVTIGDIKTGAPQYGSYGTAPVNLNIKTGGRVYGTTGTKVKGVDLDAPGSINGVPLLEVDLDSFEDKPWRKPGADLSDYFNYGFNEDTWKAYCEKQKRIRMGLEVIPVTSTTNKITAEDCTMEVTPGAEIQDGRFNLFKVQQGRTGNSEKETALPSTKAEFTSPPSLFKTGLPPSRNSTSSQSQTSTASRKANSSVGKWQDRYGRAESPDLRRLPGAIDVIGQTITISRVEGRRRANENSNIQVLSERSATEVDNNFSKPPPFFPPGAPPTHLPPPPFLPPPPTVSTAPPLIPPPGIPITVPPPGFPPPPGAPPPSLIPTIESGHSSGYDSRSARAFPYGNVAFPHLPGSAPSWPSLVDTSKQWDYYARREKDRDRERDRDRERDRDRDRERERTRERERERDHSPTPSVFNSDEERYRYREYAERGYERHRASREKEERHRERRHREKEETRHKSSRSNSRRRHESEEGDSHRRHKHKKSKRSKEGKEAGSEPAPEQESTEATPAE

SEQ ID NO: 29303 - protein, 26 aa, Homo sapiens
  Payload ID: 5715
  Gene Symbol: FIP1L1
  Gene Name: factor interacting with PAPOLA and CPSF1
  ENSP ID: ENSP00000421241
  MOD_RES (1)..(1): Any amino acid
XANPPSGIEDETAENGVPKPGQKSKE

SEQ ID NO: 29304 - protein, 254 aa, Homo sapiens [sequence omitted]

SEQ ID NO: 29305 - protein, 378 aa, Homo sapiens
  Payload ID: 5715
  Gene Symbol: FIP1L1
  Gene Name: factor interacting with PAPOLA and CPSF1
  Uniprot ID: Q6UN15
  ENSP ID: ENSP00000425456
MSAGEVERLVSELSGGTGGDEEEEWLYGDENEVERPEEENASANPPSGIEDETAENGVPKPKVTETEDDSDSDSDDDEDDVHVTIGDIKTGAPQYGSYGTAPVNLNIKTGGRVYGTTGTKVKGVDLDAPGSINGVPLLEVDLDSFEDKPWRKPGADLSDYFNYGFNEDTWKAYCEKQKRIRMGLEVIPVTSTTNKITAEDCTMEVTPGAEIQDGRFNLFKVQQGRTGNSEKETALPSTKAEFTSPPSLFKTGLPPSRNSTSSQSQTSTASRKANSSVGKWQDRYGRAESPDLRRLPGAIDVIGQTITISRVEGRRRANENSNIQVLSERSATEVDNNFSKPPPFFPPGAPPTHLPPPPFLPPPPTVSTAPPLIPPPGK

SEQ ID NO: 29306 - protein, 486 aa, Homo sapiens
  Payload ID: 5716
  Gene Symbol: FOXRED1
  Gene Name: FAD-dependent oxidoreductase domain containing 1
  Uniprot ID: Q96CU9
  ENSP ID: ENSP00000263578
MIRRVLPHGMGRGLLTRRPGTRRGGFSLDWDGKVSEIKKKIKSILPGRSCDLLQDTSHLPPEHSDVVIVGGGVLGLSVAYWLKKLESRRGAIRVLVVERDHTYSQASTGLSVGGICQQFSLPENIQLSLFSASFLRNINEYLAVVDAPPLDLRFNPSGYLLLASEKDAAAMESNVKVQRQEGAKVSLMSPDQLRNKFPWINTEGVALASYGMEDEGWFDPWCLLQGLRRKVQSLGVLFCQGEVTRFVSSSQRMLTTDDKAVVLKRIHEVHVKMDRSLEYQPVECAIVINAAGAWSAQIAALAGVGEGPPGTLQGTKLPVEPRKRYVYVWHCPQGPGLETPLVADTSGAYFRREGLGSNYLGGRSPTEQEEPDPANLEVDHDFFQDKVWPHLALRVPAFETLKVQSAWAGYYDYNTFDQNGVVGPHPLVVNMYFATGFSGHGLQQAPGIGRAVAEMVLKGRFQTIDLSPFLFTRFYLGEKIQENNII

SEQ ID NO: 29307 - protein, 472 aa, Homo sapiens
  Payload ID: 5716
  Gene Symbol: FOXRED1
  Gene Name: FAD-dependent oxidoreductase domain containing 1
  Uniprot ID: Q96CU9
  ENSP ID: ENSP00000434178
MAHTGRTVGRLGEGDWDGKVSEIKKKIKSILPGRSCDLLQDTSHLPPEHSDVVIVGGGVLGLSVAYWLKKLESRRGAIRVLVVERDHTYSQASTGLSVGGICQQFSLPENIQLSLFSASFLRNINEYLAVVDAPPLDLRFNPSGYLLLASEKDAAAMESNVKVQRQEGAKVSLMSPDQLRNKFPWINTEGVALASYGMEDEGWFDPWCLLQGLRRKVQSLGVLFCQGEVTRFVSSSQRMLTTDDKAVVLKRIHEVHVKMDRSLEYQPVECAIVINAAGAWSAQIAALAGVGEGPPGTLQGTKLPVEPRKRYVYVWHCPQGPGLETPLVADTSGAYFRREGLGSNYLGGRSPTEQEEPDPANLEVDHDFFQDKVWPHLALRVPAFETLKVQSAWAGYYDYNTFDQNGVVGPHPLVVNMYFATGFSGHGLQQAPGIGRAVAEMVLKGRFQTIDLSPFLFTRFYLGEKIQENNII

SEQ ID NO: 29308 - protein, 48 aa, Homo sapiens
  Payload ID: 5716
  Gene Symbol: FOXRED1
  Gene Name: FAD-dependent oxidoreductase domain containing 1
  ENSP ID: ENSP00000434739
MIRRVLPHGMGRGLLTRRPGTRRGGFSLVFTGLHWALSRWDLSAVLIA

SEQ ID NO: 29309 - protein, 185 aa, Homo sapiens
  Payload ID: 5716
  Gene Symbol: FOXRED1
  Gene Name: FAD-dependent oxidoreductase domain containing 1
  ENSP ID: ENSP00000436374
MIRRVLPHGMGRGLLTRRPGTRRGGFSLDWDGKVSEIKKKIKSILPGRSCDLLQDTSHLPPEHSDVVIVGGGVLGLSVAYWLKKLESRRGAIRVLVVERDHTYSQASTGLSVGGICQQFSLPENIQLSLFSASFLRNINYLAVVDAPPLDLRFNPSGYLLLASEKDAAAMESNVKVQRDGGRRLV

SEQ ID NO: 29310 - protein, 684 aa, Homo sapiens
  Payload ID: 5717
  Gene Symbol: FOXRED2
  Gene Name: FAD-dependent oxidoreductase domain containing 2
  Uniprot ID: Q8IWF2
  ENSP ID: ENSP00000216187
MGLSAAAPLWGPPGLLLAIALHPALSVPPRRDYCVLGAGPAGLQMAYFLQRAGRDYAVFERAPRPGSFFTRYPRHRKLISINKRYTGKANAEFNLRHDWNSLLSHDPRLLFRHYSRAYFPDARDMVRYLGDFADTLGLRVQYNTTIAHVTLDKDRQAWNGHYFILTDQKGQVHQCSVLFVATGLSVPNQVDFPGSEYAEGYESVSVDPEDFVGQNVLILGRGNSAFETAENILGVTNFIHMLSRSRVRLSWATHYVGDLRAINNGLLDTYQLKSLDGLLESDLTDLAILKDSKGKFHVTPKFFLEEANTNQSADSITLPQDDNDNFAMRVPYDRVIRCLGWNFDFSIFNKSLRLNSGNAFGKKYPLIRASYESKGSRGLFILGTASHSVDYRKSAGGFIHGFRYTVRAVHRLLEHRHHSVTWPATELPITQLTSSIVRRVNEASGLYQMFGVLADVILLKENSTAFEYLEEFPIQMLAQLETLTGRKAKHGLFVINMEYGRNFSGPDKDVFFDDRSVGHTEDAWQSNFLHPVIYYYRYLPTEQEVRFRPAHWPLPRPTAIHHIVEDFLTDWTAPIGHILPLRRFLENCLDTDLRSFYAESCFLFALTRQKLPPFCQQGYLRMQGLVSTESLWQHRVESRLLRDYAPTGRRLEDSSQQLGDQEPLGSPLAPGPLAQSVDSNKEEL

SEQ ID NO: 29311 - protein, 684 aa, Homo sapiens; identical to SEQ ID NO: 29310
  Payload ID: 5717
  Gene Symbol: FOXRED2
  Gene Name: FAD-dependent oxidoreductase domain containing 2
  Uniprot ID: Q8IWF2
  ENSP ID: ENSP00000380400

SEQ ID NO: 29312 - protein, 684 aa, Homo sapiens; identical to SEQ ID NO: 29310
  Payload ID: 5717
  Gene Symbol: FOXRED2
  Gene Name: FAD-dependent oxidoreductase domain containing 2
  Uniprot ID: Q8IWF2
  ENSP ID: ENSP00000380401

SEQ ID NO: 29313 - protein, 86 aa, Homo sapiens
  Payload ID: 5717
  Gene Symbol: FOXRED2
  Gene Name: FAD-dependent oxidoreductase domain containing 2
  ENSP ID: ENSP00000409692
MGLSAAAPLWGPPGLLLAIALHPALSVPPRRDYCVLGAGPAGLQMAYFLQRAGRDYAVFERAPRPGSFFTRYPRHRKLISINKRYT

SEQ ID NO: 29314 - protein, 409 aa, Homo sapiens
  Payload ID: 5718
  Gene Symbol: FAXC
  Gene Name: failed axon connections homolog
  Uniprot ID: Q5TGI0
  ENSP ID: ENSP00000374328
MHWGVGFASSRPCVVDLSWNQSISFFGWWAGSEEPFSFYGDIIAFPLQDYGGIMAGLGSDPWWKKTLYLTGGALLAAAAYLLHELLVIRKQQEIDSKDAIILHQFARPNNGVPSLSPFCLKMETYLRMADLPYQNYFGGKLSAQGKMPWIEYNHEKVSGTEFIIDFLEEKLGVNLNKNLGPHERAISRAVTKMVEEHFYWTLAYCQWVDNLNETRKMLSLSGGGPFSNLLRWVVCHITKGIVKREMHGHGIGRFSEEEIYMLMEKDMRSLAGLLGDKKYIMGPKLSTLDATVFGHLAQAMWTLPGTRPERLIKGELINLAMYCERIRRKFWPEWHHDDDNTIYESEESSEGSKTHTPLLDFSFYSRTETFEDEGAENSFSRTPDTDFTGHSLFDSDVDMDDYTDHEQCK

SEQ ID NO: 29315 - protein, 129 aa, Homo sapiens
  Payload ID: 5718
  Gene Symbol: FAXC
  Gene Name: failed axon connections homolog
  Uniprot ID: Q5TGI0
  ENSP ID: ENSP00000445267
MGPKLSTLDATVFGHLAQAMWTLPGTRPERLIKGELINLAMYCERIRRKFWPEWHHDDDNTIYESEESSEGSKTHTPLLDFSFYSRTETFEDEGAENSFSRTPDTDFTGHSLFDSDVDMDDYTDHEQCK

SEQ ID NO: 29316 - protein, 351 aa, Homo sapiens
  Payload ID: 5719
  Gene Symbol: FAM47E-STBD1
  Gene Name: FAM47E-STBD1 readthrough
  ENSP ID: ENSP00000422067
MADRRRRLRPGTLAPVREGVNCRSRCFTKHKNGLKFPTSLHSRQLVFPRKGLDDFRKGCPPCTGLVTQVPVEGFLPQIYHRAPQLAPKKRQIKLLKEADVLSKLSPAQQARKAFLEDVEAHLTPHPLALYLNLEEAMPIELLSKVLEVLDPDRKLEDTWAYCQDTRKGMKEPTKLLKKHSTQVYLGPSKKTSVSNAGQWLYEEKPHKMDLLHENGPRPGLHENGISDIDEEFILKQFDIDYETKPSHDALHTMKLNQVPLELKRSVGLSKLQETEFFQKLGYERKLQKPQNPYKPKWVKMRYGAWYLNPKLWKKQRVDEPLVDPEVSHKAQEENFKKELQEQSIFKKAMDI

SEQ ID NO: 29317 - protein, 191 aa, Homo sapiens
  Payload ID: 5719
  Gene Symbol: FAM47E-STBD1
  Gene Name: FAM47E-STBD1 readthrough
  ENSP ID: ENSP00000423044
KKHSTQVYLGPSKKTSVSNAGQWLYEEKPHKMDLLHENGPRPGLHENVCKAVSDFCKWVTTFGISDIDEEFILKQFDIDYETKPSHDALHTMKLNQVPLELKRSVGLSKLQETEFFQKLGYERKLQKPQVCWSLLEVHSRPYLPGYHQWRLQNSKDCCLLLLLEASSWRGPSLMPARALLYESIFKKAMDI

SEQ ID NO: 29318 - protein, 53 aa, Homo sapiens
  Payload ID: 5719
  Gene Symbol: FAM47E-STBD1
  Gene Name: FAM47E-STBD1 readthrough
  ENSP ID: ENSP00000424458
MADRRRRLRPGTLAPVREGVNCRSSSYQRCWKCLILTGSWRTHGLIVRTPGKE

SEQ ID NO: 29319 - protein, 53 aa, Homo sapiens; identical to SEQ ID NO: 29318
  Payload ID: 5719
  Gene Symbol: FAM47E-STBD1
  Gene Name: FAM47E-STBD1 readthrough
  ENSP ID: ENSP00000425528

SEQ ID NO: 29320 - protein, 135 aa, Homo sapiens
  Payload ID: 5720
  Gene Symbol: FAM101A
  Gene Name: family with sequence similarity 101, member A
  Uniprot ID: Q6ZTI6
  ENSP ID: ENSP00000315626
MRPRMLPVFFGESIKVNPEPTHEIRCNSEVKYASEKHFQDKVFYAPVPTVTAYSETIVAAPNCTWRNYRSQLTLEPRPRALRFRSTTIIFPKHARSTFRTTLHCSLGRPSRWFTASVQLQLCQDPAPSLLGPATL

SEQ ID NO: 29321 - protein, 135 aa, Homo sapiens; identical to SEQ ID NO: 29320
  Payload ID: 5720
  Gene Symbol: FAM101A
  Gene Name: family with sequence similarity 101, member A
  Uniprot ID: Q6ZTI6
  ENSP ID: ENSP00000345898

SEQ ID NO: 29322 - protein, 135 aa, Homo sapiens; identical to SEQ ID NO: 29320
  Payload ID: 5720
  Gene Symbol: FAM101A
  Gene Name: family with sequence similarity 101, member A
  Uniprot ID: Q6ZTI6
  ENSP ID: ENSP00000374377

SEQ ID NO: 29323 - protein, 216 aa, Homo sapiens
  Payload ID: 5720
  Gene Symbol: FAM101A
  Gene Name: family with sequence similarity 101, member A
  Uniprot ID: Q6ZTI6
  ENSP ID: ENSP00000444080
MVGHLHLQGMEDSLKEQGREGLLDSPDSGLPPSPSPSPPFYSLAPGILDARAGGAGASSEPPGPSEARAPPSQLPNPPASEMRPRMLPVFFGESIKVNPEPTHEIRCNSEVKYASEKHFQDKVFYAPVPTVTAYSETIVAAPNCTWRNYRSQLTLEPRPRALRFRSTTIIFPKHARSTFRTTLHCSLGRPSRWFTASVQLQLCQDPAPSLLGPATL

SEQ ID NO: 29324 - protein, 144 aa, Homo sapiens
  Payload ID: 5721
  Gene Symbol: FAM101B
  Gene Name: family with sequence similarity 101, member B
  Uniprot ID: Q8N5W9
  ENSP ID: ENSP00000331915
SPASLPLAPGCALRLCPLSFGEGVEFDPLPPKEVRYTSLVKYDSERHFIDDVQLPLGLAVASCSQTVTCVPNGTWRNYKAEVRFEPRHRPTRFLSTTIVYPKYPKAVYTTTLDYNCRKTLRRFLSSVELEAAELPGSDDLSDEC

SEQ ID NO: 29325 - protein, 242 aa, Homo sapiens
  Payload ID: 5722
  Gene Symbol: FAM102A
  Gene Name: family with sequence similarity 102, member A
  Uniprot ID: Q5T9C2
  ENSP ID: ENSP00000362176
MFLLSGDPCFKTPPSTAKSISIPGQDSSLQLTCKGGGTSSGGSSTNSLTGSRPPKARPTILSSGLPEEPDQNLSSPEEVFHSGHSRNSSYASQQSKISGYSTEHSRSSSLSDLTHRRNTSTSSSASGGLGMTVEGPEGSEREHRPPEKPPRPPRPLHLSDRSFRRKKDSVESHPTWVDDTRIDADAIVEKIVQSQDFTDGSNTEDSNLRLFVSRDGSATLSGIQLATRVSSGVYEPVVIESH

SEQ ID NO: 29326 - protein, 384 aa, Homo sapiens
  Payload ID: 5722
  Gene Symbol: FAM102A
  Gene Name: family with sequence similarity 102, member A
  Uniprot ID: Q5T9C2
  ENSP ID: ENSP00000362187
MAFLMKKKKFKFQTTFTLEELTAVPFVNGVLFCKVRLLDGGDFVSLSSREEVQENCVRWRKRFTFVCKMSANPATGLLDPCVFRVSVRKELKGGKAYSKLGFADLNLAEFAGSGSTVRCCLLEGYDTKNTRQDNSILKVTIGMFLLSGDPCFKTPPSTAKSISIPGQDSSLQLTCKGGGTSSGGSSTNSLTGSRPPKARPTILSSGLPEEPDQNLSSPEEVFHSGHSRNSSYASQQSKISGYSTEHSRSSSLSDLTHRRNTSTSSSASGGLGMTVEGPEGSEREHRPPEKPPRPPRPLHLSDRSFRRKKDSVESHPTWVDDTRIDADAIVEKIVQSQDFTDGSNTEDSNLRLFVSRDGSATLSGIQLATRVSSGVYEPVVIESH

SEQ ID NO: 29327 - protein, 360 aa, Homo sapiens
  Payload ID: 5723
  Gene Symbol: FAM102B
  Gene Name: family with sequence similarity 102, member B
  Uniprot ID: Q5T8I3
  ENSP ID: ENSP00000359052
MMKKKKFKFKVDFELEELSSVPFVNGVLFCKMRLLDGGSFTAESSREVVQANCVRWRKKFSFMCKMSASAATGILDPCIYRVSVRKELKGGKAYAKLGFADLNLAEFAGSGNTTRRCLLEGYDTKNTRQDNSILKVLISMQLMSGDPCFKTPPSTSMSIPIAGESESLQEDRKGGETLKVHLGIADLSAKSASVPDELGACGHSRTSSYASQQSKVSGYSTCHSRSSSFSELCHRRNTSVGSTSTGVESILEPCDEIEQKIAEPNLDTADKEDTASEKLSRCPVKQDSVESQLKRVDDTRVDADDIVEKILQSQDFSLDSSAEEEGLRLFVGPGGSTTFGSHHLPNRVGSGAYEQVVIKR

SEQ ID NO: 29328 - protein, 355 aa, Homo sapiens
  Payload ID: 5723
  Gene Symbol: FAM102B
  Gene Name: family with sequence similarity 102, member B
  Uniprot ID: Q5T8I3
  ENSP ID: ENSP00000386084
MMKKKKFKFKVDFELEELSSVPFVNGVLFCKMRLLDGGSFTAESSREVVQANCVRWRKKFSFMCKMSASAATGILDPCIYRVSVRKELKGGKAYAKLGFADLNLAEFAGSGNTTRRCLLEGYDTKNTRQDNSILKVLISMQLMSGDPCFKTPPSTSMSIPIAGESESLQEDRKGGETLKVHLGIADLSAKSASVPDELGACGHSRTSSYASQQSKVSGYSTCHSRSSSFSELCHRRNTSVGSTSTGVESILEPCDEIEQKIAEPNLDTADKEDTASEKLSRCPVKQDSVESQLKRVDDTRVDADDIVEKILQSQDFSLDSSAEEEGLRLFVGPGGSTTFGSHHLPNSALEAPSLL

SEQ ID NO: 29329 - protein, 118 aa, Homo sapiens
  Payload ID: 5724
  Gene Symbol: FAM103A1
  Gene Name: family with sequence similarity 103, member A1
  Uniprot ID: Q9BTL3
  ENSP ID: ENSP00000307181
MTDTAEAVPKFEEMFASRFTENDKEYQEYLKRPPESPPIVEEWNSRAGGNQRNRGNRLQDNRQFRGRDNRWGWPSDNRSNQWHGRSWGNNYPQHRQEPYYPQQYGHYGYNQRPPYGYY

SEQ ID NO: 29330 - protein, 186 aa, Homo sapiens
  Payload ID: 5725
  Gene Symbol: FAM104A
  Gene Name: family with sequence similarity 104, member A
  Uniprot ID: Q969W3
  ENSP ID: ENSP00000384648
MGGRGADAGSSGGTGPTEGYSPPAASTRAAARAKARGGGRGGRRNTTPSVPSLRGAAPRSFHPPAAMSERLRPRKRRRNGNEEDNHLPPQTKRSSRNPVFQDSWDTESSGSDSGGSSSSSSSSINSPDRASGPEGSLSQTMAGSSPNTPQPVPEQSALCQGLYFHINQTLREAHFHSLQHRGRPLT

SEQ ID NO: 29331 - protein, 207 aa, Homo sapiens
  Payload ID: 5725
  Gene Symbol: FAM104A
  Gene Name: family with sequence similarity 104, member A
  Uniprot ID: Q969W3
  ENSP ID: ENSP00000384832
MGGRGADAGSSGGTGPTEGYSPPAASTRAAARAKARGGGRGGRRNTTPSVPSLRGAAPRSFHPPAAMSERLRPRKRRRNGNEEDNHLPPQTKRSSRNPVFQDSWDTETVPVMRNSKENRLRGNKAFCASSGSDSGGSSSSSSSSINSPDRASGPEGSLSQTMAGSSPNTPQPVPEQSALCQGLYFHINQTLREAHFHSLQHRGRPLT

SEQ ID NO: 29332 - protein, 109 aa, Homo sapiens
  Payload ID: 5725
  Gene Symbol: FAM104A
  Gene Name: family with sequence similarity 104, member A
  ENSP ID: ENSP00000462507
MGGRGADAGSSGGTGPTEGYSPPAASTRAAARAKARGGGRGGRRNTTPSVPSLRGAAPRSFHPPAAMSERLRPRIPGTQSLQAVTVVGAAAAAAAASIARTGPAGRKAA

SEQ ID NO: 29333 - protein, 96 aa, Homo sapiens
  Payload ID: 5725
  Gene Symbol: FAM104A
  Gene Name: family with sequence similarity 104, member A
  ENSP ID: ENSP00000462781
MRNSKENRLRGNKAFCASSGSDSGGSSSSSSSSINSPDRASGPEGSLSQTMAGSSPNTPQPVPEQSALCQGLYFHINQTLREAHFHSLQHRGRPLT

SEQ ID NO: 29334 - protein, 125 aa, Homo sapiens
  Payload ID: 5725
  Gene Symbol: FAM104A
  Gene Name: family with sequence similarity 104, member A
  ENSP ID: ENSP00000462806
MEGSTIRKRRRNGNEEDNHLPPQTKRSSRNPVFQDSWDTETVPVMRNSKENRLRGNKAFCASSGSDSGGSSSSSSSSINSPDRASGPEGSLSQTMAGSSPNTPQPVPEQSALCQGLYFHINQTLR

SEQ ID NO: 29335 - protein, 103 aa, Homo sapiens
  Payload ID: 5725
  Gene Symbol: FAM104A
  Gene Name: family with sequence similarity 104, member A
  ENSP ID: ENSP00000462840
MGGRGADAGSSGGTGPTEGYSPPAASTRAAARAKARGGGRGGRRNTTPSVPSLRGAAPRSFHPPAAMSERLRPSLQAVTVVGAAAAAAAASIARTGPAGRKAA

SEQ ID NO: 29336 - protein, 116 aa, Homo sapiens
  Payload ID: 5726
  Gene Symbol: FAM104B
  Gene Name: family with sequence similarity 104, member B
  Uniprot ID: Q5XKR9
  ENSP ID: ENSP00000333394
MGGCPVRKRRRNGSKEGNHHSTQPKRNKRNPIFQDSQDTEVFSWSDNERSSSRINIPERASGPEGNLNQIVTEPDANFPQFLHEGLSKPVYVINWFMSFGPEIKLNTSQQGRNQAV

SEQ ID NO: 29337 - protein, 115 aa, Homo sapiens
  Payload ID: 5726
  Gene Symbol: FAM104B
  Gene Name: family with sequence similarity 104, member B
  Uniprot ID: Q5XKR9
  ENSP ID: ENSP00000364101
MGGCPVRKRRRNGSKEGNHHSTQPKRNKRNPIFQDSQDTEFSWSDNERSSSRINIPERASGPEGNLNQIVTEPDANFPQFLHEGLSKPVYVINWFMSFGPEIKLNTSQQGRNQAV

SEQ ID NO: 29338 - protein, 116 aa, Homo sapiens
  Payload ID: 5726
  Gene Symbol: FAM104B
  Gene Name: family with sequence similarity 104, member B
  Uniprot ID: Q5XKR9
  ENSP ID: ENSP00000397188
MGGCPVRKRRRNGSKEGNHHSTQPKRNKRNPIFQDSQDTEVFSWSDNERSSSRINIPERASGPEGNLNQIVTEPDANFPQFLHEGYVPCQGLYSHINQTLKEAHFNSLQQRGQAPT

SEQ ID NO: 29339 - protein, 46 aa, Homo sapiens
  Payload ID: 5726
  Gene Symbol: FAM104B
  Gene Name: family with sequence similarity 104, member B
  Uniprot ID: Q5XKR9
  ENSP ID: ENSP00000420895
MGGCPVRKRRRNGSKEGNHHSTQPKRNKRNPIFQDSQDTEVAIFME

SEQ ID NO: 29340 - protein, 112 aa, Homo sapiens
  Payload ID: 5726
  Gene Symbol: FAM104B
  Gene Name: family with sequence similarity 104, member B
  Uniprot ID: Q5XKR9
  ENSP ID: ENSP00000421161
MTCRKRRRNGSKEGNHHSTQPKRNKRNPIFQDSQDTEFSWSDNERSSSRINIPERASGPEGNLNQIVTEPDANFPQFLHEGYVPCQGLYSHINQTLKEAHFNSLQQRGQAPT

SEQ ID NO: 29341 - protein, 114 aa, Homo sapiens
  Payload ID: 5726
  Gene Symbol: FAM104B
  Gene Name: family with sequence similarity 104, member B
  Uniprot ID: Q5XKR9
  ENSP ID: ENSP00000423164
MLVLWLKRRRNGSKEGNHHSTQPKRNKRNPIFQDSQDTEFSWSDNERSSSRINIPERASGPEGNLNQIVTEPDANFPQFLHEGYVPCQGLYSHINQTLKEAHFNSLQQRGQAPT

SEQ ID NO: 29342 - protein, 356 aa, Homo sapiens
  Payload ID: 5727
  Gene Symbol: FAM105A
  Gene Name: family with sequence similarity 105, member A
  Uniprot ID: Q9NUU6
  ENSP ID: ENSP00000274217
MAATRSPTRARERERSGAPAAGSDQVHSWMLATSQALDTVWRMAKGFVMLAVSFLVAAICYFRRLHLYSGHKLKWWIGYLQRKFKRNLSVEAEVDLLSYCAREWKGETPRNKLMRKAYEELFWRHHIKCVRQVRRDNYDALRSVLFQIFSQGISFPSWMKEKDIVKLPEKLLFSQGCNWIQQYSFGPEKYTGSNVFGKLRKYVELLKTQWTEFNGIRDYHKRGSMCNTLFSDAILEYKLYEALKFIMLYQVTEVYEQMKTKKVIPSLFRLLFSRETSSDPLSFMMNHLNSVGDTCGLEQIDMFILGYSLEVKIKVFRLFKFNSRDFEVCYPEEPLRDWPEISLLTENDRHYHIPVF

SEQ ID NO: 29343 - protein, 169 aa, Homo sapiens
  Payload ID: 5728
  Gene Symbol: FAM106A
  Gene Name: family with sequence similarity 106, member A
  Uniprot ID: Q4KMX7
  ENSP ID: ENSP00000437812
MLPSTMFLVHLPLSTNRLHCLRNTSLESYLCSFVHLNHPLHISDRVILISLHEAVRFSFAFSFPRGTLSIAYCLMSSVSTSSEAIMSTELLANYCHSSLHVCICISSFPNETGNHDSFPGAVVSISDQPTDQCKLAAKELPLRNLLECRFFDCMGEEDLINLGVIGTER

SEQ ID NO: 29344 - protein, 144 aa, Homo sapiens
  Payload ID: 5729
  Gene Symbol: FAM107A
  Gene Name: family with sequence similarity 107, member A
  Uniprot ID: O95990
  ENSP ID: ENSP00000354270
MYSEIQRERADIGGLMARPEYREWNPELIKPKKLLNPVKASRSHQELHRELLMNHRRGLGVDSKPELQRVLEHRRRNQLIKKKKEELEAKRLQCPFEQELLRRQQRLNQLEKPPEKEEDHAPEFIKVRENLRRIATLTSEEREL

SEQ ID NO: 29345 - protein, 144 aa, Homo sapiens; identical to SEQ ID NO: 29344
  Payload ID: 5729
  Gene Symbol: FAM107A
  Gene Name: family with sequence similarity 107, member A
  Uniprot ID: O95990
  ENSP ID: ENSP00000377991

SEQ ID NO: 29346 - protein, 172 aa, Homo sapiens
  Payload ID: 5729
  Gene Symbol: FAM107A
  Gene Name: family with sequence similarity 107, member A
  Uniprot ID: O95990
  ENSP ID: ENSP00000400858
MAQRLGEWARGPSDATGLYRAVLLRSAAMYSEIQRERADIGGLMARPEYREWNPELIKPKKLLNPVKASRSHQELHRELLMNHRRGLGVDSKPELQRVLEHRRRNQLIKKKKEELEAKRLQCPFEQELLRRQQRLNQLEKPPEKEEDHAPEFIKVRENLRRIATLTSEEREL

SEQ ID NO: 29347 - protein, 105 aa, Homo sapiens
  Payload ID: 5729
  Gene Symbol: FAM107A
  Gene Name: family with sequence similarity 107, member A
  ENSP ID: ENSP00000418038
MYSEIQRERADIGGLMARPEYREWNPELIKPKKLLNPVKASRSHQELHRELLMNHRRGLGVDSKPELQRVLEHRRRNQLIKKKKEELEAKRLQCPFEQELLRRQQ

SEQ ID NO: 29348 - protein, 175 aa, Homo sapiens
  Payload ID: 5729
  Gene Symbol: FAM107A
  Gene Name: family with sequence similarity 107, member A
  Uniprot ID: O95990
  ENSP ID: ENSP00000419124
MGAAQGKKKTYSPQARFHSENEKQRRNGSAAMYSEIQRERADIGGLMARPEYREWNPELIKPKKLLNPVKASRSHQELHRELLMNHRRGLGVDSKPELQRVLEHRRRNQLIKKKKEELEAKRLQCPFEQELLRRQQRLNQLEKPPEKEEDHAPEFIKVRENLRRIATLTSEEREL

SEQ ID NO: 29349 - protein, 135 aa, Homo sapiens
  Payload ID: 5729
  Gene Symbol: FAM107A
  Gene Name: family with sequence similarity 107, member A
  Uniprot ID: O95990
  ENSP ID: ENSP00000419529
MYSEIQRERADIGGLMARPEYREWNPELIKPKKLLNPVKASRSHQELHRELLMNHRRGLGVDSKPELQRVLEHRRRNQLIKKKKEELEAKRLQCPFEQELLRRQQRLNQVGDGHPAGTTHPPGLSSREELCCGHS

SEQ ID NO: 29350 - protein, 306 aa, Homo sapiens
  Payload ID: 5730
  Gene Symbol: FAM107B
  Gene Name: family with sequence similarity 107, member B
  Uniprot ID: Q9H098
  ENSP ID: ENSP00000181796
MSTWKARLTKRLKSPSRSMHPFPCSALLACFGNTRESASFNQSGVADTHSTVRVQPVAKAGRQPRHPSAEGAPEKRQDSSTHAERNGSANRNSSHRTAAQPAETPEDVPGSLDDGADCEAVVFHASIPRPSIIDTPKEEEFREEPKCLELEQKMTSDSPPEDIDHKDSYLITRSIMAEPDYIEDDNPELIRPQKLINPVKTSRNHQDLHRELLMNQKRGLAPQNKPELQKVMEKRKRDQVIKQKEEEAQKKKSDLEIELLKRQQKLEQLELEKQKLQEEQENAPEFVKVKGNLRRTGQEVAQAQES

SEQ ID NO: 29351 - protein, 131 aa, Homo sapiens
  Payload ID: 5730
  Gene Symbol: FAM107B
  Gene Name: family with sequence similarity 107, member B
  Uniprot ID: Q9H098
  ENSP ID: ENSP00000367719
MAEPDYIEDDNPELIRPQKLINPVKTSRNHQDLHRELLMNQKRGLAPQNKPELQKVMEKRKRDQVIKQKEEEAQKKKSDLEIELLKRQQKLEQLELEKQKLQEEQENAPEFVKVKGNLRRTGQEVAQAQES

SEQ ID NO: 29352 - protein, 131 aa, Homo sapiens; identical to SEQ ID NO: 29351
  Payload ID: 5730
  Gene Symbol: FAM107B
  Gene Name: family with sequence similarity 107, member B
  Uniprot ID: Q9H098
  ENSP ID: ENSP00000367723

SEQ ID NO: 29353 - protein, 131 aa, Homo sapiens; identical to SEQ ID NO: 29351
  Payload ID: 5730
  Gene Symbol: FAM107B
  Gene Name: family with sequence similarity 107, member B
  Uniprot ID: Q9H098
  ENSP ID: ENSP00000367726

SEQ ID NO: 29354 - protein, 131 aa, Homo sapiens; identical to SEQ ID NO: 29351
  Payload ID: 5730
  Gene Symbol: FAM107B
  Gene Name: family with sequence similarity 107, member B
  Uniprot ID: Q9H098
  ENSP ID: ENSP00000367728

SEQ ID NO: 29355 - protein, 131 aa, Homo sapiens; identical to SEQ ID NO: 29351
  Payload ID: 5730
  Gene Symbol: FAM107B
  Gene Name: family with sequence similarity 107, member B
  Uniprot ID: Q9H098
  ENSP ID: ENSP00000367731

SEQ ID NO: 29356 - protein, 90 aa, Homo sapiens
  Payload ID: 5730
  Gene Symbol: FAM107B
  Gene Name: family with sequence similarity 107, member B
  ENSP ID: ENSP00000397949
MAEPDYIEDDNPELIRPQKLINPVKTSRNHQDLHRELLMNQKRGLAPQNKPELQKVMEKRKRDQVIKQKEEEAQKKKSDLEIELLKRQQK

SEQ ID NO: 29357 - protein, 128 aa, Homo sapiens
  Payload ID: 5730
  Gene Symbol: FAM107B
  Gene Name: family with sequence similarity 107, member B
  ENSP ID: ENSP00000413676
MAEPDYIEDDNPELIRPQKLINPVKTSRNHQDLHRELLMNQKRGLAPQNKPELQKVMEKRKRDQVIKQKEEEAQKKKSDLEIELLKRQQKLEQLELEKQKLQEEQENAPEFVKVKGNLRRTGQEVAQA

SEQ ID NO: 29358 - protein, 101 aa, Homo sapiens
  Payload ID: 5730
  Gene Symbol: FAM107B
  Gene Name: family with sequence similarity 107, member B
  ENSP ID: ENSP00000417242
MAEPDYIEDDNPELIRPQKLINPVKTSRNHQDLHRELLMNQKRGLAPQNKPELQKVMEKRKRDQVIKQKEEEAQKKKSDLEIELLKRQQKLEQLELEKQKL

SEQ ID NO: 29359 - protein, 131 aa, Homo sapiens; identical to SEQ ID NO: 29351
  Payload ID: 5730
  Gene Symbol: FAM107B
  Gene Name: family with sequence similarity 107, member B
  Uniprot ID: Q9H098
  ENSP ID: ENSP00000417782

SEQ ID NO: 29360 - protein, 84 aa, Homo sapiens
  Payload ID: 5730
  Gene Symbol: FAM107B
  Gene Name: family with sequence similarity 107, member B
  ENSP ID: ENSP00000417845
MAEPDYIEDDNPELIRPQKLINPVKTSRNHQDLHRELLMNQKRGLAPQNKPELQKVMEKRKRDQVIKQKEEEAQKKKSDLEIEL

SEQ ID NO: 29361 - protein, 131 aa, Homo sapiens; identical to SEQ ID NO: 29351
  Payload ID: 5730
  Gene Symbol: FAM107B
  Gene Name: family with sequence similarity 107, member B
  Uniprot ID: Q9H098
  ENSP ID: ENSP00000418120

SEQ ID NO: 29362 - protein, 131 aa, Homo sapiens; identical to SEQ ID NO: 29351
  Payload ID: 5730
  Gene Symbol: FAM107B
  Gene Name: family with sequence similarity 107, member B
  Uniprot ID: Q9H098
  ENSP ID: ENSP00000418330

SEQ ID NO: 29363 - protein, 51 aa, Homo sapiens
  Payload ID: 5730
  Gene Symbol: FAM107B
  Gene Name: family with sequence similarity 107, member B
  ENSP ID: ENSP00000418365
MAEPDYIEDDNPELIRPQKLINPVKTSRNHQDLHRELLMNQKRILVWLEIH

SEQ ID NO: 29364 - protein, 124 aa, Homo sapiens
  Payload ID: 5730
  Gene Symbol: FAM107B
  Gene Name: family with sequence similarity 107, member B
  ENSP ID: ENSP00000418395
MAEPDYIEDDNPELIRPQKLINPVKTSRNHQDLHRELLMNQKRGLAPQNKPELQKVMEKRKRDQVIKQKEEEAQKKKSDLEIELLKRQQKLEQLELEKQKLQEEQENAPEFVKVKGNLRRTGQE

SEQ ID NO: 29365 - protein, 67 aa, Homo sapiens
  Payload ID: 5730
  Gene Symbol: FAM107B
  Gene Name: family with sequence similarity 107, member B
  ENSP ID: ENSP00000419064
MAEPDYIEDDNPELIRPQKLINPVKTSRNHQDLHRELLMNQKRGLAPQNKPELQKVMEKRKRDQVIK

SEQ ID NO: 29366 - protein, 131 aa, Homo sapiens; identical to SEQ ID NO: 29351
  Payload ID: 5730
  Gene Symbol: FAM107B
  Gene Name: family with sequence similarity 107, member B
  Uniprot ID: Q9H098
  ENSP ID: ENSP00000419603

SEQ ID NO: 29367 - protein, 126 aa, Homo sapiens
  Payload ID: 5730
  Gene Symbol: FAM107B
  Gene Name: family with sequence similarity 107, member B
  ENSP ID: ENSP00000420249
MAEPDYIEDDNPELIRPQKLINPVKTSRNHQDLHRELLMNQKRGLAPQNKPELQKVMEKRKRDQVIKQKEEEAQKKKSDLEIELLKRQQKLEQLELEKQKLQEEQENAPEFVKVKGNLRRTGQEVA

SEQ ID NO: 29368 - protein, 160 aa, Homo sapiens
  Payload ID: 5730
  Gene Symbol: FAM107B
  Gene Name: family with sequence similarity 107, member B
  ENSP ID: ENSP00000420273
MSTWKARLTKRLKSPSRSMHPFPCSALLACFGNTRESASFNQSGVADTHSTVRVQPVAKAGRQPRHPSAEGAPEKRQDSSTHAERNGSANRNSSHRTAAQPAETPEDVPGSLDDGADCEAVVFHASIPRPSIIDTPKEEEFREEPKCLELEQKMTSGECS

SEQ ID NO: 29369 - protein, 93 aa, Homo sapiens
  Payload ID: 5730
  Gene Symbol: FAM107B
  Gene Name: family with sequence similarity 107, member B
  ENSP ID: ENSP00000420314
MAEPDYIEDDNPELIRPQKLINPVKTSRNHQDLHRELLMNQKRGLAPQNKPELQKVMEKRKRDQVIKQKEEEAQKKKSDLEIELLKRQQKLEQ

SEQ ID NO: 29370 - protein, 130 aa, Homo sapiens
  Payload ID: 5730
  Gene Symbol: FAM107B
  Gene Name: family with sequence similarity 107, member B
  ENSP ID: ENSP00000420444
MAEPDYIEDDNPELIRPQKLINPVKTSRNHQDLHRELLMNQKRGLAPQNKPELQKVMEKRKRDQVIKQKEEEAQKKKSDLEIELLKRQQKLEQLELEKQKLQEEQENAPEFVKVKGNLRRTGQEVAQAQE

SEQ ID NO: 29371 - protein, 131 aa, Homo sapiens; identical to SEQ ID NO: 29351
  Payload ID: 5730
  Gene Symbol: FAM107B
  Gene Name: family with sequence similarity 107, member B
  Uniprot ID: Q9H098
  ENSP ID: ENSP00000479842

SEQ ID NO: 29372 - protein, 262 aa, Homo sapiens
  Payload ID: 5731
  Gene Symbol: FAM109A
  Gene Name: family with sequence similarity 109, member A
  Uniprot ID: Q8N4B1
  ENSP ID: ENSP00000354461
MAPGSPPGPAIATMKLNERSLAFYATCDAPVDNAGFLYKKGGRHAAYHRRWFVLRGNMLFYFEDAASREPVGVIILEGCTVELVEAAEEFAFAVRFAGTRARTYVLAAESQDAMEGWVKALSRASFDYLRLVVRELEQQLAAVRGGGGMALPQPQPQSLPLPPSLPSALAPVPSLPSAPAPVPALPLPRRPSALPPKENGCAVWSTEATFRPGPEPPPPPPRRRASAPHGPLDMAPFARLHECYGQEIRALRGQWLSSRVQP

SEQ ID NO: 29373 - protein, 117 aa, Homo sapiens
  Payload ID: 5731
  Gene Symbol: FAM109A
  Gene Name: family with sequence similarity 109, member A
  ENSP ID: ENSP00000447349
MKLNERSLAFYATCDAPVDNAGFLYKKGGRHAAYHRRWFVLRGNMLFYFEDAASREPVGVIILEGCTVELVEAAEEFAFAVRFAGTRARTYVLAAESQDAMEGWVKALSRASFDYLR

SEQ ID NO: 29374 - protein, 249 aa, Homo sapiens
  Payload ID: 5731
  Gene Symbol: FAM109A
  Gene Name: family with sequence similarity 109, member A
  Uniprot ID: Q8N4B1
  ENSP ID: ENSP00000447353
MKLNERSLAFYATCDAPVDNAGFLYKKGGRHAAYHRRWFVLRGNMLFYFEDAASREPVGVIILEGCTVELVEAAEEFAFAVRFAGTRARTYVLAAESQDAMEGWVKALSRASFDYLRLVVRELEQQLAAVRGGGGMALPQPQPQSLPLPPSLPSALAPVPSLPSAPAPVPALPLPRRPSALPPKENGCAVWSTEATFRPGPEPPPPPPRRRASAPHGPLDMAPFARLHECYGQEIRALRGQWLSSRVQP

SEQ ID NO: 29375 - protein, 74 aa, Homo sapiens
  Payload ID: 5731
  Gene Symbol: FAM109A
  Gene Name: family with sequence similarity 109, member A
  ENSP ID: ENSP00000447539
MKLNERSLAFYATCDAPVDNAGFLYKKGGRHAAYHRRWFVLRGNMLFYFEDAASREPVGVIILEGCTVELVEAA

SEQ ID NO: 29376 - protein, 249 aa, Homo sapiens; identical to SEQ ID NO: 29374
  Payload ID: 5731
  Gene Symbol: FAM109A
  Gene Name: family with sequence similarity 109, member A
  Uniprot ID: Q8N4B1
  ENSP ID: ENSP00000449994

SEQ ID NO: 29377 - protein, 259 aa, Homo sapiens
  Payload ID: 5732
  Gene Symbol: FAM109B
  Gene Name: family with sequence similarity 109, member B
  Uniprot ID: Q6ICB4
  ENSP ID: ENSP00000312753
MKLNERSVAHYALSDSPADHMGFLRTWGGPGTPPTPSGTGRRCWFVLKGNLLFSFESREGRAPLSLVVLEGCTVELAEAPVPEEFAFAICFDAPGVRPHLLAAEGPAAQEAWVKVLSRASFGYMRLVVRELESQLQDARQSLALQRRSSWKSVASRCKPQAPNHRAAGLENGHCLSKDSSPVGLVEEAGSRSAGWGLAEWELQGPASLLLGKGQSPVSPETSCFSTLHDWYGQEIVELRQCWQKRAQGSHSKCEEQDRP

SEQ ID NO: 29378 - protein, 108 aa, Homo sapiens
  Payload ID: 5732
  Gene Symbol: FAM109B
  Gene Name: family with sequence similarity 109, member B
  ENSP ID: ENSP00000396170
MKLNERSVAHYALSDSPADHMGFLRTWGGPGTPPTPSGTGRRCWFVLKGNLLFSFESREGRAPLSLVVLEGCTVELAEAPVPEEFAFAICFDAPGVRPHLLAAEGPAA

SEQ ID NO: 29379 - protein, 295 aa, Homo sapiens
  Payload ID: 5733
  Gene Symbol: FAM110A
  Gene Name: family with sequence similarity 110, member A
  Uniprot ID: Q9BQ89
  ENSP ID: ENSP00000246100
MPVHTLSPGAPSAPALPCRLRTRVPGYLLRGPADGGARKPSAVERLEADKAKYVKSLHVANTRQEPVQPLLSKQPLFSPETRRTVLTPSRRALPGPCRRPQLDLDILSSLIDLCDSPVSPAEASRTPGRAEGAGRPPPATPPRPPPSTSAVRRVDVRPLPASPARPCPSPGPAAASSPARPPGLQRSKSDLSERFSRAAADLERFFNFCGLDPEEARGLGVAHLARASSDIVSLAGPSAGPGSSEGGCSRRSSVTVEERARERVPYGVSVVERNARVIKWLYGLRQARESPAAEG

SEQ ID NO: 29380 - protein, 295 aa, Homo sapiens; identical to SEQ ID NO: 29379
  Payload ID: 5733
  Gene Symbol: FAM110A
  Gene Name: family with sequence similarity 110, member A
  Uniprot ID: Q9BQ89
  ENSP ID: ENSP00000354163

SEQ ID NO: 29381 - protein, 295 aa, Homo sapiens; identical to SEQ ID NO: 29379
  Payload ID: 5733
  Gene Symbol: FAM110A
  Gene Name: family with sequence similarity 110, member A
  Uniprot ID: Q9BQ89
  ENSP ID: ENSP00000371365

SEQ ID NO: 29382 - protein, 295 aa, Homo sapiens; identical to SEQ ID NO: 29379
  Payload ID: 5733
  Gene Symbol: FAM110A
  Gene Name: family with sequence similarity 110, member A
  Uniprot ID: Q9BQ89
  ENSP ID: ENSP00000371367

SEQ ID NO: 29383 - protein, 295 aa, Homo sapiens; identical to SEQ ID NO: 29379
  Payload ID: 5733
  Gene Symbol: FAM110A
  Gene Name: family with sequence similarity 110, member A
  Uniprot ID: Q9BQ89
  ENSP ID: ENSP00000445228

SEQ ID NO: 29384 - protein, 189 aa, Homo sapiens
  Payload ID: 5733
  Gene Symbol: FAM110A
  Gene Name: family with sequence similarity 110, member A
  ENSP ID: ENSP00000477334
  MOD_RES (1)..(1): Any amino acid
XSSLIDLCDSPVSPAEASRTPGRAEGAGRPPPATPPRPPPSTSAVRRVDVRPLPASPARPCPSPGPAAASSPARPPGLQRSKSDLSERFSRAAADLERFFNFCGLDPEEARGLGVAHLARASSDIVSLAGPSAGPGSSEGGCSRRSSVTVEERARERVPYGVSVVERNARVIKWLYGLRQARESPAAEG

SEQ ID NO: 29385 - protein, 370 aa, Homo sapiens
  Payload ID: 5734
  Gene Symbol: FAM110B
  Gene Name: family with sequence similarity 110, member B
  Uniprot ID: Q8TC76
  ENSP ID: ENSP00000355204
MPTETLQTGSMVKPVSPAGTFTSAVPLRILNKGPDYFRRQAEPNPKRLSAVERLEADKAKYVKSQEVINAKQEPVKPAVLAKPPVCPAAKRALGSPTLKVFGNHAKTESGVQRENLKLEILKNIINSSEGSSSGSGHKHSSRNWPPHRSEATDLHRHSFAESLKVYPTQGRRSPQEGGSHVGRRLLEQSAESFLHVSHSSSDIRKVTSVKPLKAIPCSSSAPPLPPKPKIAAIASMKSPEADPVEPACGVSRRPSLQRSKSDLSDRYFRVDADVERFFNYCGLDPEELENLGMENFARANSDIISLNFRSASMISSDCEQSQDSNSDLRNDDSANDRVPYGISAIERNARIIKWLYSIKQARESQKVSHV

SEQ ID NO: 29386 - protein, 321 aa, Homo sapiens
  Payload ID: 5735
  Gene Symbol: FAM110C
  Gene Name: family with sequence similarity 110, member C
  Uniprot ID: Q1W6H9
  ENSP ID: ENSP00000328347
MRALAALSAPPNERLLPRDPAATRDPDAARPARRSAVERLAADRAKYVRGRPGTGRGVASEGSGPGAIKCPGNDPGPPARAPAPVARRAIARKPLRPDSLIIYRQKCEFVRGSGADGPRASLVKKLFQGPGKDKAPVPRTGDEGKAGNPETVPTTPGPAADPAIPETPAPAARSAAPSSVPAAPPGPEPRVVRRRGLQRSQSDLSSRYSAALAESDTFFQYCGLDPEVVEALGRENFTAGSDCVTLKVRSVSVATSGSGFSRHSGGDDEGLQEEELIEQVPSTTSVIERNARIIKWLYTCKKAKETPSQEQSRTRGSKPSR

SEQ ID NO: 29387 - protein, 271 aa, Homo sapiens
  Payload ID: 5736
  Gene Symbol: FAM110D
  Gene Name: family with sequence similarity 110, member D
  Uniprot ID: Q8TAY7
  ENSP ID: ENSP00000363386
MLLAPPSTPSRGRTPSAVERLEADKAKYVKTHQVIARRQEPALRGSPGPLTPHPCNELGPPASPRTPRPVRRGSGRRLPRPDSLIFYRQKRDCKASVNKENAKGQGLVRRLFLGAPRDAAPSSPASTERPAASGGWAAPQDAPEAAGKRALCPTCSLPLSEKERFFNYCGLERALVEVLGAERFSPQSWGADASPQAGTSPPPGSGDASDWTSSDRGVDSPGGAGGGGGSEAAGSARDRRPPVSVVERNARVIQWLYGCQRARGPPRESEV

SEQ ID NO: 29388 - protein, 611 aa, Homo sapiens
  Payload ID: 5737
  Gene Symbol: FAM111A
  Gene Name: family with sequence similarity 111, member A
  Uniprot ID: Q96PZ2
  ENSP ID: ENSP00000355264
MSCKKQRSRKHSVNEKCNMKIEHYFSPVSKEQQNNCSTSLMRMESRGDPRATTNTQAQRFHSPKKNPEDQTMPQNRTIYVTLKVNHRRNQDMKLKLTHSENSSLYMALNTLQAVRKEIETHQGQEMLVRGTEGIKEYINLGMPLSCFPEGGQVVITFSQSKSKQKEDNHIFGRQDKASTECVKFYIHAIGIGKCKRRIVKCGKLHKKGRKLCVYAFKGETIKDALCKDGRFLSFLENDDWKLIENNDTILESTQPVDELEGRYFQVEVEKRMVPSAAASQNPESEKRNTCVLREQIVAQYPSLKRESEKIIENFKKKMKVKNGETLFELHRTTFGKVTKNSSSIKVVKLLVRLSDSVGYLFWDSATTGYATCFVFKGLFILTCRHVIDSIVGDGIEPSKWATIIGQCVRVTFGYEELKDKETNYFFVEPWFEIHNEELDYAVLKLKENGQQVPMELYNGITPVPLSGLIHIIGHPYGEKKQIDACAVIPQGQRAKKCQERVQSKKAESPEYVHMYTQRSFQKIVHNPDVITYDTEFFFGASGSPVFDSKGSLVAMHAAGFAYTYQNETRSIIEFGSTMESILLDIKQRHKPWYEEVFVNQQDVEMMSDEDL

SEQ ID NO: 29389 - protein, 611 aa, Homo sapiens; identical to SEQ ID NO: 29388
  Payload ID: 5737
  Gene Symbol: FAM111A
  Gene Name: family with sequence similarity 111, member A
  Uniprot ID: Q96PZ2
  ENSP ID: ENSP00000406683

SEQ ID NO: 29390 - protein, 611 aa, Homo sapiens; identical to SEQ ID NO: 29388
  Payload ID: 5737
  Gene Symbol: FAM111A
  Gene Name: family with sequence similarity 111, member A
  Uniprot ID: Q96PZ2
  ENSP ID: ENSP00000431631

SEQ ID NO: 29391 - protein, 96 aa, Homo sapiens
  Payload ID: 5737
  Gene Symbol: FAM111A
  Gene Name: family with sequence similarity 111, member A
  ENSP ID: ENSP00000432821
MSCKKQRSRKHSVNEKCNMKIEHYFSPVSKEQQNNCSTSLMRMESRGDPRATTNTQAQRFHSPKKNPEDQTMPQNRTIYVTLKVNHRRNQDMKLKL

SEQ ID NO: 29392 - protein, 611 aa, Homo sapiens; identical to SEQ ID NO: 29388
  Payload ID: 5737
  Gene Symbol: FAM111A
  Gene Name: family with sequence similarity 111, member A
  Uniprot ID: Q96PZ2
  ENSP ID: ENSP00000433154

SEQ ID NO: 29393 - protein, 611 aa, Homo sapiens; identical to SEQ ID NO: 29388
  Payload ID: 5737
  Gene Symbol: FAM111A
  Gene Name: family with sequence similarity 111, member A
  Uniprot ID: Q96PZ2
  ENSP ID: ENSP00000434435

SEQ ID NO: 29394 - protein, 183 aa, Homo sapiens
  Payload ID: 5737
  Gene Symbol: FAM111A
  Gene Name: family with sequence similarity 111, member A
  ENSP ID: ENSP00000436128
MSCKKQRSRKHSVNEKCNMKIEHYFSPVSKEQQNNCSTSLMRMESRGDPRATTNTQAQRFHSPKKNPEDQTMPQNRTIYVTLKVNHRRNQDMKLKLTHSENSSLYMALNTLQAVRKEIETHQGQEMLVRGTEGIKEYINLGMPLSCFPEGGQVVITFSQSKSKQKEDNHIFGRQDKASTECVK

SEQ ID NO: 29395 - protein, 734 aa, Homo sapiens
  Payload ID: 5738
  Gene Symbol: FAM111B
  Gene Name: family with sequence similarity 111, member B
  Uniprot ID: Q6SJ93
  ENSP ID: ENSP00000341565
MNSMKTEENKSFSAMEDDQRTRPEVSKDTVMKQTHADTPVDHCLSGIRKCSSTFKLKSEVNKHETALEMQNPNLNNKECCFTFTLNGNSRKLDRSVFTAYGKPSESIYSALSANDYFSERIKNQFNKNIIVYEEKTIDGHINLGMPLKCLPSDSHFKITFGQRKSSKEDGHILRQCENPNMECILFHVVAIGRTRKKIVKINELHEKGSKLCIYALKGETIEGALCKDGRFRSDIGEFEWKLKEGHKKIYGKQSMVDEVSGKVLEMDISKKKALQQKDIHKKIKQNESATDEINHQSLIQSKKKVHKPKKDGETKDVEHSREQILPPQDLSHYIKDKTRQTIPRIRNYYFCSLPRKYRQINSQVRRRPHLGRRYAINLDVQKEAINLLKNYQTLNEAIMHQYPNFKEEAQWVRKYFREEQKRMNLSPAKQFNIYKKDFGKMTANSVSVATCEQLTYYSKSVGFMQWDNNGNTGNATCFVFNGGYIFTCRHVVHLMVGKNTHPSLWPDIISKCAKVTFTYTEFCPTPDNWFSIEPWLKVSNENLDYAILKLKENGNAFPPGLWRQISPQPSTGLIYLIGHPEGQIKKIDGCTVIPLNERLKKYPNDCQDGLVDLYDTTSNVYCMFTQRSFLSEVWNTHTLSYDTCFSDGSSGSPVFNASGKLVALHTFGLFYQRGFNVHALIEFGYSMDSILCDIKKTNESLYKSLNDEKLETYDEEKGKQESSLQDHQIEPMEC

SEQ ID NO: 29396 - protein, 704 aa, Homo sapiens
  Payload ID: 5738
  Gene Symbol: FAM111B
  Gene Name: family with sequence similarity 111, member B
  Uniprot ID: Q6SJ93
  ENSP ID: ENSP00000393855
MKQTHADTPVDHCLSGIRKCSSTFKLKSEVNKHETALEMQNPNLNNKECCFTFTLNGNSRKLDRSVFTAYGKPSESIYSALSANDYFSERIKNQFNKNIIVYEEKTIDGHINLGMPLKCLPSDSHFKITFGQRKSSKEDGHILRQCENPNMECILFHVVAIGRTRKKIVKINELHEKGSKLCIYALKGETIEGALCKDGRFRSDIGEFEWKLKEGHKKIYGKQSMVDEVSGKVLEMDISKKKALQQKDIHKKIKQNESATDEINHQSLIQSKKKVHKPKKDGETKDVEHSREQILPPQDLSHYIKDKTRQTIPRIRNYYFCSLPRKYRQINSQVRRRPHLGRRYAINLDVQKEAINLLKNYQTLNEAIMHQYPNFKEEAQWVRKYFREEQKRMNLSPAKQFNIYKKDFGKMTANSVSVATCEQLTYYSKSVGFMQWDNNGNTGNATCFVFNGGYIFTCRHVVHLMVGKNTHPSLWPDIISKCAKVTFTYTEFCPTPDNWFSIEPWLKVSNENLDYAILKLKENGNAFPPGLWRQISPQPSTGLIYLIGHPEGQIKKIDGCTVIPLNERLKKYPNDCQDGLVDLYDTTSNVYCMFTQRSFLSEVWNTHTLSYDTCFSDGSSGSPVFNASGKLVALHTFGLFYQRGFNVHALIEFGYSMDSILCDIKKTNESLYKSLNDEKLETYDEEKGKQESSLQDHQIEPMEC

SEQ ID NO: 29397 - protein, 162 aa, Homo sapiens
  Payload ID: 5738
  Gene Symbol: FAM111B
  Gene Name: family with sequence similarity 111, member B
  ENSP ID: ENSP00000432143
MKQTHADTPVDHCLSGIRKCSSTFKLKSEVNKHETALEMQNPNLNNKECCFTFTLNGNSRKLDRSVFTAYGKPSESIYSALSANDYFSERIKNQFNKNIIVYEEKTIDGHINLGMPLKCLPSDSHFKITFGQRKSSKEDGHILRQCENPNMECILFHVVAIG

SEQ ID NO: 29398 - protein, 704 aa, Homo sapiens; identical to SEQ ID NO: 29396
  Payload ID: 5738
  Gene Symbol: FAM111B
  Gene Name: family with sequence similarity 111, member B
  Uniprot ID: Q6SJ93
  ENSP ID: ENSP00000432875

SEQ ID NO: 29399 - protein, 734 aa, Homo sapiens; identical to SEQ ID NO: 29395
  Payload ID: 5738
  Gene Symbol: FAM111B
  Gene Name: family with sequence similarity 111, member B
  Uniprot ID: Q6SJ93
  ENSP ID: ENSP00000483456

SEQ ID NO: 29400 - protein, 563 aa, Homo sapiens
  Payload ID: 5739
  Gene Symbol: FAM114A1
  Gene Name: family with sequence similarity 114, member A1
  Uniprot ID: Q8IWE2
  ENSP ID: ENSP00000351740
MSDDAGDTLATGDKAEVTEMPNSDSLPEDAEVHCDSAAVSHEPTPADPRGEGHENAAVQGAGAAAIGPPVQPQDANALEPPLNGDVTEDTLAECIDSVSLEAEPRSEIPLQEQNYLAVDSPPSGGGWAGWGSWGKSLLSSASATVGHGLTAVKEKAGATLRIHGVNSGSSEGAQPNTENGVPEITDAATDQGPAESPPTSPSSASRGMLSAITNVVQNTGKSVLTGGLDALEFIGKKTMNVLAESDPGFKRTKTLMERTVSLSQMLREAKEKEKQRLAQQLTMERTAHYGMLFDEYQGLSHLEALEILSNESESKVQSFLASLDGEKLELLKNDLISIKDIFAAKELENEENQEEQGLEEKGEEFARMLTELLFELHVAATPDKLNKAMKRAHDWVEEDQTVVSVDVAKVSEEETKKEEKEEKSQDPQEDKKEEKKTKTIEEVYMSSIESLAEVTARCIEQLHKVAELILHGQEEEKPAQDQAKVLIKLTTAMCNEVASLSKKFTNSLTTVGSNKKAEVLNPMISSVLLEGCNSTTYIQDAFQLLLPVLQVSHIQTSCLKAQP

SEQ ID NO: 29401 - protein, 133 aa, Homo sapiens
  Payload ID: 5739
  Gene Symbol: FAM114A1
  Gene Name: family with sequence similarity 114, member A1
  ENSP ID: ENSP00000422965
MSDDAGDTLATGDKAEVTEMPNSDSLPEDAEVHCDSAAVSHEPTPADPRGEGHENAAVQGAGAAAIGPPVQPQDANALEPPLNGDVTEDTLAECIDSVSLEAEPRSEIPLQEQNYLAVDSPPSGGGWAGWGSW

SEQ ID NO: 29402 - protein, 356 aa, Homo sapiens
  Payload ID: 5739
  Gene Symbol: FAM114A1
  Gene Name: family with sequence similarity 114, member A1
  Uniprot ID: Q8IWE2
  ENSP ID: ENSP00000424115
MLSAITNVVQNTGKSVLTGGLDALEFIGKKTMNVLAESDPGFKRTKTLMERTVSLSQMLREAKEKEKQRLAQQLTMERTAHYGMLFDEYQGLSHLEALEILSNESESKVQSFLASLDGEKLELLKNDLISIKDIFAAKELENEENQEEQGLEEKGEEFARMLTELLFELHVAATPDKLNKAMKRAHDWVEEDQTVVSVDVAKVSEEETKKEEKEEKSQDPQEDKKEEKKTKTIEEVYMSSIESLAEVTARCIEQLHKVAELILHGQEEEKPAQDQAKVLIKLTTAMCNEVASLSKKFTNSLTTVGSNKKAEVLNPMISSVLLEGCNSTTYIQDAFQLLLPVLQVSHIQTSCLKAQP

SEQ ID NO: 29403 - protein, 505 aa, Homo sapiens
  Payload ID: 5740
  Gene Symbol: FAM114A2
  Gene Name: family with sequence similarity 114, member A2
  Uniprot ID: Q9NRY5
  ENSP ID: ENSP00000341597
MSDKDDIETPLLTEAAPILEDGNCEPAKNSESVDQGAKPESKSEPVVSTRKRPETKPSSDLETSKVLPIQDNVSKDVPQTRWGYWGSWGKSILSSASATVATVGQGISNVIEKAETSLGIPGPSEISTEVKYVAGETNAKENENSSPVAGAFGVFSTISTAVQSTGKSVISGGLDALEFIGKKTMDVIAEGDPGFKRTKGLMNRNATLSQVLREAKEKEEIRTSNEVTVETDKKTHYGLLFDEFQGLSHLEALEMLSQESEIKVKSILNSLSGEELETLKVELEQLKETFSLAEFCEEEEEEKKGDEDFTKDITELFSQLHVSSKPEKLARARNTAHEWIRKSLTKPLAENEEGEKQSEAENTEQVNKNSIEDIHAFAIRSLAELTACSIELFHKTAALVLHGRKQEVTAIERSQTLSQMTIVLCKELSSLSKEFTTCLTTAGVKEMADVLNPLITAVFLEASNSASYIQDAFQLLLPVLEISLIENKIESHRHELQGQKPLLEH

SEQ ID NO: 29404 - protein, 103 aa, Homo sapiens
  Payload ID: 5740
  Gene Symbol: FAM114A2
  Gene Name: family with sequence similarity 114, member A2
  ENSP ID: ENSP00000428551
MSDKDDIETPLLTEAAPILEDGNCEPAKNSESVDQGAKPESKSEPVVSTRKRPETKPSSDLETSKVLPIQDNVSKDVPQTRWGYWGSWGKSILSSASATVATV

SEQ ID NO: 29405 - protein, 166 aa, Homo sapiens
  Payload ID: 5740
  Gene Symbol: FAM114A2
  Gene Name: family with sequence similarity 114, member A2
  ENSP ID: ENSP00000428827
MSDKDDIETPLLTEAAPILEDGNCEPAKNSESVDQGAKPESKSEPVVSTRKRPETKPSSDLETSKVLPIQDNVSKDVPQTRWGYWGSWGKSILSSASATVATVGQGISNVIEKAETSLGIPGPSEISTEVKYVAGETNAKENENSSPVAGAFGVFSTISTAVQSTG

SEQ ID NO: 29406 - protein, 79 aa, Homo sapiens
  Payload ID: 5740
  Gene Symbol: FAM114A2
  Gene Name: family with sequence similarity 114, member A2
  ENSP ID: ENSP00000428941
MSDKDDIETPLLTEAAPILEDGNCEPAKNSESVDQGAKPESKSEPVVSTRKRPETKPSSDLETSKVLPIQDNVSKDVPQ

SEQ ID NO: 29407 - protein, 435 aa, Homo sapiens
  Payload ID: 5740
  Gene Symbol: FAM114A2
  Gene Name: family with sequence similarity 114, member A2
  ENSP ID: ENSP00000429088
MSDKDDIETPLLTEAAPILEDGNCEPAKNSESVDQGISNVIEKAETSLGIPGPSEISTEVKYVAGETNAKENENSSPVAGAFGVFSTISTAVQSTGKSVISGGLDALEFIGKKTMDVIAEGDPGFKRTKGLMNRNATLSQVLREAKEKEEIRTSNEVTVETDKKTHYGLLFDEFQGLSHLEALEMLSQESEIKVKSILNSLSGEELETLKVELEQLKETFSLAEFCEEEEEEKKGDEDFTKDITELFSQLHVSSKPEKLARARNTAHEWIRKSLTKPLAENEEGEKQSEAENTEQVNKNSIEDIHAFAIRSLAELTACSIELFHKTAALVLHGRKQEVTAIERSQTLSQMTIVLCKELSSLSKEFTTCLTTAGVKEMADVLNPLITAVFLEASNSASYIQDAFQLLLPVLEISLIENKIESHRHELQGQKPLLEH

SEQ ID NO: 29408 - protein, 15 aa, Homo sapiens
  Payload ID: 5740
  Gene Symbol: FAM114A2
  Gene Name: family with sequence similarity 114, member A2
  ENSP ID: ENSP00000429403
MSDKDDIETPLLTEA

SEQ ID NO: 29409 - protein, 125 aa, Homo sapiens
  Payload ID: 5740
  Gene Symbol: FAM114A2
  Gene Name: family with sequence similarity 114, member A2
  ENSP ID: ENSP00000429753
MSDKDDIETPLLTEAAPILEDGNCEPAKNSESVDQGAKPESKSEPVVSTRKRPETKPSSDLETSKVLPIQDNVSKDVPQTRWGYWGSWGKSILSSASATVATVGQGISNVIEKAETSLGIPGPSE

SEQ ID NO: 29410 - protein, 63 aa, Homo sapiens
  Payload ID: 5740
  Gene Symbol: FAM114A2
  Gene Name: family with sequence similarity 114, member A2
  ENSP ID: ENSP00000429919
MSDKDDIETPLLTEAAPILEDGNCEPAKNSESVDQGAKPESKSEPVVSTRKRPETKPSSDLET

SEQ ID NO: 29411 - protein, 210 aa, Homo sapiens
  Payload ID: 5740
  Gene Symbol: FAM114A2
  Gene Name: family with sequence similarity 114, member A2
  ENSP ID: ENSP00000430186
MSDKDDIETPLLTEAAPILEDGNCEPAKNSESVDQGAKPESKSEPVVSTRKRPETKPSSDLETSKVLPIQDNVSKDVPQTRWGYWGSWGKSILSSASATVATVGQGISNVIEKAETSLGIPGPSEISTEVKYVAGETNAKENENSSPVAGAFGVFSTISTAVQSTGKSVISGGLDALEFIGKKTMDVIAEGDPGFKRTKGLMNRNATLSQ

SEQ ID NO: 29412 - protein, 505 aa, Homo sapiens; identical to SEQ ID NO: 29403
  Payload ID: 5740
  Gene Symbol: FAM114A2
  Gene Name: family with sequence similarity 114, member A2
  Uniprot ID: Q9NRY5
  ENSP ID: ENSP00000430384

SEQ ID NO: 29413 - protein, 505 aa, Homo sapiens; identical to SEQ ID NO: 29403
  Payload ID: 5740
  Gene Symbol: FAM114A2
  Gene Name: family with sequence similarity 114, member A2
  Uniprot ID: Q9NRY5
  ENSP ID: ENSP00000430489

SEQ ID NO: 29414 - protein, 249 aa, Homo sapiens [sequence omitted]

SEQ ID NO: 29415 - protein, 453 aa, Homo sapiens
  Payload ID: 5741
  Gene Symbol: FAM117A
  Gene Name: family with sequence similarity 117, member A
  Uniprot ID: Q9C073
  ENSP ID: ENSP00000240364
MAGAAAGGRGGGAWGPGRGGAGGLRRGCSPPAPAGSPRAGLQPLRATIPFQLQQPHQRRDGGGRAASVPCSVAPEKSVCRPQPLQVRRTFSLDTILSSYLLGQWPRDADGAFTCCTNDKATQTPLSWQELEGERASSCAHKRSASWGSTDHRKEISKLKQQLQRTKLSRSGKEKERGSPLLGDHAVRGALRASPPSFPSGSPVLRLSPCLHRSLEGLNQELEEVFVKEQGEEELLRILDIPDGHRAPAPPQSGSCDHPLLLLEPGNLASSPSMSLASPQPCGLASHEEHRGAAEELASTPNDKASSPGHPAFLEDGSPSPVLAFAASPRPNHSYIFKREPPEGCEKVRVFEEATSPGPDLAFLTSCPDKNKVHFNPTGSAFCPVNLMKPLFPGMGFIFRNCPSNPGSPLPPASPRPPPRKDPEASKASPLPFEPWQRTPPSEEPVLFQSSLMV

SEQ ID NO: 29416 - protein, 223 aa, Homo sapiens
  Payload ID: 5741
  Gene Symbol: FAM117A
  Gene Name: family with sequence similarity 117, member A
  ENSP ID: ENSP00000421412
MAGAAAGGRGGGAWGPGRGGAGGLRRGCSPPAPAGSPRAGLQPLRATIPFQLQQPHQRRDGGGRAASVPCSVAPEKSVCRPQPLQVRRTFSLDTILSSYLLGQWPRDADGAFTCCTNDKATQISKLKQQLQRTKLSRSGKEKERGSPLLGDHAVRGALRASPPSFPSGSPVLRLSPCLHRSLEGLNQELEEVFVKEQGEEELLRILDIPDGHRAPAPPQSGSC

SEQ ID NO: 29417 - protein, 230 aa, Homo sapiens
  Payload ID: 5741
  Gene Symbol: FAM117A
  Gene Name: family with sequence similarity 117, member A
  ENSP ID: ENSP00000427326
MWLFFPLCYHPPTPLSWQELEGERASSCAHKRSASWGSTDHRKEISKLKQQLQRTKLSRSGKEKERGSPLLGDHAVRGALRASPPSFPSGSPVLRLSPCLHRSLEGLNQELEEVFVKEQGEEELLRILDIPDGHRAPAPPQSGSCDHPLLLLEPGNLASSPSMSLASPQPCGLASHEEHRGAAEELASTPNDKASSPGHPAFLEDGSPSPVLAFAASPRPNHSYIFKREP

SEQ ID NO: 29418 - protein, 181 aa, Homo sapiens
  Payload ID: 5741
  Gene Symbol: FAM117A
  Gene Name: family with sequence similarity 117, member A
  Uniprot ID: Q9C073
  ENSP ID: ENSP00000465808
MSLASPQPCGLASHEEHRGAAEELASTPNDKASSPGHPAFLEDGSPSPVLAFAASPRPNHSYIFKREPPEGCEKVRVFEEATSPGPDLAFLTSCPDKNKVHFNPTGSAFCPVNLMKPLFPGMGFIFRNCPSNPGSPLPPASPRPPPRKDPEASKASPLPFEPWQRTPPSEEPVLFQSSLMV

SEQ ID NO: 29419 - protein, 55 aa, Homo sapiens
  Payload ID: 5741
  Gene Symbol: FAM117A
  Gene Name: family with sequence similarity 117, member A
  ENSP ID: ENSP00000467070
ASPPSFPSGSPVLRLSPCLHRSLEGLNQELEEVFVKEQGEEELLRSPGHRRSLPS

SEQ ID NO: 29420 - protein, 589 aa, Homo sapiens
  Payload ID: 5742
  Gene Symbol: FAM117B
  Gene Name: family with sequence similarity 117, member B
  Uniprot ID: Q6P1L5
  ENSP ID: ENSP00000376071
MSQRVRRNGSPTPAGSLGGGAVATAGGPGSRLQPMRATVPFQLKQQQQQQHGSPTRSGGGGGGNNNGGCCGGASGPAGGGGGGGPRTASRSTSPTRGGGNAAARTSPTVATQTGASATSTRGTSPTRSAAPGARGSPPRPPPPPPLLGTVSSPSSSPTHLWTGEVSAAPPPARVRHRRRSPEQSRSSPEKRSPSAPVCKAGDKTRQPSSSPSSIIRRTSSLDTLAAPYLAGHWPRDSHGQAAPCMRDKATQTESAWAEEYSEKKKGSHKRSASWGSTDQLKEIAKLRQQLQRSKHSSRHHRDKERQSPFHGNHAAINQCQAPVPKSALIPVIPITKSTGSRFRNSVEGLNQEIEIIIKETGEKEEQLIPQDIPDGHRAPPPLVQRSSSTRSIDTQTPGGADRGSNNSSRSQSVSPTSFLTISNEGSEESPCSADDLLVDPRDKENGNNSPLPKYATSPKPNNSYMFKREPPEGCERVKVFEECSPKQLHEIPAFYCPDKNKVNFIPKSGSAFCLVSILKPLLPTPDLTLKGSGHSLTVTTGMTTTLLQPIAVASLSTNTEQDRVSRGTSTVMPSASLLPPPEPIEEAEG

SEQ ID NO: 29421 - protein, 357 aa, Homo sapiens
  Payload ID: 5743
  Gene Symbol: FAM118A
  Gene Name: family with sequence similarity 118, member A
  Uniprot ID: Q9NWS6
  ENSP ID: ENSP00000216214
MDSVEKTTNRSEQKSRKFLKSLIRKQPQELLLVIGTGVSAAVAPGIPALCSWRSCIEAVIEAAEQLEVLHPGDVAEFRRKVTKDRDLLVVAHDLIRKMSPRTGDAKPSFFQDCLMEVFDDLEQHIRSPVVLQSILSLMDRGAMVLTTNYDNLLEAFGRRQNKPMESLDLKDKTKVLEWARGHMKYGVLHIHGLYTDPCGVVLDPSGYKDVTQDAEVMEVLQNLYRTKSFLFVGCGETLRDQIFQALFLYSVPNKVDLEHYMLVLKENEDHFFKHQADMLLHGIKVVSYGDCFDHFPGYVQDLATQICKQQSPDADRVDSTTLLGNACQDCAKRKLEENGIEVSKKRTQSDTDDAGGS

SEQ ID NO: 29422 - protein, 202 aa, Homo sapiens
  Payload ID: 5743
  Gene Symbol: FAM118A
  Gene Name: family with sequence similarity 118, member A
  ENSP ID: ENSP00000385231
MDSVEKTTNRSEQKSRKFLKSLIRKQPQELLLVIGTGVSAAVAPGIPALCSWRSCIEAVIEAAEQLEVLHPGDVAEFRRKVTKDRDLLVVAHDLIRKMSPRTGDAKPSFFQDCLMEVFDDLEQHIRSPVVLQSILSLMDRGAMVLTTNYDNLLEAFGRRQNKPMESLDLKDKTKVWAGAAGSLQVWGVLCPGSCSHFVAVNY

SEQ ID NO: 29423 - protein, 29 aa, Homo sapiens
  Payload ID: 5743
  Gene Symbol: FAM118A
  Gene Name: family with sequence similarity 118, member A
  ENSP ID: ENSP00000388511
MRNGGLGSILDNSQMDSVEKTTNRSEQKS

SEQ ID NO: 29424 - protein, 15 aa, Homo sapiens
  Payload ID: 5743
  Gene Symbol: FAM118A
  Gene Name: family with sequence similarity 118, member A
  ENSP ID: ENSP00000389298
MRNGGLGSILDNSQM

SEQ ID NO: 29425 - protein, 139 aa, Homo sapiens
  Payload ID: 5743
  Gene Symbol: FAM118A
  Gene Name: family with sequence similarity 118, member A
  ENSP ID: ENSP00000395194
MDSVEKTTNRSEQKSRKFLKSLIRKQPQELLLVIGTGVSAAVAPGIPALCSWRSCIEAVIEAAEQLEVLHPGDVAEFRRKVTKDRDLLVVAHDLIRKMSPRTGDAKPSFFQDCLMEVFDDLEQHIRSPVVLQSILSLMD

SEQ ID NO: 29426 - protein, 357 aa, Homo sapiens; identical to SEQ ID NO: 29421
  Payload ID: 5743
  Gene Symbol: FAM118A
  Gene Name: family with sequence similarity 118, member A
  Uniprot ID: Q9NWS6
  ENSP ID: ENSP00000395892

SEQ ID NO: 29427 - protein, 350 aa, Homo sapiens
  Payload ID: 5744
  Gene Symbol: FAM118B
  Gene Name: family with sequence similarity 118, member B
  ENSP ID: ENSP00000353321
MASTGSQASDIDEIFGFFNDGEPPTKKPRKLLPSLKTKKPRELVLVIGTGISAAVAPQVPALKSWKGLIQALLDAAIDFDLLEDEESKKFQKCLHEDKNLVHVAHDLIQKLSPRTSNVRSTFFKDCLYEVFDDLESKMEDSGKQLLQSVLHLMENGALVLTTNFDNLLELYAADQGKQLESLDLTDEKKVLEWAQEKRKLSVLHIHGVYTNPSGIVLHPAGYQNVLRNTEVMREIQKLYENKSFLFLGCGWTVDDTTFQALFLEAVKHKSDLEHFMLVRRGDVDEFKKLRENMLDKGIKVISYGDDYADLPEYFKRLTCEISTRGTSGMVREGQLNGSSAAHSEIRGCST

SEQ ID NO: 29428 - protein, 275 aa, Homo sapiens
  Payload ID: 5744
  Gene Symbol: FAM118B
  Gene Name: family with sequence similarity 118, member B
  ENSP ID: ENSP00000432712
MASTGSQASDIDEIFGFFNDGEPPTKKPRKLLPSLKTKKPRELVLVIGTGISAAVAPQVPALKSWKGLIQALLDAAIDFDLLEDEESKKFQKCLHEDKNLVHVAHDLIQKLSPVLEWAQEKRKLSVLHIHGVYTNPSGIVLHPAGYQNVLRNTEVMREIQKLYENKSFLFLGCGWTVDDTTFQALFLEAVKHKSDLEHFMLVRRGDVDEFKKLRENMLDKGIKVISYGDDYADLPEYFKRLTCEISTRGTSAGMVREGQLNGSSAAHSEIRGCST

SEQ ID NO: 29429 - protein, 351 aa, Homo sapiens
  Payload ID: 5744
  Gene Symbol: FAM118B
  Gene Name: family with sequence similarity 118, member B
  Uniprot ID: Q9BPY3
  ENSP ID: ENSP00000433343
MASTGSQASDIDEIFGFFNDGEPPTKKPRKLLPSLKTKKPRELVLVIGTGISAAVAPQVPALKSWKGLIQALLDAAIDFDLLEDEESKKFQKCLHEDKNLVHVAHDLIQKLSPRTSNVRSTFFKDCLYEVFDDLESKMEDSGKQLLQSVLHLMENGALVLTTNFDNLLELYAADQGKQLESLDLTDEKKVLEWAQEKRKLSVLHIHGVYTNPSGIVLHPAGYQNVLRNTEVMREIQKLYENKSFLFLGCGWTVDDTTFQALFLEAVKHKSDLEHFMLVRRGDVDEFKKLRENMLDKGIKVISYGDDYADLPEYFKRLTCEISTRGTSAGMVREGQLNGSSAAHSEIRGCST

SEQ ID NO: 29430 - protein, 346 aa, Homo sapiens
  Payload ID: 5744
  Gene Symbol: FAM118B
  Gene Name: family with sequence similarity 118, member B
  ENSP ID: ENSP00000434952
MASTGSQASDIDEIFGFFNDGEPPTKKPRKLLPSLKTKKPRELVLVIGTGISAAVAPQVPALKSWKGLIQALLDAAIDFDLLEDEESKKFQKCLHEDKNLVHVAHDLIQKLSPRTSNVRSTFFKDCLYEVFDDLESKMEDSGKQLLQSVLHLMENGALVLTTNFDNLLELYAADQGKQLESLDLTDEKKVLEWAQEKRKLSVLHIHGVYTNPSGIVLHPAGYQNVLRNTEVMREIQKLYENKSFLFLGCGWTVDDTTFQALFLEAVKHKSDLEHFMLVRRGDVDEFKKLRENMLDKGIKVISYGDDYADLPEYFKRLTCEISTRGTSGMVREGQLNGSSAAHSEIR

SEQ ID NO: 29431 - protein, 235 aa, Homo sapiens
  Payload ID: 5744
  Gene Symbol: FAM118B
  Gene Name: family with sequence similarity 118, member B
  ENSP ID: ENSP00000435754
MASTGSQASDIDEIFGFFNDGEPPTKKPRKLLPSLKTKKPRELVLVIGTGISAAVAPQVPALKSWKGLIQALLDAAIDFDLLEDEESKKFQKCLHEDKNLVHVAHDLIQKLSPVLEWAQEKRKLSVLHIHGVYTNPSGIVLHPAGYQNVLRNTEVMREIQKLYENKSFLFLGCGWTVDDTTFQALFLEAVKHKSDLEHFMLVRRGDVDEFKKLRENMLDKGIKVISYGDDYADLP

SEQ ID NO: 29432 - protein, 153 aa, Homo sapiens
  Payload ID: 5744
  Gene Symbol: FAM118B
  Gene Name: family with sequence similarity 118, member B
  ENSP ID: ENSP00000437285
MASTGSQASDIDEIFGFFNDGEPPTKKPRKLLPSLKTKKPRELVLVIGTGISAAVAPQVPALKSWKGLIQALLDAAIDFDLLEDEESKKFQKCLHEDKNLVHVAHDLIQKLSPRTSNVRSTFFKDCLYEVFDDLESKMEDSGKQLLQSVLHLM

SEQ ID NO: 29433 - protein, 275 aa, Homo sapiens; identical to SEQ ID NO: 29428
  Payload ID: 5744
  Gene Symbol: FAM118B
  Gene Name: family with sequence similarity 118, member B
  ENSP ID: ENSP00000487554

SEQ ID NO: 29434 - protein, 1118 aa, Homo sapiens
  Payload ID: 5745
  Gene Symbol: FAM120A
  Gene Name: family with sequence similarity 120A
  Uniprot ID: Q9NZB2
  ENSP ID: ENSP00000277165
MGVQGFQDYIEKHCPSAVVPVELQKLARGSLVGGGRQRPPQTPLRLLVDADNCLHRLYGGFYTDWVSGGQWNHMLGYLAALAKACFGGNIELFVFFNGALEKARLHEWVKRQGNERQTAQQIVSHVQNKGTPPPKVWFLPPVCMAHCIRLALIRFHVKVAQSIEDHHQEVIGFCRENGFHGLVAYDSDYALCNIPYYFSAHALKLSRNGKSLTTSQYLMHEVAKQLDLNPNRFPIFAALLGNHILPDEDLASFHWSLLGPEHPLASLKVRAHQLVLPPCDVVIKAVADYVRNIQDTSDLDAIAKDVFQHSQSRTDDKVIRFKRAIGYYSATSKPMSFHPPHYLAARPGPFGMPGMVPPHVPPQMLNIPQTSLQAKPVAPQVPSPGGAPGQGPYPYSLSEPAPLTLDTSGKNLTEQNSYSNIPHEGKHTPLYERSSPINPAQSGSPNHVDSAYFPGSSTSSSSDNDEGSGGATNHISGNKIGWEKTGSHSEPQARGDPGDQTKAEGSSTASSGSQLAEGKGSQMGTVQPIPCLLSMPTRNHMDITTPPLPPVAPEVLRVAEHRHKKGLMYPYIFHVLTKGEIKIAVSIEDEANKDLPPAALLYRPVRQYVYGVLFSLAESRKKTERLAFRKNRLPPEFSPVIIKEWAAYKGKSPQTPELVEALAFREWTCPNLKRLWLGKAVEDKNRRMRAFLACMRSDTPAMLNPANVPTHLMVLCCVLRYMVQWPGARILRRQELDAFLAQALSPKLYEPDQLQELKIENLDPRGIQLSALFMSGVDMALFANDACGQPIPWEHCCPWMYFDGKLFQSKLLKASREKTPLIDLCDGQADQAAKVEKMRQSVLEGLSFSRQSHTLPFPPPPALPFYPASAYPRHFGPVPPSQGRGRGFAGVCGFGGPYGETVATGPYRAFRVAAASGHCGAFSGSDSSRTSKSQGGVQPIPSQGGKLEIAGTVVGHWAGSRRGRGGRGPFPLQVVSVGGPARGRPRGVISTPVIRTFGRGGRYYGRGYKNQAAIQGRPPYAASAEEVAKELKSKSGESKSSAMSSDGSLAENGVMAEEKPAPQMNGSTGDARAPSHSESALNNDSKTCNTNPHLNALSTDSACRREAALEAAVLNKEE

SEQ ID NO: 29435 - protein, 628 aa, Homo sapiens
  Payload ID: 5745
  Gene Symbol: FAM120A
  Gene Name: family with sequence similarity 120A
  Uniprot ID: Q9NZB2
  ENSP ID: ENSP00000364538
MGVQGFQDYIEKHCPSAVVPVELQKLARGSLVGGGRQRPPQTPLRLLVDADNCLHRLYGGFYTDWVSGGQWNHMLGYLAALAKACFGGNIELFVFFNGALEKARLHEWVKRQGNERQTAQQIVSHVQNKGTPPPKVWFLPPVCMAHCIRLALIRFHVKVAQSIEDHHQEVIGFCRENGFHGLVAYDSDYALCNIPYYFSAHALKLSRNGKSLTTSQYLMHEVAKQLDLNPNRFPIFAALLGNHILPDEDLASFHWSLLGPEHPLASLKVRAHQLVLPPCDVVIKAVADYVRNIQDTSDLDAIAKDVFQHSQSRTDDKVIRFKRAIGYYSATSKPMSFHPPHYLAARPGPFGMPGMVPPHVPPQMLNIPQTSLQAKPVAPQVPSPGGAPGQGPYPYSLSEPAPLTLDTSGKNLTEQNSYSNIPHEGKHTPLYERSSPINPAQSGSPNHVDSAYFPGSSTSSSSDNDEGSGGATNHISGNKIGWEKTGSHSEPQARGDPGDQTKAEGSSTASSGSQLAEGKGSQMGTVQPIPCLLSMPTRNHMDITTPPLPPVAPEVLRVAEHRHKKGLMYPYIFHVLTKVLSKGPWSGFCYLMSGHSYGCFVLLSFFEPFFCLTNLLETKFTFPFLNIE

SEQ ID NO: 29436 - protein, 495 aa, Homo sapiens
  Payload ID: 5745
  Gene Symbol: FAM120A
  Gene Name: family with sequence similarity 120A
  ENSP ID: ENSP00000396534
VKVAQSIEDHHQEVIGFCRENGFHGLVAYDSDYALCNIPYYFSAHALKLSRNGKSLTTSQYLMHEVAKQLDLNPNRFPIFAALLGNHILPDEDLASFHWSLLGPEHPLASLKVRAHQLVLPPCDVVIKAVADYVRNIQDTSDLDAIAKDVFQHSQSRTDDKVIRFKRAIGYYSATSKPMSFHPPHYLAARPGPFGMPGMVPPHVPPQMLNIPQTSLQAKPVAPQVPSPGGAPGQGPYPYSLSEPAPLTLDTSGKNLTEQNSYSNIPHEGKHTPLYERSSPINPAQSGSPNHVDSAYFPGSSTSSSSDNDEGSGGATNHISGNKIGWEKTGSHSEPQARGDPGDQTKAEGSSTASSGSQLAEGKGSQMGTVQPIPCLLSMPTRNHMDITTPPLPPVAPEVLRVAEHRHKKGLMYPYIFHVLTKGEIKIAVSIEDEANKDLPPAALLYRPVRQYVYGVLFSLAESRKKTERLAFRKNRLPPECMYCNNPLFVFLGTS

SEQ ID NO: 29437 - protein, 494 aa, Homo sapiens
  Payload ID: 5745
  Gene Symbol: FAM120A
  Gene Name: family with sequence similarity 120A
  ENSP ID: ENSP00000412440
GEIKIAVSIEDEANKDLPPAALLYRPVRQYVYGVLFSLAESRKKTERLAFRKNRLPPEFSPVIIKEWAAYKGKSPQTPELVEALAFREWTCPNLKRLWLGKAVEDKNRRMRAFLACMRSDTPAMLNPANVPTHLMVLCCVLRYMVQWPGARILRRQELDAFLAQALSPKLYEPDQLQELKIENLDPRGIQLSALFMSGVDMALFANDACGQPIPWEHCCPWMYFDGKLFQSKLLKASREKTPLIDLCDGQADQAAKVEKMRQSVLEGLSFSRQSHTLPFPPPPALPFYPASAYPRHFGPVPPSQGRGRGFAGVQPIPSQGGKLEIAGTVVGHWAGSRRGRGGRGPFPLQVVSVGGPARGRPRGVISTPVIRTFGRGGRYYGRGYKNQAAIQGRPPYAASAEEVAKELKSKSGESKSSAMSSDGSLAENGVMAEEKPAPQMNGSTGDARAPSHSESALNNDSKTCNTNPHLNALSTDSACRREAALEAAVLNKEE

SEQ ID NO: 29438 - protein, 256 aa, Homo sapiens
  Payload ID: 5746
  Gene Symbol: FAM120AOS
  Gene Name: family with sequence similarity 120A opposite strand
  Uniprot ID: Q5T036
  ENSP ID: ENSP00000364561
MGKTKDIGDDDTVASEFWSGALSQPSSVPTRPRTPNRDSWRRAWAARGLHPRPSILQPGPARLSRARAGGTRCPQRRHGRATFCALGRGIGVRRGPGPRPARIPGLTLTWKRMSARRMQWAMQTGGRNQTFGGGVPLFWTWLTICCAVWRSLPCRLTHSCSRAFSSAPLKKTKSSMLPPKQALASAARNLCRGAGCNRQAVAGQLLPSTWSLHAHGLAKEAPILPVKKISRSCSVNNKVSKKTTKPPTLRSFLSPI

SEQ ID NO: 29439 - protein, 74 aa, Homo sapiens
  Payload ID: 5746
  Gene Symbol: FAM120AOS
  Gene Name: family with sequence similarity 120A opposite strand
  ENSP ID: ENSP00000414298
MQFRGRNLCRGAGCNRQAVAGQLLPSTWSLHAHGLAKEAPILPVKKISRSCSVNNKVSKKTTKPPTLRSFLSPI

SEQ ID NO: 29440 - protein, 66 aa, Homo sapiens
  Payload ID: 5746
  Gene Symbol: FAM120AOS
  Gene Name: family with sequence similarity 120A opposite strand
  ENSP ID: ENSP00000416978
MRLILNLCRGAGCNRQAVAGQLLPSTWSLHAHGLAKEAPILPVKKISRSCSVNNKVSKKTTKPPTL

SEQ ID NO: 29441 - protein, 58 aa, Homo sapiens
  Payload ID: 5746
  Gene Symbol: FAM120AOS
  Gene Name: family with sequence similarity 120A opposite strand
  ENSP ID: ENSP00000429212
MQFRGRNLCRGAGCNRQAVAGQLLPSTWSLHAHGLAKEAPILPVKKMESCSVAQAGVQ

SEQ ID NO: 29442 - protein, 910 aa, Homo sapiens
  Payload ID: 5747
  Gene Symbol: FAM120B
  Gene Name: family with sequence similarity 120B
  Uniprot ID: Q96EK7
  ENSP ID: ENSP00000417970
MGVRGLQGFVGSTCPHICTVVNFKELAEHHRSKYPGCTPTIVVDAMCCLRYWYTPESWICGGQWREYFSALRDFVKTFTAAGIKLIFFFDGMVEQDKRDEWVKRRLKNNREISRIFHYIKSHKEQPGRNMFFIPSGLAVFTRFALKTLGQETLCSLQEADYEVASYGLQHNCLGILGEDTDYLIYDTCPYFSISELCLESLDTVMLCREKLCESLGLCVADLPLLACLLGNDIIPEGMFESFRYKCLSSYTSVKENFDKKGNIILAVSDHISKVLYLYQGEKKLEEILPLGPNKALFYKGMASYLLPGQKSPWFFQKPKGVITLDKQVISTSSDAESREEVPMCSDAESRQEVPMCTGPESRREVPVYTDSEPRQEVPMCSDPEPRQEVPTCTGPESRREVPMCSDPEPRQEVPMCTGPEARQEVPMYTDSEPRQEVPMYTDSEPRQEVPMYTGSEPRQEVPMYTGPESRQEVPMYTGPESRQEVLIRTDPESRQEIMCTGHESKQEVPICTDPISKQEDSMCTHAEINQKLPVATDFEFKLEALMCTNPEIKQEDPTNVGPEVKQQVTMVSDTEILKVARTHHVQAESYLVYNIMSSGEIECSNTLEDELDQALPSQAFIYRPIRQRVYSLLLEDCQDVTSTCLAVKEWFVYPGNPLRHPDLVRPLQMTIPGGTPSLKILWLNQEPEIQVRRLDTLLACFNLSSSREELQAVESPFQALCCLLIYLFVQVDTLCLEDLHAFIAQALCLQGKSTSQLVNLQPDYINPRAVQLGSLLVRGLTTLVLVNSACGFPWKTSDFMPWNVFDGKLFHQKYLQSEKGYAVEVLLEQNRSRLTKFHNLKAVVCKACMKENRRITGRAHWGSHHAGRWGRQGSSYHRTGSGYSRSSQGQPWRDQGPGSRQYEHDQWRRY

SEQ ID NO: 29443 - protein, 933 aa, Homo sapiens
  Payload ID: 5747
  Gene Symbol: FAM120B
  Gene Name: family with sequence similarity 120B
  ENSP ID: ENSP00000440125
MFGPRGSTSAGAGRKEILSRSSVMGVRGLQGFVGSTCPHICTVVNFKELAEHHRSKYPGCTPTIVVDAMCCLRYWYTPESWICGGQWREYFSALRDFVKTFTAAGIKLIFFFDGMVEQDKRDEWVKRRLKNNREISRIFHYIKSHKEQPGRNMFFIPSGLAVFTRFALKTLGQETLCSLQEADYEVASYGLQHNCLGILGEDTDYLIYDTCPYFSISELCLESLDTVMLCREKLCESLGLCVADLPLLACLLGNDIIPEGMFESFRYKCLSSYTSVKENFDKKGNIILAVSDHISKVLYLYQGEKKLEEILPLGPNKALFYKGMASYLLPGQKSPWFFQKPKGVITLDKQVISTSSDAESREEVPMCSDAESRQEVPMCTGPESRREVPVYTDSEPRQEVPMCSDPEPRQEVPTCTGPESRREVPMCSDPEPRQEVPMCTGPEARQEVPMYTDSEPRQEVPMYTDSEPRQEVPMYTGSEPRQEVPMYTGPESRQEVPMYTGPESRQEVLIRTDPESRQEIMCTGHESKQEVPICTDPISKQEDSMCTHAEINQKLPVATDFEFKLEALMCTNPEIKQEDPTNVGPEVKQQVTMVSDTEILKVARTHHVQAESYLVYNIMSSGEIECSNTLEDELDQALPSQAFIYRPIRQRVYSLLLEDCQDVTSTCLAVKEWFVYPGNPLRHPDLVRPLQMTIPGGTPSLKILWLNQEPEIQVRRLDTLLACFNLSSSREELQAVESPFQALCCLLIYLFVQVDTLCLEDLHAFIAQALCLQGKSTSQLVNLQPDYINPRAVQLGSLLVRGLTTLVLVNSACGFPWKTSDFMPWNVFDGKLFHQKYLQSEKGYAVEVLLEQNRSRLTKFHNLKAVVCKACMKENRRITGRAHWGSHHAGRWGRQGSSYHRTGSGYSRSSQGQPWRDQGPGSRQYEHDQWRRY

SEQ ID NO: 29444 - protein, 922 aa, Homo sapiens
  Payload ID: 5747
  Gene Symbol: FAM120B
  Gene Name: family with sequence similarity 120B
  ENSP ID: ENSP00000477556
MDRQMILSRSSVMGVRGLQGFVGSTCPHICTVVNFKELAEHHRSKYPGCTPTIVVDAMCCLRYWYTPESWICGGQWREYFSALRDFVKTFTAAGIKLIFFFDGMVEQDKRDEWVKRRLKNNREISRIFHYIKSHKEQPGRNMFFIPSGLAVFTRFALKTLGQETLCSLQEADYEVASYGLQHNCLGILGEDTDYLIYDTCPYFSISELCLESLDTVMLCREKLCESLGLCVADLPLLACLLGNDIIPEGMFESFRYKCLSSYTSVKENFDKKGNIILAVSDHISKVLYLYQGEKKLEEILPLGPNKALFYKGMASYLLPGQKSPWFFQKPKGVITLDKQVISTSSDAESREEVPMCSDAESRQEVPMCTGPESRREVPVYTDSEPRQEVPMCSDPEPRQEVPTCTGPESRREVPMCSDPEPRQEVPMCTGPEARQEVPMYTDSEPRQEVPMYTDSEPRQEVPMYTGSEPRQEVPMYTGPESRQEVPMYTGPESRQEVLIRTDPESRQEIMCTGHESKQEVPICTDPISKQEDSMCTHAEINQKLPVATDFEFKLEALMCTNPEIKQEDPTNVGPEVKQQVTMVSDTEILKVARTHHVQAESYLVYNIMSSGEIECSNTLEDELDQALPSQAFIYRPIRQRVYSLLLEDCQDVTSTCLAVKEWFVYPGNPLRHPDLVRPLQMTIPGGTPSLKILWLNQEPEIQVRRLDTLLACFNLSSSREELQAVESPFQALCCLLIYLFVQVDTLCLEDLHAFIAQALCLQGKSTSQLVNLQPDYINPRAVQLGSLLVRGLTTLVLVNSACGFPWKTSDFMPWNVFDGKLFHQKYLQSEKGYAVEVLLEQNRSRLTKFHNLKAVVCKACMKENRRITGRAHWGSHHAGRWGRQGSSYHRTGSGYSRSSQGQPWRDQGPGSRQYEHDQWRRY

SEQ ID NO: 29445 - protein, 933 aa, Homo sapiens; identical to SEQ ID NO: 29443
  Payload ID: 5747
  Gene Symbol: FAM120B
  Gene Name: family with sequence similarity 120B
  ENSP ID: ENSP00000479118

SEQ ID NO: 29446 - protein, 910 aa, Homo sapiens; identical to SEQ ID NO: 29442
  Payload ID: 5747
  Gene Symbol: FAM120B
  Gene Name: family with sequence similarity 120B
  Uniprot ID: Q96EK7
  ENSP ID: ENSP00000481344

SEQ ID NO: 29447 - protein, 242 aa, Homo sapiens
  Payload ID: 5747
  Gene Symbol: FAM120B
  Gene Name: family with sequence similarity 120B
  Uniprot ID: Q96EK7
  ENSP ID: ENSP00000482544
MTIPGGTPSLKILWLNQEPEIQVRRLDTLLACFNLSSSREELQAVESPFQALCCLLIYLFVQVDTLCLEDLHAFIAQALCLQGKSTSQLVNLQPDYINPRAVQLGSLLVRGLTTLVLVNSACGFPWKTSDFMPWNVFDGKLFHQKYLQSEKGYAVEVLLEQNRSRLTKFHNLKAVVCKACMKENRRITGRAHWGSHHAGRWGRQGSSYHRTGSGYSRSSQGQPWRDQGPGSRQYEHDQWRRY

SEQ ID NO: 29448 - protein, 922 aa, Homo sapiens; identical to SEQ ID NO: 29444
  Payload ID: 5747
  Gene Symbol: FAM120B
  Gene Name: family with sequence similarity 120B
  ENSP ID: ENSP00000485745

SEQ ID NO: 29449 - protein, 242 aa, Homo sapiens; identical to SEQ ID NO: 29447
  Payload ID: 5747
  Gene Symbol: FAM120B
  Gene Name: family with sequence similarity 120B
  Uniprot ID: Q96EK7
  ENSP ID: ENSP00000485793

SEQ ID NO: 29450 - protein, 895 aa, Homo sapiens
  Payload ID: 5748
  Gene Symbol: FAM120C
  Gene Name: family with sequence similarity 120C
  ENSP ID: ENSP00000329896
MGVQGFQEFLEKRCPGAVVPVDLLKLARTVSRQQQQQHLHRQLPPTAALAPGAPRAARGSVPLQPPLPPAALGAYSGGAGPTRHHHPAHHFHHHGQAQPGLHPPLPPPPPPQLPGARVLVDAGSALPRLYGGYQTDWVCGGQWNAMLGYLSALCQACAYPGGDGLELVVMFPGGLGKDRLAEWGRRCQAERQTAQLIVGHVGNKGTPPPRAWFLPPACLSHCVRLALIRFRVKVFQSLEDHHLEVVAFFRENGFHGLLAHDSEYALYNIPSYYSSHALKLSWNGKNLTTNQFLMQEVAKQLGLKRMNFPIFAALLGNHILPDEDLAAFHWSLLGPEHPLASLKVRAHQLVLPPCDVVIKAVSEYVSSIKDPSNLDVVGKDVFKQSQSRTEDKIERFKKAVEYYSVTTKLSSLPVGPSFLGFRNNRLGNPPLPRNQVGTISAGKPMFSHQVPQKVKYPPPFPVGPNSSLLFSSHALGESHAFSEDPMLQNSPFANWAVSYDSSASQFPNYLPSKASPPLGPDSSHSSSSDGDEPNGASSDHITEAFHHQPEWGNPNRDRGSWAQPVDTGVSEASLGDGEPHIPSLLSMSTRNHMDITIPPLPPVAPEVLRVAEHRHRRGLMYPYIYHVLTKGEIKIPVCIEDECNMELPPAALLFRSARQYVYGVLFSLAETQRKMERLAMRRRLPVEVPSVILKEWSAYKGKSPQTPELVSALTFREWTCPNLKKLWLGKAVEDKNRRMRAFLACMKSDTPSMLNPANVPTHLLLMCCVLRYMVQWPGGRILHRHELDTFLAQAVSTQLYEPDRLQELKVSIQSHPKEENWRLLGWLWASGLAADPPGAEDPSACKWFLSVGQERGMEKNRLVEDPRDTKKEISKALQMEFLNPWSFIKVGLAPR

SEQ ID NO: 29451 - protein, 1096 aa, Homo sapiens
  Payload ID: 5748
  Gene Symbol: FAM120C
  Gene Name: family with sequence similarity 120C
  Uniprot ID: Q9NX05
  ENSP ID: ENSP00000364324
MGVQGFQEFLEKRCPGAVVPVDLLKLARTVSRQQQQQHLHRQLPPTAALAPGAPRAARGSVPLQPPLPPAALGAYSGGAGPTRHHHPAHHFHHHGQAQPGLHPPLPPPPPPQLPGARVLVDAGSALPRLYGGYQTDWVCGGQWNAMLGYLSALCQACAYPGGDGLELVVMFPGGLGKDRLAEWGRRCQAERQTAQLIVGHVGNKGTPPPRAWFLPPACLSHCVRLALIRFRVKVFQSLEDHHLEVVAFFRENGFHGLLAHDSEYALYNIPSYYSSHALKLSWNGKNLTTNQFLMQEVAKQLGLKRMNFPIFAALLGNHILPDEDLAAFHWSLLGPEHPLASLKVRAHQLVLPPCDVVIKAVSEYVSSIKDPSNLDVVGKDVFKQSQSRTEDKIERFKKAVEYYSVTTKLSSLPVGPSFLGFRNNRLGNPPLPRNQVGTISAGKPMFSHQVPQKVKYPPPFPVGPNSSLLFSSHALGESHAFSEDPMLQNSPFANWAVSYDSSASQFPNYLPSKASPPLGPDSSHSSSSDGDEPNGASSDHITEAFHHQPEWGNPNRDRGSWAQPVDTGVSEASLGDGEPHIPSLLSMSTRNHMDITIPPLPPVAPEVLRVAEHRHRRGLMYPYIYHVLTKGEIKIPVCIEDECNMELPPAALLFRSARQYVYGVLFSLAETQRKMERLAMRRRLPVEVPSVILKEWSAYKGKSPQTPELVSALTFREWTCPNLKKLWLGKAVEDKNRRMRAFLACMKSDTPSMLNPANVPTHLLLMCCVLRYMVQWPGGRILHRHELDTFLAQAVSTQLYEPDRLQELKIEKLDARGIQLAALFMSGVDTALFANDACGQPVPWEHCCPWIYFDGKLFQSKLIKAGRERVSLVELCDGQADLATKVEKMRQSILEGVNMNHPPPSALLPSPTFVPPMVPSLYPVSLYSRAMGSMPLPPQGRSRGFAGLHPIPPQGGKLEIAGMVVGQWAGSRSSRGRGSFGMQVVSVGGPGKGHGKEQTGRGSKGHKKGNKQGSSDGVSKSLELHQGRSRSQVNGNSGALIKEEKSDHRLPAPSQCALSRDSNECNNGNRYLPMNNREKNHLQEQKLETVAQRKED

SEQ ID NO: 29452 - protein, 238 aa, Homo sapiens
  Payload ID: 5748
  Gene Symbol: FAM120C
  Gene Name: family with sequence similarity 120C
  Uniprot ID: Q9NX05
  ENSP ID: ENSP00000420718
MGVQGFQEFLEKRCPGAVVPVDLLKLARTVSRQQQQQHLHRQLPPTAALAPGAPRAARGSVPLQPPLPPAALGAYSGGAGPTRHHHPAHHFHHHGQAQPGLHPPLPPPPPPQLPGARVLVDAGSALPRLYGGYQTDWVCGGQWNAMLGYLSALCQACAYPGGDGLELVVMFPGGLGKDRLAEWGRRCQAERQTAQLIVGHVGNKGTPPPRAWFLPPACLSHCVRLALIRFRVKQAAML

SEQ ID NO: 29453 - protein, 287 aa, Homo sapiens
  Payload ID: 5749
  Gene Symbol: FAM122A
  Gene Name: family with sequence similarity 122A
  Uniprot ID: Q96E09
  ENSP ID: ENSP00000377807
MAQEKMELDLELPPGTGGSPAEGGGSGGGGGLRRSNSAPLIHGLSDTSPVFQAEAPSARRNSTTFPSRHGLLLPASPVRMHSSRLHQIKQEEGMDLINRETVHEREVQTAMQISHSWEESFSLSDNDVEKSASPKRIDFIPVSPAPSPTRGIGKQCFSPSLQSFVSSNGLPPSPIPSPTTRFTTRRSQSPINCIRPSVLGPLKRKCEMETEYQPKRFFQGITNMLSSDVAQLSDPGVCVSSDTLDGNSSSAGSSCNSPAKVSTTTDSPVSPAQAASPFIPLDELSSK

SEQ ID NO: 29454 - protein, 241 aa, Homo sapiens
  Payload ID: 5750
  Gene Symbol: FAM122B
  Gene Name: family with sequence similarity 122B
  Uniprot ID: Q7Z309
  ENSP ID: ENSP00000298090
MAQEKMELDLEPDTSYGGTLRRSSSAPLIHGLSDLSQVFQPYTLRTRRNSTTIMSRHSLLLSSSPNRIPSSRLHQIKREEGLDMVNRETAHEREMQTAMQISQSWDESLSLSDSDFDKPEKLYSPKRIDFTPVSPAPSPTRGFGKMFVSSSGLPPSPVPSPRRFSRRSQSPVKCIRPSVLGPLKRKGEMETESQPKRLFQGTTNMLSPDAAQLSDLSSWWCYQGEEIPALTRCVEHLQMNE

SEQ ID NO: 29455 - protein, 267 aa, Homo sapiens
  Payload ID: 5750
  Gene Symbol: FAM122B
  Gene Name: family with sequence similarity 122B
  ENSP ID: ENSP00000339207
MAQEKMELDLEPDTSYGGTLRRSSSAPLIHGLSDLSQVFQPYTLRTRRNSTTIMSRHSLLLSSSPNRIPSSRLHQIKREEGLDMVNRETAHEREMQTAMQISQSWDESLSLSDSDFDKPEKLYSPKRIDFTPVSPAPSPTRGFGKMFVSSSGLPPSPVPSPRRFSSRRSQSPVKCIRPSVLGPLKRKGEMETESQPKRLFQGTTNMLSPDAAQLSDLSSCSDILDGSSSSSGLSSDPLAKGSATAESPVACSNSCSSFILMDDLSPK

SEQ ID NO: 29456 - protein, 247 aa, Homo sapiens
  Payload ID: 5750
  Gene Symbol: FAM122B
  Gene Name: family with sequence similarity 122B
  Uniprot ID: Q7Z309
  ENSP ID: ENSP00000359826
MAQEKMELDLEPDTSYGGTLRRSSSAPLIHGLSDLSQVFQPYTLRTRRNSTTIMSRHSLEEGLDMVNRETAHEREMQTAMQISQSWDESLSLSDSDFDKPEKLYSPKRIDFTPVSPAPSPTRGFGKMFVSSSGLPPSPVPSPRRFSRRSQSPVKCIRPSVLGPLKRKGEMETESQPKRLFQGTTNMLSPDAAQLSDLSSCSDILDGSSSSSGLSSDPLAKGSATAESPVACSNSCSSFILMDDLSPK

SEQ ID NO: 29457 - protein, 248 aa, Homo sapiens
  Payload ID: 5750
  Gene Symbol: FAM122B
  Gene Name: family with sequence similarity 122B
  Uniprot ID: Q7Z309
  ENSP ID: ENSP00000419592
MAQEKMELDLEPDTSYGGTLRRSSSAPLIHGLSDLSQVFQPYTLRTRRNSTTIMSRHSLEEGLDMVNRETAHEREMQTAMQISQSWDESLSLSDSDFDKPEKLYSPKRIDFTPVSPAPSPTRGFGKMFVSSSGLPPSPVPSPRRFSSRRSQSPVKCIRPSVLGPLKRKGEMETESQPKRLFQGTTNMLSPDAAQLSDLSSCSDILDGSSSSSGLSSDPLAKGSATAESPVACSNSCSSFILMDDLSPK

SEQ ID NO: 29458 - protein, 267 aa, Homo sapiens; identical to SEQ ID NO: 29455
  Payload ID: 5750
  Gene Symbol: FAM122B
  Gene Name: family with sequence similarity 122B
  ENSP ID: ENSP00000479150

SEQ ID NO: 29459 - protein, 266 aa, Homo sapiens
  Payload ID: 5750
  Gene Symbol: FAM122B
  Gene Name: family with sequence similarity 122B
  Uniprot ID: Q7Z309
  ENSP ID: ENSP00000487221
MAQEKMELDLEPDTSYGGTLRRSSSAPLIHGLSDLSQVFQPYTLRTRRNSTTIMSRHSLLLSSSPNRIPSSRLHQIKREEGLDMVNRETAHEREMQTAMQISQSWDESLSLSDSDFDKPEKLYSPKRIDFTPVSPAPSPTRGFGKMFVSSSGLPPSPVPSPRRFSRRSQSPVKCIRPSVLGPLKRKGEMETESQPKRLFQGTTNMLSPDAAQLSDLSSCSDILDGSSSSSGLSSDPLAKGSATAESPVACSNSCSSFILMDDLSPK

SEQ ID NO: 29460 - protein, 195 aa, Homo sapiens
  Payload ID: 5751
  Gene Symbol: FAM122C
  Gene Name: family with sequence similarity 122C
  Uniprot ID: Q6P4D5
  ENSP ID: ENSP00000359820
MAQEKMKLGFKSLPSSTTADGNILRRVNSAPLINGLGFNSQVLQADMLRIRTNRTTFRNRRSLLLPPPPFHGSISRLHQIKQEEAMDLINRETMSEWKLQSEIQISHSWEEGLKLVKWHFNINQKRFSKAQPTCFLLILPNCQKIMCIYFQLLLMETTAMLDLLVIRQLKSALSQTLLCHLLILVLICSSRQTFN

SEQ ID NO: 29461 - protein, 152 aa, Homo sapiens
  Payload ID: 5751
  Gene Symbol: FAM122C
  Gene Name: family with sequence similarity 122C
  Uniprot ID: Q6P4D5
  ENSP ID: ENSP00000359821
MAQEKMKLGFKSLPSSTTADGNILRRVNSAPLINGLGFNSQVLQADMLRIRTNRTTFRNRRSLLLPPPPFHGSISRLHQIKQEEAMDLINRETMSEWKLQSEIQISHSWEEGLKLNDNGLQKSSSLKCIDLTPVSSMASSIKKTGKSTSSYF

SEQ ID NO: 29462 - protein, 115 aa, Homo sapiens
  Payload ID: 5751
  Gene Symbol: FAM122C
  Gene Name: family with sequence similarity 122C
  Uniprot ID: Q6P4D5
  ENSP ID: ENSP00000402477
MAYFPGTGRTDQETQLDLSLCGREPESLENLFLDPDMAQEKMKLGFKSLPSSTTADGNILRRVNSAPLINGLGFNSQVLQADMLRIRTNRTTFRNRRSLEITSPTSVEQKPKDLF

SEQ ID NO: 29463 - protein, 79 aa, Homo sapiens
  Payload ID: 5751
  Gene Symbol: FAM122C
  Gene Name: family with sequence similarity 122C
  ENSP ID: ENSP00000485120
MAQEKMKLGFKSLPSSTTADGNILRRVNSAPLINGLGFNSQVLQADMLRIRTNRTTFRNRRSLEITSPTSVEQKPKDLF

SEQ ID NO: 29464 - protein, 582 aa, Homo sapiens
  Payload ID: 5752
  Gene Symbol: FAM124A
  Gene Name: family with sequence similarity 124A
  Uniprot ID: Q86V42
  ENSP ID: ENSP00000280057
MDPKAGGGGEEDDCVDSGAETGGSDYSHLSSTSNGFSTWRMPCCLFLYCTHGDKEKGRWSLQVEHTWPSGELSVEEAQDPFLVSIHIIADPGESQPLQEAIDNVLAWIHPDLPLFRVSERRASRRRRKPPKGAQPALAVVLFLQEEYGEEQILQLHRTLQQPPWRHHHTEQVHGRFLPYLPCSQDFFTLAPGTPLWAIRPVHYGKEIVRFTVYCRYDNYADSLRFYQLILRRSPSQKKADFCIFPIFSNLDVDIQFSLKRLPCDQCPVPTDSSVLEFRVRDIGELVPLLPNPCSPISEGRWQTEDHDGNKILLQAQRVHKKFPKPGRVHHASEKKRHSTPLPSTAVPSHTPGSSQQSPLNSPHPGPIRTGLPPGHQQEFAGRANSTPNPPWSFQRSKSLFCLPTGGPSLASSAEPQWFSNTGAPGHRASEWRHGHLLSIDDLEGAQETDVDTGLRLSSSDLSVVSAYSAPSRFCSTVETPLPSERCSSHWAAHKDSREGPLPTVSRVTTEASWASLPFFTKRSSSSSATARAAPPAPSTSTLTDSSPQLPCDTPKVKQTDGDMPPPPGSAGPGDNDMEEFYI

SEQ ID NO: 29465 - protein, 546 aa, Homo sapiens
  Payload ID: 5752
  Gene Symbol: FAM124A
  Gene Name: family with sequence similarity 124A
  Uniprot ID: Q86V42
  ENSP ID: ENSP00000324625
MDPKAGGGGEEDDCVDSGAETGGSDYSHLSSTSSELSVEEAQDPFLVSIHIIADPGESQPLQEAIDNVLAWIHPDLPLFRVSERRASRRRRKPPKGAQPALAVVLFLQEEYGEEQILQLHRTLQQPPWRHHHTEQVHGRFLPYLPCSQDFFTLAPGTPLWAIRPVHYGKEIVRFTVYCRYDNYADSLRFYQLILRRSPSQKKADFCIFPIFSNLDVDIQFSLKRLPCDQCPVPTDSSVLEFRVRDIGELVPLLPNPCSPISEGRWQTEDHDGNKILLQAQRVHKKFPKPGRVHHASEKKRHSTPLPSTAVPSHTPGSSQQSPLNSPHPGPIRTGLPPGHQQEFAGRANSTPNPPWSFQRSKSLFCLPTGGPSLASSAEPQWFSNTGAPGHRASEWRHGHLLSIDDLEGAQETDVDTGLRLSSSDLSVVSAYSAPSRFCSTVETPLPSERCSSHWAAHKDSREGPLPTVSRVTTEASWASLPFFTKRSSSSSATARAAPPAPSTSTLTDSSPQLPCDTPKVKQTDGDMPPPPGSAGPGDNDMEEFYI

SEQ ID NO: 29466 - protein, 301 aa, Homo sapiens
  Payload ID: 5752
  Gene Symbol: FAM124A
  Gene Name: family with sequence similarity 124A
  Uniprot ID: Q86V42
  ENSP ID: ENSP00000481212
MDPKAGGGGEEDDCVDSGAETGGSDYSHLSSTSSELSVEEAQDPFLVSIHIIADPGESQPLQEAIDNVLAWIHPDLPLFRVSERRASRRRRKPPKGAQPALAVVLFLQEEYGEEQILQLHRTLQQPPWRHHHTEQVHGRFLPYLPCSQDFFTLAPGTPLWAIRPVHYGKEIVRFTVYCRYDNYADSLRFYQLILRRSPSQKKADFCIFPIFSNLDVDIQFSLKRLPCDQCPVPTDSSVLEFRVRDIGELVPLLPNPCSPISEGRWQTEDHDGNKILLQVLGGRLSVCLGDLRNQLALPQTL

SEQ ID NO: 29467 - protein, 286 aa, Homo sapiens
  Payload ID: 5752
  Gene Symbol: FAM124A
  Gene Name: family with sequence similarity 124A
  ENSP ID: ENSP00000483855
MDPKAGGGGEEDDCVDSGAETGGSDYSHLSSTSSELSVEEAQDPFLVSIHIIADPGESQPLQEAIDNVLAWIHPDLPLFRVSERRASRRRRKPPKGAQPALAVVLFLQEEYGEEQILQLHRTLQQPPWRHHHTEQVHGRFLPYLPCSQDFFTLAPGTPLWAIRPVHYGKEIVRFTVYCRYDNYADSLRFYQLILRRSPSQKKADFCIFPIFSNLDVDIQFSLKRLPCDQCPVPTDSSVLEFRVRDIGELVPLLPNPCSPISEGRWQTEDHDGNKILLQVLGGRLSV

SEQ ID NO: 29468 - protein, 272 aa, Homo sapiens
  Payload ID: 5753
  Gene Symbol: FAM124B
  Gene Name: family with sequence similarity 124B
  Uniprot ID: Q9H5Z6
  ENSP ID: ENSP00000243806
MDETQGPLAMTVHLLANSGHGSLLQRTLDQLLDCICPEVRLFQVSERASPVKYCEKSHSKRSRFPGMSVLLFLHESPGEDRLFRVLDSLQHSPWQCYPTQDTRGRLCPYFFANQEFYSLDSQLPIWGVRQVHCGSEILRVTLYCSFDNYEDAIRLYEMILQREATLQKSNFCFFVLYASKSFALQLSLKQLPPGMSVDPKESSVLQFKVQEIGQLVPLLPNPCMPISSTRWQTQDYDGNKILLQRWESSSVAQTRVRWCHHSSLRSSPSGFK

SEQ ID NO: 29469 - protein, 272 aa, Homo sapiens; identical to SEQ ID NO: 29468
  Payload ID: 5753
  Gene Symbol: FAM124B
  Gene Name: family with sequence similarity 124B
  Uniprot ID: Q9H5Z6
  ENSP ID: ENSP00000374524

SEQ ID NO: 29470 - protein, 455 aa, Homo sapiens
  Payload ID: 5753
  Gene Symbol: FAM124B
  Gene Name: family with sequence similarity 124B
  Uniprot ID: Q9H5Z6
  ENSP ID: ENSP00000386895
MDETQGPLAMTVHLLANSGHGSLLQRTLDQLLDCICPEVRLFQVSERASPVKYCEKSHSKRSRFPGMSVLLFLHESPGEDRLFRVLDSLQHSPWQCYPTQDTRGRLCPYFFANQEFYSLDSQLPIWGVRQVHCGSEILRVTLYCSFDNYEDAIRLYEMILQREATLQKSNFCFFVLYASKSFALQLSLKQLPPGMSVDPKESSVLQFKVQEIGQLVPLLPNPCMPISSTRWQTQDYDGNKILLQVQLNPELGVKNGILGAGMLPLGSRLTSVSAKRTSEPRSQRNQGKRSQGHSLELPEPSGSPTSDRCAGTSWKSPGRSFQVSSPAMGAHLHLSSHHLESGARMKVLNRENSFQKLEAETNVDTGLTIINSEPRQTYFGGFPRDLQTSQPPFCLPASSLGVATSKNNSVLKERVSPLPLAGQRDLGTRKTISECLLHLQVQGEEKEEDEEEFFI

SEQ ID NO: 29471 - protein, 419 aa, Homo sapiens
  Payload ID: 5754
  Gene Symbol: FAM126A
  Gene Name: family with sequence similarity 126, member A
  ENSP ID: ENSP00000386246
MFTSEKGVVEEWLSEFKTLPETSLPNYATNLKDKSSLVSSLYKVIQEPQSELLEPVCHQLFEFYRSGEEQLLQFTLQFLPELIWCYLAVSASRNVHSSGCIEALLLGVYNLEIVDKQGHTKVLSFTIPSLSKPSVYHEPSSIGSMALTESALSQHGLSKVVYSGPHPQREMLTAQNRFEVLTFLLLCYNAALTYMPSVSLQSLCQICSRICVCGYPRQHVRKYKGISSRIPVSSGFMVQMLTGIYFAFYNGEWDLAQKALDDIIYRAQLELYPEPLLVANAIKASLPHGPMKSNKEGTRCIQVEITPTSSRISRNAVTSMSIRGHRWKRHEQPDNNNDATELGILVIPEISVTNVAGERTGNGEKGRTLGEIDAQHIQGVQETATDPRTESKGLPEIRRQKSVRKMMEDGINSPGRVQF

SEQ ID NO: 29472 - protein, 114 aa, Homo sapiens
  Payload ID: 5754
  Gene Symbol: FAM126A
  Gene Name: family with sequence similarity 126, member A
  ENSP ID: ENSP00000386624
MFTSEKGVVEEWLSEFKTLPETSLPNYATNLKDKSSLVSSLYKVIQEPQSELLEPVCHQLFEFYRSGEEQLLQFTLQFLPELIWCYLAVSASRNVHSSGCIEALLLGVYNLVCI

SEQ ID NO: 29473 - protein, 471 aa, Homo sapiens
  Payload ID: 5754
  Gene Symbol: FAM126A
  Gene Name: family with sequence similarity 126, member A
  ENSP ID: ENSP00000397168
  MOD_RES (1)..(1): Any amino acid
XRGWRQWWLSRLGCQSVRGGGRWLTGTRSARKKGSRWCCYSGGSRAASVAVAESLTSRGPAGGAPAAALTLPETSLPNYATNLKDKSSLVSSLYKVIQEPQSELLEPVCHQLFEFYRSGEEQLLQFTLQFLPELIWCYLAVSASRNVHSSGCIEALLLGVYNLEIVDKQGHTKVLSFTIPSLSKPSVYHEPSSIGSMALTESALSQHGLSKVVYSGPHPQREMLTAQNRFEVLTFLLLCYNAALTYMPSVSLQSLCQICSRICVCGYPRQHVRKYKGISSRIPVSSGFMVQMLTGIYFAFYNGEWDLAQKALDDIIYRAQLELYPEPLLVANAIKASLPHGPMKSNKEGTRCIQVEITPTSSRISRNAVTSMSIRGHRWKRHEQPDNNNDATELGILVIPEISVTNVAGERTGNGEKGRTLGEIDAQHIQGVQETATDPRTESKGLPEIRRQKSVRKMMEDGINSPGRVQF

SEQ ID NO: 29474 - protein, 521 aa, Homo sapiens
  Payload ID: 5754
  Gene Symbol: FAM126A
  Gene Name: family with sequence similarity 126, member A
  Uniprot ID: Q9BYI3
  ENSP ID: ENSP00000403396
MFTSEKGVVEEWLSEFKTLPETSLPNYATNLKDKSSLVSSLYKVIQEPQSELLEPVCHQLFEFYRSGEEQLLQFTLQFLPELIWCYLAVSASRNVHSSGCIEALLLGVYNLEIVDKQGHTKVLSFTIPSLSKPSVYHEPSSIGSMALTESALSQHGLSKVVYSGPHPQREMLTAQNRFEVLTFLLLCYNAALTYMPSVSLQSLCQICSRICVCGYPRQHVRKYKGISSRIPVSSGFMVQMLTGIYFAFYNGEWDLAQKALDDIIYRAQLELYPEPLLVANAIKASLPHGPMKSNKEGTRCIQVEITPTSSRISRNAVTSMSIRGHRWKRHGNTELTGQEELMEISEVDEGFYSRAASSTSQSGLSNSSHNCSNKPSIGKNHRRSGGSKTGGKEKETTGESCKDHFARKQTQRAQSENLELLSLKRLTLTTSQSLPKPSSHGLAKTAATVFSKSFEQVSGVTVPHNPSSAVGCGAGTDANRFSACSLQEEKLIYVSERTELPMKHQSGQQRPPSISITLSTD

SEQ ID NO: 29475 - protein, 100 aa, Homo sapiens
  Payload ID: 5755
  Gene Symbol: FAM126B
  Gene Name: family with sequence similarity 126, member B
  ENSP ID: ENSP00000286181
MLGTDRCVVEEWLSEFKALPDTQITSYAATLHRKKTLVPALYKVIQDSNNEIQPPRVPLLCTGVSLKKFSSWSLSAISCLSSIVAQRFDLRGSHCSSCQN

SEQ ID NO: 29476 - protein, 530 aa, Homo sapiens
  Payload ID: 5755
  Gene Symbol: FAM126B
  Gene Name: family with sequence similarity 126, member B
  Uniprot ID: Q8IXS8
  ENSP ID: ENSP00000393667
MLGTDRCVVEEWLSEFKALPDTQITSYAATLHRKKTLVPALYKVIQDSNNELLEPVCHQLFELYRSSEVRLKRFTLQFLPELMWVYLRLTVSRDRQSNGCIEALLLGIYNLEIADKDGNNKVLSFTIPSLSKPSIYHEPSTIGSMALTEGALCQHDLIRVVYSDLHPQRETFTAQNRFEVLSFLMLCYNSAIVYMPASSYQSLCRMGSRVCVSGFPRQHEKHWKELCGRIVLDPEFMVQLLTGVYYAMYNGQWDLGQEVLDDIIYRAQLELFSQPLLVANAMKNSLPFDAPDSTQEGQKVLKVEVTPTVPRISRTAITTASIRRHRWRREGAEGVNGGEESVNLNDADEGFSSGASLSSQPIGTKPSSSSQRGSLRKVATGRSAKDKETASAIKSSESPRDSVVRKQYVQQPTDLSVDSVELTPMKKHLSLPAGQVVPKINSLSLIRTASASSSKSFDYVNGSQASTSIGVGTEGGTNLAANNANRYSTVSLQEDRLGQAGEGKELLSPGAPLTKQSRSPSFNMQLISQV

SEQ ID NO: 29477 - protein, 208 aa, Homo sapiens
  Payload ID: 5755
  Gene Symbol: FAM126B
  Gene Name: family with sequence similarity 126, member B
  ENSP ID: ENSP00000401905
MLGTDRCVVEEWLSEFKALPDTQITSYAATLHRKKTLVPALYKVIQDSNNELLEPVCHQLFELYRSSEVRLKRFTLQFLPELMWVYLRLTVSRDRQSNGCIEALLLGIYNLEIADKDGNNKVLSFTIPSLSKPSIYHEPSTIGSMALTEGALCQHDLIRVVYSDLHPQRETFTAQNRFEVLSFLMLCYNSAIVYMPASSYQSLCRMGS

SEQ ID NO: 29478 - protein, 87 aa, Homo sapiens
  Payload ID: 5755
  Gene Symbol: FAM126B
  Gene Name: family with sequence similarity 126, member B
  ENSP ID: ENSP00000408374
MLGTDRCVVEEWLSEFKALPDTQITSYAATLHRKKTLVPALYKVIQDSNNELLEPVCHQLFELYRSSEVRLKRFTLQFLPELMWVYL

SEQ ID NO: 29479 - protein, 84 aa, Homo sapiens
  Payload ID: 5755
  Gene Symbol: FAM126B
  Gene Name: family with sequence similarity 126, member B
  ENSP ID: ENSP00000412139
MLGTDRCVVEEWLSEFKALPDTQITSYAATLHRKKTLVPALYKVIQDSNNEIQPPRVPLLCTGVSLKKFSSWSLSAISCLSSIV

SEQ ID NO: 29480 - protein, 113 aa, Homo sapiens
  Payload ID: 5756
  Gene Symbol: FAM127A
  Gene Name: family with sequence similarity 127, member A
  Uniprot ID: A6ZKI3
  ENSP ID: ENSP00000257013
MDGRVQLIKALLALPIRPATRRWRNPIPFPETFDGDTDRLPEFIVQTGSYMFVDENTFSSDALKVTFLITRLTGPALQWVIPYIKKESPLLNDYRGFLAEMKRVFGWEEDEDF

SEQ ID NO: 29481 - protein, 113 aa, Homo sapiens
  Payload ID: 5757
  Gene Symbol: FAM127B
  Gene Name: family with sequence similarity 127, member B
  Uniprot ID: Q9BWD3
  ENSP ID: ENSP00000375267
MDGRVQLMKALLAGPLRPAARRWRNPIPFPETFDGDTDRLPEFIVQTSSYMFVDENTFSNDALKVTFLITRLTGPALQWVIPYIRKESPLLNDYRGFLAEMKRVFGWEEDEDF

SEQ ID NO: 29482 - protein, 113 aa, Homo sapiens
  Payload ID: 5758
  Gene Symbol: FAM127C
  Gene Name: family with sequence similarity 127, member C
  Uniprot ID: Q17RB0
  ENSP ID: ENSP00000375268
MEGRVQLMKALLARPLRPAARRWRNPIPFPETFDGDTDRLPEFIVQTSSYMFVDENTFSNDALKVTFLITRLTGPALQWVIPYIKKESPLLSDYRGFLAEMKRVFGWEEDEDF

SEQ ID NO: 29483 - protein, 928 aa, Homo sapiens
  Payload ID: 5759
  Gene Symbol: FAM129A
  Gene Name: family with sequence similarity 129, member A
  Uniprot ID: Q9BZQ8
  ENSP ID: ENSP00000356481
MGGSASSQLDEGKCAYIRGKTEAAIKNFSPYYSRQYSVAFCNHVRTEVEQQRDLTSQFLKTKPPLAPGTILYEAELSQFSEDIKKWKERYVVVKNDYAVESYENKEAYQRGAAPKCRILPAGGKVLTSEDEYNLLSDRHFPDPLASSEKENTQPFVVLPKEFPVYLWQPFFRHGYFCFHEAADQKRFSALLSDCVRHLNHDYMKQMTFEAQAFLEAVQFFRQEKGHYGSWEMITGDEIQILSNLVMEELLPTLQTDLLPKMKGKKNDRKRTWLGLLEEAYTLVQHQVSEGLSALKEECRALTKGLEGTIRSDMDQIVNSKNYLIGKIKAMVAQPAEKSCLESVQPFLASILEELMGPVSSGFSEVRVLFEKEVNEVSQNFQTTKDSVQLKEHLDRLMNLPLHSVKMEPCYTKVNLLHERLQDLKSRFRFPHIDLVVQRTQNYMQELMENAVFTFEQLLSPHLQGEASKTAVAIEKVKLRVLKQYDYDSSTIRKKIFQEALVQITLPTVQKALASTCKPELQKYEQFIFADHTNMIHVENVYEEILHQILLDETLKVIKEAAILKKHNLFEDNMALPSESVSSLTDLKPPTGSNQASPARRASAILPGVLGSETLSNEVFQESEEEKQPEVPSSLAKGESLSLPGPSPPPDGTEQVIISRVDDPVVNPVATEDTAGLPGTCSSELEFGGTLEDEEPAQEEPEPITASGSLKALRKLLTASVEVPVDSAPVMEEDTNGESHVPQENEEEEEKEPSQAAAIHPDNCEESEVSEREAQPPCPEAHGEELGGFPEVGSPASPPASGGLTEEPLGPMEGELPGEACTLTAHEGRGGKCTEEGDASQQEGCTLGSDPICLSESQVSEEQEEMGGQSSAAQATASVNAEEIKVARIHECQWVVEDAPNPDVLLSHKDDVKEGEGGQESFPELPSEE

SEQ ID NO: 29484 - protein, 100 aa, Homo sapiens
  Payload ID: 5759
  Gene Symbol: FAM129A
  Gene Name: family with sequence similarity 129, member A
  ENSP ID: ENSP00000414039
  MOD_RES (1)..(1): Any amino acid
XAVAIEKVKLRVLKQYDYDSSTIRKKIFQEALVQITLPTVQKALASTCKPELQKYEQFIFADHTNMIHVENVYEEILHQILLDETLKGAYIPIKCSSLKS

SEQ ID NO: 29485 - protein, 746 aa, Homo sapiens
  Payload ID: 5760
  Gene Symbol: FAM129B
  Gene Name: family with sequence similarity 129, member B
  Uniprot ID: Q96TA1
  ENSP ID: ENSP00000362409
MGDVLSTHLDDARRQHIAEKTGKILTEFLQFYEDQYGVALFNSMRHEIEGTGLPQAQLLWRKVPLDERIVFSGNLFQHQEDSKKWRNRFSLVPHNYGLVLYENKAAYERQVPPRAVINSAGYKILTSVDQYLELIGNSLPGTTAKSGSAPILKCPTQFPLILWHPYARHYYFCMMTEAEQDKWQAVLQDCIRHCNNGIPEDSKVEGPAFTDAIRMYRQSKELYGTWEMLCGNEVQILSNLVMEELGPELKAELGPRLKGKPQERQRQWIQISDAVYHMVYEQAKARFEEVLSKVQQVQPAMQAVIRTDMDQIITSKEHLASKIRAFILPKAEVCVRNHVQPYIPSILEALMVPTSQGFTEVRDVFFKEVTDMNLNVINEGGIDKLGEYMEKLSRLAYHPLKMQSCYEKMESLRLDGLQQRFDVSSTSVFKQRAQIHMREQMDNAVYTFETLLHQELGKGPTKEELCKSIQRVLERVLKKYDYDSSSVRKRFFREALLQISIPFLLKKLAPTCKSELPRFQELIFEDFARFILVENTYEEVVLQTVMKDILQAVKEAAVQRKHNLYRDSMVMHNSDPNLHLLAEGAPIDWGEEYSNSGGGGSPSPSTPESATLSEKRRRAKQVVSVVQDEEVGLPFEASPESPPPASPDGVTEIRGLLAQGLRPESPPPAGPLLNGAPAGESPQPKAAPEASSPPASPLQHLLPGKAVDLGPPKPSDQETGEQVSSPSSHPALHTTTEDSAGVQTEF

SEQ ID NO: 29486 - protein, 733 aa, Homo sapiens
  Payload ID: 5760
  Gene Symbol: FAM129B
  Gene Name: family with sequence similarity 129, member B
  Uniprot ID: Q96TA1
  ENSP ID: ENSP00000362411
MGWMGEKTGKILTEFLQFYEDQYGVALFNSMRHEIEGTGLPQAQLLWRKVPLDERIVFSGNLFQHQEDSKKWRNRFSLVPHNYGLVLYENKAAYERQVPPRAVINSAGYKILTSVDQYLELIGNSLPGTTAKSGSAPILKCPTQFPLILWHPYARHYYFCMMTEAEQDKWQAVLQDCIRHCNNGIPEDSKVEGPAFTDAIRMYRQSKELYGTWEMLCGNEVQILSNLVMEELGPELKAELGPRLKGKPQERQRQWIQISDAVYHMVYEQAKARFEEVLSKVQQVQPAMQAVIRTDMDQIITSKEHLASKIRAFILPKAEVCVRNHVQPYIPSILEALMVPTSQGFTEVRDVFFKEVTDMNLNVINEGGIDKLGEYMEKLSRLAYHPLKMQSCYEKMESLRLDGLQQRFDVSSTSVFKQRAQIHMREQMDNAVYTFETLLHQELGKGPTKEELCKSIQRVLERVLKKYDYDSSSVRKRFFREALLQISIPFLLKKLAPTCKSELPRFQELIFEDFARFILVENTYEEVVLQTVMKDILQAVKEAAVQRKHNLYRDSMVMHNSDPNLHLLAEGAPIDWGEEYSNSGGGGSPSPSTPESATLSEKRRRAKQVVSVVQDEEVGLPFEASPESPPPASPDGVTEIRGLLAQGLRPESPPPAGPLLNGAPAGESPQPKAAPEASSPPASPLQHLLPGKAVDLGPPKPSDQETGEQVSSPSSHPALHTTTEDSAGVQTEF

SEQ ID NO: 29487 - protein, 651 aa, Homo sapiens
  Payload ID: 5761
  Gene Symbol: FAM129C
  Gene Name: family with sequence similarity 129, member C
  Uniprot ID: Q86XR2
  ENSP ID: ENSP00000333447
MGPDRKEVPLSRGTQAVVVGKGRGAPGDDSSMGGRPSSPLDKQQRQHLRGQVDTLLRNFLPCYRGQLAASVLRQISRELGPQEPTGSQLLRSKKLPRVREHRGPLTQLRGHPPRWQPIFCVLRGDGRLEWFSHKEEYENGGHCLGSTALTGYTLLTSQREYLRLLDALCPESLGDHTQEEPDSLLEVPVSFPLFLQHPFRRHLCFSAATREAQHAWRLALQGGIRLQGIVLQRSQAPAARAFLDAVRLYRQHQGHFGDDDVTLGSDAEVLTAVLMREQLPALRAQTLPGLRGAGRARAWAWTELLDAVHAAVLAGASAGLCAFQPEKDELLASLEKTIRPDVDQLLRQRARVAGRLRTDIRGPLESCLRREVDPQLPRVVQTLLRTVEASLEAVRTLLAQGMDRLSHRLRQSPSGTRLRREVYSFGEMPWDLALMQTCYREAERSRGRLGQLAAPFGFLGMQSLVFGAQDLAQQLMADAVATFLQLADQCLTTALNCDQAAQRLERVRGRVLKKFKSDSGLAQRRFIRGWGLCIFLPFVLSQLEPGCKKELPEFEGDVLAVGSQALTTEGIYEDVIRGCLLQRIDQELKKTLGANDVSCTLDGCLEVPWEQEGADEETEAEREGGACPRQPDSGAQIQPLCPPPSPGTFRS

SEQ ID NO: 29488 - protein, 697 aa, Homo sapiens
  Payload ID: 5761
  Gene Symbol: FAM129C
  Gene Name: family with sequence similarity 129, member C
  Uniprot ID: Q86XR2
  ENSP ID: ENSP00000335040
MGPDRKEVPLSRGTQAVVVGKGRGAPGDDSSMGGRPSSPLDKQQRQHLRGQVDTLLRNFLPCYRGQLAASVLRQISRELGPQEPTGSQLLRSKKLPRVREHRGPLTQLRGHPPRWQPIFCVLRGDGRLEWFSHKEEYENGGHCLGSTALTGYTLLTSQREYLRLLDALCPESLGDHTQEEPDSLLEVPVSFPLFLQHPFRRHLCFSAATREAQHAWRLALQGGIRLQGIVLQRSQAPAARAFLDAVRLYRQHQGHFGDDDVTLGSDAEVLTAVLMREQLPALRAQTLPGLRGAGRARAWAWTELLDAVHAAVLAGASAGLCAFQPEKDELLASLEKTIRPDVDQLLRQRARVAGRLRTDIRGPLESCLRREVDPQLPRVVQTLLRTVEASLEAVRTLLAQGMDRLSHRLRQSPSGTRLRREVYSFGEMPWDLALMQTCYREAERSRGRLGQLAAPFGFLGMQSLVFGAQDLAQQLMADAVATFLQLADQCLTTALNCDQAAQRLERVRGRVLKKFKSDSGLAQRRFIRGWGLCIFLPFVLSQLEPGCKKELPEFEGDVLAVGSQALTTEGIYEDVIRGCLLQRIDQELKKTLGANDVSCTLDGCLEVPWEQEGAAPNLNLVSSFLAGRQAFTDFLCLPAKSSANWILAASLLSCSCFRSGFHRDSRVFLVQLAEGLSHSLETVSSHSVWSFRPTPRQ

SEQ ID NO: 29489 - protein, 423 aa, Homo sapiens
  Payload ID: 5761
  Gene Symbol: FAM129C
  Gene Name: family with sequence similarity 129, member C
  Uniprot ID: Q86XR2
  ENSP ID: ENSP00000394929
MREQLPALRAQTLPGLRGAGRARAWAWTELLDAVHAAVLAGASAGLCAFQPEKDELLASLEKTIRPDVDQLLRQRARVAGRLRTDIRGPLESCLRREVDPQLPRVVQTLLRTVEASLEAVRTLLAQGMDRLSHRLRQSPSGTRLRREVYSFGEMPWDLALMQTCYREAERSRGRLGQLAAPFGFLGMQSLVFGAQDLAQQLMADAVATFLQLADQCLTTALNCDQAAQRLERVRGRVLKKFKSDSGLAQRRFIRGWGLCIFLPFVLSQLEPGCKKELPEFEGDVLAVGSQALTTEGIYEDVIRGCLLQRIDQELKKTLGANDVSCTLDGCLEVPWEQEGAAPNLNLVSSFLAGRQAFTDFLCLPAKSSANWILAASLLSCSCFRSGFHRDSRVFLVQLAEGLSHSLETVSSHSVWSFRPTPRQ

SEQ ID NO: 29490 - protein, 562 aa, Homo sapiens
  Payload ID: 5761
  Gene Symbol: FAM129C
  Gene Name: family with sequence similarity 129, member C
  ENSP ID: ENSP00000468994
MGGRPSSPLDKQQRQHLRGQVDTLLRNFLPCYRGQLAASVLRQISRELGPQEPTGSQLLRSKKLPRVREHRGPLTQLRGHPPRWQPIFCVLRGDGRLEWFSHKEEYENGGHCLGSTALTGYTLLTSQREYLRLLDALCPESLGDHTQEEPDSLLEVPVSFPLFLQHPFRRHLCFSAATREAQHAWRLALQGGIRLQGIVLQRSQAPAARAFLDAVRLYRQHQGHFGDDDVTLGSDAEVLTAVLMREQLPALRAQTLPGLRGAGRARAWAWTELLDAVHAAVLAGASAGLCAFQPEKDELLASLEKTIRPDVDQLLRQRARVAGRLRTDIRGPLESCLRREVDPQLPRVVQTLLRTVEASLEAVRTLLAQGMDRLSHRLRQSPSGTRLRREVYSFGEMPWDLALMQTCYREAERSRGRLGQLAAPFGFLGMQSLVFGAQDLAQQLMADAVATFLQLADQCLTTALNCDQAAQRLERVRGRVLKKFKSDSGLAQRRFIRGWGLCIFLPFVLSQLEPGCKKTESHSVAQAVVQWCDLGSLQPPPPRFKRSSHLSLPSSWDYRHPL

SEQ ID NO: 29491 - protein, 620 aa, Homo sapiens
  Payload ID: 5761
  Gene Symbol: FAM129C
  Gene Name: family with sequence similarity 129, member C
  ENSP ID: ENSP00000469225
MGGRPSSPLDKQQRQHLRGQVDTLLRNFLPCYRGQLAASVLRQISRELGPQEPTGSQLLRSKKLPRVREHRGPLTQLRGHPPRWQPIFCVLRGDGRLEWFSHKEEYENGGHCLGSTALTGYTLLTSQREYLRLLDALCPESLGDHTQEEPDSLLEVPVSFPLFLQHPFRRHLCFSAATREAQHAWRLALQGGIRLQGIVLQRSQAPAARAFLDAVRLYRQHQGHFGDDDVTLGSDAEVLTAVLMREQLPALRAQTLPGLRGAGRARAWAWTELLDAVHAAVLAGASAGLCAFQPEKDELLASLEKTIRPDVDQLLRQRARVAGRLRTDIRGPLESCLRREVDPQLPRVVQTLLRTVEASLEAVRTLLAQGMDRLSHRLRQSPSGTRLRREVYSFGEMPWDLALMQTCYREAERSRGRLGQLAAPFGFLGMQSLVFGAQDLAQQLMADAVATFLQLADQCLTTALNCDQAAQRLERVRGRVLKKFKSDSGLAQRRFIRGWGLCIFLPFVLSQLEPGCKKELPEFEGDVLAVGSQALTTEGIYEDVIRGCLLQRIDQELKKTLGANDVSCTLDGCLEVPWEQEGADEETEAEREGGACPRQPDSGAQIQPLCPPPSPGTFRS

SEQ ID NO: 29492 - protein, 666 aa, Homo sapiens
  Payload ID: 5761
  Gene Symbol: FAM129C
  Gene Name: family with sequence similarity 129, member C
  Uniprot ID: Q86XR2
  ENSP ID: ENSP00000470106
MGPDRKEVPLSRGTQAVVVGKGRGAPGDDSSMGGRPSSPLDKQQRQHLRGQVDTLLRNFLPCYRGQLAASVLRQISRELGPQEPTGSQLLRSKKLPRVREHRGPLTQLRGHPPRWQPIFCVLRGDGRLEWFSHKEEYENGGHCLGSTALTGYTLLTSQREYLRLLDALCPESLGDHTQEEPDSLLEVPVSFPLFLQHPFRRHLCFSAATREAQHAWRLALQGGIRLQGIVLQRSQAPAARAFLDAVRLYRQHQGHFGDDDVTLGSDAEVLTAVLMREQLPALRAQTLPGLRGAGRARAWAWTELLDAVHAAVLAGASAGLCAFQPEKDELLASLEKTIRPDVDQLLRQRARVAGRLRTDIRGPLESCLRREVDPQLPRVVQTLLRTVEASLEAVRTLLAQGMDRLSHRLRQSPSGTRLRREVYSFGEMPWDLALMQTCYREAERSRGRLGQLAAPFGFLGMQSLVFGAQDLAQQLMADAVATFLQLADQCLTTALNCDQAAQRLERVRGRVLKKFKSDSGLAQRRFIRGWGLCIFLPFVLSQLEPGCKKELPEFEGDVLAVGSQALTTEGIYEDVIRGCLLQRIDQELKKTLGANDVSCTLDGCLEVPWEQEGAGGELHRLLKHASDCWGWGGGGPHGVYGIVMSVGSWTEQNALCLLTQPAWPSS

SEQ ID NO: 29493 - protein, 584 aa, Homo sapiens
  Payload ID: 5761
  Gene Symbol: FAM129C
  Gene Name: family with sequence similarity 129, member C
  ENSP ID: ENSP00000470798
MGGRPSSPLDKQQRQHLRGQVDTLLRNFLPCYRGQLAASVLRQISRELGPQEPTGSQLLRSKKLPRVREHRGPLTQLRGHPPRWQPIFCVLRGDGRLEWFSHKEEYENGGHCLGSTALTGYTLLTSQREYLRLLDALCPESLGDHTQEEPDSLLEVPVSFPLFLQHPFRRHLCFSAATREAQHAWRLALQGGIRLQGIVLQRSQAPAARAFLDAVRLYRQHQGHFGDDDVTLGSDAEVLTAVLMREQLPALRAQTLPGLRGAGRARAWAWTELLDAVHAAVLAGASAGLCAFQPEKDELLASLEKTIRPDVDQLLRQRARVAGRLRTDIRGPLESCLRREVDPQLPRVVQTLLRTVEASLEAVRTLLAQGMDRLSHRLRQSPSGTRLRREVYSFGEMPWDLALMQTCYREAERSRGRLGQLAAPFGFLGMQSLVFGAQDLAQQLMADAVATFLQLADQCLTTALNCDQAAQRLERVRGRVLKELPEFEGDVLAVGSQALTTEGIYEDVIRGCLLQRIDQELKKTLGANDVSCTLDGCLEVPWEQEGADEETEAEREGGACPRQPDSGAQIQPLCPPPSPGTFRS

SEQ ID NO: 29494 - protein, 569 aa, Homo sapiens
  Payload ID: 5761
  Gene Symbol: FAM129C
  Gene Name: family with sequence similarity 129, member C
  ENSP ID: ENSP00000471117
MGGRPSSPLDKQQRQHLRGQVDTLLRNFLPCYRGQLAASKLPRVREHRGPLTQLRGHPPRWQPIFCVLRGDGRLEWFSHKEEYENGGHCLGSTALTGYTLLTSQREYLRLLDALCPESLGDHTQEEPDSLLEVPVSFPLFLQHPFRRHLCFSAATREAQHAWRLALQGGIRLQGIVLQRSQAPAARAFLDAVRLYRQHQGHFGDDDVTLGSDAEVLTAVLMREQLPALRAQTLPGLRGAGRARAWAWTELLDAVHAAVLAGASAGLCAFQPEKDELLASLEKTIRPDVDQLLRQRARVAGRLRTDIRGPLESCLRREVDPQLPRVVQTLLRTVEASLEAVRTLLAQGMDRLSHRLRQSPSGTRLRREVYSFGEMPWDLALMQTCYREAERSRGRLGQLAAPFGFLGMQSLVFGAQDLAQQLMADAVATFLQLADQCLTTALNCDQAAQRLERVRGRVLKKFKSDSGLAQRRFIRGWGLCIFLPFVLSQLEPGCKKELPEFEGDVLAVGSQALTTEGIYEDVIRGCLLQRIDQDEETEAEREGGACPRQPDSGAQIQPLCPPPSPGTFRS

SEQ ID NO: 29495 - protein, 666 aa, Homo sapiens
  Payload ID: 5761
  Gene Symbol: FAM129C
  Gene Name: family with sequence similarity 129, member C
  ENSP ID: ENSP00000471168
MGGRPSSPLDKQQRQHLRGQVDTLLRNFLPCYRGQLAASVLRQISRELGPQEPTGSQLLRSKKLPRVREHRGPLTQLRGHPPRWQPIFCVLRGDGRLEWFSHKEEYENGGHCLGSTALTGYTLLTSQREYLRLLDALCPESLGDHTQEEPDSLLEVPVSFPLFLQHPFRRHLCFSAATREAQHAWRLALQGGIRLQGIVLQRSQAPAARAFLDAVRLYRQHQGHFGDDDVTLGSDAEVLTAVLMREQLPALRAQTLPGLRGAGRARAWAWTELLDAVHAAVLAGASAGLCAFQPEKDELLASLEKTIRPDVDQLLRQRARVAGRLRTDIRGPLESCLRREVDPQLPRVVQTLLRTVEASLEAVRTLLAQGMDRLSHRLRQSPSGTRLRREVYSFGEMPWDLALMQTCYREAERSRGRLGQLAAPFGFLGMQSLVFGAQDLAQQLMADAVATFLQLADQCLTTALNCDQAAQRLERVRGRVLKKFKSDSGLAQRRFIRGWGLCIFLPFVLSQLEPGCKKELPEFEGDVLAVGSQALTTEGIYEDVIRGCLLQRIDQELKKTLGANDVSCTLDGCLEVPWEQEGAAPNLNLVSSFLAGRQAFTDFLCLPAKSSANWILAASLLSCSCFRSGFHRDSRVFLVQLAEGLSHSLETVSSHSVWSFRPTPRQ

SEQ ID NO: 29496 - protein, 1023 aa, Homo sapiens
  Payload ID: 5762
  Gene Symbol: FAM13A
  Gene Name: family with sequence similarity 13, member A
  Uniprot ID: O94988
  ENSP ID: ENSP00000264344
MGAGALAICQSKAAVRLKEDMKKIVAVPLNEQKDFTYQKLFGVSLQELERQGLTENGIPAVVWNIVEYLTQHGLTQEGLFRVNGNVKVVEQLRLKFESGVPVELGKDGDVCSAASLLKLFLRELPDSLITSALQPRFIQLFQDGRNDVQESSLRDLIKELPDTHYCLLKYLCQFLTKVAKHHVQNRMNVHNLATVFGPNCFHVPPGLEGMKEQDLCNKIMAKILENYNTLFEVEYTENDHLRCENLARLIIVKEVYYKNSLPILLTRGLERDMPKPPPKTKIPKSRSEGSIQAHRVLQPELSDGIPQLSLRLSYRKACLEDMNSAEGAISAKLVPSSQEDERPLSPFYLSAHVPQVSNVSATGELLERTIRSAVEQHLFDVNNSGGQSSEDSESGTLSASSATSARQRRRQSKEQDEVRHGRDKGLINKENTPSGFNHLDDCILNTQEVEKVHKNTFGCAGERSKPKRQKSSTKLSELHDNQDGLVNMESLNSTRSHERTGPDDFEWMSDERKGNEKDGGHTQHFESPTMKIQEHPSLSDTKQQRNQDAGDQEESFVSEVPQSDLTALCDEKNWEEPIPAFSSWQRENSDSDEAHLSPQAGRLIRQLLDEDSDPMLSPRFYAYGQSRQYLDDTEVPPSPPNSHSFMRRRSSSLGSYDDEQEDLTPAQLTRRIQSLKKKIRKFEDRFEEEKKYRPSHSDKAANPEVLKWTNDLAKFRRQLKESKLKISEEDLTPRMRQRSNTLPKSFGSQLEKEDEKKQELVDKAIKPSVEATLESIQRKLQEKRAESSRPEDIKDMTKDQIANEKVALQKALLYYESIHGRPVTKNERQVMKPLYDRYRLVKQILSRANTIPIIGSPSSKRRSPLLQPIIEGETASFFKEIKEEEEGSEDDSNVKPDFMVTLKTDFSARCFLDQFEDDADGFISPMDDKIPSKCSQDTGLSNLHAASIPELLEHLQEMREEKKRIRKKLRDFEDNFFRQNGRNVQKEDRTPMAEEYSEYKHIKAKLRLLEVLISKRDTDSKSM

SEQ ID NO: 29497 - protein, 669 aa, Homo sapiens
  Payload ID: 5762
  Gene Symbol: FAM13A
  Gene Name: family with sequence similarity 13, member A
  Uniprot ID: O94988
  ENSP ID: ENSP00000378450
MACEIMPLQSSQEDERPLSPFYLSAHVPQVSNVSATGELLERTIRSAVEQHLFDVNNSGGQSSEDSESGTLSASSATSARQRRRQSKEQDEVRHGRDKGLINKENTPSGFNHLDDCILNTQEVEKVHKNTFGCAGERSKPKRQKSSTKLSELHDNQDGLVNMESLNSTRSHERTGPDDFEWMSDERKGNEKDGGHTQHFESPTMKIQEHPSLSDTKQQRNQDAGDQEESFVSEVPQSDLTALCDEKNWEEPIPAFSSWQRENSDSDEAHLSPQAGRLIRQLLDEDSDPMLSPRFYAYGQSRQYLDDTEVPPSPPNSHSFMRRRSSSLGSYDDEQEDLTPAQLTRRIQSLKKKIRKFEDRFEEEKKYRPSHSDKAANPEVLKWTNDLAKFRRQLKESKLKISEEDLTPRMRQRSNTLPKSFGSQLEKEDEKKQELVDKAIKPSVEATLESIQRKLQEKRAESSRPEDIKDMTKDQIANEKVALQKALLYYESIHGRPVTKNERQVMKPLYDRYRLVKQILSRANTIPIIEEEEGSEDDSNVKPDFMVTLKTDFSARCFLDQFEDDADGFISPMDDKIPSKCSQDTGLSNLHAASIPELLEHLQEMREEKKRIRKKLRDFEDNFFRQNGRNVQKEDRTPMAEEYSEYKHIKAKLRLLEVLISKRDTDSKSM

SEQ ID NO: 29498 - protein, 129 aa, Homo sapiens
  Payload ID: 5762
  Gene Symbol: FAM13A
  Gene Name: family with sequence similarity 13, member A
  ENSP ID: ENSP00000421269
MQPPVVNMTDCSFFLRSFKQSKAAVRLKEDMKKIVAVPLNEQKDFTYQKLFGVSLQELERQGLTENGIPAVVWNIVEYLTQHGLTQEGLFRVNGNVKVVEQLRLKFESGVPVELGKDGDVCSAASLLKL

SEQ ID NO: 29499 - protein, 697 aa, Homo sapiens
  Payload ID: 5762
  Gene Symbol: FAM13A
  Gene Name: family with sequence similarity 13, member A
  Uniprot ID: O94988
  ENSP ID: ENSP00000421562
MACEIMPLQSSQEDERPLSPFYLSAHVPQVSNVSATGELLERTIRSAVEQHLFDVNNSGGQSSEDSESGTLSASSATSARQRRRQSKEQDEVRHGRDKGLINKENTPSGFNHLDDCILNTQEVEKVHKNTFGCAGERSKPKRQKSSTKLSELHDNQDGLVNMESLNSTRSHERTGPDDFEWMSDERKGNEKDGGHTQHFESPTMKIQEHPSLSDTKQQRNQDAGDQEESFVSEVPQSDLTALCDEKNWEEPIPAFSSWQRENSDSDEAHLSPQAGRLIRQLLDEDSDPMLSPRFYAYGQSRQYLDDTEVPPSPPNSHSFMRRRSSSLGSYDDEQEDLTPAQLTRRIQSLKKKIRKFEDRFEEEKKYRPSHSDKAANPEVLKWTNDLAKFRRQLKESKLKISEEDLTPRMRQRSNTLPKSFGSQLEKEDEKKQELVDKAIKPSVEATLESIQRKLQEKRAESSRPEDIKDMTKDQIANEKVALQKALLYYESIHGRPVTKNERQVMKPLYDRYRLVKQILSRANTIPIIGSPSSKRRSPLLQPIIEGETASFFKEIKEEEEGSEDDSNVKPDFMVTLKTDFSARCFLDQFEDDADGFISPMDDKIPSKCSQDTGLSNLHAASIPELLEHLQEMREEKKRIRKKLRDFEDNFFRQNGRNVQKEDRTPMAEEYSEYKHIKAKLRLLEVLISKRDTDSKSM

SEQ ID NO: 29500 - protein, 609 aa, Homo sapiens
  Payload ID: 5762
  Gene Symbol: FAM13A
  Gene Name: family with sequence similarity 13, member A
  ENSP ID: ENSP00000421914
MKEQDLCNKIMAKILENYNTLFEVEYTENDHLRCENLARLIIVKEVYYKNSLPILLTRGLERDMPKPPPKTKNMESLNSTRSHERTGPDDFEWMSDERKGNEKDGGHTQHFESPTMKIQEHPSLSDTKQQRNQDAGDQEESFVSEVPQSDLTALCDEKNWEEPIPAFSSWQRENSDSDEAHLSPQAGRLIRQLLDEDSDPMLSPRFYAYGQSRQYLDDTEVPPSPPNSHSFMRRRSSSLGSYDDEQEDLTPAQLTRRIQSLKKKIRKFEDRFEEEKKYRPSHSDKAANPEVLKWTNDLAKFRRQLKESKLKISEEDLTPRMRQRSNTLPKSFGSQLEKEDEKKQELVDKAIKPSVEATLESIQRKLQEKRAESSRPEDIKDMTKDQIANEKVALQKALLYYESIHGRPVTKNERQVMKPLYDRYRLVKQILSRANTIPIIGSPSSKRRSPLLQPIIEGETASFFKEIKEEEEGSEDDSNVKPDFMVTLKTDFSARCFLDQFEDDADGFISPMDDKIPSKCSQDTGLSNLHAASIPELLEHLQEMREEKKRIRKKLRDFEDNFFRQNGRNVQKEDRTPMAEEYSEYKHIKAKLRLLEVLISKRDTDSKSM

SEQ ID NO: 29501 - protein, 202 aa, Homo sapiens
  Payload ID: 5762
  Gene Symbol: FAM13A
  Gene Name: family with sequence similarity 13, member A
  ENSP ID: ENSP00000422345
MGAGALAICQSKAAVRLKEDMKKIVAVPLNEQKDFTYQKLFGVSLQELERQGLTENGIPAVVWNIVEYLTQHGLTQEGLFRVNGNVKVVEQLRLKFESGVPVELGKDGDVCSAASLLKLFLRELPDSLITSALQPRFIQLFQDGRNDVQESSLRDLIKELPDTHYCLLKYLCQFLTKVAKHHVQNRMNVHNLATVFGPNCFQ

SEQ ID NO: 29502 - protein, 669 aa, Homo sapiens
  Payload ID: 5762
  Gene Symbol: FAM13A
  Gene Name: family with sequence similarity 13, member A
  Uniprot ID: O94988
  ENSP ID: ENSP00000423252
MACEIMPLQRLLERTIRSAVEQHLFDVNNSGGQSSEDSESGTLSASSATSARQRRRQSKEQDEVRHGRDKGLINKENTPSGFNHLDDCILNTQEVEKVHKNTFGCAGERSKPKRQKSSTKLSELHDNQDGLVNMESLNSTRSHERTGPDDFEWMSDERKGNEKDGGHTQHFESPTMKIQEHPSLSDTKQQRNQDAGDQEESFVSEVPQSDLTALCDEKNWEEPIPAFSSWQRENSDSDEAHLSPQAGRLIRQLLDEDSDPMLSPRFYAYGQSRQYLDDTEVPPSPPNSHSFMRRRSSSLGSYDDEQEDLTPAQLTRRIQSLKKKIRKFEDRFEEEKKYRPSHSDKAANPEVLKWTNDLAKFRRQLKESKLKISEEDLTPRMRQRSNTLPKSFGSQLEKEDEKKQELVDKAIKPSVEATLESIQRKLQEKRAESSRPEDIKDMTKDQIANEKVALQKALLYYESIHGRPVTKNERQVMKPLYDRYRLVKQILSRANTIPIIGSPSSKRRSPLLQPIIEGETASFFKEIKEEEEGSEDDSNVKPDFMVTLKTDFSARCFLDQFEDDADGFISPMDDKIPSKCSQDTGLSNLHAASIPELLEHLQEMREEKKRIRKKLRDFEDNFFRQNGRNVQKEDRTPMAEEYSEYKHIKAKLRLLEVLISKRDTDSKSM

SEQ ID NO: 29503 - protein, 150 aa, Homo sapiens
  Payload ID: 5762
  Gene Symbol: FAM13A
  Gene Name: family with sequence similarity 13, member A
  ENSP ID: ENSP00000423800
MGAGALAICQSKAAVRLKEDMKKIVAVPLNEQKDFTYQKLFGVSLQELERQGLTENGIPAVVWNIVEYLTQHGLTQEGLFRVNGNVKVVEQLRLKFESGVPVELGKDGDVCSAASLLKLFLRELPDSLITSALQPRFIQLFQVCHLGLKA

SEQ ID NO: 29504 - protein, 163 aa, Homo sapiens
  Payload ID: 5762
  Gene Symbol: FAM13A
  Gene Name: family with sequence similarity 13, member A
  ENSP ID: ENSP00000425784
MACEIMPLQSSQEDERPLSPFYLSAHVPQVSNVSATGELLERTIRSAVEQHLFDVNNSGGQSSEDSESGTLSASSATSARQRRRQSKEQDEVRHGRDKGLINKENTPSGFNHLDDCILNTQEVEKVHKNTFGCAGERSKPKRQKSSTKLSELHDNQDGLVERK

SEQ ID NO: 29505 - protein, 277 aa, Homo sapiens
  Payload ID: 5762
  Gene Symbol: FAM13A
  Gene Name: family with sequence similarity 13, member A
  ENSP ID: ENSP00000426517
MGAGALAICQSKAAVRLKEDMKKIVAVPLNEQKDFTYQKLFGVSLQELERQGLTENGIPAVVWNIVEYLTQHGLTQEGLFRVNGNVKVVEQLRLKFESGVPVELGKDGDVCSAASLLKLFLRELPDSLITSALQPRFIQLFQDGRNDVQESSLRDLIKELPDTHYCLLKYLCQFLTKVAKHHVQNRMNVHNLATVFGPNCFHVPPGLEGMKEQDLCNKIMAKILENYNTLFEVEYTENDHLRCENLARLIIVKVSNLVFNFQYCYNFGQKILFNSFS

SEQ ID NO: 29506 - protein, 186 aa, Homo sapiens
  Payload ID: 5762
  Gene Symbol: FAM13A
  Gene Name: family with sequence similarity 13, member A
  ENSP ID: ENSP00000427077
MACEIMPLQSAHVPQVSNVSATGELLERTIRSAVEQHLFDVNNSGGQSSEDSESGTLSASSATSARQRRRQSKEQDEVRHGRDKGLINKENTPSGFNHLDDCILNTQEVEKVHKNTFGCAGERSKPKRQKSSTKLSELHDNQDGLVNMESLNSTRSHERTGPDDFEWMSDERKGNEKDGGHTQHFE

SEQ ID NO: 29507 - protein, 683 aa, Homo sapiens
  Payload ID: 5762
  Gene Symbol: FAM13A
  Gene Name: family with sequence similarity 13, member A
  Uniprot ID: O94988
  ENSP ID: ENSP00000427189
MACEIMPLQSAHVPQVSNVSATGELLERTIRSAVEQHLFDVNNSGGQSSEDSESGTLSASSATSARQRRRQSKEQDEVRHGRDKGLINKENTPSGFNHLDDCILNTQEVEKVHKNTFGCAGERSKPKRQKSSTKLSELHDNQDGLVNMESLNSTRSHERTGPDDFEWMSDERKGNEKDGGHTQHFESPTMKIQEHPSLSDTKQQRNQDAGDQEESFVSEVPQSDLTALCDEKNWEEPIPAFSSWQRENSDSDEAHLSPQAGRLIRQLLDEDSDPMLSPRFYAYGQSRQYLDDTEVPPSPPNSHSFMRRRSSSLGSYDDEQEDLTPAQLTRRIQSLKKKIRKFEDRFEEEKKYRPSHSDKAANPEVLKWTNDLAKFRRQLKESKLKISEEDLTPRMRQRSNTLPKSFGSQLEKEDEKKQELVDKAIKPSVEATLESIQRKLQEKRAESSRPEDIKDMTKDQIANEKVALQKALLYYESIHGRPVTKNERQVMKPLYDRYRLVKQILSRANTIPIIGSPSSKRRSPLLQPIIEGETASFFKEIKEEEEGSEDDSNVKPDFMVTLKTDFSARCFLDQFEDDADGFISPMDDKIPSKCSQDTGLSNLHAASIPELLEHLQEMREEKKRIRKKLRDFEDNFFRQNGRNVQKEDRTPMAEEYSEYKHIKAKLRLLEVLISKRDTDSKSM

SEQ ID NO: 29508 - protein, 915 aa, Homo sapiens
  Payload ID: 5763
  Gene Symbol: FAM13B
  Gene Name: family with sequence similarity 13, member B
  Uniprot ID: Q9NYF5
  ENSP ID: ENSP00000033079
MRKSSSPSLSNCNSVLANKIFGIPLDELQQGGHPDNEVPFIVRHVVDYIEEHGGLEQQGLFQVNGNAETVEWLRQRYDSGEEVDLVKEADVPSAISLLRFFLQELPEPVIPGSLHIHLMQLSQDYNNEDEFGRKLRFLLQQLPPVNYSLLKFLCRFLANVASHHEEIWSANSLAAVFGPDVFHIYTDVEDMKEQEIVSRIMAGLLENYYEFFENEEEDFSSNDLSSITEQVNELSEEEEEDEKLEHIEELPEEGAEKSNDMPEVVQLRMTENILESNSVTATSTHISPISILPASTDILERTIRAAVEQHLFDLQSSIDHDLKNLQQQSVVCNNEAESIHCDGEGSNNQIDIADDIINASESNRDCSKPVASTNLDNEAMQQDCVFENEENTQSVGILLEPCSDRGDSEDGCLEREEYLLFDSDKLSHLILDSSSKICDLNANTESEVPGGQSVGVQGEAACVSIPHLDLKNVSDGDKWEEPFPAFKSWQEDSESGEAQLSPQAGRMNHHPLEEDCPPVLSHRSLDFGQSQRFLHDPEKLDSSSKALSFTRIRRSSFSSKDEKREDRTPYQLVKKLQKKIRQFEEQFERERNSKPSYSDIAANPKVLKWMTELTKLRKQIKDAKHKNSDGEFVPQTRPRSNTLPKSFGSSLDHEDEENEDEPKVIQKEKKPSKEATLELILKRLKEKRIERCLPEDIKKMTKDHLVEEKASLQKSLLYYESQHGRPVTKEERHIVKPLYDRYRLVKQMLTRASITPVLGSPSTKRRGQMLQPIIEGETAHFFEEIKEEEEDGVNLSSELGDMLKTAVQVQSSLENSESDVEENQEKLALDLRLSSSRAASMPELLEQLWKARAEKKKLRKTLREFEEAFYQQNGRNAQKEDRVPVLEEYREYKKIKAKLRLLEVLISKQDSSKSI

SEQ ID NO: 29509 - protein, 887 aa, Homo sapiens
  Payload ID: 5763
  Gene Symbol: FAM13B
  Gene Name: family with sequence similarity 13, member B
  Uniprot ID: Q9NYF5
  ENSP ID: ENSP00000388521
MRKSSSPSLSNCNSVLANKIFGIPLDELQQGGHPDNEVPFIVRHVVDYIEEHGGLEQQGLFQVNGNAETVEWLRQRYDSGEEVDLVKEADVPSAISLLRFFLQELPEPVIPGSLHIHLMQLSQDYNNEDEFGRKLRFLLQQLPPVNYSLLKFLCRFLANVASHHEEIWSANSLAAVFGPDVFHIYTDVEDMKEQEIVSRIMAGLLENYYEFFENEEEDFSSNDLSSITEQVNELSEEEEEDEKLEHIEELPEEGAEKSNDMPEVVQLRMTENILESNSVTATSTHISPISILPASTDILERTIRAAVEQHLFDLQSSIDHDLKNLQQQSVVCNNEAESIHCDGEGSNNQIDIADDIINASESNRDCSKPVASTNLDNEAMQQDCVFENEENTQSVGILLEPCSDRGDSEDGCLEREEYLLFDSDKLSHLILDSSSKICDLNANTESEVPGGQSVGVQGEAACVSIPHLDLKNVSDGDKWEEPFPAFKSWQEDSESGEAQLSPQAGRMNHHPLEEDCPPVLSHRSLDFGQSQRFLHDPEKLDSSSKALSFTRIRRSSFSSKDEKREDRTPYQLVKKLQKKIRQFEEQFERERNSKPSYSDIAANPKVLKWMTELTKLRKQIKDAKHKNSDGEFVPQTRPRSNTLPKSFGSSLDHEDEENEDEPKVIQKEKKPSKEATLELILKRLKEKRIERCLPEDIKVTKEERHIVKPLYDRYRLVKQMLTRASITPVLGSPSTKRRGQMLQPIIEGETAHFFEEIKEEEEDGVNLSSELGDMLKTAVQVQSSLENSESDVEENQEKLALDLRLSSSRAASMPELLEQLWKARAEKKKLRKTLREFEEAFYQQNGRNAQKEDRVPVLEEYREYKKIKAKLRLLEVLISKQDSSKSI

SEQ ID NO: 29510 - protein, 791 aa, Homo sapiens
  Payload ID: 5763
  Gene Symbol: FAM13B
  Gene Name: family with sequence similarity 13, member B
  Uniprot ID: Q9NYF5
  ENSP ID: ENSP00000394669
MQLSQDYNNEDEFGRKLRFLLQQLPPVNYSLLKFLCRFLANVASHHEEIWSANSLAAVFGPDVFHIYTDVEDMKEQEIVSRIMAGLLENYYEFFENEEEDFSSNDLSSITEQVNELSEEEEEDEKLEHIEELPEEGAEKSNDMPEVVQLRMTENILESNSVTATSTHISPISILPASTDILERTIRAAVEQHLFDLQSSIDHDLKNLQQQSVVCNNEAESIHCDGEGSNNQIDIADDIINASESNRDCSKPVASTNLDNEAMQQDCVFENEENTQSVGILLEPCSDRGDSEDGCLEREEYLLFDSDKLSHLILDSSSKICDLNANTESEVPGGQSVGVQGEAACVSIPHLDLKNVSDGDKWEASCPITFPLIDFKTMHLQRDGEEPFPAFKSWQEDSESGEAQLSPQAGRMNHHPLEEDCPPVLSHRSLDFGQSQRFLHDPEKLDSSSKALSFTRIRRSSFSSKDEKREDRTPYQLVKKLQKKIRQFEEQFERERNSKPSYSDIAANPKVLKWMTELTKLRKQIKDAKHKNSDGEFVPQTRPRSNTLPKSFGSSLDHEDEENEDEPKVIQKEKKPSKEATLELILKRLKEKRIERCLPEDIKVTKEERHIVKPLYDRYRLVKQMLTRASITPVLGSPSTKRRGQMLQPIIEGETAHFFEEIKEEEEDGVNLSSELGDMLKTAVQVQSSLENSESDVEENQEKLALDLRLSSSRAASMPELLEQLWKARAEKKKLRKTLREFEEAFYQQNGRNAQKEDRVPVLEEYREYKKIKAKLRLLEVLISKQDSSKSI

SEQ ID NO: 29511 - protein, 87 aa, Homo sapiens
  Payload ID: 5763
  Gene Symbol: FAM13B
  Gene Name: family with sequence similarity 13, member B
  ENSP ID: ENSP00000422311
MRKSSSPSLSNCNSVLANKIFGIPLDELQQGGHPDNEVPFIVRHVVDYIEEHGGLEQQGLFQVNGNAETVEWLRQRYDSGEEVDLVK

SEQ ID NO: 29512 - protein, 52 aa, Homo sapiens
  Payload ID: 5763
  Gene Symbol: FAM13B
  Gene Name: family with sequence similarity 13, member B
  ENSP ID: ENSP00000422673
MRKSSSPSLSNCNSVLANKIFGIPLDELQQGGHPDNEVPFIVRHVVDYIEEH

SEQ ID NO: 29513 - protein, 95 aa, Homo sapiens
  Payload ID: 5763
  Gene Symbol: FAM13B
  Gene Name: family with sequence similarity 13, member B
  ENSP ID: ENSP00000424785
MRKSSSPSLSNCNSVLANKIFGIPLDELQQGGHPDNEVPFIVRHVVDYIEEHGGLEQQGLFQVNGNAETVEWLRQRYDSGEEVDLVKEADVPSAI

SEQ ID NO: 29514 - protein, 142 aa, Homo sapiens
  Payload ID: 5763
  Gene Symbol: FAM13B
  Gene Name: family with sequence similarity 13, member B
  ENSP ID: ENSP00000425326
MRKSSSPSLSNCNSVLANKIFGIPLDELQQGGHPDNEVPFIVRHVVDYIEEHGGLEQQGLFQVNGNAETVEWLRQRYDSGEEVDLVKEADVPSAISLLRFFLQELPEPVIPGSLHIHLMQLSQDYNNEDEFGRKLRFLLQQL

SEQ ID NO: 29515 - protein, 64 aa, Homo sapiens
  Payload ID: 5763
  Gene Symbol: FAM13B
  Gene Name: family with sequence similarity 13, member B
  ENSP ID: ENSP00000426863
MRKSSSPSLSNCNSVLANKIFGIPLDELQQGGHPDNEVPFIVRHVVDYIEEHGGLEQQGLFQVN

SEQ ID NO: 29516 - protein, 573 aa, Homo sapiens
  Payload ID: 5764
  Gene Symbol: FAM13C
  Gene Name: family with sequence similarity 13, member C
  ENSP ID: ENSP00000392302
MFSCFCFSLQDNSFSSTTVTECDEDPVSLHEDQTDCSSLRDENNKENYPDAGALVEEHAPPSWEPQQQNVEATVLVDSVLRPSMGNFKSRKPKSIFKAESGRSHGESQETEHVVSSQSECQVRAGTPAHESPQNNAFKCQETVRLQPRIDQRTAISPKDAFETRQDLNEEEAAQVHGVKDPAPASTQSVLADGTDSADPSPVHKDGQNEADSAPEDLHSVGTSRLLYHITDGDNPLLSPRCSIFSQSQRFNLDPESAPSPPSTQQFMMPRSSSRCSCGDGKEPQTITQLTKHIQSLKRKIRKFEEKFEQEKKYRPSHGDKTSNPEVLKWMNDLAKGRKQLKELKLKLSEEQGSAPKGPPRNLLCEQPTVPRENGKPEAAGPEPSSSGEETPDAALTCLKERREQLPPQEDSKVTKQDKNLIKPLYDRYRIIKQILSTPSLIPTIQEEEDSDEDRPQGSQQPSLADPASHLPVGDHLTYSNETEPVRALLPDEKKEVKPPALSMSNLHEATMPVLLDHLRETRADKKRLRKALREFEEQFFKQTGRYVSAERFLKLILPRELLLKMSCNFLQER

SEQ ID NO: 29517 - protein, 458 aa, Homo sapiens
  Payload ID: 5764
  Gene Symbol: FAM13C
  Gene Name: family with sequence similarity 13, member C
  Uniprot ID: Q8NE31
  ENSP ID: ENSP00000400241
MFSCFCFSLQDNSFSSTTVTECDEDPVSLHEDQTDCSSLRDENNKENYPDAGALVEEHAPPSWEPQQQNVEATVLVDSVLRPSMGNFKSRKPKSIFKAESGRSHGESQETEHVVSSQSECQVRAGTPAHESPQNNAFKCQETVRLQPRIDQRTAISPKDAFETRQDLNEEEAAQVHGVKDPAPASTQSVLADGTDSADPSPVHKDGQNEADSAPEDLHSVGTSRLLYHITDGDNPLLSPRCSIFSQSQRFNLDPESAPSPPSTQQFMMPRSSSRCSCGDGKEPQTITQLTKHIQSLKRKIRKFEEKFEQEKKYRPSHGDKTSNPEVLKWMNDLAKGRKQLKELKLKLSEEQGSAPKGPPRNLLCEQPTVPRENGKPEAAGPEPSSSGEETPDAALTCLKERREQLPPQEDSKVTKQDKNLIKPLYDRYRIIKQILSTPSLIPTIVSQDTCMLLLCTDV

SEQ ID NO: 29518 - protein, 502 aa, Homo sapiens
  Payload ID: 5764
  Gene Symbol: FAM13C
  Gene Name: family with sequence similarity 13, member C
  Uniprot ID: Q8NE31
  ENSP ID: ENSP00000423896
MGNFKSRKPKSIFKAESGRSHGESQETEHVVSSQSECQVRAGTPAHESPQNNAFKCQETVRLQPRIDQRTAISPKDAFETRQDLNEEEAAQVHGVKDPAPASTQSVLADGTDSADPSPVHKDGQNEADSAPEDLHSVGTSRLLYHITDGDNPLLSPRCSIFSQSQRFNLDPESAPSPPSTQQFMMPRSSSRCSCGDGKEPQTITQLTKHIQSLKRKIRKFEEKFEQEKKYRPSHGDKTSNPEVLKWMNDLAKGRKQLKELKLKLSEEQGSAPKGPPRNLLCEQPTVPRENGKPEAAGPEPSSSGEETPDAALTCLKERREQLPPQEDSKVTKQDKNLIKPLYDRYRIIKQILSTPSLIPTIQEEEDSDEDRPQGSQQPSLADPASHLPVGDHLTYSNETEPVRALLPDEKKEVKPPALSMSNLHEATMPVLLDHLRETRADKKRLRKALREFEEQFFKQTGRSPQKEDRIPMADEYYEYKHIKAKLRLLEVLISKQDVAKTI

SEQ ID NO: 29519 - protein, 5 aa, Homo sapiens
  Payload ID: 5764
  Gene Symbol: FAM13C
  Gene Name: family with sequence similarity 13, member C
  ENSP ID: ENSP00000424797
MGNFK

SEQ ID NO: 29520 - protein, 25 aa, Homo sapiens
  Payload ID: 5764
  Gene Symbol: FAM13C
  Gene Name: family with sequence similarity 13, member C
  ENSP ID: ENSP00000425820
MGNFKSRKPKSIFKAESGRSHGESQ

SEQ ID NO: 29521 - protein, 134 aa, Homo sapiens
  Payload ID: 5764
  Gene Symbol: FAM13C
  Gene Name: family with sequence similarity 13, member C
  ENSP ID: ENSP00000445068
SRLLYHITDGDNPLLSPRCSIFSQSQRFNLDPESAPSPPSTQQFMMPRSSSRCSCGDGKEPQTITQLTKHIQSLKRKIRKFEEKFEQEKKYRPSHGDKTSNPEVLKWMNDLAKGRKQLKGKSQPKIFFPHKGSS

SEQ ID NO: 29522 - protein, 501 aa, Homo sapiens
  Payload ID: 5764
  Gene Symbol: FAM13C
  Gene Name: family with sequence similarity 13, member C
  Uniprot ID: Q8NE31
  ENSP ID: ENSP00000480677
MGNFKSRKPKSIFKAESGRSHGESQETEHVVSSQSECQVRAGTPAHESPQNNAFKCQETVRLQPRIDQRTAISPKDAFETRQDLNEEEAAQVHGVKDPAPASTQSVLADGTDSADPSPVHKDGQNEADSAPEDLHSVGTSRLLYHITDGDNPLLSPRCSIFSQSQRFNLDPESAPSPPSTQQFMMPRSSSRCSCGDGKEPQTITQLTKHIQSLKRKIRKFEEKFEQEKKYRPSHGDKTSNPEVLKWMNDLAKGRKQLKELKLKLSEEQGSAPKGPPRNLLCEQPTVPRENGKPEAAGPEPSSSGEETPDAALTCLKERREQLPPQEDSKVTKQDKNLIKPLYDRYRIIKQILSTPSLIPTIEEEDSDEDRPQGSQQPSLADPASHLPVGDHLTYSNETEPVRALLPDEKKEVKPPALSMSNLHEATMPVLLDHLRETRADKKRLRKALREFEEQFFKQTGRSPQKEDRIPMADEYYEYKHIKAKLRLLEVLISKQDVAKTI

SEQ ID NO: 29523 - protein, 487 aa, Homo sapiens
  Payload ID: 5764
  Gene Symbol: FAM13C
  Gene Name: family with sequence similarity 13, member C
  Uniprot ID: Q8NE31
  ENSP ID: ENSP00000481830
MFSCFCFSLQDNSFSSTTVTECDEDPVSLHEDQTDCSSLRDENNKENYPDAGALVEEHAPPSWEPQQQNVEATVLVDSVLRPSMGNFKSRKPKSIFKAESGRSHGESQETEHVVSSQSECQVRAGTPAHESPQNNAFKCQETVRLQPRIDQRTAISPKDAFETRQDLNEEEAAQVHGVKDPAPASTQSVLADGTDSADPSPVHKDGQNEADSAPEDLHSVGTSRLLYHITDGDNPLLSPRCSIFSQSQRFNLDPESAPSPPSTQQFMMPRSSSRCSCGDGKEPQTITQLTKHIQSLKRKIRKFEEKFEQEKKYRVTKQDKNLIKPLYDRYRIIKQILSTPSLIPTIQEEEDSDEDRPQGSQQPSLADPASHLPVGDHLTYSNETEPVRALLPDEKKEVKPPALSMSNLHEATMPVLLDHLRETRADKKRLRKALREFEEQFFKQTGRSPQKEDRIPMADEYYEYKHIKAKLRLLEVLISKQDVAKTI

SEQ ID NO: 29524 - protein, 585 aa, Homo sapiens
  Payload ID: 5764
  Gene Symbol: FAM13C
  Gene Name: family with sequence similarity 13, member C
  Uniprot ID: Q8NE31
  ENSP ID: ENSP00000481854
MFSCFCFSLQDNSFSSTTVTECDEDPVSLHEDQTDCSSLRDENNKENYPDAGALVEEHAPPSWEPQQQNVEATVLVDSVLRPSMGNFKSRKPKSIFKAESGRSHGESQETEHVVSSQSECQVRAGTPAHESPQNNAFKCQETVRLQPRIDQRTAISPKDAFETRQDLNEEEAAQVHGVKDPAPASTQSVLADGTDSADPSPVHKDGQNEADSAPEDLHSVGTSRLLYHITDGDNPLLSPRCSIFSQSQRFNLDPESAPSPPSTQQFMMPRSSSRCSCGDGKEPQTITQLTKHIQSLKRKIRKFEEKFEQEKKYRPSHGDKTSNPEVLKWMNDLAKGRKQLKELKLKLSEEQGSAPKGPPRNLLCEQPTVPRENGKPEAAGPEPSSSGEETPDAALTCLKERREQLPPQEDSKVTKQDKNLIKPLYDRYRIIKQILSTPSLIPTIQEEEDSDEDRPQGSQQPSLADPASHLPVGDHLTYSNETEPVRALLPDEKKEVKPPALSMSNLHEATMPVLLDHLRETRADKKRLRKALREFEEQFFKQTGRSPQKEDRIPMADEYYEYKHIKAKLRLLEVLISKQDVAKTI

SEQ ID NO: 29525 - protein, 606 aa, Homo sapiens
  Payload ID: 5764
  Gene Symbol: FAM13C
  Gene Name: family with sequence similarity 13, member C
  ENSP ID: ENSP00000483510
MFSCFCFSLQDNSFSSTTVTECDEDPVSLHEDQTDCSSLRDENNKENYPDAGALVEEHAPPSWEPQQQNVEATVLVDSVLRPSMGNFKSRKPKSIFKAESGRSHGESQETEHVVSSQSECQVRAGTPAHESPQNNAFKCQETVRLQPRIDQRTAISPKDAFETRQDLNENSLLKLQALESDLCSAFLTNQEEAAQVHGVKDPAPASTQSVLADGTDSADPSPVHKDGQNEADSAPEDLHSVGTSRLLYHITDGDNPLLSPRCSIFSQSQRFNLDPESAPSPPSTQQFMMPRSSSRCSCGDGKEPQTITQLTKHIQSLKRKIRKFEEKFEQEKKYRPSHGDKTSNPEVLKWMNDLAKGRKQLKELKLKLSEEQGSAPKGPPRNLLCEQPTVPRENGKPEAAGPEPSSSGEETPDAALTCLKERREQLPPQEDSKVTKQDKNLIKPLYDRYRIIKQILSTPSLIPTIQEEEDSDEDRPQGSQQPSLADPASHLPVGDHLTYSNETEPVRALLPDEKKEVKPPALSMSNLHEATMPVLLDHLRETRADKKRLRKALREFEEQFFKQTGRSPQKEDRIPMADEYYEYKHIKAKLRLLEVLISKQDVAKTI

SEQ ID NO: 29526 - protein, 49 aa, Homo sapiens
  Payload ID: 5764
  Gene Symbol: FAM13C
  Gene Name: family with sequence similarity 13, member C
  ENSP ID: ENSP00000484217
  MOD_RES (1)..(1): Any amino acid
XRTAISPKDAFETRQDLNEEEAAQVHGVKDPAPASTQSVLADGTDSAGN

SEQ ID NO: 29527 - protein, 50 aa, Homo sapiens
  Payload ID: 5764
  Gene Symbol: FAM13C
  Gene Name: family with sequence similarity 13, member C
  ENSP ID: ENSP00000484539
MFSCFCFSLQDNSFSSTTVTEPERRGERCAKVCICRPKMRPGLPAPGAQV

SEQ ID NO: 29528 - protein, 605 aa, Homo sapiens
  Payload ID: 5764
  Gene Symbol: FAM13C
  Gene Name: family with sequence similarity 13, member C
  ENSP ID: ENSP00000484625
MFSCFCFSLQDNSFSSTTVTECDEDPVSLHEDQTDCSSLRDENNKENYPDAGALVEEHAPPSWEPQQQNVEATVLVDSVLRPSMGNFKSRKPKSIFKAESGRSHGESQETEHVVSSQSECQVRAGTPAHESPQNNAFKCQETVRLQPRIDQRTAISPKDAFETRQDLNENSLLKLQALESDLCSAFLTNQEEAAQVHGVKDPAPASTQSVLADGTDSADPSPVHKDGQNEADSAPEDLHSVGTSRLLYHITDGDNPLLSPRCSIFSQSQRFNLDPESAPSPPSTQQFMMPRSSSRCSCGDGKEPQTITQLTKHIQSLKRKIRKFEEKFEQEKKYRPSHGDKTSNPEVLKWMNDLAKGRKQLKELKLKLSEEQGSAPKGPPRNLLCEQPTVPRENGKPEAAGPEPSSSGEETPDAALTCLKERREQLPPQEDSKVTKQDKNLIKPLYDRYRIIKQILSTPSLIPTIEEEDSDEDRPQGSQQPSLADPASHLPVGDHLTYSNETEPVRALLPDEKKEVKPPALSMSNLHEATMPVLLDHLRETRADKKRLRKALREFEEQFFKQTGRSPQKEDRIPMADEYYEYKHIKAKLRLLEVLISKQDVAKTI

SEQ ID NO: 29529 - protein, 50 aa, Homo sapiens; identical to SEQ ID NO: 29527
  Payload ID: 5764
  Gene Symbol: FAM13C
  Gene Name: family with sequence similarity 13, member C
  ENSP ID: ENSP00000484965

SEQ ID NO: 29530 - protein, 335 aa, Homo sapiens
  Payload ID: 5765
  Gene Symbol: FAM131A
  Gene Name: family with sequence similarity 131, member A
  Uniprot ID: Q6UXB0
  ENSP ID: ENSP00000310135
MFLATLSFLLPFAHPFGTVSCEYMLGSPLSSLAQVNLSPFSHPKVHMDPNYCHPSTSLHLCSLAWSFTRLLHPPLSPGISQVVKDHVTKPTAMAQGRVAHLIEWKGWSKPSDSPAALESAFSSYSDLSEGEQEARFAAGVAEQFAIAEAKLRAWSSVDGEDSTDDSYDEDFAGGMDTDMAGQLPLGPHLQDLFTGHRFSRPVRQGSVEPESDCSQTVSPDTLCSSLCSLEDGLLGSPARLASQLLGDELLLAKLPPSRESAFRSLGPLEAQDSLYNSPLTESCLSPAEEEPAPCKDCQPLCPPLTGSWERQRQASDLASSGVVSLDEDEAEPEEQ

SEQ ID NO: 29531 - protein, 281 aa, Homo sapiens
  Payload ID: 5765
  Gene Symbol: FAM131A
  Gene Name: family with sequence similarity 131, member A
  Uniprot ID: Q6UXB0
  ENSP ID: ENSP00000340974
MLPKSRRALTIQEIAALARSSLHGISQVVKDHVTKPTAMAQGRVAHLIEWKGWSKPSDSPAALESAFSSYSDLSEGEQEARFAAGVAEQFAIAEAKLRAWSSVDGEDSTDDSYDEDFAGGMDTDMAGQLPLGPHLQDLFTGHRFSRPVRQGSVEPESDCSQTVSPDTLCSSLCSLEDGLLGSPARLASQLLGDELLLAKLPPSRESAFRSLGPLEAQDSLYNSPLTESCLSPAEEEPAPCKDCQPLCPPLTGSWERQRQASDLASSGVVSLDEDEAEPEEQ

SEQ ID NO: 29532 - protein, 366 aa, Homo sapiens
  Payload ID: 5765
  Gene Symbol: FAM131A
  Gene Name: family with sequence similarity 131, member A
  Uniprot ID: Q6UXB0
  ENSP ID: ENSP00000373360
MPMISVLGKMFLWQREGPGGRWTCQTSRRVSSDPAWAVEWIELPRGLSLSSLGSARTLRGWSRSSRPSSVDSQDLPEVNVGDTVAMLPKSRRALTIQEIAALARSSLHGISQVVKDHVTKPTAMAQGRVAHLIEWKGWSKPSDSPAALESAFSSYSDLSEGEQEARFAAGVAEQFAIAEAKLRAWSSVDGEDSTDDSYDEDFAGGMDTDMAGQLPLGPHLQDLFTGHRFSRPVRQGSVEPESDCSQTVSPDTLCSSLCSLEDGLLGSPARLASQLLGDELLLAKLPPSRESAFRSLGPLEAQDSLYNSPLTESCLSPAEEEPAPCKDCQPLCPPLTGSWERQRQASDLASSGVVSLDEDEAEPEEQ

SEQ ID NO: 29533 - protein, 281 aa, Homo sapiens; identical to SEQ ID NO: 29531
  Payload ID: 5765
  Gene Symbol: FAM131A
  Gene Name: family with sequence similarity 131, member A
  Uniprot ID: Q6UXB0
  ENSP ID: ENSP00000388551

SEQ ID NO: 29534 - protein, 281 aa, Homo sapiens; identical to SEQ ID NO: 29531
  Payload ID: 5765
  Gene Symbol: FAM131A
  Gene Name: family with sequence similarity 131, member A
  Uniprot ID: Q6UXB0
  ENSP ID: ENSP00000390588

SEQ ID NO: 29535 - protein, 123 aa, Homo sapiens
  Payload ID: 5765
  Gene Symbol: FAM131A
  Gene Name: family with sequence similarity 131, member A
  ENSP ID: ENSP00000399875
MLPKSRRALTIQEIAALARSSLHGISQVVKDHVTKPTAMAQGRVAHLIEWKGWSKPSDSPAALESAFSSYSDLSEGEQEARFAAGVAEQFAIAEAKLRAWSSVDGEDSTDDSYDEDFAGGMDT

SEQ ID NO: 29536 - protein, 251 aa, Homo sapiens
  Payload ID: 5765
  Gene Symbol: FAM131A
  Gene Name: family with sequence similarity 131, member A
  ENSP ID: ENSP00000414050
MAQGRVAHLIEWKGWSKPSDSPAALESAFSSYSDLSEGEQEARFAAGVAEQFAIAEAKLRAWSSVDGEDSTDDSYDEDFAGGMDTDMAGQLPLGPHLQDLFTGHRFSRPVRQGSVEPESDCSQTVSPDTLCSSLCSLEDGLLGSPARLASQLLGDELLLAKLPPSRESAFRSLGPLEAQDSLYNSPLTEGWLLPSRSLWVEPSLKGPCPAGLVLCFIHLSIVSKSSSFFLKTEGFWSVFSVGSSLLWEALE

SEQ ID NO: 29537 - protein, 231 aa, Homo sapiens
  Payload ID: 5765
  Gene Symbol: FAM131A
  Gene Name: family with sequence similarity 131, member A
  ENSP ID: ENSP00000414913
MLPKSRRALTIQEIAALARSSLHGISQVVKDHVTKPTAMAQGRVAHLIEWKGWSKPSDSPAALESAFSSYSDLSEGEQEARFAAGVAEQFAIAEAKLRAWSSVDGEDSTDDSYDEDFAGGMDTDMAGQLPLGPHLQDLFTGHRFSRPVRQGSVEPESDCSQTVSPDTLCSSLCSLEDGLLGSPARLASQLLGDELLLAKLPPSRESAFRSLGPLEAQDSLYNSPLTESCLS

SEQ ID NO: 29538 - protein, 11 aa, Homo sapiens
  Payload ID: 5766
  Gene Symbol: FAM131B
  Gene Name: family with sequence similarity 131, member B
  ENSP ID: ENSP00000386396
  MOD_RES (1)..(1): Any amino acid
XDFSWDGINAL

SEQ ID NO: 29539 - protein, 348 aa, Homo sapiens
  Payload ID: 5766
  Gene Symbol: FAM131B
  Gene Name: family with sequence similarity 131, member B
  Uniprot ID: Q86XD5
  ENSP ID: ENSP00000386568
MGCIGSRTVGNEVIAVDWKGLKDVDQINMDSTSSLHGSSLHRPSTELSMEDTTSILPKLKRNSNAYGIGALAKSSFSGISRSMKDHVTKPTAMGQGRVAHMIEWQGWGKTPAVQPQHSHESVRRDTDAYSDLSDGEKEARFLAGVMEQFAISEATLMAWSSMDGEDMSVNSTQEPLGCNYSDNYQELMDSQDALAQAPMDGWPHSYVSQGMYCLGSSDAWEASDQSLIASPATGSYLGPAFDDSQPSLHEMGPSQPASGYSALEPPPLLGGDTDWAPGVGAVDLARGPAEEEKRPLAPEEEEDAGCRDLESLSPREDPEMSTALSRKVSDVTSSGVQSFDEEEGEANN

SEQ ID NO: 29540 - protein, 332 aa, Homo sapiens
  Payload ID: 5766
  Gene Symbol: FAM131B
  Gene Name: family with sequence similarity 131, member B
  Uniprot ID: Q86XD5
  ENSP ID: ENSP00000386984
MDSTSSLHGSSLHRPSTEQTRTDFSWDGINLSMEDTTSILPKLKRNSNAYGIGALAKSSFSGISRSMKDHVTKPTAMGQGRVAHMIEWQGWGKTPAVQPQHSHESVRRDTDAYSDLSDGEKEARFLAGVMEQFAISEATLMAWSSMDGEDMSVNSTQEPLGCNYSDNYQELMDSQDALAQAPMDGWPHSYVSQGMYCLGSSDAWEASDQSLIASPATGSYLGPAFDDSQPSLHEMGPSQPASGYSALEPPPLLGGDTDWAPGVGAVDLARGPAEEEKRPLAPEEEEDAGCRDLESLSPREDPEMSTALSRKVSDVTSSGVQSFDEEEGEANN

SEQ ID NO: 29541 - protein, 332 aa, Homo sapiens; identical to SEQ ID NO: 29540
  Payload ID: 5766
  Gene Symbol: FAM131B
  Gene Name: family with sequence similarity 131, member B
  Uniprot ID: Q86XD5
  ENSP ID: ENSP00000387017

SEQ ID NO: 29542 - protein, 332 aa, Homo sapiens; identical to SEQ ID NO: 29540
  Payload ID: 5766
  Gene Symbol: FAM131B
  Gene Name: family with sequence similarity 131, member B
  Uniprot ID: Q86XD5
  ENSP ID: ENSP00000387147

SEQ ID NO: 29543 - protein, 360 aa, Homo sapiens
  Payload ID: 5766
  Gene Symbol: FAM131B
  Gene Name: family with sequence similarity 131, member B
  Uniprot ID: Q86XD5
  ENSP ID: ENSP00000410603
MGCIGSRTVGNEVIAVDWKGLKDVDQINMDSTSSLHGSSLHRPSTEQTRTDFSWDGINLSMEDTTSILPKLKRNSNAYGIGALAKSSFSGISRSMKDHVTKPTAMGQGRVAHMIEWQGWGKTPAVQPQHSHESVRRDTDAYSDLSDGEKEARFLAGVMEQFAISEATLMAWSSMDGEDMSVNSTQEPLGCNYSDNYQELMDSQDALAQAPMDGWPHSYVSQGMYCLGSSDAWEASDQSLIASPATGSYLGPAFDDSQPSLHEMGPSQPASGYSALEPPPLLGGDTDWAPGVGAVDLARGPAEEEKRPLAPEEEEDAGCRDLESLSPREDPEMSTALSRKVSDVTSSGVQSFDEEEGEANN

SEQ ID NO: 29544 - protein, 63 aa, Homo sapiens
  Payload ID: 5766
  Gene Symbol: FAM131B
  Gene Name: family with sequence similarity 131, member B
  ENSP ID: ENSP00000430601
MGCIGSRTVGNEVIAVDWKGLKDVDQINMDSTSSLHGSSLHRPSTEQTRTDFSWDGINGSHGA

SEQ ID NO: 29545 - protein, 44 aa, Homo sapiens
  Payload ID: 5766
  Gene Symbol: FAM131B
  Gene Name: family with sequence similarity 131, member B
  ENSP ID: ENSP00000430805
MDSTSSLHGSSLHRPSTEQTRTDFSWDGINLECFFLETMNLLHV

SEQ ID NO: 29546 - protein, 280 aa, Homo sapiens
  Payload ID: 5767
  Gene Symbol: FAM131C
  Gene Name: family with sequence similarity 131, member C
  Uniprot ID: Q96AQ9
  ENSP ID: ENSP00000364814
MGSCVSRDLFTSAHKNCPMPQGADPLNPDLPSGRTPTVAPDCVIGKDKQMDFCWDPWQRCFQTTNGYLSDSRSRPGNYNVAALATSSLVGVVQSIKDHITKPTAMARGRVAHLIEWKGWSAQPAGWELSPAEDEHYCCLPDELREARFAAGVAEQFAITEATLSAWSSLDEEELHPENSPQGIVQLQDLESIYLQDSLPSGPSQDDSLQAFSSPSPSPDSCPSPEEPPSTAGIPQPPSPELQHRRRLPGAQGPEGGTHPPGSLPSMDSGSLWEEDEVFYN

SEQ ID NO: 29547 - protein, 302 aa, Homo sapiens
  Payload ID: 5768
  Gene Symbol: FAM132A
  Gene Name: family with sequence similarity 132, member A
  Uniprot ID: Q5T7M4
  ENSP ID: ENSP00000329137
MRRWAWAAVVVLLGPQLVLLGGVGARREAQRTQQPGQRADPPNATASASSREGLPEAPKPSQASGPEFSDAHMTWLNFVRRPDDGALRKRCGSRDKKPRDLFGPPGPPGAEVTAETLLHEFQELLKEATERRFSGLLDPLLPQGAGLRLVGEAFHCRLQGPRRVDKRTLVELHGFQAPAAQGAFLRGSGLSLASGRFTAPVSGIFQFSASLHVDHSELQGKARLRARDVVCVLICIESLCQRHTCLEAVSGLESNSRVFTLQVQGLLQLQAGQYASVFVDNGSGAVLTIQAGSSFSGLLLGT

SEQ ID NO: 29548 - protein, 74 aa, Homo sapiens
  Payload ID: 5769
  Gene Symbol: FAM132B
  Gene Name: family with sequence similarity 132, member B
  ENSP ID: ENSP00000343261
  MOD_RES (1)..(1): Any amino acid
XIQSRCQRNASLEAIMGLESSSELFTISVNGVLYLQATKNLVPQDLLGAKLVWQGRSGLGEKGAMASHLHLLTN

SEQ ID NO: 29549 - protein, 63 aa, Homo sapiens
  Payload ID: 5769
  Gene Symbol: FAM132B
  Gene Name: family with sequence similarity 132, member B
  ENSP ID: ENSP00000349855
  MOD_RES (1)..(1): Any amino acid
XFGYSSLEAIMGLESSSELFTISVNGVLYLQMGQWTSVFLDNASGCSLTVRSGSHFSAVLLGV

SEQ ID NO: 29550 - protein, 354 aa, Homo sapiens
  Payload ID: 5769
  Gene Symbol: FAM132B
  Gene Name: family with sequence similarity 132, member B
  Uniprot ID: Q4G0M1
  ENSP ID: ENSP00000442304
MAPARRPAGARLLLVYAGLLAAAAAGLGSPEPGAPSRSRARREPPPGNELPRGPGESRAGPAARPPEPTAERAHSVDPRDAWMLFVRQSDKGVNGKKRSRGKAKKLKFGLPGPPGPPGPQGPPGPIIPPEALLKEFQLLLKGAVRQRERAEPEPCTCGPAGPVAASLAPVSATAGEDDDDVVGDVLALLAAPLAPGPRAPRVEAAFLCRLRRDALVERRALHELGVYYLPDAEGAFRRGPGLNLTSGQYRAPVAGFYALAATLHVALGEPPRRGPPRPRDHLRLLICIQSRCQRNASLEAIMGLESSSELFTISVNGVLYLQMGQWTSVFLDNASGCSLTVRSGSHFSAVLLGV

SEQ ID NO: 29551 - protein, 248 aa, Homo sapiens
  Payload ID: 5770
  Gene Symbol: FAM133A
  Gene Name: family with sequence similarity 133, member A
  Uniprot ID: Q8N9E0
  ENSP ID: ENSP00000318974
MGKRDNRVAYMNPIAMARWRGPTQSVGPTIQDYLNRPRPTWEEVKKQLENKKTGSKALAEFEEKMNENWKKELEKSREKLLSGNESSSKKRERKKKRKKKSCRSSSSSSSSDSSSSSSDSEDEEKKQGKRRKKKKNRSYKSSQSSTHESESESKESVKKKKKSKDETEKEKDVRSLSKKRKKSYPDDKPLSSESSSESDYEEDVQAKKKRRCEEREQAKEKVKKKKKKQHKKHSKKKKKKSGSSHKSR

SEQ ID NO: 29552 - protein, 248 aa, Homo sapiens; identical to SEQ ID NO: 29551
  Payload ID: 5770
  Gene Symbol: FAM133A
  Gene Name: family with sequence similarity 133, member A
  Uniprot ID: Q8N9E0
  ENSP ID: ENSP00000362169

SEQ ID NO: 29553 - protein, 105 aa, Homo sapiens
  Payload ID: 5771
  Gene Symbol: FAM133B
  Gene Name: family with sequence similarity 133, member B
  ENSP ID: ENSP00000389559
MGKRDNRVAYMNPIAMARSRGPIQSSGPTIQDYLNRPRPTWEEVKEQLEKKKKGSKALAEFEEKMNENWKKELEKHREKLLSGSESSSKKRQRKKKEKKKSGRFF

SEQ ID NO: 29554 - protein, 237 aa, Homo sapiens
  Payload ID: 5771
  Gene Symbol: FAM133B
  Gene Name: family with sequence similarity 133, member B
  Uniprot ID: Q5BKY9
  ENSP ID: ENSP00000389783
MNPIAMARSRGPIQSSGPTIQDYLNRPRPTWEEVKEQLEKKKKGSKALAEFEEKMNENWKKELEKHREKLLSGSESSSKKRQRKKKEKKKSGRYSSSSSSSSDSSSSSSDSEDEDKKQGKRRKKKKNRSHKSSESSMSETESDSKDSLKKKKKSKDGTEKEKDIKGLSKKRKMYSEDKPLSSESLSESEYIEEVRAKKKKSSEEREKATEKTKKKKKHKKHSKKKKKKAASSSPDSP

SEQ ID NO: 29555 - protein, 247 aa, Homo sapiens
  Payload ID: 5771
  Gene Symbol: FAM133B
  Gene Name: family with sequence similarity 133, member B
  Uniprot ID: Q5BKY9
  ENSP ID: ENSP00000398401
MGKRDNRVAYMNPIAMARSRGPIQSSGPTIQDYLNRPRPTWEEVKEQLEKKKKGSKALAEFEEKMNENWKKELEKHREKLLSGSESSSKKRQRKKKEKKKSGRYSSSSSSSSDSSSSSSDSEDEDKKQGKRRKKKKNRSHKSSESSMSETESDSKDSLKKKKKSKDGTEKEKDIKGLSKKRKMYSEDKPLSSESLSESEYIEEVRAKKKKSSEEREKATEKTKKKKKHKKHSKKKKKKAASSSPDSP

SEQ ID NO: 29556 - protein, 237 aa, Homo sapiens; identical to SEQ ID NO: 29554
  Payload ID: 5771
  Gene Symbol: FAM133B
  Gene Name: family with sequence similarity 133, member B
  Uniprot ID: Q5BKY9
  ENSP ID: ENSP00000402843

SEQ ID NO: 29557 - protein, 30 aa, Homo sapiens
  Payload ID: 5771
  Gene Symbol: FAM133B
  Gene Name: family with sequence similarity 133, member B
  ENSP ID: ENSP00000407458
MNPIAMARSRGPIQSSGPTIQDYLNRPRPT

SEQ ID NO: 29558 - protein, 120 aa, Homo sapiens
  Payload ID: 5771
  Gene Symbol: FAM133B
  Gene Name: family with sequence similarity 133, member B
  ENSP ID: ENSP00000446324
YSSSSSSSSDSSSSSSDSEDEDKKQGKRRKKKKNRSHKSSESSMSETESDSKDSLKKKKKSKDGTEKEKDIKGLSKKRKMYSEDKPLSSESLSESEYIEEVRAKKKKSSEEREKATASIS

SEQ ID NO: 29559 - protein, 178 aa, Homo sapiens
  Payload ID: 5772
  Gene Symbol: FAM134A
  Gene Name: family with sequence similarity 134, member A
  ENSP ID: ENSP00000273048
MASGGGGGNTGAGGGPGMGLSLGLGLGLSLGMSEATSEAEEEAATAEAVGRLATTLWLRLRGWEAVLAAAQRLLVWEKPLHSLVTAAALNGLFWLLSSSSLRPFFLLSVSLLAYFLLDLWQPRFLPDVSASSPEEPHSDRFTCRSCCSTRGRIQLSSAFESALAVLCWLCWDTMFQGL

SEQ ID NO: 29560 - protein, 94 aa, Homo sapiens
  Payload ID: 5772
  Gene Symbol: FAM134A
  Gene Name: family with sequence similarity 134, member A
  ENSP ID: ENSP00000391284
MISYIVLLSILLWPLVVYHELIQRMYTRLEPLLMQLDYSMKAEANALHHKHDKRKRQGKNAPPGGDEPLAETESESEAELAGFSPVVDVKKTAL

SEQ ID NO: 29561 - protein, 102 aa, Homo sapiens
  Payload ID: 5772
  Gene Symbol: FAM134A
  Gene Name: family with sequence similarity 134, member A
  ENSP ID: ENSP00000394606
MASGGGGGNTGAGGGPGMGLSLGLGLGLSLGMSEATSEAEEEAATAEAVGRLATTLWLRLRGWEAVLAAAQRLLVWEKPLHSLVTAAALNGLFCIIPRGATL

SEQ ID NO: 29562 - protein, 543 aa, Homo sapiens
  Payload ID: 5772
  Gene Symbol: FAM134A
  Gene Name: family with sequence similarity 134, member A
  Uniprot ID: Q8NC44
  ENSP ID: ENSP00000395249
MASGGGGGNTGAGGGPGMGLSLGLGLGLSLGMSEATSEAEEEAATAEAVGRLATTLWLRLRGWEAVLAAAQRLLVWEKPLHSLVTAAALNGLFWLLSSSSLRPFFLLSVSLLAYFLLDLWQPRFLPDVSASSPEEPHSDSEGAGSGARPHLLSVPELCRYLAESWLTFQIHLQELLQYKRQNPAQFCVRVCSGCAVLAVLGHYVPGIMISYIVLLSILLWPLVVYHELIQRMYTRLEPLLMQLDYSMKAEANALHHKHDKRKRQGKNAPPGGDEPLAETESESEAELAGFSPVVDVKKTALALAITDSELSDEEASILESGGFSVSRATTPQLTDVSEDLDQQSLPSEPEETLSRDLGEGEEGELAPPEDLLGRPQALSRQALDSEEEEEDVAAKETLLRLSSPLHFVNTHFNGAGSPPDGVKCSPGGPVETLSPETVSGGLTALPGTLSPPLCLVGSDPAPSPSILPPVPQDSPQPLPAPEEEEALTTEDFELLDQGELEQLNAELGLEPETPPKPPDAPPLGPDIHSLVQSDQEAQAVAEP

SEQ ID NO: 29563 - protein, 5 aa, Homo sapiens
  Payload ID: 5772
  Gene Symbol: FAM134A
  Gene Name: family with sequence similarity 134, member A
  ENSP ID: ENSP00000399261
MISYI

SEQ ID NO: 29564 - protein, 167 aa, Homo sapiens
  Payload ID: 5772
  Gene Symbol: FAM134A
  Gene Name: family with sequence similarity 134, member A
  ENSP ID: ENSP00000403898
MISYIVLLSILLWPLVVYHELIQRMYTRLEPLLMQLDYSMKAEANALHHKHDKRKRQGKNAPPGGDEPLAETESESEAELAGFSPVVDVKKTALALAITDSELSDEEASILESGGFSVSRATTPQLTDVSEDLDQQSLPSEPEETLSRDLGEGEEGELAPPEDLLGR

SEQ ID NO: 29565 - protein, 203 aa, Homo sapiens
  Payload ID: 5772
  Gene Symbol: FAM134A
  Gene Name: family with sequence similarity 134, member A
  ENSP ID: ENSP00000411247
  MOD_RES (1)..(1): Any amino acid
XDSELSDEEASILESGGFSVSRATTPQLTDVSEDLDQQSLPSEPEETLSRDLGEGEEGELAPPEDLLGRPQALSRQALDSEEEEEDVAAKETLLRLSSPLHFVNTHFNGAGSPPDGVKCSPGGPVETLSPETDSPQPLPAPEEEEALTTEDFELLDQGELEQLNAELGLEPETPPKPPDAPPLGPDIHSLVQSDQEAQAVAEP

SEQ ID NO: 29566 - protein, 5 aa, Homo sapiens
  Payload ID: 5772
  Gene Symbol: FAM134A
  Gene Name: family with sequence similarity 134, member A
  ENSP ID: ENSP00000414547
MISYI

SEQ ID NO: 29567 - protein, 497 aa, Homo sapiens
  Payload ID: 5773
  Gene Symbol: FAM134B
  Gene Name: family with sequence similarity 134, member B
  Uniprot ID: Q9H6L5
  ENSP ID: ENSP00000304642
MASPAPPEHAEEGCPAPAAEEQAPPSPPPPQASPAERQQQEEEAQEAGAAEGAGLQVEEAAGRAAAAVTWLLGEPVLWLGCRADELLSWKRPLRSLLGFVAANLLFWFLALTPWRVYHLISVMILGRVIMQIIKDMVLSRTRGAQLWRSLSESWEVINSKPDERPRLSHCIAESWMNFSIFLQEMSLFKQQSPGKFCLLVCSVCTFFTILGSYIPGVILSYLLLLCAFLCPLFKCNDIGQKIYSKIKSVLLKLDFGIGEYINQKKRERSEADKEKSHKDDSELDFSALCPKISLTVAAKELSVSDTDVSEVSWTDNGTFNLSEGYTPQTDTSDDLDRPSEEVFSRDLSDFPSLENGMGTNDEDELSLGLPTELKRKKEQLDSGHRPSKETQSAAGLTLPLNSDQTFHLMSNLAGDVITAAVTAAIKDQLEGVQQALSQAAPIPEEDTDTEEGDDFELLDQSELDQIESELGLTQDQEAEAQQNKKSSGFLSNLLGGH

SEQ ID NO: 29568 - protein, 356 aa, Homo sapiens
  Payload ID: 5773
  Gene Symbol: FAM134B
  Gene Name: family with sequence similarity 134, member B
  Uniprot ID: Q9H6L5
  ENSP ID: ENSP00000382691
MPEGEDFGPGKSWEVINSKPDERPRLSHCIAESWMNFSIFLQEMSLFKQQSPGKFCLLVCSVCTFFTILGSYIPGVILSYLLLLCAFLCPLFKCNDIGQKIYSKIKSVLLKLDFGIGEYINQKKRERSEADKEKSHKDDSELDFSALCPKISLTVAAKELSVSDTDVSEVSWTDNGTFNLSEGYTPQTDTSDDLDRPSEEVFSRDLSDFPSLENGMGTNDEDELSLGLPTELKRKKEQLDSGHRPSKETQSAAGLTLPLNSDQTFHLMSNLAGDVITAAVTAAIKDQLEGVQQALSQAAPIPEEDTDTEEGDDFELLDQSELDQIESELGLTQDQEAEAQQNKKSSGFLSNLLGGH

SEQ ID NO: 29569 - protein, 217 aa, Homo sapiens
  Payload ID: 5773
  Gene Symbol: FAM134B
  Gene Name: family with sequence similarity 134, member B
  ENSP ID: ENSP00000425089
  MOD_RES (1)..(1): Any amino acid
XELDFSALCPKISLTVAAKELSVSDTDVSEVSWTDNGTFNLSEGYTPQTDTSDDLDRPSEEVFSRDLSDFPSLENGMGTNDEDELSLGLPTELKRKKEQLDSGHRPSKETQSAAGLTLPLNSDQTFHLMSNLAGDVITAAVTAAIKDQLEGVQQALSQAAPIPEEDTDTEEGDDFELLDQSELDQIESELGLTQDQEAEAQQNKKSSGFLSNLLGGH

SEQ ID NO: 29570 - protein, 466 aa, Homo sapiens
  Payload ID: 5774
  Gene Symbol: FAM134C
  Gene Name: family with sequence similarity 134, member C
  Uniprot ID: Q86VR2
  ENSP ID: ENSP00000309432
MAEAEGVPTTPGPASGSTFRGRRDVSGSWERDQQVEAAQRALVEVLGPYEPLLSRVQAALVWERPARSALWCLGLNAAFWFFALTSLRLVFLLAFGLMIIVCIDQWKNKIWPEIKVPRPDALDNESWGFVHPRLLSVPELCHHVAEVWVSGTIFIRNVLLFKKQNPGKFCLLSCGILTFLAVLGRYVPGLLLSYLMLVTVMMWPLAVYHRLWDRAYVRLKPALQRLDFSVRGYMMSKQRERQLRRRALHPERAMDNHSDSEEELAAFCPQLDDSTVARELAITDSEHSDAEVSCTDNGTFNLSRGQTPLTEGSEDLDGHSDPEESFARDLPDFPSINMDPAGLDDEDDTSIGMPSLMYRSPPGAEEPQAPPASRDEAALPELLLGALPVGSNLTSNLASLVSQGMIQLALSGASQPGPSGAPAQRATRGFLRSPSSDLDTDAEGDDFELLDQSELSQLDPASSRSH

SEQ ID NO: 29571 - protein, 129 aa, Homo sapiens
  Payload ID: 5774
  Gene Symbol: FAM134C
  Gene Name: family with sequence similarity 134, member C
  ENSP ID: ENSP00000465004
MAEAEGVPTTPGPASGSTFRGRRDVSGSWERDQQVEAAQRALVEVLGPYEPLLSRVQAALVWERPARSALWCLGLNAAFWFFALTSLRLVFLLAFGLMIIVCIDQWKNKIWPEIKVPRPDALDNESSAC

SEQ ID NO: 29572 - protein, 120 aa, Homo sapiens
  Payload ID: 5774
  Gene Symbol: FAM134C
  Gene Name: family with sequence similarity 134, member C
  ENSP ID: ENSP00000465016
MIIVCIDQWKNKIWPEIKVPRPDALDNESWGFVHPRLLSVPELCHHVAEVWVSGTIFIRNVLLFKKQNPGKFCLLSCGILTFLAVLGRYVPGLLLSYLMLVTVMMWPLAVYHRLWDRAYV

SEQ ID NO: 29573 - protein, 83 aa, Homo sapiens
  Payload ID: 5774
  Gene Symbol: FAM134C
  Gene Name: family with sequence similarity 134, member C
  ENSP ID: ENSP00000466145
MAEAEGVPTTPGPASGSTFRGRRDVSGSWERDQQVEAAQRALVEVLGPYEPLLSRVQAALVWERPARSALWCLGLNAAFCSAC

SEQ ID NO: 29574 - protein, 81 aa, Homo sapiens
  Payload ID: 5774
  Gene Symbol: FAM134C
  Gene Name: family with sequence similarity 134, member C
  ENSP ID: ENSP00000466482
MAEAEGVPTTPGPASGSTFRGRRDVSGSWERDQQVEAAQRALVEVLGPYEPLLSRVQAALVWERPARSALWCLGLNAAFWY

SEQ ID NO: 29575 - protein, 133 aa, Homo sapiens
  Payload ID: 5774
  Gene Symbol: FAM134C
  Gene Name: family with sequence similarity 134, member C
  ENSP ID: ENSP00000466925
MAEAEGVPTTPGPASGSTFRGRRDVSGSWERDQQVEAAQRALVEVLGPYEPLLSRVQAALVWERPARSALWCLGLNAAFWFFALTSLRLVFLLAFGLMIIVCIDQWKNKIWPEIKAGALCTLGCSACPSSATM

SEQ ID NO: 29576 - protein, 80 aa, Homo sapiens
  Payload ID: 5774
  Gene Symbol: FAM134C
  Gene Name: family with sequence similarity 134, member C
  ENSP ID: ENSP00000467157
MAEAEGVPTTPGPASGSTFRGRRDVSGSWERDQQVEAAQRALVEVLGPYEPLLSRVQAALVWERPARSALWCLGLNAAFW

SEQ ID NO: 29577 - protein, 109 aa, Homo sapiens
  Payload ID: 5774
  Gene Symbol: FAM134C
  Gene Name: family with sequence similarity 134, member C
  ENSP ID: ENSP00000467332
MQIARARLRMRLGASGSGSAPQFFALTSLRLVFLLAFGLMIIVCIDQWKNKIWPEIKVPRPDALDNESWGFVHPRLLSVPELCHHVAEVWVSGTIFIRNVLLFKKQNPG

SEQ ID NO: 29578 - protein, 369 aa, Homo sapiens
  Payload ID: 5774
  Gene Symbol: FAM134C
  Gene Name: family with sequence similarity 134, member C
  ENSP ID: ENSP00000467847
MIIVCIDQWKNKIWPEIKVPRPDALDNESWGFVHPRLLSVPELCHHVAEVWVSGTIFIRNVLLFKKQNPGKFCLLSCGILTFLAVLGRYVPGLLLSYLMLVTVMMWPLAVYHRLWDRAYVRLKPALQRLDFSVRGYMMSKQRERQLRRRALHPERAMDNHSDSEEELAAFCPQLDDSTVARELAITDSEHSDAEVSCTDNGTFNLSRGQTPLTEGSEDLDGHSDPEESFARDLPDFPSINMDPAGLDDEDDTSIGMPSLMYRSPPGAEEPQAPPASRDEAALPELLLGALPVGSNLTSNLASLVSQGMIQLALSGASQPGPSGAPAQRATRGFLRSPSSDLDTDAEGDDFELLDQSELSQLDPASSRSH

SEQ ID NO: 29579 - protein, 147 aa, Homo sapiens
  Payload ID: 5775
  Gene Symbol: FAM135A
  Gene Name: family with sequence similarity 135, member A
  ENSP ID: ENSP00000194672
MTEVQAMVEFSVELNKFYNVDLFQRGFYQIRASMKIPSRIPHRVEASLLHATGMTLAFPASVHDSLICSKTFQILYKNEEVVLNDVMIFKVKMLLDERKIEETLEEMNFLLSLDLHFTDGDYSSCIIGCTTPATNKLSSPCEDNLVK

SEQ ID NO: 29580 - protein, 1319 aa, Homo sapiens
  Payload ID: 5775
  Gene Symbol: FAM135A
  Gene Name: family with sequence similarity 135, member A
  Uniprot ID: Q9P2D6
  ENSP ID: ENSP00000354913
MTEVQAMVEFSVELNKFYNVDLFQRGFYQIRASMKIPSRIPHRVEASLLHATGMTLAFPASVHDSLICSKTFQILYKNEEVVLNDVMIFKVKMLLDERKIEETLEEMNFLLSLDLHFTDGDYSADDLNALQLISSRTLKLHFSPHRGLHHHVNVMFDYFHLSVVSVTVHASLVALHQPLISFPRPVKTTWLNRNAPAQNKDSVIPTLESVVFGINYTKQLSPDGCSFIIADSFLHHAYRFHYTLCATLLLAFKGLHSYFITVTEEIPSCQKLELEEMDVEARLTELCEEVKKIENPDELAELINMNLAQLCSLLMALWGQFLEVITLHEELRILLAQEHHTLRVRRFSEAFFCFEHPREAAIAYQELHAQSHLQMCTAIKNTSFCSSLPPLPIECSELDGDLNSLPIIFEDRYLDSVTEGKLDISQDDSEITQMEHNLASRRSSDDCHDHQTTPSLGVRTIEIKPSNKDPFSGENITVKLGPWTELRQEEILVDNLLPNFESLESNGKSKSIEITFEKEALQEAKCLSIGESLTKLRSNLPAPSTKEYHVVVSGDTIKLPDISATYASSRFSDSGVESEPSSFATHPNTDLVFETVQGQGPCNSERLFPQLLMKPDYNVKFSLGNHCTESTSAISEIQSSLTSINSLPSDDELSPDENSKKSVVPECHLNDSKTVLNLGTTDLPKCDDTKKSSITLQQQSVVFSGNLDNETVAIHSLNSSIKDPLQFVFSDEETSSDVKSSCSSKPNLDTMCKGFQSPDKSNNSTGTAITLNSKLICLGTPCVISGSISSNTDVSEDRTMKKNSDVLNLTQMYSEIPTVESETHLGTSDPFSASTDIVKQGLVENYFGSQSSTDISDTCAVSYSNALSPQKETSEKEISNLQQEQDKEDEEEEQDQQMVQNGYYEETDYSALDGTINAHYTSRDELMEERLTKSEKINSDYLRDGINMPTVCTSGCLSFPSAPRESPCNVKYSSKSKFDAITKQPSSTSYNFTSSISWYESSPKPQIQAFLQAKEELKLLKLPGFMYSEVPLLASSVPYFSVEEEDGSEDGVHLIVCVHGLDGNSADLRLVKTYIELGLPGGRIDFLMSERNQNDTFADFDSMTDRLLDEIIQYIQIYSLTVSKISFIGHSLGNLIIRSVLTRPRFKYYLNKLHTFLSLSGPHLGTLYNSSALVNTGLWFMQKWKKSGSLLQLTCRDHSDPRQTFLYKLSNKAGLHYFKNVVLVGSLQDRYVPYHSARIEMCKTALKDKQSGQIYSEMIHNLLRPVLQSKDCNLVRYNVINALPNTADSLIGRAAHIAVLDSEIFLEKFFLVAALKYFQ

SEQ ID NO: 29581 - protein, 1515 aa, Homo sapiens
  Payload ID: 5775
  Gene Symbol: FAM135A
  Gene Name: family with sequence similarity 135, member A
  Uniprot ID: Q9P2D6
  ENSP ID: ENSP00000359510
MTEVQAMVEFSVELNKFYNVDLFQRGFYQIRASMKIPSRIPHRVEASLLHATGMTLAFPASVHDSLICSKTFQILYKNEEVVLNDVMIFKVKMLLDERKIEETLEEMNFLLSLDLHFTDGDYSADDLNALQLISSRTLKLHFSPHRGLHHHVNVMFDYFHLSVVSVTVHASLVALHQPLISFPRPVKTTWLNRNAPAQNKDSVIPTLESVVFGINYTKQLSPDGCSFIIADSFLHHAYRFHYTLCATLLLAFKGLHSYFITVTEEIPSCQKLELEEMDVEARLTELCEEVKKIENPDELAELINMNLAQLCSLLMALWGQFLEVITLHEELRILLAQEHHTLRVRRFSEAFFCFEHPREAAIAYQELHAQSHLQMCTAIKNTSFCSSLPPLPIECSELDGDLNSLPIIFEDRYLDSVTEDLDAPWMGIQNLQRSESSKMDKYETEESSVAGLSSPELKVRPAGASSIWYTEGEKQLTKSLKGKNEESNKSKVKVTKLMKTMKSENTKKLIKQNSKDSVVLVGYKCLKSTASNDLIKCFEGNPSHSQKEGLDPTICGYNFDPKTYMRQTSQKEASCLPTNTERTEQKSPDIENVQPDQFDPLNSGNLNLCANLSISGKLDISQDDSEITQMEHNLASRRSSDDCHDHQTTPSLGVRTIEIKPSNKDPFSGENITVKLGPWTELRQEEILVDNLLPNFESLESNGKSKSIEITFEKEALQEAKCLSIGESLTKLRSNLPAPSTKEYHVVVSGDTIKLPDISATYASSRFSDSGVESEPSSFATHPNTDLVFETVQGQGPCNSERLFPQLLMKPDYNVKFSLGNHCTESTSAISEIQSSLTSINSLPSDDELSPDENSKKSVVPECHLNDSKTVLNLGTTDLPKCDDTKKSSITLQQQSVVFSGNLDNETVAIHSLNSSIKDPLQFVFSDEETSSDVKSSCSSKPNLDTMCKGFQSPDKSNNSTGTAITLNSKLICLGTPCVISGSISSNTDVSEDRTMKKNSDVLNLTQMYSEIPTVESETHLGTSDPFSASTDIVKQGLVENYFGSQSSTDISDTCAVSYSNALSPQKETSEKEISNLQQEQDKEDEEEEQDQQMVQNGYYEETDYSALDGTINAHYTSRDELMEERLTKSEKINSDYLRDGINMPTVCTSGCLSFPSAPRESPCNVKYSSKSKFDAITKQPSSTSYNFTSSISWYESSPKPQIQAFLQAKEELKLLKLPGFMYSEVPLLASSVPYFSVEEEDGSEDGVHLIVCVHGLDGNSADLRLVKTYIELGLPGGRIDFLMSERNQNDTFADFDSMTDRLLDEIIQYIQIYSLTVSKISFIGHSLGNLIIRSVLTRPRFKYYLNKLHTFLSLSGPHLGTLYNSSALVNTGLWFMQKWKKSGSLLQLTCRDHSDPRQTFLYKLSNKAGLHYFKNVVLVGSLQDRYVPYHSARIEMCKTALKDKQSGQIYSEMIHNLLRPVLQSKDCNLVRYNVINALPNTADSLIGRAAHIAVLDSEIFLEKFFLVAALKYFQ

SEQ ID NO: 29582 - protein, 1302 aa, Homo sapiens
  Payload ID: 5775
  Gene Symbol: FAM135A
  Gene Name: family with sequence similarity 135, member A
  Uniprot ID: Q9P2D6
  ENSP ID: ENSP00000409201
MTEVQAMVEFSVELNKFYNVDLFQRGKTFQILYKNEEVVLNDVMIFKVKMLLDERKIEETLEEMNFLLSLDLHFTDGDYSADDLNALQLISSRTLKLHFSPHRGLHHHVNVMFDYFHLSVVSVTVHASLVALHQPLISFPRPVKTTWLNRNAPAQNKDSVIPTLESVVFGINYTKQLSPDGCSFIIADSFLHHAYRFHYTLCATLLLAFKGLHSYFITVTEEIPSCQKLELAKANMQLLYERLLRRKQLRTQKDNHLEEMDVEARLTELCEEVKKIENPDELAELINMNLAQLCSLLMALWGQFLEVITLHEELRILLAQEHHTLRVRRFSEAFFCFEHPREAAIAYQELHAQSHLQMCTAIKNTSFCSSLPPLPIECSELDGDLNSLPIIFEDRYLDSVTEGKLDISQDDSEITQMEHNLASRRSSDDCHDHQTTPSLGVRTIEIKPSNKDPFSGENITVKLGPWTELRQEEILVDNLLPNFESLESNGKSKSIEITFEKEALQEAKCLSIGESLTKLRSNLPAPSTKEYHVVVSGDTIKLPDISATYASSRFSDSGVESEPSSFATHPNTDLVFETVQGQGPCNSERLFPQLLMKPDYNVKFSLGNHCTESTSAISEIQSSLTSINSLPSDDELSPDENSKKSVVPECHLNDSKTVLNLGTTDLPKCDDTKKSSITLQQQSVVFSGNLDNETVAIHSLNSSIKDPLQFVFSDEETSSDVKSSCSSKPNLDTMCKGFQSPDKSNNSTGTAITLNSKLICLGTPCVISGSISSNTDVSEDRTMKKNSDVLNLTQMYSEIPTVESETHLGTSDPFSASTDIVKQGLVENYFGSQSSTDISDTCAVSYSNALSPQKETSEKEISNLQQEQDKEDEEEEQDQQMVQNGYYEETDYSALDGTINAHYTSRDELMEERLTKSEKINSDYLRDGINMPTVCTSGCLSFPSAPRESPCNVKYSSKSKFDAITKQPSSTSYNFTSSISWYESSPKPQIQAFLQAKEELKLLKLPGFMYSEVPLLASSVPYFSVEEEDGSEDGVHLIVCVHGLDGNSADLRLVKTYIELGLPGGRIDFLMSERNQNDTFADFDSMTDRLLDEIIQYIQIYSLTVSKISFIGHSLGNLIIRSVLTRPRFKYYLNKLHTFLSLSGPHLGTLYNSSALVNTGLWFMQKWKKSGSLLQLTCRDHSDPRQTFLYKLSNKAGLHYFKNVVLVGSLQDRYVPYHSARIEMCKTALKDKQSGQIYSEMIHNLLRPVLQSKDCNLVRYNVINALPNTADSLIGRAAHIAVLDSEIFLEKFFLVAALKYFQ

SEQ ID NO: 29583 - protein, 1515 aa, Homo sapiens; identical to SEQ ID NO: 29581
  Payload ID: 5775
  Gene Symbol: FAM135A
  Gene Name: family with sequence similarity 135, member A
  Uniprot ID: Q9P2D6
  ENSP ID: ENSP00000410768

SEQ ID NO: 29584 - protein, 31 aa, Homo sapiens
  Payload ID: 5775
  Gene Symbol: FAM135A
  Gene Name: family with sequence similarity 135, member A
  ENSP ID: ENSP00000421505
MTEVQAMVEFSVELNKFYNVDLFQRGFYQIR

SEQ ID NO: 29585 - protein, 505 aa, Homo sapiens
  Payload ID: 5775
  Gene Symbol: FAM135A
  Gene Name: family with sequence similarity 135, member A
  ENSP ID: ENSP00000422406
MTEVQAMVEFSVELNKFYNVDLFQRGFYQIRASMKIPSRIPHRVEASLLHATGMTLAFPASVHDSLICSKTFQILYKNEEVVLNDVMIFKVKMLLDERKIEETLEEMNFLLSLDLHFTDGDYSADDLNALQLISSRTLKLHFSPHRGLHHHVNVMFDYFHLSVVSVTVHASLVALHQPLISFPRPVKTTWLNRNAPAQNKDSVIPTLESVVFGINYTKQLSPDGCSFIIADSFLHHAYRFHYTLCATLLLAFKGLHSYFITVTEEIPSCQKLELEEMDVEARLTELCEEVKKIENPDELAELINMNLAQLCSLLMALWGQFLEVITLHEELRILLAQEHHTLRVRRFSEAFFCFEHPREAAIAYQELHAQSHLQMCTAIKNTSFCSSLPPLPIECSELDGDLNSLPIIFEDRYLDSVTEDLDAPWMGIQNLQRSESSKMDKYETEESSVAGLSSPELKVRPAGASSIWYTEGEKQLTKSLKGKNEESNKSKVKVTKLMKTMKSEN

SEQ ID NO: 29586 - protein, 1469 aa, Homo sapiens
  Payload ID: 5775
  Gene Symbol: FAM135A
  Gene Name: family with sequence similarity 135, member A
  Uniprot ID: Q9P2D6
  ENSP ID: ENSP00000423307
MTEVQAMVEFSVELNKFYNVDLFQRGFYQIRASMKIPSRIPHRVEASLLHATGMTLAFPASVHDSLICSKTFQILYKNEEVVLNDVMIFKVKMLLDERKIEETLEEMNFLLSLDLHFTDGDYSADDLNALQLISSRTLKLHFSPHRGLHHHVNVMFDYFHLSVVSVTVHASLVALHQPLISFPRPVKTTWLNRNAPAQNKDSVIPTLESVVFGINYTKQLSPDGCSFIIADSFLHHAYRFHYTLCATLLLAFKGLHSYFITVTEEIPSCQKLELEEMDVEARLTELCEEVKKIENPDELAELINMNLAQLCSLLMALWGQFLEVITLHEELRILLAQEHHTLRVRRFSEAFFCFEHPREAAIAYQELHAQSHLQMCTAIKNTSFCSSLPPLPIECSELDGDLNSLPIIFEDRYLDSVTEDLDAPWMGIQNLQRSESSKMDKYETEESSVAGLSSPELKVRPAGASSIWYTEGEKQLTKSLKGKNEESNKSKVKVTKLMKTMKSENTKKLIKQNSKDSVVLVGYKCLKSTASNDLIKCFEGNPSHSQKEGLDPTICGYNFDPKTYMRQTSQKEASCLPTNTERTEQKSPDIENVQPDQFDPLNSGNLNLCANLSISGKLDISQDDSEITQMEHNLASRRSSDDCHDHQTTPSLGVRTIEIKPSNKDPFSGENITVKLGPWTELRQEEILVDNLLPNFESLESNGKSKSIEITFEKEALQEAKCLSIGESLTKLRSNLPAPSTKEYHVVVSGDTIKLPDISATYASSRFSDSGVESEPSSFATHPNTDLVFETVQGQGPCNSERLFPQLLMKPDYNVKFSLGNHCTESTSAISEIQSSLTSINSLPSDDELSPDENSKKSVVPECHLNDSKTVLNLGTTDLPKCDDTKKSSITLQQQSVVFSGNLDNETVAIHSLNSSIKDPLQFVFSDEETSSDVKSSCSSKPNLDTMCKGFQSPDKSNNSTGTAITLNSKLICLGTPCVISGSISSNTDVSEDRTMKKNSDVLNLTQMYSEIPTVESETHLGTSDPFSASTDIVKQGLVENYFGSQSSTDISDTCAVSYSNALSPQKETSEKEISNLQQEQDKEDEEEEQDQQMVQNGYYEETDYSALDGTINAHYTSRDELMEERLTKSEKINSDYLRDGINMPTVCTSGCLSFPSAPRESPCNVKYSSKSKFDAITKQPSSTSYNFTSSISWYESSPKPQIQAFLQAKEELKLLKLPGFMYSEVPLLASSVPYFSVEEEDGSEDGVHLIVCVHGLDGNSADLRLVKTYIELGLPGGRIDFLMSERNQNDTFADFDSMTDRLLDEIIQYIQIYSLTVSKISFIGHSLGNLIIRSVLTRPRFKYYLNKLHTFLSLSGPHLGTLYNSSALVNTGLWFMQKWKKSGSLLQLTCRDHSDPRQTFLYKLSNKAGLHYFKNVVLVGSLQDRYVPYHSARIEMCKTALKDKQSGNGIKLFQRVIGINELFPKFFL

SEQ ID NO: 29587 - protein, 1095 aa, Homo sapiens
  Payload ID: 5775
  Gene Symbol: FAM135A
  Gene Name: family with sequence similarity 135, member A
  ENSP ID: ENSP00000423785
MTEVQAMVEFSVELNKFYNVDLFQRGFYQIRASMKIPSRIPHRVEASLLHATGMTLAFPASVHDSLICSKTFQILYKNEEVVLNDVMIFKVKMLLDERKIEETLEEMNFLLSLDLHFTDGDYSADDLNALQLISSRTLKLHFSPHRGLHHHVNVMFDYFHLSVVSVTVHASLVALHQPLISFPRPVKTTWLNRNAPAQNKDSVIPTLESVVFGINYTKQLSPDGCSFIIADSFLHHAYRFHYTLCATLLLAFKGLHSYFITVTEEIPSCQKLELEEMDVEARLTELCEEVKKIENPDELAELINMNLAQLCSLLMALWGQFLEVITLHEELRILLAQEHHTLRVRRFSEAFFCFEHPREAAIAYQELHAQSHLQMCTAIKNTSFCSSLPPLPIECSELDGDLNSLPIIFEDRYLDSVTEGKLDISQDDSEITQMEHNLASRRSSDDCHDHQTTPSLGVRTIEIKPSNKDPFSGENITVKLGPWTELRQEEILVDNLLPNFESLESNDEETSSDVKSSCSSKPNLDTMCKGFQSPDKSNNSTGTAITLNSKLICLGTPCVISGSISSNTDVSEDRTMKKNSDVLNLTQMYSEIPTVESETHLGTSDPFSASTDIVKQGLVENYFGSQSSTDISDTCAVSYSNALSPQKETSEKEISNLQQEQDKEDEEEEQDQQMVQNGYYEETDYSALDGTINAHYTSRDELMEERLTKSEKINSDYLRDGINMPTVCTSGCLSFPSAPRESPCNVKYSSKSKFDAITKQPSSTSYNFTSSISWYESSPKPQIQAFLQAKEELKLLKLPGFMYSEVPLLASSVPYFSVEEEDGSEDGVHLIVCVHGLDGNSADLRLVKTYIELGLPGGRIDFLMSERNQNDTFADFDSMTDRLLDEIIQYIQIYSLTVSKISFIGHSLGNLIIRSVLTRPRFKYYLNKLHTFLSLSGPHLGTLYNSSALVNTGLWFMQKWKKSGSLLQLTCRDHSDPRQTFLYKLSNKAGLHYFKNVVLVGSLQDRYVPYHSARIEMCKTALKDKQSGQIYSEMIHNLLRPVLQSKDCNLVRYNVINALPNTADSLIGRAAHIAVLDSEIFLEKFFLVAALKYFQ

SEQ ID NO: 29588 - protein, 50 aa, Homo sapiens
  Payload ID: 5775
  Gene Symbol: FAM135A
  Gene Name: family with sequence similarity 135, member A
  ENSP ID: ENSP00000425101
MTEVQAMVEFSVELNKFYNVDLFQRGFYQIRASMKIPSRIPHRVEASLLH

SEQ ID NO: 29589 - protein, 153 aa, Homo sapiens
  Payload ID: 5776
  Gene Symbol: FAM135B
  Gene Name: family with sequence similarity 135, member B
  ENSP ID: ENSP00000160713
MSEIQGTVEFSVELHKFYNVDLFQRGYYQIRVTLKVSSRIPHRLSASIAGQTESSSLHSACVHDSTVHSRVFQILYRNEEVPINDAVVFRVHLLLGGERMEDALSEVDFQLKVDLHFTDSEQQLRDVAGAPMVSSRTLGLHFHPRNGLHHQVP

SEQ ID NO: 29590 - protein, 1141 aa, Homo sapiens
  Payload ID: 5776
  Gene Symbol: FAM135B
  Gene Name: family with sequence similarity 135, member B
  Uniprot ID: Q49AJ0
  ENSP ID: ENSP00000276737
MSEIQGTVEFSVELHKFYNVDLFQRGYYQIRVTLKVSSRIPHRLSASIAGQTESSSLHSACVHDSTVHSRVFQILYRNEEVPINDAVVFRVHLLLGGERMEDALSEVDFQLKVDLHFTDSEQQLRDVAGAPMVSSRTLGLHFHPRNGLHHQVPVMFDYFHLSVISVTVHAALVALQQPLISFTRPGRGSWLGKGGPDTGQEQSIISLENLVFGAGYCKPTSSEGSFYITSENCMQHAHKWHRDLCLLLLHAYRGLRLHFLVIMRDIPELPHTELEALAVEETLSQLCSELQMLNNPEKIAEQISKDLAWLTSHMMTLWTQFLDTVTLHSQVTTYLTQEHHTLRVRRFSEAFFYMEHQKLAVLTFQENLIQTHSQLSLDIRNSEYLTSMPPLPAECLDIDGDWNTLPVIFEDRYVDCPATGHNLSVYPNFDVPVTSPTIMNLKDKEDNCMVNSNLSFREDLVLSTIKPSQMDSDEEVIRCPEPGENVATQNHMDMCSESQVYISIGEFQNKAGVPEDECWTGQTSDAGTYPVADVDTSRRSPGPEDGQAPVLTYIDVKSSNKNPSRAEPLVAFNAQHESRSSRDKYGLDRTGLSKVVVGGSHQNAISSDKTTLHELSTLGKGIDQEGKMVLLSLKLTPSEPCDPLSSTLREPLDIRSSLKDSHTEEQEELSVLSGVIKRSSSIISDSGIESEPSSVAWSEARSRALELPSDREVLHPFVRRHALHRNSLEGGHTESNTSLPSGIQASLTSISSLPFEEDEREVALTKLTKSVSAPHISSPEEAAEDADTKQQDGGFAEPSDMHSKSQGSPGSCSQLCGDSGTDAGADHPLVEIVLDADNQQGPGYIDIPKGKGKQFDAQGHCLPDGRTENTPGVETKGLNLKIPRVIALENPRTRSLHRALEETPKGMPKDLNVGQQALSNSGISEVEGLSQHQVPELSCTSAADAINRNSTGQQSQSGSPCIMDDTAFNRGVNAFPEAKHKAGTVCPTVTHSVHSQVLKNQELKAGTSIMGSHLTSAETFTLDSLKAVEVVNLSVSCTATCLPFSSVPKETPARAGFSSKQTLFPITHQPLGSFGVVSTHSSTLDEEVSERMFRGRGRKFGRWNSPGCLCPWPGWEQCRPPAGKDFHRTGAPWRKTGLPNV

SEQ ID NO: 29591 - protein, 1406 aa, Homo sapiens
  Payload ID: 5776
  Gene Symbol: FAM135B
  Gene Name: family with sequence similarity 135, member B
  Uniprot ID: Q49AJ0
  ENSP ID: ENSP00000378710
MSEIQGTVEFSVELHKFYNVDLFQRGYYQIRVTLKVSSRIPHRLSASIAGQTESSSLHSACVHDSTVHSRVFQILYRNEEVPINDAVVFRVHLLLGGERMEDALSEVDFQLKVDLHFTDSEQQLRDVAGAPMVSSRTLGLHFHPRNGLHHQVPVMFDYFHLSVISVTVHAALVALQQPLISFTRPGRGSWLGKGGPDTGQEQSIISLENLVFGAGYCKPTSSEGSFYITSENCMQHAHKWHRDLCLLLLHAYRGLRLHFLVIMRDIPELPHTELEALAVEETLSQLCSELQMLNNPEKIAEQISKDLAWLTSHMMTLWTQFLDTVTLHSQVTTYLTQEHHTLRVRRFSEAFFYMEHQKLAVLTFQENLIQTHSQLSLDIRNSEYLTSMPPLPAECLDIDGDWNTLPVIFEDRYVDCPATGHNLSVYPNFDVPVTSPTIMNLKDKEDNCMVNSNLSFREDLVLSTIKPSQMDSDEEVIRCPEPGENVATQNHMDMCSESQVYISIGEFQNKAGVPEDECWTGQTSDAGTYPVADVDTSRRSPGPEDGQAPVLTYIDVKSSNKNPSRAEPLVAFNAQHESRSSRDKYGLDRTGLSKVVVGGSHQNAISSDKTTLHELSTLGKGIDQEGKMVLLSLKLTPSEPCDPLSSTLREPLDIRSSLKDSHTEEQEELSVLSGVIKRSSSIISDSGIESEPSSVAWSEARSRALELPSDREVLHPFVRRHALHRNSLEGGHTESNTSLPSGIQASLTSISSLPFEEDEREVALTKLTKSVSAPHISSPEEAAEDADTKQQDGGFAEPSDMHSKSQGSPGSCSQLCGDSGTDAGADHPLVEIVLDADNQQGPGYIDIPKGKGKQFDAQGHCLPDGRTENTPGVETKGLNLKIPRVIALENPRTRSLHRALEETPKGMPKDLNVGQQALSNSGISEVEGLSQHQVPELSCTSAADAINRNSTGQQSQSGSPCIMDDTAFNRGVNAFPEAKHKAGTVCPTVTHSVHSQVLKNQELKAGTSIMGSHLTSAETFTLDSLKAVEVVNLSVSCTATCLPFSSVPKETPARAGFSSKQTLFPITHQPLGSFGVVSTHSSTLDEEVSERMFSFYQAKEKFKKELKIEGFLYSDLTVLASDIPYFPPEEEEENLEDGIHLVVCVHGLDGNSADLRLVKTFIELGLPGGKLDFLMSEKNQMDTFADFDTMTDRLLDEIIQHIQLYNLSISRISFIGHSLGNIIIRSVLTRPRFRYYLNKLHTFLSLSGPHLGTLYNNSTLVSTGLWLMQKLKKSGSLLQLTFRDNADLRKCFLYQLSQKTGLQYFKNVVLVASPQDRYVPFHSARIEMCKTALKDRHTGPVYAEMINNLLGPLVEAKDCTLIRHNVFHALPNTANTLIGRAAHIAVLDSELFLEKFFLVAGLNYFK

SEQ ID NO: 29592 - protein, 68 aa, Homo sapiens
  Payload ID: 5776
  Gene Symbol: FAM135B
  Gene Name: family with sequence similarity 135, member B
  ENSP ID: ENSP00000428017
MSEIQGTVEFSVELHKFYNVDLFQRGYYQIRVTLKVSSRIPHRLSASIAGQTEVLNIHMSEQEPAQGK

SEQ ID NO: 29593 - protein, 43 aa, Homo sapiens
  Payload ID: 5776
  Gene Symbol: FAM135B
  Gene Name: family with sequence similarity 135, member B
  ENSP ID: ENSP00000429874
MSEIQGTVEFSVELHKFYNVDLFQRGMQSEFGISRAGDISKSS

SEQ ID NO: 29594 - protein, 451 aa, Homo sapiens
  Payload ID: 5776
  Gene Symbol: FAM135B
  Gene Name: family with sequence similarity 135, member B
  ENSP ID: ENSP00000430088
EPSSVAWSEARSRALELPSDREVLHPFVRRHALHRNSLEGGHTESNTSLPSGIQASLTSISSLPFEEDEREVALTKLTKSVSAPHISSPEEAAEDADTKQQDGGFAEPSDMHSKSQGSPGSCSQLCGDSGTDAGADHPLVEIVLDADNQQGPGYIDIPKGKGKQFDAQGHCLPDGRTENTPGVETKGLNLKIPRVIALENPRTRSLHRALEETPKGMPKDLNVGQQALSNSGISEVEGLSQHQVPELSCTSAADAINRNSTGQQSQSGSPCIMDDTAFNRGVNAFPEAKHKAGTVCPTVTHSVHSQVLKNQELKAGTSIMGSHLTSAETFTLDSLKAVEVVNLSVSCTATCLPFSSVPKETPARAGFSSKQTLFPITHQPLGSFGVVSTHSSTLDEEVSERMFRGRGRKFGRWNSPGCLCPWPGWEQCRPPAGKDFHRTGAPWRKTGLPNV

SEQ ID NO: 29595 - protein, 138 aa, Homo sapiens
  Payload ID: 5777
  Gene Symbol: FAM136A
  Gene Name: family with sequence similarity 136, member A
  Uniprot ID: Q96C01
  ENSP ID: ENSP00000037869
MAELQQLRVQEAVESMVKSLERENIRKMQGLMFRCSASCCEDSQASMKQVHQCIERCHVPLAQAQALVTSELEKFQDRLARCTMHCNDKAKDSIDAGSKELQVKQQLDSCVTKCVDDHMHLIPTMTKKMKEALLSIGK

SEQ ID NO: 29596 - protein, 163 aa, Homo sapiens
  Payload ID: 5777
  Gene Symbol: FAM136A
  Gene Name: family with sequence similarity 136, member A
  ENSP ID: ENSP00000390840
MVKSLERENIRKMQVAGLGPNQDPLLSGWVPGPSLSHHATPCTAAASPQTGCGRPWGRRGGLGQDFGSFGGSDEIRVPLPCARLFSAPSSPGQERPRRQGLMFRCSASCCEDSQASMKQVHQCIERCHVPLAQAQALVTSELEKFQDRLARCTMHCNDKAKDS

SEQ ID NO: 29597 - protein, 105 aa, Homo sapiens
  Payload ID: 5777
  Gene Symbol: FAM136A
  Gene Name: family with sequence similarity 136, member A
  ENSP ID: ENSP00000391468
MAELQQLRVQEAVESMVKSLERENIRKMQVSGPRPSRGAANVKDQKGEDFRPPRWPGHACFSCAQPRFTQRGFLHCSSLSPAMPLCVSVLLLSRRSHVPVQRQLL

SEQ ID NO: 29598 - protein, 245 aa, Homo sapiens
  Payload ID: 5777
  Gene Symbol: FAM136A
  Gene Name: family with sequence similarity 136, member A
  ENSP ID: ENSP00000397269
MAELQQLRVQEAVESMVKSLERENIRKMQVAGLGPNQDPLLSGWVPGPSLSHHATPCTAAASPQTGCGRPWGRRGGLGQDFGSFGGSDEIRVPLPCARLFSAPSSPGQERPRRQVGSPWWQALAPPPSPLTRPLPQGLMFRCSASCCEDSQASMKQVHQCIERCHVPLAQAQALVTSELEKFQDRLARCTMHCNDKAKDSIDAGSKELQVKQQLDSCVTKCVDDHMHLIPTMTKKMKEALLSIGK

SEQ ID NO: 29599 - protein, 482 aa, Homo sapiens
  Payload ID: 5778
  Gene Symbol: FAM149A
  Gene Name: family with sequence similarity 149, member A
  Uniprot ID: A5PLN7
  ENSP ID: ENSP00000227065
MLFEGKVNPQTQSLLAECGEWTRRSLHLRVLGRQLILPTDKGVQHFQGSTPASAVHRPPLSACGHSSNIRELCISGSQIVPAALSASALPGPDDTGVADLTARSSLEEEVYHVDGKIEEYFAFDRKEDDDECLEQKPAQPGRKWRKLGLPPVSPRDCVKDAVAAEVFDHVWTNMVELLEELIRKHWETTLTEGKKQRETLKVAGNRFPHVLVPHAHADGASGPPSGHAEAHGISLASRLNPPQIHHFSSSFYSDMNGVMTIQAKPLQRRPAYFADRTQNEKEDKASGGGAGALSSAPHRLGRASDTHGLSPSAKKTPVPWRLPSLASDSQRLKTPNIYSDEVLRGTKLPTGVDHMASPLVQTSRSRFPPLVTETRGQNTAVPGCRLVSYRGRHLQNRVLSAMPDGTERSRLRERTATLERLSRPSTTHTFRQSDTPRKSSLTQMEFAAHTWTGQSILTGSQYVPKSFQRTTLTFKRRFQVTS

SEQ ID NO: 29600 - protein, 773 aa, Homo sapiens
  Payload ID: 5778
  Gene Symbol: FAM149A
  Gene Name: family with sequence similarity 149, member A
  Uniprot ID: A5PLN7
  ENSP ID: ENSP00000348732
MKAAVLDLGSLLAKLFETSTAPPAGPSSRPSGGAAAAGSGGSRAGTPLGTAPTLLRALAPDSPSASRRSPAPLLSSPYSRGSAASRAAGAVGTLLSWPSSPRAGKAPPQPPTPSGGGCSPARLVVPARPPSGPGGVWAALPRNPLQPGPGERELGACVAPGAGPRTLFLTLPDIGEEGASDGDSGDGEARGLSEGRRRHGFTVRSKDSLPTHFTRNVQKAIDKYTCKSLSSFSSSGSHTPTGAHTSWSGSATQSSTTGSSTERGSVYSWRDDEFDEASSQSVQRLLWEVEEMLFEGKVNPQTQSLLAECGEWTRRSLHLRVLGRQLILPTDKGVQHFQGSTPASAVHRPPLSACGHSSNIRELCISGSQIVPAALSASALPGPDDTGVADLTARSSLEEEVYHVDGKIEEYFAFDRKEDDDECLEQKPAQPGRKWRKLGLPPVSPRDCVKDAVAAEVFDHVWTNMVELLEELIRKHWETTLTEGKKQRETLKVAGNRFPHVLVPHAHADGASGPPSGHAEAHGISLASRLNPPQIHHFSSSFYSDMNGVMTIQAKPLQRRPAYFADRTQNEKEDKASGGGAGALSSAPHRLGRASDTHGLSPSAKKTPVPWRLPSLASDSQRLKTPNIYSDEVLRGTKLPTGVDHMASPLVQTSRSRFPPLVTETRGQNTAVPGCRLVSYRGRHLQNRVLSAMPDGTERSRLRERTATLERLSRPSTTHTFRQSDTPRKSSLTQMEFAAHTWTGQSILTGSQYVPKSFQRTTLTFKRRFQVTS

SEQ ID NO: 29601 - protein, 402 aa, Homo sapiens
  Payload ID: 5778
  Gene Symbol: FAM149A
  Gene Name: family with sequence similarity 149, member A
  ENSP ID: ENSP00000374005
MLFEGKVNPQTQSLLAECGEWTRRSLHLRVLGRQLILPTDKGVQHFQGSTPASAVHRPPLSACGHSSNIRELCISGSQIVPAALSASALPGPDDTGVADLTARSSLEEEVYHVDGKIEEYFAFDRKEDDDECLEQKPAQPGRKWRKLGLPPVSPRDCVKDAVAAEVFDHVWTNMVELLEELIRKHWETTLTEGKKQRETLKVAGNRFPHVLVPHAHADGASGPPSGHAEAHGISLASRLNPPQIHHFSSSFYSDMNGVMTIQAKPLQRRPAYFADRTQNEKEDKASGGGAGALSSAPHRLGRASDTHGLSPSAKKTPVPWRLPSLASDSQRLKTPNIYSDEVLRGTTADWRGPHGFPTGSNVTEQVPPASHGDQGAEYSSSWMPPCFLQRKASTKPCVECHA

SEQ ID NO: 29602 - protein, 36 aa, Homo sapiens
  Payload ID: 5778
  Gene Symbol: FAM149A
  Gene Name: family with sequence similarity 149, member A
  ENSP ID: ENSP00000421136
MLFEGKVNPQTQSLLAECGEWTRRSLHLRVLGRQLI

SEQ ID NO: 29603 - protein, 61 aa, Homo sapiens
  Payload ID: 5778
  Gene Symbol: FAM149A
  Gene Name: family with sequence similarity 149, member A
  ENSP ID: ENSP00000421713
MLFEGKVNPQTQSLLAECGEWTRRSLHLRVLGRQLILPTDKGVQHFQGSTPASAVHRPPLS

SEQ ID NO: 29604 - protein, 76 aa, Homo sapiens
  Payload ID: 5778
  Gene Symbol: FAM149A
  Gene Name: family with sequence similarity 149, member A
  ENSP ID: ENSP00000422330
MLFEGKVNPQTQSLLAECGEWTRRSLHLRVLGRQLILPTDKGVQHFQGSTPASAVHRPPLSACGHSSNIRELCISG

SEQ ID NO: 29605 - protein, 53 aa, Homo sapiens
  Payload ID: 5778
  Gene Symbol: FAM149A
  Gene Name: family with sequence similarity 149, member A
  ENSP ID: ENSP00000422584
  MOD_RES (1)..(1): Any amino acid
XLTQMEFAAHTWTGQSILTEDNFDFQEEIPSDILKPPHQNHWSTCGLGTLLIT

SEQ ID NO: 29606 - protein, 159 aa, Homo sapiens
  Payload ID: 5778
  Gene Symbol: FAM149A
  Gene Name: family with sequence similarity 149, member A
  ENSP ID: ENSP00000422722
  MOD_RES (1)..(1): Any amino acid
XSLASDSQRLKTPNIYSDEVLRGTKLPTGVDHMASPLVQTSRSRFPPLVTETRGQNTAVPGCRLVSYRGRHLQNRVLSAMPDGTERSRLRERTATLERLSRPSTTHTFRSDTPRKSSLTQMEFAAHTWTGQSILTGSQYVPKSFQRTTLTFKRRFQVTS

SEQ ID NO: 29607 - protein, 147 aa, Homo sapiens
  Payload ID: 5778
  Gene Symbol: FAM149A
  Gene Name: family with sequence similarity 149, member A
  ENSP ID: ENSP00000423143
  MOD_RES (1)..(1): Any amino acid
XSLASDSQRLKTPNIYSDEVLRGTKLPTGVDHMASPLVQTSRSRFPPLVTETRGQNTAVPGCRLVSYRGRHLQNRVLSAMPDGTERSRLRERTATLERLSRPSTTHTFRQSDTPRKSSLTQMEFAAHTWTGQSILTGGNSKCLGPVA

SEQ ID NO: 29608 - protein, 482 aa, Homo sapiens; identical to SEQ ID NO: 29599
  Payload ID: 5778
  Gene Symbol: FAM149A
  Gene Name: family with sequence similarity 149, member A
  Uniprot ID: A5PLN7
  ENSP ID: ENSP00000424380

SEQ ID NO: 29609 - protein, 482 aa, Homo sapiens; identical to SEQ ID NO: 29599
  Payload ID: 5778
  Gene Symbol: FAM149A
  Gene Name: family with sequence similarity 149, member A
  Uniprot ID: A5PLN7
  ENSP ID: ENSP00000426835

SEQ ID NO: 29610 - protein, 482 aa, Homo sapiens; identical to SEQ ID NO: 29599
  Payload ID: 5778
  Gene Symbol: FAM149A
  Gene Name: family with sequence similarity 149, member A
  Uniprot ID: A5PLN7
  ENSP ID: ENSP00000427155

SEQ ID NO: 29611 - protein, 582 aa, Homo sapiens
  Payload ID: 5779
  Gene Symbol: FAM149B1
  Gene Name: family with sequence similarity 149, member B1
  Uniprot ID: Q96BN6
  ENSP ID: ENSP00000242505
MISRYTRKAVPQSLELKGITKHALNHHPPPEKLEEISPTSDSHEKDTSSQSKSDITRESSFTSADTGNSLSAFPSYTGAGISTEGSSDFSWGYGELDQNATEKVQTMFTAIDELLYEQKLSVHTKSLQEECQQWTASFPHLRILGRQIITPSEGYRLYPRSPSAVSASYETTLSQERDSTIFGIRGKKLHFSSSYAHKASSIAKSSSFCSMERDEEDSIIVSEGIIEEYLAFDHIDIEEGFHGKKSEAATEKQKLGYPPIAPFYCMKEDVLAYVFDSVWCKVVSCMEQLTRSHWEGFASDDESNVAVTRPDSESSCVLSELHPLVLPRVPQSKVLYITSNPMSLCQASRHQPNVNDLLVHGMPLQPRNLSLMDKLLDLDDKLLMRPGSSTILSTRNWPNRAVEFSTSSLSYTVQSTRRRNPPPRTLHPISTSHSCAETPRSVEEILRGARVPVAPDSLSSPSPTPLSRNNLLPPIGTAEVEHVSTVGPQRQMKPHGDSSRAQSAVVDEPNYQQPQERLLLPDFFPRPNTTQSFLLDTQYRRSCAVEYPHQARPGRGSAGPQLHGSTKSQSGGRPVSRTRQGP

SEQ ID NO: 29612 - protein, 469 aa, Homo sapiens
  Payload ID: 5779
  Gene Symbol: FAM149B1
  Gene Name: family with sequence similarity 149, member B1
  ENSP ID: ENSP00000362046
  MOD_RES (1)..(1): Any amino acid
XFTSADTGNSLSAFPSYTGAGISTEGSSDFSWGYGELDQNATEKVQTMFTAIDELLYEQKLSVHTKSLQEECQQWTASFPHLRILGRQIITPSEGYRLYPRSPSAVSASYETTLSQERDSTIFGIRGKKLHFSSSYAHKASSIAKSSSFCSMERDEEDSIIVSEGIIEEYLAFDHIDIEEGFHGKKSEAATEKQKLGYPPIAPFYCMKEDVLAYVFDSVWCKVVSCMEQLTRSHWEGFASDDESNVAVTRPDSESSCVLSELHPLVLPRVPQSKMSLCQASRHQPNVNDLLVHGMPLQPRNLSLMDKLLDLDDKLLMRPGSSTILSTRNWPNRAVEFSTSSLSYTVQSTRRRNPPPRTLHPISTSHSCAETPRSVEEILRGARVPVAPDSLSSPSPTPLSRNNLLPPIGTAEVEHVSTVGPQRQMKPHGDSSRAQSAVVDEPNYQQPQERLLLPDFFPRPNTTQSFLVE

SEQ ID NO: 29613 - protein, 335 aa, Homo sapiens
  Payload ID: 5779
  Gene Symbol: FAM149B1
  Gene Name: family with sequence similarity 149, member B1
  ENSP ID: ENSP00000402293
SSFCSMERDEEDSIIVSEGIIEEYLAFDHIDIEEGFHGKKSEAATEKQKLGYPPIAPFYCMKEDVLAYVFDSVWCKVVSCMEQLTRSHWEGFASDDESNVAVTRPDSESSCVLSELHPLVLPRVPQSKVLYITSNPMSLCQASRHQPNVNDLLVHGMPLQPRNLSLMDKLLDLDDKLLMRPGSSTILSTRNWPNRAVEFSTSSLSYTVQSTRRRNPPPRTLHPISTSHSCAETPRSVEEILRGARVPVAPDSLSSPSPTPLSRNNLLPPIGTAEVEHVSTVGPQRQMLDTQYRRSCAVEYPHQARPGRGSAGPQLHGSTKSQSGGRPVSRTRQGP

SEQ ID NO: 29614 - protein, 209 aa, Homo sapiens
  Payload ID: 5779
  Gene Symbol: FAM149B1
  Gene Name: family with sequence similarity 149, member B1
  ENSP ID: ENSP00000476913
GKKSEAATEKQKLGYPPIAPFYCMKEDVLAYVFDSVWCKVVSCMEQLTRSHWEGFASDDESNVAVTRPDSESSCVLSELHPLVLPRVPQSKVLYITSNPMSLCQASRHQPNVNDLLVHGMPLQPRNLSLMDKLLDLDDKLLMRPGSSTILSTRNWPNRAVEFSTSSLSYTVQSTRRRNPPPRTLHPISTSHSCAETPRSVEEILRGARV

SEQ ID NO: 29615 - protein, 129 aa, Homo sapiens
  Payload ID: 5780
  Gene Symbol: FAM150A
  Gene Name: family with sequence similarity 150, member A
  Uniprot ID: Q6UXT8
  ENSP ID: ENSP00000351345
MRPLKPGAPLPALFLLALALSPHGAHGRPRGRRGARVTDKEPKPLLFLPAAGAGRTPSGSRSAEIFPRDSNLKDKFIKHFTGPVTFSPECSKHFHRLYYNTRECSTPAYYKRCARLLTRLAVSPLCSQT

SEQ ID NO: 29616 - protein, 111 aa, Homo sapiens
  Payload ID: 5780
  Gene Symbol: FAM150A
  Gene Name: family with sequence similarity 150, member A
  Uniprot ID: Q6UXT8
  ENSP ID: ENSP00000430953
MRPLKPGAPLPALFLLALALSPHGAHGRPRGRRGARVTDKEPKPLLFLPAAGAGRTPSGSRSAEIFPRDSNLKDKFIKHFTGPVTFSPECSKHFHRLYYNTRECSTPAYIS

SEQ ID NO: 29617 - protein, 59 aa, Homo sapiens
  Payload ID: 5781
  Gene Symbol: FAM150B
  Gene Name: family with sequence similarity 150, member B
  ENSP ID: ENSP00000339565
MKDKFLKHLTGPLYFSPKCSKHFHRLYHNTRDCTIPAYYKRCARLLTRLAVSPVCMEDK

SEQ ID NO: 29618 - protein, 152 aa, Homo sapiens
  Payload ID: 5781
  Gene Symbol: FAM150B
  Gene Name: family with sequence similarity 150, member B
  Uniprot ID: Q6UX46
  ENSP ID: ENSP00000384604
MRGPGHPLLLGLLLVLGAAGRGRGGAEPREPADGQALLRLVVELVQELRKHHSAEHKGLQLLGRDCALGRAEAAGLGPSPEQRVEIVPRDLRMKDKFLKHLTGPLYFSPKCSKHFHRLYHNTRDCTIPAYYKRCARLLTRLAVSPVCMEDKQ

SEQ ID NO: 29619 - protein, 102 aa, Homo sapiens
  Payload ID: 5781
  Gene Symbol: FAM150B
  Gene Name: family with sequence similarity 150, member B
  ENSP ID: ENSP00000385214
  MOD_RES (1)..(1): Any amino acid
XHHSAEHKGLQLLGRDCALGRAEAAGLGPSPEQRVEIVPRDLRMKDKFLKHLTGPLYFSPKCSKHFHRLYHNTRDCTIPAYYKRCARLLTRLAVSPVCMEDK

SEQ ID NO: 29620 - protein, 60 aa, Homo sapiens
  Payload ID: 5781
  Gene Symbol: FAM150B
  Gene Name: family with sequence similarity 150, member B
  ENSP ID: ENSP00000385537
MKDKFLKHLTGPLYFSPKCSKHFHRLYHNTRDCTIPAYYKRCARLLTRLAVSPVCMEDKQ

SEQ ID NO: 29621 - protein, 59 aa, Homo sapiens; identical to SEQ ID NO: 29617
  Payload ID: 5781
  Gene Symbol: FAM150B
  Gene Name: family with sequence similarity 150, member B
  ENSP ID: ENSP00000385672

SEQ ID NO: 29622 - protein, 151 aa, Homo sapiens
  Payload ID: 5781
  Gene Symbol: FAM150B
  Gene Name: family with sequence similarity 150, member B
  ENSP ID: ENSP00000389939
MRGPGHPLLLGLLLVLGAAGRGRGGAEPREPADGQALLRLVVELVQELRKHHSAEHKGLQLLGRDCALGRAEAAGLGPSPEQRVEIVPRDLRMKDKFLKHLTGPLYFSPKCSKHFHRLYHNTRDCTIPAYYKRCARLLTRLAVSPVCMEDK

SEQ ID NO: 29623 - protein, 91 aa, Homo sapiens
  Payload ID: 5781
  Gene Symbol: FAM150B
  Gene Name: family with sequence similarity 150, member B
  Uniprot ID: Q6UX46
  ENSP ID: ENSP00000478180
MRGPGHPLLLGLLLVLGPSPEQRVEIVPRDLRMKDKFLKHLTGPLYFSPKCSKHFHRLYHNTRDCTIPAYYKRCARLLTRLAVSPVCMEDK

SEQ ID NO: 29624 - protein, 585 aa, Homo sapiens
  Payload ID: 5782
  Gene Symbol: FAM151A
  Gene Name: family with sequence similarity 151, member A
  Uniprot ID: Q8WW52
  ENSP ID: ENSP00000306888
MVCREQLSKNQVKWVFAGITCVSVVVIAAIVLAITLRRPGCELEACSPDADMLDYLLSLGQISRRDALEVTWYHAANSKKAMTAALNSNITVLEADVNVEGLGTANETGVPIMAHPPTIYSDNTLEQWLDAVLGSSQKGIKLDFKNIKAVGPSLDLLRQLTEEGKVRRPIWINADILKGPNMLISTEVNATQFLALVQEKYPKATLSPGWTTFYMSTSPNRTYTQAMVEKMHELVGGVPQRVTFPVRSSMVRAAWPHFSWLLSQSERYSLTLWQAASDPMSVEDLLYVRDNTAVHQVYYDIFEPLLSQFKQLALNATRKPMYYTGGSLIPLLQLPGDDGLNVEWLVPDVQGSGKTATMTLPDTEGMILLNTGLEGTVAENPVPIVHTPSGNILTLESCLQQLATHPGHWGIHLQIAEPAALRPSLALLARLSSLGLLHWPVWVGAKISHGSFSVPGHVAGRELLTAVAEVFPHVTVAPGWPEEVLGSGYREQLLTDMLELCQGLWQPVSFQMQAMLLGHSTAGAIGRLLASSPRATVTVEHNPAGGDYASVRTALLAARAVDRTRVYYRLPQGYHKDLLAHVGRN

SEQ ID NO: 29625 - protein, 398 aa, Homo sapiens
  Payload ID: 5782
  Gene Symbol: FAM151A
  Gene Name: family with sequence similarity 151, member A
  Uniprot ID: Q8WW52
  ENSP ID: ENSP00000360353
MVCREQLSKNQVKWVFAGITCVSVVVIAAIVLAITLRRPGCELEACSPDADMLDYLLSLGQISRRDALEVTWYHAANSKKAMTAALNSNITVLEADVNVEGLGTANETGVPIMAHPPTIYSDNTLEQWLDAVLGSSQKGIKLDFKNIKAVGPSLDLLRQLTEEGKVRRPIWINADILKGPNMLISTEVNATQFLALVQEKYPKATLSPGWTTFYMSTSPNRTYTQAMVEKMHELVGGVPQRVTFPVRSSMVRAAWPHFSWLLSQSERYSLTLWQAASDPMSVEDLLYVRDNTAVHQVYYDIFEPLLLTDMLELCQGLWQPVSFQMQAMLLGHSTAGAIGRLLASSPRATVTVEHNPAGGDYASVRTALLAARAVDRTRVYYRLPQGYHKDLLAHVGRN

SEQ ID NO: 29626 - protein, 276 aa, Homo sapiens
  Payload ID: 5783
  Gene Symbol: FAM151B
  Gene Name: family with sequence similarity 151, member B
  Uniprot ID: Q6UXP7
  ENSP ID: ENSP00000282226
MAASAGGPGSWSENILEYFLRNSQITAEDGAEITWYHAANHKAQTNEALKSTAHMIEADVLLPSDGSEHSQPIMAHPPETNSDNTLQEWLTEVMKSNKGIKLDFKSLAVVEPSMMLLENVKRHLKRPVWINADILPGPNGNSKVIDAKPFLDTVISFFPDVTFSLGWTTGWHPEKVNEGYSWTMVKEMEYICNELSQPVTFPVRAALVRQSCSQLLWLLKKSNRYSLTIWTGKNDNYSVEDLLYIRDHFDKKQVFYDILEPQNHEFKQAIGIKVNL

SEQ ID NO: 29627 - protein, 67 aa, Homo sapiens
  Payload ID: 5783
  Gene Symbol: FAM151B
  Gene Name: family with sequence similarity 151, member B
  ENSP ID: ENSP00000427035
MAASAGGPGSWSENILEYFLRNSQITAEDGAEITWYHAANHKAQTNEALKKTRFHRVGQTGLELLTS

SEQ ID NO: 29628 - protein, 310 aa, Homo sapiens
  Payload ID: 5784
  Gene Symbol: FAM153A
  Gene Name: family with sequence similarity 153, member A
  Uniprot ID: Q9UHL3
  ENSP ID: ENSP00000353887
MVDKDTERDIEMKRQLRRLRELHLYSTWKKYQEAMKTSLGVPQCERDEGSLGKPLCPPEILSETLPGSVKKRVCFPSEDHLEEFIAEHLPEASNQSLLTVAHADAGTQTNGDLEDLEEHGPGQTVSEEATEVHTMEGDPDTLAEFLIRDVLQELSSYNGEEEDPEEVKTSLGVPQRGDLEDLEEHVPGQTVSEEATGVHMMQVDPATLAKSDLEDLEEHVPEQTVSEEATGVHMMQVDPATLAKQLEDSTITGSHQQMSASPSSAPAEEATEKTKVEEEVKTRKPKKKTRKPSKKSRWNVLKCWDIFNIF

SEQ ID NO: 29629 - protein, 114 aa, Homo sapiens
  Payload ID: 5784
  Gene Symbol: FAM153A
  Gene Name: family with sequence similarity 153, member A
  ENSP ID: ENSP00000377153
MVDKDTERDIEMKRQLRRLRELHLYSTWKKYQEAMKTSLGVPQRGDLEDLEEHVPGQTVSEEATGVHMMQVDPATLAKQLEDSTITGSHQQMSASPSSAPAEEATEKTKVEEEV

SEQ ID NO: 29630 - protein, 310 aa, Homo sapiens; identical to SEQ ID NO: 29628
  Payload ID: 5784
  Gene Symbol: FAM153A
  Gene Name: family with sequence similarity 153, member A
  Uniprot ID: Q9UHL3
  ENSP ID: ENSP00000411506

SEQ ID NO: 29631 - protein, 129 aa, Homo sapiens [sequence omitted]

SEQ ID NO: 29632 - protein, 310 aa, Homo sapiens; identical to SEQ ID NO: 29628
  Payload ID: 5784
  Gene Symbol: FAM153A
  Gene Name: family with sequence similarity 153, member A
  Uniprot ID: Q9UHL3
  ENSP ID: ENSP00000422174

SEQ ID NO: 29633 - protein, 119 aa, Homo sapiens
  Payload ID: 5784
  Gene Symbol: FAM153A
  Gene Name: family with sequence similarity 153, member A
  ENSP ID: ENSP00000423766
MGCVYSCCLEDYDEDLVQEASSEDVLGVHMVDKDTERDIEMKRQLRRLRELHLYSTWKKYQEAMKTSLGVPQCERDEGSLGKPLCPPEILSETLPGSVKKRVCFPSEDHLEEFIAEHLP

SEQ ID NO: 29634 - protein, 41 aa, Homo sapiens
  Payload ID: 5784
  Gene Symbol: FAM153A
  Gene Name: family with sequence similarity 153, member A
  ENSP ID: ENSP00000424904
MGCVYSCCLEVCCGEDEIVYPRMPGESTVCHREREKPITYH

SEQ ID NO: 29635 - protein, 24 aa, Homo sapiens
  Payload ID: 5784
  Gene Symbol: FAM153A
  Gene Name: family with sequence similarity 153, member A
  ENSP ID: ENSP00000425021
MVDKDTERDSTYSGITPMLRKNSS

SEQ ID NO: 29636 - protein, 35 aa, Homo sapiens
  Payload ID: 5784
  Gene Symbol: FAM153A
  Gene Name: family with sequence similarity 153, member A
  ENSP ID: ENSP00000425931
MGCVYSCCLEDYDEDLVQEASSEDVLGVHMCFVFL

SEQ ID NO: 29637 - protein, 144 aa, Homo sapiens
  Payload ID: 5784
  Gene Symbol: FAM153A
  Gene Name: family with sequence similarity 153, member A
  ENSP ID: ENSP00000426689
MVDKDTERDIEMKRQLRRLRELHLYSTWKKYQEAMKTSLGVPQRGDLEDLEEHVPGQTVSEEATGVHMMQVDPATLAKKLEDSTITGSHQQMSASPSSAPAEEATEKTKVEEEVKTRKPKKKTRKPSKKSRWNVLKCWDIFNIF

SEQ ID NO: 29638 - protein, 387 aa, Homo sapiens
  Payload ID: 5784
  Gene Symbol: FAM153A
  Gene Name: family with sequence similarity 153, member A
  ENSP ID: ENSP00000481950
MGCVYSCCLEVCCGEDEIVYPRMPGESTVCHREREKPITYHWYHWHPGHIYPRIASMEDYDEDLVQEASSEDVLGVHMVDKDTERDIEMKRQLRRLRELHLYSTWKKYQEAMKTSLGVPQCERDEGSLGKPLCPPEILSETLPGSVKKRVCFPSEDHLEEFIAEHLPEASNQSLLTVAHADAGTQTNGDLEDLEEHGPGQTVSEEATEVHTMEGDPDTLAEFLIRDVLQELSSYNGEEEDPEEVKTSLGVPQRGDLEDLEEHVPGQTVSEEATGVHMMQVDPATLAKSDLEDLEEHVPEQTVSEEATGVHMMQVDPATLAKQLEDSTITGSHQQMSASPSSAPAEEATEKTKVEEEVKTRKPKKKTRKPSKKSRWNVLKCWDIFNIF

SEQ ID NO: 29639 - protein, 387 aa, Homo sapiens
  Payload ID: 5785
  Gene Symbol: FAM153B
  Gene Name: family with sequence similarity 153, member B
  Uniprot ID: P0C7A2
  ENSP ID: ENSP00000253490
MGCAYSCCLEVCCGEDEIVYPRMPGESTVCHREREKPITYHWYHWHPGHIYPRVASMEDYDEDLVQEASSEDVLGVHMVDKDTERDIEMKRQLRRLRELHLYSTWKKYQEAMKTSLGVPQCERDEGSLGKPLCPPEILSETLPGSVKKRVCFPSEDHLEEFIAEHLPEASNQSLLTVAHADTGIQTNGDLEDLEEHGPGQTVSEEATEVHMMEGDPDTLAELLIRDVLQELSSYNGEEEDPEEVKTSLGVPQRGDLEDLEEHVPGQTVSEEATGVHMMQVDPATPAKSDLEDLEEHVPGQTVSEEATGVHMMQVDPATLAKQLEDSTITGSHQQMSASPSSAPAEEATEKTKVEEEVKTRKPKKKTRKPSKKSRWNVLKCWDIFNIF

SEQ ID NO: 29640 - protein, 310 aa, Homo sapiens
  Payload ID: 5785
  Gene Symbol: FAM153B
  Gene Name: family with sequence similarity 153, member B
  ENSP ID: ENSP00000424849
MVDKDTERDIEMKRQLRRLRELHLYSTWKKYQEAMKTSLGVPQCERDEGSLGKPLCPPEILSETLPGSVKKRVCFPSEDHLEEFIAEHLPEASNQSLLTVAHADTGIQTNGDLEDLEEHGPGQTVSEEATEVHMMEGDPDTLAELLIRDVLQELSSYNGEEEDPEEVKTSLGVPQRGDLEDLEEHVPGQTVSEEATGVHMMQVDPATPAKSDLEDLEEHVPGQTVSEEATGVHMMQVDPATLAKQLEDSTITGSHQQMSASPSSAPAEEATEKTKVEEEVKTRKPKKKTRKPSKKSRWNVLKCWDIFNIF

SEQ ID NO: 29641 - protein, 310 aa, Homo sapiens; identical to SEQ ID NO: 29640
  Payload ID: 5785
  Gene Symbol: FAM153B
  Gene Name: family with sequence similarity 153, member B
  ENSP ID: ENSP00000427684

SEQ ID NO: 29642 - protein, 133 aa, Homo sapiens
  Payload ID: 5785
  Gene Symbol: FAM153B
  Gene Name: family with sequence similarity 153, member B
  ENSP ID: ENSP00000453011
MKRQLRRLRELHLYSTWKKYQEAMKTSLGVPQCERDEGSLGKPLCPPEILSETLPGSVKKRVCFPSEDHLEEFIAEHLPEASNQSLLTVAHADTGIQTNGDLEDLEEHGPGQTVSEEATEVHMMEGDPDTLAE

SEQ ID NO: 29643 - protein, 310 aa, Homo sapiens; identical to SEQ ID NO: 29640
  Payload ID: 5785
  Gene Symbol: FAM153B
  Gene Name: family with sequence similarity 153, member B
  ENSP ID: ENSP00000453424

SEQ ID NO: 29644 - protein, 144 aa, Homo sapiens
  Payload ID: 5785
  Gene Symbol: FAM153B
  Gene Name: family with sequence similarity 153, member B
  ENSP ID: ENSP00000453712
MVDKDTERDIEMKRQLRRLRELHLYSTWKKYQEAMKTSLGVPQRGDLEDLEEHVPGQTVSEEATGVHMMQVDPATPAKKLEDSTITGSHQQMSASPSSAPAEEATEKTKVEEEVKTRKPKKKTRKPSKKSRWNVLKCWDIFNIF

SEQ ID NO: 29645 - protein, 144 aa, Homo sapiens; identical to SEQ ID NO: 29644
  Payload ID: 5785
  Gene Symbol: FAM153B
  Gene Name: family with sequence similarity 153, member B
  ENSP ID: ENSP00000481297

SEQ ID NO: 29646 - protein, 114 aa, Homo sapiens
  Payload ID: 5786
  Gene Symbol: FAM153C
  Gene Name: family with sequence similarity 153, member C
  Uniprot ID: Q494X1
  ENSP ID: ENSP00000381177
MVDKDTERDIEMKRQLRRLRELHLYSTWKKYQEAMKTSLGVPQRGDLEDLEEHLPGQTVSEEATGVHMMQVDPATPAKKLEDSTITGSHQQMSASPSSAPAEEATEKTKVEEEV

SEQ ID NO: 29647 - protein, 176 aa, Homo sapiens
  Payload ID: 5786
  Gene Symbol: FAM153C
  Gene Name: family with sequence similarity 153, member C
  ENSP ID: ENSP00000422293
MGCAYSCCLEVCCGKDEIVYPRMPGESTVCHREREKPITYHWYHWHPGHIYPRVASMEDYDEDLVQEASSEDVLGVHMVDKDTERDIEMKRQLRRLRELHLYSTWKKYQEAMKTSLGVPQRGDLEDLEEHLPGQTVSEEATGVHMMQVDPATPAKKLEDSTITGSHQQMSASPSSA

SEQ ID NO: 29648 - protein, 39 aa, Homo sapiens
  Payload ID: 5786
  Gene Symbol: FAM153C
  Gene Name: family with sequence similarity 153, member C
  ENSP ID: ENSP00000423403
MVDKDTERDIEMKRQLRRLRELHLYSTWKKYQEAMKTSL

SEQ ID NO: 29649 - protein, 144 aa, Homo sapiens
  Payload ID: 5786
  Gene Symbol: FAM153C
  Gene Name: family with sequence similarity 153, member C
  Uniprot ID: Q494X1
  ENSP ID: ENSP00000424623
MVDKDTERDIEMKRQLRRLRELHLYSTWKKYQEAMKTSLGVPQRGDLEDLEEHLPGQTVSEEATGVHMMQVDPATPAKKLEDSTITGSHQQMSASPSSAPAEEATEKTKVEEEVKTRKPKKKTRKPSKKSRWNVLKCWDIFNIF

SEQ ID NO: 29650 - protein, 173 aa, Homo sapiens
  Payload ID: 5786
  Gene Symbol: FAM153C
  Gene Name: family with sequence similarity 153, member C
  ENSP ID: ENSP00000426621
MGCAYSCCLEDYDEDLVQEASSEDVLGVHMVDKDTERDIEMKRQLRRLRELHLYSTWKKYQEAMKTSLGVPQRGDLEDLEEHLPGQTVSEEATGVHMMQVDPATPAKKLEDSTITGSHQQMSASPSSAPAEEATEKTKVEEEVKTRKPKKKTRKPSKKSRWNVLKCWDIFNIF

SEQ ID NO: 29651 - protein, 144 aa, Homo sapiens; identical to SEQ ID NO: 29649
  Payload ID: 5786
  Gene Symbol: FAM153C
  Gene Name: family with sequence similarity 153, member C
  Uniprot ID: Q494X1
  ENSP ID: ENSP00000481919

SEQ ID NO: 29652 - protein, 458 aa, Homo sapiens
  Payload ID: 5787
  Gene Symbol: FAM155A
  Gene Name: family with sequence similarity 155, member A
  Uniprot ID: B1AL88
  ENSP ID: ENSP00000365080
MTRGAWMCRQYDDGLKIWLAAPRENEKPFIDSERAQKWRLSLASLLFFTVLLSDHLWFCAEAKLTRARDKEHQQQQRQQQQQQQQQRQRQQQQQQRRQQEPSWPALLASMGESSPAAQAHRLLSASSSPTLPPSPGDGGGGGGKGNRGKDDRGKALFLGNSAKPVWRLETCYPQGASSGQCFTVENADAVCARNWSRGAAGGDGQEVRSKHPTPLWNLSDFYLSFCNSYTLWELFSGLSSPNTLNCSLDVVLKEGGEMTTCRQCVEAYQDYDHHAQEKYEEFESVLHKYLQSEEYSVKSCPEDCKIVYKAWLCSQYFEVTQFNCRKTIPCKQYCLEVQTRCPFILPDNDEVIYGGLSSFICTGLYETFLTNDEPECCDVRREEKSNNPSKGTVEKSGSCHRTSLTVSSATRLCNSRLKLCVLVLILLHTVLTASAAQNTAGLSFGGINTLEENSTNEE

SEQ ID NO: 29653 - protein, 472 aa, Homo sapiens
  Payload ID: 5788
  Gene Symbol: FAM155B
  Gene Name: family with sequence similarity 155, member B
  Uniprot ID: O75949
  ENSP ID: ENSP00000252338
MFRGAWMWPGKDAAALTICCCCCCWAPRPSDKPCADSERAQRWRLSLASLLFFTVLLADHLWLCAGARPRARELSSAMRPPWGAGRERQPVPPRAVLPLPPPPPGEPSAPPGTCGPRYSNLTKAAPAAGSRPVCGGVPEPTGLDAACTKLQSLQRLFEPTTPAPPLRPPDSLSRAPAEFPSAKKNLLKGHFRNFTLSFCDTYTVWDLLLGMDRPDSLDCSLDTLMGDLLAVVASPGSGAWEACSNCIEAYQRLDRHAQEKYDEFDLVLHKYLQAEEYSIRSCTKGCKAVYKAWLCSEYFSVTQQECQRWVPCKQYCLEVQTRCPFILPDNEEMVYGGLPGFICTGLLDTSPKRLETKCCDVQWVSCEAKKKKFKESEAPKTHQQQFHHSYFHHYHQQYHHYHPHHDPPGRVSNKPALLPVSGGSRLSPSRIRLCVLVLMLLHTVVSFSSNQGGGGLGLETLPALEEGLTREE

SEQ ID NO: 29654 - protein, 213 aa, Homo sapiens
  Payload ID: 5789
  Gene Symbol: FAM156A
  Gene Name: family with sequence similarity 156, member A
  Uniprot ID: Q8NDB6
  ENSP ID: ENSP00000471676
MDPLQKRNPASPSKSSPMTAAETSQEGPAPSQPSYSEQPMMGLSNLSPGPGPSQAVPLPEGLLRQRYREEKTLEERRWERLEFLQRKKAFLRHVRRRHRDHMAPYAVGREARISPLGDRSQNRFRCECRYCQSHRPNLSGIPGESNRAPHPSSWETLVQGLSGLTLSLGTNQPGPLPEAALQPQETEEKRQRERQQESKIMFQRLLKQWLEEN

SEQ ID NO: 29655 - protein, 38 aa, Homo sapiens
  Payload ID: 5789
  Gene Symbol: FAM156A
  Gene Name: family with sequence similarity 156, member A
  ENSP ID: ENSP00000477905
MDPLQKRNPASPSKSSPMTAAETSQEGPAPSQPSYSEQ

SEQ ID NO: 29656 - protein, 213 aa, Homo sapiens; identical to SEQ ID NO: 29654
  Payload ID: 5789
  Gene Symbol: FAM156A
  Gene Name: family with sequence similarity 156, member A
  Uniprot ID: Q8NDB6
  ENSP ID: ENSP00000479184

SEQ ID NO: 29657 - protein, 111 aa, Homo sapiens
  Payload ID: 5789
  Gene Symbol: FAM156A
  Gene Name: family with sequence similarity 156, member A
  ENSP ID: ENSP00000479338
MDPLQKRNPASPSKSSPMTAAETSQEGPAPSQPSYSEQPMMGLSNLSPGPGPSQAVPLPEGLLRQRYREEKTLEERRWERLEFLQRKKAFLRHVRRRHRDHMAPYAVGREA

SEQ ID NO: 29658 - protein, 184 aa, Homo sapiens
  Payload ID: 5789
  Gene Symbol: FAM156A
  Gene Name: family with sequence similarity 156, member A
  ENSP ID: ENSP00000479348
MDPLQKRNPASPSKSSPMTAAETSQEGPAPSQPSYSEQPMMGLSNLSPGPGPSQAVPLPEGLLRQRYREEKTLEERRWERLEFLQRKKAFLRHVRRRHRDHMAPYAVGREARISPLGDRSQNRFRCECRYCQSHRPNLSGIPGESNRAPHPSSWETLVQGLSGLTLSLGTNQPGPLPEAALQPQ

SEQ ID NO: 29659 - protein, 4 aa, Homo sapiens
  Payload ID: 5789
  Gene Symbol: FAM156A
  Gene Name: family with sequence similarity 156, member A
  ENSP ID: ENSP00000479822
MDPL

SEQ ID NO: 29660 - protein, 213 aa, Homo sapiens; identical to SEQ ID NO: 29654
  Payload ID: 5789
  Gene Symbol: FAM156A
  Gene Name: family with sequence similarity 156, member A
  Uniprot ID: Q8NDB6
  ENSP ID: ENSP00000480373

SEQ ID NO: 29661 - protein, 213 aa, Homo sapiens; identical to SEQ ID NO: 29654
  Payload ID: 5789
  Gene Symbol: FAM156A
  Gene Name: family with sequence similarity 156, member A
  Uniprot ID: Q8NDB6
  ENSP ID: ENSP00000480518

SEQ ID NO: 29662 - protein, 213 aa, Homo sapiens; identical to SEQ ID NO: 29654
  Payload ID: 5789
  Gene Symbol: FAM156A
  Gene Name: family with sequence similarity 156, member A
  Uniprot ID: Q8NDB6
  ENSP ID: ENSP00000481435

SEQ ID NO: 29663 - protein, 131 aa, Homo sapiens
  Payload ID: 5789
  Gene Symbol: FAM156A
  Gene Name: family with sequence similarity 156, member A
  ENSP ID: ENSP00000481568
MDPLQKRNPASPSKSSPMTAAETSQEGPAPSQPSYSEQPMMGLSNLSPGPGPSQAVPLPEGLLRQRYREEKTLEERRWERLEFLQRKKAFLRHVRRRHRDHMAPYAVGREARISPLGDRSQNRFRCECRYC

SEQ ID NO: 29664 - protein, 213 aa, Homo sapiens; identical to SEQ ID NO: 29654
  Payload ID: 5789
  Gene Symbol: FAM156A
  Gene Name: family with sequence similarity 156, member A
  Uniprot ID: Q8NDB6
  ENSP ID: ENSP00000482142

SEQ ID NO: 29665 - protein, 82 aa, Homo sapiens
  Payload ID: 5789
  Gene Symbol: FAM156A
  Gene Name: family with sequence similarity 156, member A
  ENSP ID: ENSP00000482562
MDPLQKRNPASPSKSSPMTAAETSQEGPAPSQPSYSEQPMMGLSNLSPGPGPSQAVPLPEGLLRQRYREEKTLEERRWERLE

SEQ ID NO: 29666 - protein, 56 aa, Homo sapiens
  Payload ID: 5789
  Gene Symbol: FAM156A
  Gene Name: family with sequence similarity 156, member A
  ENSP ID: ENSP00000482980
MDPLQKRNPASPSKSSPMTAAETSQEGPAPSQPSYSEQPMMGLSNLSPGPGPSQAV

SEQ ID NO: 29667 - protein, 213 aa, Homo sapiens; identical to SEQ ID NO: 29654
  Payload ID: 5789
  Gene Symbol: FAM156A
  Gene Name: family with sequence similarity 156, member A
  Uniprot ID: Q8NDB6
  ENSP ID: ENSP00000484167

SEQ ID NO: 29668 - protein, 3 aa, Homo sapiens
  Payload ID: 5789
  Gene Symbol: FAM156A
  Gene Name: family with sequence similarity 156, member A
  ENSP ID: ENSP00000484486
MDP

SEQ ID NO: 29669 - protein, 126 aa, Homo sapiens
  Payload ID: 5789
  Gene Symbol: FAM156A
  Gene Name: family with sequence similarity 156, member A
  ENSP ID: ENSP00000484757
MDPLQKRNPASPSKSSPMTAAETSQEGPAPSQPSYSEQPMMGLSNLSPGPGPSQAVPLPEGLLRQRYREEKTLEERRWERLEFLQRKKAFLRHVRRRHRDHMAPYAVGREARISPLGDRSQNRFRC

SEQ ID NO: 29670 - protein, 35 aa, Homo sapiens
  Payload ID: 5789
  Gene Symbol: FAM156A
  Gene Name: family with sequence similarity 156, member A
  ENSP ID: ENSP00000484967
MDPLQKRNPASPSKSSPMTAAETSQEGPAPSQPSY

SEQ ID NO: 29671 - protein, 213 aa, Homo sapiens; identical to SEQ ID NO: 29654
  Payload ID: 5789
  Gene Symbol: FAM156A
  Gene Name: family with sequence similarity 156, member A
  Uniprot ID: Q8NDB6
  ENSP ID: ENSP00000485247

SEQ ID NO: 29672 - protein, 213 aa, Homo sapiens; identical to SEQ ID NO: 29654
  Payload ID: 5790
  Gene Symbol: FAM156B
  Gene Name: family with sequence similarity 156, member B
  Uniprot ID: Q8NDB6
  ENSP ID: ENSP00000422411

SEQ ID NO: 29673 - protein, 213 aa, Homo sapiens; identical to SEQ ID NO: 29654
  Payload ID: 5790
  Gene Symbol: FAM156B
  Gene Name: family with sequence similarity 156, member B
  Uniprot ID: Q8NDB6
  ENSP ID: ENSP00000424864

SEQ ID NO: 29674 - protein, 213 aa, Homo sapiens; identical to SEQ ID NO: 29654
  Payload ID: 5790
  Gene Symbol: FAM156B
  Gene Name: family with sequence similarity 156, member B
  Uniprot ID: Q8NDB6
  ENSP ID: ENSP00000469248

SEQ ID NO: 29675 - protein, 56 aa, Homo sapiens; identical to SEQ ID NO: 29666
  Payload ID: 5790
  Gene Symbol: FAM156B
  Gene Name: family with sequence similarity 156, member B
  ENSP ID: ENSP00000478064

SEQ ID NO: 29676 - protein, 3 aa, Homo sapiens
  Payload ID: 5790
  Gene Symbol: FAM156B
  Gene Name: family with sequence similarity 156, member B
  ENSP ID: ENSP00000479752
MDP

SEQ ID NO: 29677 - protein, 129 aa, Homo sapiens
  Payload ID: 5790
  Gene Symbol: FAM156B
  Gene Name: family with sequence similarity 156, member B
  ENSP ID: ENSP00000482608
MDPLQKRNPASPSKSSPMTAAETSQEGPAPSQPSYSEQPMMGLSNLSPGPGPSQAVPLPEGLLRQRYREEKTLEERRWERLEFLQRKKAFLRHVRRRHRDHMAPYAVGREARISPLGDRSQNRFRCECR

SEQ ID NO: 29678 - protein, 213 aa, Homo sapiens; identical to SEQ ID NO: 29654
  Payload ID: 5790
  Gene Symbol: FAM156B
  Gene Name: family with sequence similarity 156, member B
  Uniprot ID: Q8NDB6
  ENSP ID: ENSP00000483008

SEQ ID NO: 29679 - protein, 49 aa, Homo sapiens
  Payload ID: 5790
  Gene Symbol: FAM156B
  Gene Name: family with sequence similarity 156, member B
  ENSP ID: ENSP00000484983
MDPLQKRNPASPSKSSPMTAAETSQEGPAPSQPSYSEQPMMGLSNLSPG

SEQ ID NO: 29680 - protein, 190 aa, Homo sapiens
  Payload ID: 5791
  Gene Symbol: FAM159A
  Gene Name: family with sequence similarity 159, member A
  Uniprot ID: Q6UWV7
  ENSP ID: ENSP00000429726
MSGACTSYVSAEQEVVRGFSCPRPGGEAAAVFCCGFRDHKYCCDDPHSFFPYEHSYMWWLSIGALIGLSVAAVVLLAFIVTACVLCYLFISSKPHTKLDLGLSLQTAGPEEVSPDCQGVNTGMAAEVPKVSPLQQSYSCLNPQLESNEGQAVNSKRLLHHCFMATVTTSDIPGSPEEASVPNPDLCGPVP

SEQ ID NO: 29681 - protein, 160 aa, Homo sapiens
  Payload ID: 5792
  Gene Symbol: FAM159B
  Gene Name: family with sequence similarity 159, member B
  Uniprot ID: A6NKW6
  ENSP ID: ENSP00000373726
MSEASRLCSGYYSLNQSFVEPFQCPRRGEGAALQYCCGFADLKYCCSEPGSYFPYKHSYMWSLSIGALIGLGIAALVLLAFVISVCVLCYLFLYTKPQRLDTGLKLQHLEASSTQEGKSNGKTKALNSNAASNATNETYYEADDIIQEKTMDATQIHIAY

SEQ ID NO: 29682 - protein, 70 aa, Homo sapiens
  Payload ID: 5792
  Gene Symbol: FAM159B
  Gene Name: family with sequence similarity 159, member B
  ENSP ID: ENSP00000426145
MSEASRLCSGYYSLNQSFVEPFQCPRRGEGAALQYCCGFADLKYCCSEPGSYFPYKHSYMWSLRSNLSVS

SEQ ID NO: 29683 - protein, 70 aa, Homo sapiens; identical to SEQ ID NO: 29682
  Payload ID: 5792
  Gene Symbol: FAM159B
  Gene Name: family with sequence similarity 159, member B
  ENSP ID: ENSP00000426194

SEQ ID NO: 29684 - protein, 1040 aa, Homo sapiens
  Payload ID: 5793
  Gene Symbol: FAM160A1
  Gene Name: family with sequence similarity 160, member A1
  Uniprot ID: Q05DH4
  ENSP ID: ENSP00000413196
MMSSVSTESKLQQAVSLQGVDPETCMIVFKNHWAQVVKILEKHDPLKNTQAKYGSIPPDEASAVQNYVEHMLFLLIEEQAKDAAMGPILEFVVSENIMEKLFLWSLRREFTDETKIEQLKMYEMLVTQSHQPLLHHKPILKPLMMLLSSCSGTTTPTVEEKLVVLLNQLCSILAKDPSILELFFHTSEDQGAANFLIFSLLIPFIHREGSVGQQARDALLFIMSLSAENTMVAHHIVENTYFCPVLATGLSGLYSSLPTKLEEKGEEWHCLLKDDWLLLPSLVQFMNSLEFCNAVIQVAHPLIRNQLVNYIYNGFLVPVLAPALHKVTVEEVMTTTAYLDLFLRSISEPALLEIFLRFILLHQHENVHILDTLTSRINTPFRLCVVSLALFRTLIGLHCEDVMLQLVLRYLIPCNHMMLSQRWAVKERDCYSVSAAKLLALTPVCCSSGITLTLGNQERDYILWSKCMHDTSGPVERPFPEAFSESACIVEYGKALDISYLQYLWEAHTNILRCMRDCRVWSALYDGDSPDPEMFLQSLTEEGSVSSACPVFGLPQQLPRKTGPQLAPRKDKSQTELEWDDSYDTGISSGADVGSPGPYDDLEVSGPPAPIDPPKHIQEMKKNALLLFKGSYIEESDFQDDVMVYRLCAEKDSEDMKDSQEEAARPPAEAQAEVQSVPINNGPLLSTQPETDSEEEWNRDNSDPFHSEPKEPKQEREPEAAPESNSELASPAPEAEHSSNLTAAHPESEELIAQYDQIIKELDSGAEGLMEQNYPTPDPLLLTKEEEGKEESKGEKEKEGKKELEDEEDDFDSFIAEMPAVETVPSPFVGRDEAAFASRHPVRTQSTPFTGPFISVVLSKLENMLENSLHVNLLLIGIITQLASYPQPLLRSFLLNTNMVFQPSVRSLYQVLASVKNKIEQFASVERDFPGLLIQAQQYLLFRVDMSDMTPAALTKDPIQEASRTGSGKNLLDGPPRVLQPFLTHRTKVAEAPPNLPLPVRNPMLAAALFPEFLKELAALAQEHSILCYKILGDFEDSCC

SEQ ID NO: 29685 - protein, 1040 aa, Homo sapiens; identical to SEQ ID NO: 29684
  Payload ID: 5793
  Gene Symbol: FAM160A1
  Gene Name: family with sequence similarity 160, member A1
  Uniprot ID: Q05DH4
  ENSP ID: ENSP00000421580

SEQ ID NO: 29686 - protein, 60 aa, Homo sapiens
  Payload ID: 5793
  Gene Symbol: FAM160A1
  Gene Name: family with sequence similarity 160, member A1
  ENSP ID: ENSP00000421948
MMSSVSTESKLQQAVSLQGVDPETCMIVFKNHWAQVVKILEKHDPLKNTQAKYGSIPPDE

SEQ ID NO: 29687 - protein, 40 aa, Homo sapiens
  Payload ID: 5793
  Gene Symbol: FAM160A1
  Gene Name: family with sequence similarity 160, member A1
  ENSP ID: ENSP00000424175
MMSSVSTESKLQQAVSLQGVDPETCMIVFKNHWAQVVKIL

SEQ ID NO: 29688 - protein, 13 aa, Homo sapiens
  Payload ID: 5793
  Gene Symbol: FAM160A1
  Gene Name: family with sequence similarity 160, member A1
  ENSP ID: ENSP00000425333
MMSSVSTESKLQQ

SEQ ID NO: 29689 - protein, 42 aa, Homo sapiens
  Payload ID: 5793
  Gene Symbol: FAM160A1
  Gene Name: family with sequence similarity 160, member A1
  ENSP ID: ENSP00000426677
MMSSVSTESKLQQAVSLQGVDPETCMIVFKNHWAQVVKILEK

SEQ ID NO: 29690 - protein, 986 aa, Homo sapiens
  Payload ID: 5794
  Gene Symbol: FAM160A2
  Gene Name: family with sequence similarity 160, member A2
  Uniprot ID: Q8N612
  ENSP ID: ENSP00000265978
MERMNWLSRLASRGPGHRIPQGANLQTPVMADPETCLMVFKNHWSQVVRILERQGPRAAPGGADDLSAVRNHTYQMLTLLAEDRAVPSAPTGPGPLLEFALHEDLLTRVLTWQLQWDELGDGVEERRAEQLKLFEMLVSEARQPLLRHGPVREALLTLLDACGRPVPSSPALDEGLVLLLSQLCVCVAQEPSLLEFFLQPPPEPGAAPRLLLFSRLVPFVHREGTLGQQARDALLLLMALSAGSPTVGRYIADHSYFCPVLATGLSALYSSLPRKIEVPGDDWHCLRREDWLGVPALALFMSSLEFCNAVIQVAHPLVQKQLVDYIHNGFLVPVMGPALHKTSVEEMIASTAYLELFLRSISEPALLRTFLRFLLLHRHDTHTILDTLVARIGSNSRLCMVSLSLFRTLLNLSCEDVLLQLVLRYLVPCNHVMLSQKPAVRDVDLYGRAADKFLSLIPRCCRHHAPSPPRPEHASWARGGPSRETGRREDITGPGSPSVDSSSVTTVPRPSTPSRLALFLRQQSLGGSESPGPAPCSPGLSASPASSPGRRPTPAEEPGELEDNYLEYLREARRGVDRCVRACRTWSAPYDGERPSPEPSPFGSRTKKRSLLPEEDRNNVGEGEEEELGRRGRAGGAGEGPGHLPPPQLNGVPGSWPEGAKKVRLVPKEGAGELLEGISEGMAGLEGFGQELRELEVALSNGGTGSESPLEPPLPLEEEEAYESFTCPPEPPGPFLSSPLRTLNQLPSQPFTGPFMAVLFAKLENMLQNSVYVNFLLTGLVAQLACHPQPLLRSFLLNTNMVFQPSVKSLLQVLGSVKNKIENFAASQEDFPALLSKAKKYLIARGKLDWAEGPAAGPAPRRSDPLVKSRRPSLGELLLRHAHSPTRARQAAQLVLQPGRDGAGLGLSGGSPGASTPVLLTRGGAPERQGEALRVKNAVYCAVIFPEFLKELAAISQAHAVTSPFLLETSEEGSGPLISGCGPLNP

SEQ ID NO: 29691 - protein, 972 aa, Homo sapiens
  Payload ID: 5794
  Gene Symbol: FAM160A2
  Gene Name: family with sequence similarity 160, member A2
  Uniprot ID: Q8N612
  ENSP ID: ENSP00000416918
MERMNWLSRLASRGPGHRIPQGANLQTPVMADPETCLMVFKNHWSQVVRILERQGPRAAPGGADDLSAVRNHTYQMLTLLAEDRAVPSAPTGPGPLLEFALHEDLLTRVLTWQLQWDELGDGVEERRAEQLKLFEMLVSEARQPLLRHGPVREALLTLLDACGRPVPSSPALDEGLVLLLSQLCVCVAQEPSLLEFFLQPPPEPGAAPRLLLFSRLVPFVHREGTLGQQARDALLLLMALSAGSPTVGRYIADHSYFCPVLATGLSALYSSLPRKIEVPGDDWHCLRREDWLGVPALALFMSSLEFCNAVIQVAHPLVQKQLVDYIHNGFLVPVMGPALHKTSVEEMIASTAYLELFLRSISEPALLRTFLRFLLLHRHDTHTILDTLVARIGSNSRLCMVSLSLFRTLLNLSCEDVLLQLVLRYLVPCNHVMLSQKPAVRDVDLYGRAADKFLSLIPRCCRHHAPSPPRPEHASWARGPGSPSVDSSSVTTVPRPSTPSRLALFLRQQSLGGSESPGPAPCSPGLSASPASSPGRRPTPAEEPGELEDNYLEYLREARRGVDRCVRACRTWSAPYDGERPSPEPSPFGSRTKKRSLLPEEDRNNVGEGEEEELGRRGRAGGAGEGPGHLPPPQLNGVPGSWPEGAKKVRLVPKEGAGELLEGISEGMAGLEGFGQELRELEVALSNGGTGSESPLEPPLPLEEEEAYESFTCPPEPPGPFLSSPLRTLNQLPSQPFTGPFMAVLFAKLENMLQNSVYVNFLLTGLVAQLACHPQPLLRSFLLNTNMVFQPSVKSLLQVLGSVKNKIENFAASQEDFPALLSKAKKYLIARGKLDWAEGPAAGPAPRRSDPLVKSRRPSLGELLLRHAHSPTRARQAAQLVLQPGRDGAGLGLSGGSPGASTPVLLTRGGAPERQGEALRVKNAVYCAVIFPEFLKELAAISQAHAVTSPFLLETSEEGSGPLISGCGPLNP

SEQ ID NO: 29692 - protein, 838 aa, Homo sapiens
  Payload ID: 5794
  Gene Symbol: FAM160A2
  Gene Name: family with sequence similarity 160, member A2
  ENSP ID: ENSP00000431773
MERMNWLSRLASRGPGHRIPQGANLQTPVMADPETCLMVFKNHWSQVVRILERQGPRAAPGGADDLSAVRNHTYQMLTLLAEDRAVPSAPTGPGPLLEFALHEDLLTRVLTWQLQWDELGDGVEERRAEQLKLFEMLVSEARQPLLRHGPVREALLTLLDACGRPVPSSPALDEGLVLLLSQLCVCVAQEPSLLEFFLQPPPEPGAAPRLLLFSRLVPFVHREGTLGQQARDALLLLMALSAGSPTVGRYIADHSYFCPVLATGLSALYSSLPRKIEVPGDDWHCLRREDWLGVPALALFMSSLEFCNAVIQVAHPLVQKQLVDYIHNGFLVPVMGPALHKTSVEEMIASTAYLELFLRSISEPALLRTFLRFLLLHRHDTHTILDTLVARIGSNSRLCMVSLSLFRTLLNLSCEDVLLQLVLRYLVPCNHVMLSQKPAVRDVDLYGRAADKFLSLIPRCCRHHAPSPPRPEHASWARGPGSPSVDSSSVTTVPRPSTPSRLALFLRQQSLGGSESPGPAPCSPGLSASPASSPGRRPTPAEEPGELEDNYLEYLREARRGVDRCVRACRTWSAPYDGERPSPEPSPFGSRTKKRSLLPEEDRNNVGEGEEEELGRRGRAGGAGEGPGHLPPPQLNGVPGSWPEGAKKVRLVPKEGAGELLEGISEGMAGLEGFGQELRELEVALSNGGTGSESPLEPPLPLEEEEAYESFTCPPEPPGPFLSSPLRTLNQLPSQPFTGKLLSLGLPFCVLFACSRHVCAGFLDLLAMSFLCTCLAPHPSCLHHFQIRVMSYLCPCVCLYVFHACAGLSIDLHLSLVCMSYVHVPPLSLVWPFPAICN

SEQ ID NO: 29693 - protein, 101 aa, Homo sapiens
  Payload ID: 5795
  Gene Symbol: FAM160B1
  Gene Name: family with sequence similarity 160, member B1
  ENSP ID: ENSP00000358249
MFSKFTSILQHAVEALAPSLPLQEDFVYHWKAITHYYIETSDDKAPVTDTNIPSHLEQMLDILVQEENERESGETGPCMEYLLHHKILETLYTLGKADVSS

SEQ ID NO: 29694 - protein, 765 aa, Homo sapiens
  Payload ID: 5795
  Gene Symbol: FAM160B1
  Gene Name: family with sequence similarity 160, member B1
  Uniprot ID: Q5W0V3
  ENSP ID: ENSP00000358251
MFSKFTSILQHAVEALAPSLPLQEDFVYHWKAITHYYIETSDDKAPVTDTNIPSHLEQMLDILVQEENERESGETGPCMEYLLHHKILETLYTLGKADCPPGMKQQVLVFYTKLLGRIRQPLLPHINVHRPVQKLIRLCGEVLATPTENEEIQFLCIVCAKLKQDPYLVNFFLENKMKSLASKGVPNVISEDTLKGQDSLSTDTGQSRQPEELSGATGMEQTELEDEPPHQMDHLSTSLDNLSVTSLPEASVVCPNQDYNLVNSLLNLTRSPDGRIAVKACEGLMLLVSLPEPAAAKCLTQSTCLCELLTDRLASLYKALPQSVDPLDIETVEAINWGLDSYSHKEDASAFPGKRALISFLSWFDYCDQLIKEAQKTAAVALAKAVHERFFIGVMEPQLMQTSEMGILTSTALLHRIVRQVTSDVLLQEMVFFILGEQREPETLAEISRHPLRHRLIEHCDHISDEISIMTLRMFEHLLQKPNEHILYNLVLRNLEERNYTEYKPLCPEDKDVVENGLIAGAVDLEEDPLFTDISPENTLPNQEWLSSSPPATPDHPKNDGKTEVHKIVNSFLCLVPDDAKSSYHVEGTGYDTYLRDAHRQFRDYCAICLRWEWPGSPKALEKCNLEAAFFEGHFLKVLFDRMGRILDQPYDVNLQVTSVLSRLSLFPHPHIHEYLLDPYVNLAPGCRSLFSVIVRVVGDLMLRIQRIQDFTPKLLLVRKRLLGLEPEGPIIDHITLLEGVIVLEEFCKELAAIAFVKYHASSTP

SEQ ID NO: 29695 - protein, 738 aa, Homo sapiens
  Payload ID: 5795
  Gene Symbol: FAM160B1
  Gene Name: family with sequence similarity 160, member B1
  Uniprot ID: Q5W0V3
  ENSP ID: ENSP00000358253
MFSKFTSILQHAVEALAPSLPLQEDFVYHWKAITHYYIETSDDKAPVTDTNIPSHLEQMLDILVQEENERESGETGPCMEYLLHHKILETLYTLGKADCPPGMKQQVLVFYTKLLGRIRQPLLPHINVHRPVQKLIRLCGEVLATPTENEEIQFLCIVCAKLKQDPYLVNFFLENKMKSLASKGVPNVISEDTLKGQDSLSTDTGQSRQPEELSGATGMEQTELEDEPPHQMDHLSTSLDNLSVTSLPEASVVCPNQDYNLVNSLLNLTRSPDGRIAVKACEGLMLLVSLPEPAAAKCLTQSTCLCELLTDRLASLYKALPQSVDPLDIETVEAINWGLDSYSHKEDASAFPGKRALISFLSWFDYCDQLIKEAQKTAAVALAKAVHERFFIGVMEPQLMQTSEMGILTSTALLHRIVRQVTSDVLLQEMVFFILGEQREPETLAEISRHPLRHRLIEHCDHISDEISIMTLRMFEHLLQKPNEHILYNLVLRNLEERNYTEYKPLCPEDKDVVENGLIAGAVDLEEDPLFTDISPENTLPNQEWLSSSPPATPDHPKNDGKTEVHKIVNSFLCLVPDDAKSSYHVEGTGYDTYLRDAHRQFRDYCAICLRWEWPGSPKALEKCNLEAAFFEGHFLKVLFDRMGRILDQPYDVNLQVTSVLSRLSLFPHPHIHEYLLDPYVNLAPGCRSLFSVIVRVVGDLMLRIQRIQDFTPKLLLVRKRLLGLEPEGPMQTLPSWW

SEQ ID NO: 29696 - protein, 83 aa, Homo sapiens
  Payload ID: 5795
  Gene Symbol: FAM160B1
  Gene Name: family with sequence similarity 160, member B1
  ENSP ID: ENSP00000411924
LSLFPHPHIHEYLLDPYVNLAPGCRSLFSVIVRVVGDLMLRIQRIQDFTPKLLLVRKRLLGLEPEGPISDLEPVEALTVSSIC

SEQ ID NO: 29697 - protein, 743 aa, Homo sapiens
  Payload ID: 5796
  Gene Symbol: FAM160B2
  Gene Name: family with sequence similarity 160, member B2
  Uniprot ID: Q86V87
  ENSP ID: ENSP00000289921
MLSRLGALLQEAVGAREPSIDLLQAFVEHWKGITHYYIESTDESTPAKKTDIPWRLKQMLDILVYEEQQQAAAGEAGPCLEYLLQHKILETLCTLGKAEYPPGMRQQVFQFFSKVLAQVQHPLLHYLSVHRPVQKLLRLGGTASGSVTEKEEVQFTTVLCSKIQQDPELLAYILEGKKIVGRKKACGEPTALPKDTTSHGDKDCSHDGAPARPQLDGESCGAQALNSHMPAETEELDGGTTESNLITSLLGLCQSKKSRVALKAQENLLLLVSMASPAAATYLVQSSACCPAIVRHLCQLYRSMPVFLDPADIATLEGISWRLPSAPSDEASFPGKEALAAFLGWFDYCDHLITEAHTVVADALAKAVAENFFVETLQPQLLHVSEQSILTSTALLTAMLRQLRSPALLREAVAFLLGTDRQPEAPGDNPHTLYAHLIGHCDHLSDEISITTLRLFEELLQKPHEGIIHSLVLRNLEGRPYVAWGSPEPESYEDTLDLEEDPYFTDSFLDSGFQTPAKPRLAPATSYDGKTAVTEIVNSFLCLVPEEAKTSAFLEETGYDTYVHDAYGLFQECSSRVASWGWPLTPTPLDPHEPERPFFEGHFLRVLFDRMSRILDQPYSLNLQVTSVLSRLALFPHPHIHEYLLDPYISLAPGCRSLFSVLVRVIGDLMQRIQRVPQFPGKLLLVRKQLTGQAPGEQLDHQTLLQGVVVLEEFCKELAAIAFVKFPPHDPRQNVSPAPEGQV

SEQ ID NO: 29698 - protein, 51 aa, Homo sapiens
  Payload ID: 5796
  Gene Symbol: FAM160B2
  Gene Name: family with sequence similarity 160, member B2
  ENSP ID: ENSP00000395477
MLSRLGALLQEAVGATTPGPCWGAGRPSRHPGTWEVQALPVQVPTKARAQH

SEQ ID NO: 29699 - protein, 743 aa, Homo sapiens; identical to SEQ ID NO: 29697
  Payload ID: 5796
  Gene Symbol: FAM160B2
  Gene Name: family with sequence similarity 160, member B2
  Uniprot ID: Q86V87
  ENSP ID: ENSP00000403288

SEQ ID NO: 29700 - protein, 75 aa, Homo sapiens
  Payload ID: 5797
  Gene Symbol: FAM161A
  Gene Name: family with sequence similarity 161, member A
  ENSP ID: ENSP00000303170
MATSHRVAKLVASSLQTPVNPITGARVAQYEREDPLKALAAAEAILEDEEEEKVAQPAGASRWGFTMLARLVSDS

SEQ ID NO: 29701 - protein, 716 aa, Homo sapiens
  Payload ID: 5797
  Gene Symbol: FAM161A
  Gene Name: family with sequence similarity 161, member A
  Uniprot ID: Q3B820
  ENSP ID: ENSP00000385158
MATSHRVAKLVASSLQTPVNPITGARVAQYEREDPLKALAAAEAILEDEEEEKVAQPAGASADLNTSFSGVDEHAPISYEDFVNFPDIHHSNEEYFKKVEELKAAHIETMAKLEKMYQDKLHLKEVQPVVIREDSLSDSSRSVSEKNSYHPVSLMTSFSEPDLGQSSSLYVSSSEEELPNLEKEYPRKNRMMTYAKELINNMWTDFCVEDYIRCKDTGFHAAEKRRKKRKEWVPTITVPEPFQMMIREQKKKEESMKSKSDIEMVHKALKKQEEDPEYKKKFRANPVPASVFLPLYHDLVKQKEERRRSLKEKSKEALLASQKPFKFIAREEQKRAAREKQLRDFLKYKKKTNRFKARPIPRSTYGSTTNDKLKEEELYRNLRTQLRAQEHLQNSSPLPCRSACGCRNPRCPEQAVKLKCKHKVRCPTPDFEDLPERYQKHLSEHKSPKLLTVCKPFDLHASPHASIKREKILADIEADEENLKETRWPYLSPRRKSPVRCAGVNPVPCNCNPPVPTVSSRGREQAVRRSLEEKKMLEEERNRILTKQKQRMKELQKLLTTRAKAYDSHQSLAQISKSRVKCLRKSEKERMREYQRELEEREEKLKKRPLLFERVAQKNARMAAEKHYSNTLKALGISDEFVSKKGQSGKVLEYFNNQETKSVTEDKESFNEEEKIEERENGEENYFIDTNSQDSYKEKDEANEESEEEKSVEESH

SEQ ID NO: 29702 - protein, 660 aa, Homo sapiens
  Payload ID: 5797
  Gene Symbol: FAM161A
  Gene Name: family with sequence similarity 161, member A
  Uniprot ID: Q3B820
  ENSP ID: ENSP00000385893
MATSHRVAKLVASSLQTPVNPITGARVAQYEREDPLKALAAAEAILEDEEEEKVAQPAGASADLNTSFSGVDEHAPISYEDFVNFPDIHHSNEEYFKKVEELKAAHIETMAKLEKMYQDKLHLKEVQPVVIREDSLSDSSRSVSEKNSYHPVSLMTSFSEPDLGQSSSLYVSSSEEELPNLEKEYPRKNRMMTYAKELINNMWTDFCVEDYIRCKDTGFHAAEKRRKKRKEWVPTITVPEPFQMMIREQKKKEESMKSKSDIEMVHKALKKQEEDPEYKKKFRANPVPASVFLPLYHDLVKQKEERRRSLKEKSKEALLASQKPFKFIAREEQKRAAREKQLRDFLKYKKKTNRFKARPIPRSTYGSTTNDKLKEEELYRNLRTQLRAQEHLQNSSPLPCRSACGCRNPRCPEQAVKLKCKHKVRCPTPDFEDLPERYQKHLSEHKSPKLLTVCKPFDLHASPHASIKREKILADIEADEENLKETRWPYLSPRRKSPVRCAGVNPVPCNCNPPVPTVSSRGREQAVRKSEKERMREYQRELEEREEKLKKRPLLFERVAQKNARMAAEKHYSNTLKALGISDEFVSKKGQSGKVLEYFNNQETKSVTEDKESFNEEEKIEERENGEENYFIDTNSQDSYKEKDEANEESEEEKSVEESH

SEQ ID NO: 29703 - protein, 142 aa, Homo sapiens
  Payload ID: 5797
  Gene Symbol: FAM161A
  Gene Name: family with sequence similarity 161, member A
  ENSP ID: ENSP00000396105
MATSHRVAKLVASSLQTPVNPITGARVAQYEREDPLKALAAAEAILEDEEEEKVAQPAGASADLNTSFSGVDEHAPISYEDFVNFPDIHHSNEEYFKKVEELKAAHIETMAKLEKMYQDKLHLKEVQPVVIREDSLSDSSRA

SEQ ID NO: 29704 - protein, 601 aa, Homo sapiens
  Payload ID: 5797
  Gene Symbol: FAM161A
  Gene Name: family with sequence similarity 161, member A
  ENSP ID: ENSP00000416861
  MOD_RES (1)..(1): Any amino acid
XRVAKLVASSLQTPVNPITGARVAQYEREDPLKALAAAEAILEDEEEEKVAQPAGASADLNTSFSGVDEHAPISYEDFVNFPDIHHSNEEYFKKVEELKAAHIETMAKLEKMYQDKLHLKEVQPVVIREDSLSDSSRSVSEKNSYHPVSLMTSFSEPDLGQSSSLYVSSSEEELPNLEKEYPRKNRMMTYAKELINNMWTDFCVEDYIRCKDTGFHAAEKRRKKRKEWVPTITVPEPFQMMIREQKKKEESMKSKSDIEMVHKALKKQEEDPEYKKKFRANPVPASVFLPLYHDLVKQKEERRRSLKEKSKEALLASQKPFKFIAREEQKRAAREKQLRDFLKYKKKTNRFKARPIPRSTYGSTTNDKLKEEELYRNLRTQLRAQEHLQNSSPLPCRSACGCRNPRCPEQAVKLKCKHKVRCPTPDFEDLPERYQKHLSEHKSPKLLTVCKPFDLHASPHASIKREKILADIEADEENLKETRWPYLSPRRKSPVRCAGVNPVPCNCNPPVPTVSSRGREQAVRRSLEEKKMLEEERNRILTKQKQRMKELQKLLTTRAKAYDSHQSLAQISKSRVKCLRPGAMAHACNPSTLRGQDRQIT

SEQ ID NO: 29705 - protein, 710 aa, Homo sapiens
  Payload ID: 5798
  Gene Symbol: FAM161B
  Gene Name: family with sequence similarity 161, member B
  Uniprot ID: Q96MY7
  ENSP ID: ENSP00000286544
MRGENRPIGKRTLPPRAGWIGGCPGSQPDAKARKGWTLAPHSSRCHRCCHYRCHCRCCLCPAEMTVGRPEGAPGGAEGSRQIFPPESFADTEAGEELSGDGLVLPRASKLDEFLSPEEEIDSTSDSTGSIYQNLQELKQKGRWCLLESLFQSDPESDENLSEDEEDLESFFQDKDRGMVQVQCPQALRCGSTRRCSSLNNLPSNIPRPQTQPPSGSRPPSQHRSVSSWASSITVPRPFRMTLREARKKAEWLGSPASFEQERQRAQRQGEEEAECHRQFRAQPVPAHVYLPLYQEIMERSEARRQAGIQKRKELLLSSLKPFSFLEKEEQLKEAARQRDLAATAEAKISKQKATRRIPKSILEPALGDKLQEAELFRKIRIQMRALDMLQMASSPIASSSNRANPQPRTATRTQQEKLGFLHTNFRFQPRVNPVVPDYEGLYKAFQRRAAKRRETQEATRNKPFLLRTANLRHPQRPCDAATTGRRQDSPQPPATPLPRSRSLSGLASLSANTLPVHITDATRKRESAVRSALEKKNKADESIQWLEIHKKKSQAMSKSVTLRAKAMDPHKSLEEVFKAKLKENRNNDRKRAKEYKKELEEMKQRIQTRPYLFEQVAKDLAKKEAEQWYLDTLKQAGLEEDFVRNKGQGTRAVQEKETKIKDFPRFQETTKLSIRDPEQGLEGSLEQPASPRKVLEELSHQSPENLVSLA

SEQ ID NO: 29706 - protein, 144 aa, Homo sapiens
  Payload ID: 5798
  Gene Symbol: FAM161B
  Gene Name: family with sequence similarity 161, member B
  ENSP ID: ENSP00000450889
  MOD_RES (1)..(1): Any amino acid
XNKADESIQWLEIHKKKSQAMSKSVTLRAKAMDPHKSLEEVFKAKLKENRNNDRKRAKEYKKELEEMKQRIQTRPYLFEQVAKDLAKKEAEQWYLDTLKQAGLEEDFVRNKGQGTRAVQEKETKIKDFPRCVFFGGDRVTITWA

SEQ ID NO: 29707 - protein, 144 aa, Homo sapiens
  Payload ID: 5799
  Gene Symbol: FAM162A
  Gene Name: family with sequence similarity 162, member A
  ENSP ID: ENSP00000232125
MRSCFRLCERDVSSSLRLTRSSDLKRINGFCTKPQESPGAPSRTYNRVPLHKPTDWQKKILIWSGRFKKEDEIPETVSLEMLDAAKNKMRVKISYLMIALTVVGCIFMVIEGKKAAQRHETLTSLNLEKKARLKEEAAMKAKTE

SEQ ID NO: 29708 - protein, 154 aa, Homo sapiens
  Payload ID: 5799
  Gene Symbol: FAM162A
  Gene Name: family with sequence similarity 162, member A
  Uniprot ID: Q96A26
  ENSP ID: ENSP00000419088
MGSLSGLRLAAGSCFRLCERDVSSSLRLTRSSDLKRINGFCTKPQESPGAPSRTYNRVPLHKPTDWQKKILIWSGRFKKEDEIPETVSLEMLDAAKNKMRVKISYLMIALTVVGCIFMVIEGKKAAQRHETLTSLNLEKKARLKEEAAMKAKTE

SEQ ID NO: 29709 - protein, 141 aa, Homo sapiens
  Payload ID: 5799
  Gene Symbol: FAM162A
  Gene Name: family with sequence similarity 162, member A
  ENSP ID: ENSP00000419491
MGSLSGLRLAAGSCFRLCERDVSSSLRLTRSSDLKRINGFCTKPQESPGAPSRTYNRVPLHKPTDWQKKILIWSGRFKKEDEIPETVSLEMLDAAKNKMRVKISYLMIALTVVGCIFMVIEGKKVRRGFFSIQYVCSPPRT

SEQ ID NO: 29710 - protein, 162 aa, Homo sapiens
  Payload ID: 5800
  Gene Symbol: FAM162B
  Gene Name: family with sequence similarity 162, member B
  Uniprot ID: Q5T6X4
  ENSP ID: ENSP00000357545
MLRAVGSLLRLGRGLTVRCGPGAPLEATRRPAPALPPRGLPCYSSGGAPSNSGPQGHGEIHRVPTQRRPSQFDKKILLWTGRFKSMEEIPPRIPPEMIDTARNKARVKACYIMIGLTIIACFAVIVSAKRAVERHESLTSWNLAKKAKWREEAALAAQAKAK

SEQ ID NO: 29711 - protein, 167 aa, Homo sapiens
  Payload ID: 5801
  Gene Symbol: FAM163A
  Gene Name: family with sequence similarity 163, member A
  Uniprot ID: Q96GL9
  ENSP ID: ENSP00000354891
MTAGTVVITGGILATVILLCIIAVLCYCRLQYYCCKKSGTEVADEEEEREHDLPTHPRGPTCNACSSQALDGRGSLAPLTSEPCSQPCGVAASHCTTCSPYSSPFYIRTADMVPNGGGGERLSFAPTYYKEGGPPSLKLAAPQSYPVTWPGSGREAFTNPRAISTDV

SEQ ID NO: 29712 - protein, 166 aa, Homo sapiens
  Payload ID: 5802
  Gene Symbol: FAM163B
  Gene Name: family with sequence similarity 163, member B
  Uniprot ID: P0C2L3
  ENSP ID: ENSP00000349336
MTAGTVVITGGILATVILLCIIAVLCYCRLQYYCCKKDESEEDEEEPDFAVHSHLPPLHSNRNLVLTNGPALYPTASTSFSQKSPQARALCRSCSHCEPPTFFLQEPPEEEEDVLNGGERVLYKSVSQEDVELPPGGFGGLQALNPNRLSAMREAFARSRSISTDV

SEQ ID NO: 29713 - protein, 166 aa, Homo sapiens; identical to SEQ ID NO: 29712
  Payload ID: 5802
  Gene Symbol: FAM163B
  Gene Name: family with sequence similarity 163, member B
  Uniprot ID: P0C2L3
  ENSP ID: ENSP00000419867

SEQ ID NO: 29714 - protein, 317 aa, Homo sapiens
  Payload ID: 5803
  Gene Symbol: FAM166A
  Gene Name: family with sequence similarity 166, member A
  Uniprot ID: Q6J272
  ENSP ID: ENSP00000344729
MTTTQKHDLFTPEPHYVPGYAGFFPQLRYQVGNTYGRTTGQLLTDPSVQKSPCSVLSPMSKPKFIEDFSQSKPPRVPCQDLTEPYIPHYTSLKPSKNFEILGQLPPLEVDAQEPPGVENIPRQILLPAGFTPDTPHPPCPPGRKGDSRDLGHPVYGEEAWKSATPVCEAPRQHQLYHCQRDEYPPPARRQQETLDVGSFQRLPQLDHPNLIQRKAISGYAGFIPRFTWVMGLNYRDGVMQAMDEFDKSQFLFRNPHCDLGEKLPGTHWPSNHIYSSQGLIPFYMGFIPAMQDNYALTFGNSTRRAYWKEWAKRNHTL

SEQ ID NO: 29715 - protein, 223 aa, Homo sapiens
  Payload ID: 5803
  Gene Symbol: FAM166A
  Gene Name: family with sequence similarity 166, member A
  ENSP ID: ENSP00000420741
MTTTQKHDLFTPEPHYVPGYAGFFPQLRYQVGNTYGRTTGQLLTDPSVQKSPCSVLSPMSKPKFIEDFSQSKPPRVPCQDLTEPYIPHYTSELPVPSPAPSCARLPVPALTGCPVGTGLKPSKNFEILGQLPPLEVDAQEPPGVENIPRQILLPAGFTPDTPHPPCPPGRKGDSRDLGHPVYGEEAWKSATPVCEAPRQHQLYHCQRDEYPPPARRQQETLDV

SEQ ID NO: 29716 - protein, 275 aa, Homo sapiens
  Payload ID: 5804
  Gene Symbol: FAM166B
  Gene Name: family with sequence similarity 166, member B
  Uniprot ID: A8MTA8
  ENSP ID: ENSP00000382646
MAVASTFIPGLNPQNPHYIPGYTGHCPLLRFSVGQTYGQVTGQLLRGPPGLAWPPVHRTLLPPIRPPRSPEVPRESLPVRRGQERLSSSMIPGYTGFVPRAQFIFAKNCSQVWAEALSDFTHLHEKQGSEELPKEAKGRKDTEKDQVPEPEGQLEEPTLEVVEQASPYSMDDRDPRKFFMSGFTGYVPCARFLFGSSFPVLTNQALQEFGQKHSPGSAQDPKHLPPLPRTYPQNLGLLPNYGGYVPGYKFQFGHTFGHLTHDALGLSTFQKQLLA

SEQ ID NO: 29717 - protein, 216 aa, Homo sapiens
  Payload ID: 5804
  Gene Symbol: FAM166B
  Gene Name: family with sequence similarity 166, member B
  Uniprot ID: A8MTA8
  ENSP ID: ENSP00000412746
MAVASTFIPGLNPQNPHYIPGYTGHCPLLRFSVGQTYGQVTGQLLRGPPGLAWPPVHRTLLPPIRPPRSPEVPRESLPVRRGQERLSSSMIPGYTGFVPRAQFIFAKNCSQVWAEALSDFTHLHEKQGSEELPKEAKGRKDTEKDQVPEPEGQLEEPTLEVVEQASPYSMDDRDPRKFFMSGTAGIWAEALTRQCPGPQTSPPTSQNIPSEPGSFT

SEQ ID NO: 29718 - protein, 259 aa, Homo sapiens
  Payload ID: 5804
  Gene Symbol: FAM166B
  Gene Name: family with sequence similarity 166, member B
  ENSP ID: ENSP00000480923
MAVASTFIPGLNPQNPHYIPGYTGHCPLLRFSVGQTYGQVTGQLLRGPPGLAWPPVHRTLLPPIRPPRSPEVPRESLPVRRGQERLSSSMIPGYTGFVPRAQFIFAKNCSQVWAEALSDFTHLHEKQGSEELPKEAKGRKDTEKDQVPEPEGQLEEPTLEVVEQASPYSMDDRDPRKFFMSAFLCSPTRHCRNLGRSTHQAVPRTPNISPHFPEHTLRTWVFYNYGGYVPGYKFQFGHTFGHLTHDALGLSTFQKQLLA

SEQ ID NO: 29719 - protein, 214 aa, Homo sapiens
  Payload ID: 5805
  Gene Symbol: FAM167A
  Gene Name: family with sequence similarity 167, member A
  Uniprot ID: Q96KS9
  ENSP ID: ENSP00000284486
MSVPQIHVEEVGAEEGAGAAAPPDDHLRSLKALTEKLRLETRRPSYLEWQARLEEHTWPFPRPAAEPQASLEEGERGGQEPLLPLREAGQHPPSARSASQGARPLSTGKLEGFQSIDEAIAWLRKELTEMRLQDQQLARQLMRLRGDINKLKIEHTCRLHRRMLNDATYELEERDELADLFCDSPLASSFSLSTPLKLIGVTKMNINSRRFSLC

SEQ ID NO: 29720 - protein, 91 aa, Homo sapiens
  Payload ID: 5805
  Gene Symbol: FAM167A
  Gene Name: family with sequence similarity 167, member A
  ENSP ID: ENSP00000431951
MSVPQIHVEEVGAEEGAGAAAPPDDHLRSLKALTEKLRLETRRPSYLEWQARLEEHTWPFPRPAAEPQASLEEGERGGQEPLLPLREAGQH

SEQ ID NO: 29721 - protein, 214 aa, Homo sapiens; identical to SEQ ID NO: 29719
  Payload ID: 5805
  Gene Symbol: FAM167A
  Gene Name: family with sequence similarity 167, member A
  Uniprot ID: Q96KS9
  ENSP ID: ENSP00000432232

SEQ ID NO: 29722 - protein, 214 aa, Homo sapiens; identical to SEQ ID NO: 29719
  Payload ID: 5805
  Gene Symbol: FAM167A
  Gene Name: family with sequence similarity 167, member A
  Uniprot ID: Q96KS9
  ENSP ID: ENSP00000436655

SEQ ID NO: 29723 - protein, 163 aa, Homo sapiens
  Payload ID: 5806
  Gene Symbol: FAM167B
  Gene Name: family with sequence similarity 167, member B
  Uniprot ID: Q9BTA0
  ENSP ID: ENSP00000362684
MSLGLLKFQAVGEEDEEDEEGESLDSVKALTAKLQLQTRRPSYLEWTAQVQSQAWRRAQAKPGPGGPGDICGFDSMDSALEWLRRELREMQAQDRQLAGQLLRLRAQLHRLKMDQACHLHQELLDEAELELELEPGAGLALAPLLRHLGLTRMNISARRFTLC

SEQ ID NO: 29724 - protein, 244 aa, Homo sapiens
  Payload ID: 5807
  Gene Symbol: FAM168A
  Gene Name: family with sequence similarity 168, member A
  Uniprot ID: Q92567
  ENSP ID: ENSP00000064778
MNPVYSPVQPGAPYGNPKNMAYTGYPTAYPAAAPAYNPSLYPTNSPSYAPEFQFLHSAYATLLMKQAWPQNSSSCGTEGTFHLPVDTGTENRTYQASSAAFRYTAGTPYKVPPTQSNTAPPPYSPSPNPYQTAMYPIRSAYPQQNLYAQGAYYTQPVYAAQPHVIHHTTVVQPNSIPSAIYPAPVAAPRTNGVAMGMVAGTTMAMSAGTLLTTPQHTAIGAHPVSMPTYRAQGTPAYSYVPPHW

SEQ ID NO: 29725 - protein, 235 aa, Homo sapiens
  Payload ID: 5807
  Gene Symbol: FAM168A
  Gene Name: family with sequence similarity 168, member A
  Uniprot ID: Q92567
  ENSP ID: ENSP00000348852
MNPVYSPVQPGAPYGNPKNMAYTGYPTAYPAAAPAYNPSLYPTNSPSYAPATLLMKQAWPQNSSSCGTEGTFHLPVDTGTENRTYQASSAAFRYTAGTPYKVPPTQSNTAPPPYSPSPNPYQTAMYPIRSAYPQQNLYAQGAYYTQPVYAAQPHVIHHTTVVQPNSIPSAIYPAPVAAPRTNGVAMGMVAGTTMAMSAGTLLTTPQHTAIGAHPVSMPTYRAQGTPAYSYVPPHW

SEQ ID NO: 29726 - protein, 129 aa, Homo sapiens
  Payload ID: 5807
  Gene Symbol: FAM168A
  Gene Name: family with sequence similarity 168, member A
  Uniprot ID: Q92567
  ENSP ID: ENSP00000390501
MNPVYSPVQPGAPYGNPKNMAYTGYPTAYPAAAPAYNPSLYPTNSPSYAPATLLMKQAWPQNSSSCGTEGTFHLPVDTGTENRTYQASSAAFSTLLTTPQHTAIGAHPVSMPTYRAQGTPAYSYVPPHW

SEQ ID NO: 29727 - protein, 195 aa, Homo sapiens
  Payload ID: 5808
  Gene Symbol: FAM168B
  Gene Name: family with sequence similarity 168, member B
  Uniprot ID: A1KXE4
  ENSP ID: ENSP00000374565
MNPVYSPGSSGVPYANAKGIGYPAGFPMGYAAAAPAYSPNMYPGANPTFQTGYTPGTPYKVSCSPTSGAVPPYSSSPNPYQTAVYPVRSAYPQQSPYAQQGTYYTQPLYAAPPHVIHHTTVVQPNGMPATVYPAPIPPPRGNGVTMGMVAGTTMAMSAGTLLTAHSPTPVAPHPVTVPTYRAPGTPTYSYVPPQW

SEQ ID NO: 29728 - protein, 195 aa, Homo sapiens; identical to SEQ ID NO: 29727
  Payload ID: 5808
  Gene Symbol: FAM168B
  Gene Name: family with sequence similarity 168, member B
  Uniprot ID: A1KXE4
  ENSP ID: ENSP00000387051

SEQ ID NO: 29729 - protein, 670 aa, Homo sapiens
  Payload ID: 5809
  Gene Symbol: FAM169A
  Gene Name: family with sequence similarity 169, member A
  Uniprot ID: Q9Y6X4
  ENSP ID: ENSP00000373808
MAFPVDMLENCSHEELENSAEDYMSDLRCGDPENPECFSLLNITIPISLSNVGFVPLYGGDQTQKILALFAPEDSLTAVALYLADQWWAIDDIVKTSVPSREGLKQVSTLGERVVLYVLNRIIYRKQEMERNEIPFLCHSSTDYAKILWKKGEAIGFYSVKPTGSICASFLTQSYQLPVLDTMFLRKKYRGKDFGLHMLEDFVDSFTEDALGLRYPLSSLMYTACKQYFEKYPGDHELLWEVEGVGHWYQRIPVTRALQREALKILALSQNEPKRPMSGEYGPASVPEYEARTEDNQSSEMQLTIDSLKDAFASTSEGHDKTSVSTHTRSGNLKRPKIGKRFQDSEFSSSQGEDEKTSQTSLTASINKLESTARPSESSEEFLEEEPEQRGIEFEDESSDRDARPALETQPQQEKQDGEKESELEPMNGEIMDDSLKTSLITEEEDSTSEVLDEELKLQPFNSSEDSTNLVPLVVESSKPPEVDAPDKTPRIPDSEMLMDEGTSDEKGHMEEKLSLLPRKKAHLGSSDNVATMSNEERSDGGFPNSVIAEFSEEPVSENLSPNTTSSLEDQGEEGVSEPQETSTALPQSSLIEVELEDVPFSQNAGQKNQSEEQSEASSEQLDQFTQSAEKAVDSSSEEIEVEVPVVDRRNLRRKAKGHKGPAKKKAKLT

SEQ ID NO: 29730 - protein, 86 aa, Homo sapiens
  Payload ID: 5809
  Gene Symbol: FAM169A
  Gene Name: family with sequence similarity 169, member A
  ENSP ID: ENSP00000421451
MAFPVDMLENCSHEELENSAEDYMSDLRCGDPENPECFSLLNITIPISLSNVGFVPLYGGDQTQKILALFAPEDSLTAVALYLADQ

SEQ ID NO: 29731 - protein, 222 aa, Homo sapiens
  Payload ID: 5809
  Gene Symbol: FAM169A
  Gene Name: family with sequence similarity 169, member A
  ENSP ID: ENSP00000423631
MAFPVDMLENCSHEELENSAEDYMSDLRCGDPENPECFSLLNITIPISLSNVGFVPLYGGDQTQKILALFAPEDSLTAVALYLADQWWAIDDIVKTSVPSREGLKQVSTLGERVVLYVLNRIIYRKQEMERNEIPFLCHSSTDYAKILWKKGEAIGFYSVKPTGSICASFLTQSYQLPVLDTMFLRKKYRGKDFGLHMLEDFVDSFTEDALGLRYPLSSLMY

SEQ ID NO: 29732 - protein, 175 aa, Homo sapiens
  Payload ID: 5809
  Gene Symbol: FAM169A
  Gene Name: family with sequence similarity 169, member A
  ENSP ID: ENSP00000423883
MAFPVDMLENCSHEELENSAEDYMSDLRCGDPENPECFSLLNITIPISLSNVGFVPLYGGDQTQKILALFAPEDSLTAVALYLADQWWAIDDIVKTSVPSREGLKQVSTLGERVVLYVLNRIIYRKQEMERNEIPFLCHSSTDYAKILWKKGEAIGFYSVKPTGSICASFLTQSY

SEQ ID NO: 29733 - protein, 127 aa, Homo sapiens
  Payload ID: 5809
  Gene Symbol: FAM169A
  Gene Name: family with sequence similarity 169, member A
  Uniprot ID: Q9Y6X4
  ENSP ID: ENSP00000423905
MAFPVDMLENCSHEELENSAEDYMSDLRCGDPENPECFSLLNITIPISLSNVGFVPLYGGDQTQKILALFAPEDSLTAVALYLADQWWAIDDIVKTSVPSREGLKQEAYVPLFLPKVTNCQFLIQCF

SEQ ID NO: 29734 - protein, 610 aa, Homo sapiens
  Payload ID: 5809
  Gene Symbol: FAM169A
  Gene Name: family with sequence similarity 169, member A
  ENSP ID: ENSP00000424578
MAFPVDMLENCSHEELENSAEDYMSDLRCGDPENPECFSLLNITIPISLSNVGFVPLYGGDQTQKILALFAPEDSLTAVALYLADQWWAIDDIVKTSVPSREGLKQVSTLGERVVLYVLNRIIYRKQEMERNEIPFLCHSSTDYAKILWKKGEAIGFYSVKPTACKQYFEKYPGDHELLWEVEGVGHWYQRIPVTRALQREALKILALSQNEPKRPMSGEYGPASVPEYEARTEDNQSSEMQLTIDSLKDAFASTSEGHDKTSVSTHTRSGNLKRPKIGKRFQDSEFSSSQGEDEKTSQTSLTASINKLESTARPSESSEEFLEEEPEQRGIEFEDESSDRDARPALETQPQQEKQDGEKESELEPMNGEIMDDSLKTSLITEEEDSTSEVLDEELKLQPFNSSEDSTNLVPLVVESSKPPEVDAPDKTPRIPDSEMLMDEGTSDEKGHMEEKLSLLPRKKAHLGSSDNVATMSNEERSDGGFPNSVIAEFSEEPVSENLSPNTTSSLEDQGEEGVSEPQETSTALPQSSLIEVELEDVPFSQNAGQKNQSEEQSEASSEQLDQFTQSAEKAVDSSSEEIEVEVPVVDRRNLRRKAKGHKGPAKKKAKLT

SEQ ID NO: 29735 - protein, 127 aa, Homo sapiens; identical to SEQ ID NO: 29733
  Payload ID: 5809
  Gene Symbol: FAM169A
  Gene Name: family with sequence similarity 169, member A
  Uniprot ID: Q9Y6X4
  ENSP ID: ENSP00000425319

SEQ ID NO: 29736 - protein, 191 aa, Homo sapiens
  Payload ID: 5810
  Gene Symbol: FAM169B
  Gene Name: family with sequence similarity 169, member B
  ENSP ID: ENSP00000332615
KVQSFGERVVLFILNAIIFGRLERNLDDDDMFFLPHSVKEQAKILWRRGAAVGFYTTKMKGRLCGDGTGACYLLPVFDTVFIRRKHWHRGLGTAMLRDFCETFPEDEALGVSCSMSPAMYQAHPGNSEDVSRHARTSQNDRPRQPAPGDGSKERMCGEELEDTKDDPECGVEEEDAGLAGQPPGKLTRSSP

SEQ ID NO: 29737 - protein, 192 aa, Homo sapiens
  Payload ID: 5810
  Gene Symbol: FAM169B
  Gene Name: family with sequence similarity 169, member B
  Uniprot ID: Q8N8A8
  ENSP ID: ENSP00000453554
MKVQSFGERVVLFILNAIIFGRLERNLDDDDMFFLPHSVKEQAKILWRRGAAVGFYTTKMKGRLCGDGTGACYLLPVFDTVFIRRKHWHRGLGTAMLRDFCETFPEDEALGVSCSMSPAMYQAHPGNSEDVSRHARTSQNDRPRQPAPGDGSKERMCGEELEDTKDDPECGVEEEDAGLAGQPPGKLTRSSP

SEQ ID NO: 29738 - protein, 329 aa, Homo sapiens
  Payload ID: 5811
  Gene Symbol: FAM170A
  Gene Name: family with sequence similarity 170, member A
  Uniprot ID: A1A519
  ENSP ID: ENSP00000334285
MKRRQKRKHLENEESQETAEKGGGMSKSQEDALQPGSTRVAKGWSQGVGEVTSTSEYCSCVSSSRKLIHSGIQRIHRDSPQPQSPLAQVQERGETPPRSQHVSLSSYSSYKTCVSSLCVNKEERGMKIYYMQVQMNKGVAVSWETEETLESLEKQPRMEEVTLSEVVRVGTPPSDVSTRNLLSDSEPSGEEKEHEERTESDSLPGSPTVEDTPRAKTPDWLVTMENGFRCMACCRVFTTMEALQEHVQFGIREGFSCHVFHLTMAQLTGNMESESTQDEQEEENGNEKEEEEKPEAKEEEGQPTEEDLGLRRSWSQCPGCVFHSPKDRN

SEQ ID NO: 29739 - protein, 282 aa, Homo sapiens
  Payload ID: 5811
  Gene Symbol: FAM170A
  Gene Name: family with sequence similarity 170, member A
  Uniprot ID: A1A519
  ENSP ID: ENSP00000368873
MKRRQKRKHLENEESQETAEKGGGIQRIHRDSPQPQSPLAQVQERGETPPRSQHVSLSSYSSYKTCVSSLCVNKEERGMKIYYMQVQMNKGVAVSWETEETLESLEKQPRMEEVTLSEVVRVGTPPSDVSTRNLLSDSEPSGEEKEHEERTESDSLPGSPTVEDTPRAKTPDWLVTMENGFRCMACCRVFTTMEALQEHVQFGIREGFSCHVFHLTMAQLTGNMESESTQDEQEEENGNEKEEEEKPEAKEEEGQPTEEDLGLRRSWSQCPGCVFHSPKDRN

SEQ ID NO: 29740 - protein, 330 aa, Homo sapiens
  Payload ID: 5811
  Gene Symbol: FAM170A
  Gene Name: family with sequence similarity 170, member A
  Uniprot ID: A1A519
  ENSP ID: ENSP00000422684
MKRRQKRKHLENEESQETAEKGGGMSKSQEDALQPGSTRVAKGWSQGVGEVTSTSEYCSCVSSSRKLIHSGIQRIHRDSPQPQSPLAQVQERGETPPRSQHVSLSSYSSYKTCVSSLCVNKEERGMKIYYMQVQMNKGVAVSWETEETLESLEKQPRMEEVTLSEVVRVGTPPSDVSTRNLLSDSEPSGEEKEHEERTESDSLPGSPTVEDTPRAKTPDWLVTMENGFRCMACCRVFTTMEALQEHVQFGIREGFSCHVFHLTMAQLTGNMESESTQDEQEEENGNEKEEEEKPEAKEEEGQPTEEDLGLRRSWSQCPGCVFHSPKDRNS

SEQ ID NO: 29741 - protein, 186 aa, Homo sapiens
  Payload ID: 5811
  Gene Symbol: FAM170A
  Gene Name: family with sequence similarity 170, member A
  ENSP ID: ENSP00000423697
MKRRQKRKHLENEESQETAEKGGGMSKSQEDALQPGSTRVAKGWSQGVGEVTSTSEYCSCVSSSRKLIHSGIQRIHRDSPQPQSPLAQVQERGETPPRSQHVSLSSYSSYKTCVSSLCVNKEERGMKIYYMQVQMNKGVAVSWETEETLESLEKQPRMEEVTLSEVVRQLRLMGQKILEDGVAFSC

SEQ ID NO: 29742 - protein, 283 aa, Homo sapiens
  Payload ID: 5811
  Gene Symbol: FAM170A
  Gene Name: family with sequence similarity 170, member A
  ENSP ID: ENSP00000425939
MKRRQKRKHLENEESQETAEKGGGIQRIHRDSPQPQSPLAQVQERGETPPRSQHVSLSSYSSYKTCVSSLCVNKEERGMKIYYMQVQMNKGVAVSWETEETLESLEKQPRMEEVTLSEVVRVGTPPSDVSTRNLLSDSEPSGEEKEHEERTESDSLPGSPTVEDTPRAKTPDWLVTMENGFRCMACCRVFTTMEALQEHVQFGIREGFSCHVFHLTMAQLTGNMESESTQDEQEEENGNEKEEEEKPEAKEEEGQPTEEDLGLRRSWSQCPGCVFHSPKDRNS

SEQ ID NO: 29743 - protein, 329 aa, Homo sapiens; identical to SEQ ID NO: 29738
  Payload ID: 5811
  Gene Symbol: FAM170A
  Gene Name: family with sequence similarity 170, member A
  Uniprot ID: A1A519
  ENSP ID: ENSP00000482552

SEQ ID NO: 29744 - protein, 282 aa, Homo sapiens; identical to SEQ ID NO: 29739
  Payload ID: 5811
  Gene Symbol: FAM170A
  Gene Name: family with sequence similarity 170, member A
  Uniprot ID: A1A519
  ENSP ID: ENSP00000483075

SEQ ID NO: 29745 - protein, 283 aa, Homo sapiens
  Payload ID: 5812
  Gene Symbol: FAM170B
  Gene Name: family with sequence similarity 170, member B
  Uniprot ID: A6NMN3
  ENSP ID: ENSP00000308292
MKCYFTDHRGEQSPTDGTTLSLTSPESTEESVEVFWPGTIQREGSSPRPGPAIPREEGLYFAARDRGMRDWSSSPSSESSEYQSYSQYQSCCSCMCDEDNAAPQSVCAFYTHVQTVRGVAVAWETEAGFEPVTRKPRIHEAQFIKRQRWNGSSFEMASNTDMRWDLEACKSNCSPEPEDIDLLECCLQELREPPDWLVTTNYGVRCVACCRVLPSLDALLEHAQHGIREGFSCQIFFEEMLERRRAQGQAHDQQLEEEQSPSDNSECSRPQGEVLSAQQQEKQ

SEQ ID NO: 29746 - protein, 890 aa, Homo sapiens
  Payload ID: 5813
  Gene Symbol: FAM171A1
  Gene Name: family with sequence similarity 171, member A1
  Uniprot ID: Q5VUB5
  ENSP ID: ENSP00000367356
MSRSATLLLCLLGCHVWKAVTKTLREPGAGAQEVTLKVHISDASTHQPVADALIEIFTNQASIASGTSGTDGVAFIKFQYKLGSQLIVTASKHAYVPNSAPWKPIRLPVFSSLSLGLLPERSATLMVYEDVVQIVSGFQGARPQPRVHFQRRALRLPENTSYSDLTAFLTAASSPSEVDSFPYLRGLDGNGTGNSTRHDLTPVTAVSVHLLSSNGTPVLVDGPIYVTVPLATQSSLRHNAYVAAWRFDQKLGTWLKSGLGLVHQEGSQLTWTYIAPQLGYWVAAMSPPIPGPVVTQDITTYHTVFLLAILGGMAFILLVLLCLLLYYCRRKCLKPRQHHRKLQLPAGLESSKRDQSTSMSHINLLFSRRASEFPGPLSVTSHGRPEAPGTKELMSGVHLEMMSPGGEGDLHTPMLKLSYSTSQEFSSREELLSCKEEDKSQISFDNLTPSGTLGKDYHKSVEVFPLKARKSMEREGYESSGNDDYRGSYNTVLSQPLFEKQDREGPASTGSKLTIQEHLYPAPSSPEKEQLLDRRPTECMMSRSVDHLERPTSFPRPGQLICCSSVDQVNDSVYRKVLPALVIPAHYMKLPGDHSYVSQPLVVPADQQLEIERLQAELSNPHAGIFPHPSSQIQPQPLSSQAISQQHLQDAGTREWSPQNASMSESLSIPASLNDAALAQMNSEVQLLTEKALMELGGGKPLPHPRAWFVSLDGRSNAHVRHSYIDLQRAGRNGSNDASLDSGVDMNEPKSARKGRGDALSLQQNYPPVQEHQQKEPRAPDSTAYTQLVYLDDVEQSGSECGTTVCTPEDSALRCLLEGSSRRSGGQLPSLQEETTRRTADAPSEPAASPHQRRSAHEEEEDDDDDDQGEDKKSPWQKREERPLMAFNIK

SEQ ID NO: 29747 - protein, 198 aa, Homo sapiens
  Payload ID: 5813
  Gene Symbol: FAM171A1
  Gene Name: family with sequence similarity 171, member A1
  ENSP ID: ENSP00000407796
MSRSATLLLCLLGCHVWKAVTKTLREPGAGAQEVTLKVHISDASTHQPVADALIEIFTNQASIASGTSGTDGVAFIKFQYKLGSQLIVTASKHAYVPNSAPWKPIRLPVFSSLSLGLLPERSATLMVYEDVVQIVSGFQGNSTRHDLTPVTAVSVHLLSSNGTPVLVDGPIYVTVPLATQSSLRHNAYVAAWRFDQKL

SEQ ID NO: 29748 - protein, 826 aa, Homo sapiens
  Payload ID: 5814
  Gene Symbol: FAM171A2
  Gene Name: family with sequence similarity 171, member A2
  Uniprot ID: A8MVW0
  ENSP ID: ENSP00000293443
MPPASGPSVLARLLPLLGLLLGSASRAPGKSPPEPPSPQEILIKVQVYVSGELVPLARASVDVFGNRTLLAAGTTDSEGVATLPLSYRLGTWVLVTAARPGFLTNSVPWRVDKLPLYASVSLYLLPERPATLILYEDLVHILLGSPGARSQPLVQFQRRAARLPVSSTYSQLWASLTPASTQQEMRAFPAFLGTEASSSGNGSWLELMPLTAVSVHLLTGNGTEVPLSGPIHLSLPVPSETRALTVGTSIPAWRFDPKSGLWVRNGTGVIRKEGRQLYWTFVSPQLGYWVAAMASPTAGLVTITSGIQDIGTYHTIFLLTILAALALLVLILLCLLIYYCRRRCLKPRQQHRKLQLSGPSDGNKRDQATSMSQLHLICGGPLEPAPSGDPEAPPPGPLHSAFSSSRDLASSRDDFFRTKPRSASRPAAEPSGARGGESAGLKGARSAEGPGGLEPGLEEHRRGPSGAAAFLHEPPSPPPPFDHYLGHKGAAEGKTPDFLLSQSVDQLARPPSLGQAGQLIFCGSIDHLKDNVYRNVMPTLVIPAHYVRLGGEAGAAGVGDEPAPPEGTAPGPARAFPQPDPQRPQMPGHSGPGGEGGGGGGEGWGAGRAAPVSGSVTIPVLFNESTMAQLNGELQALTEKKLLELGVKPHPRAWFVSLDGRSNSQVRHSYIDLQAGGGARSTDASLDSGVDVHEARPARRRPAREERERAPPAAPPPPPAPPRLALSEDTEPSSSESRTGLCSPEDNSLTPLLDEVAAPEGRAATVPRGRGRSRGDSSRSSASELRRDSLTSPEDELGAEVGDEAGDKKSPWQRREERPLMVFNVK

SEQ ID NO: 29749 - protein, 159 aa, Homo sapiens
  Payload ID: 5814
  Gene Symbol: FAM171A2
  Gene Name: family with sequence similarity 171, member A2
  ENSP ID: ENSP00000466195
MPPASGPSVLARLLPLLGLLLGSASRAPGKSPPEPPSPQEILIKVQVYVSGELVPLARASVDVFGNRTLLAAGTTDSEGVATLPLSYRLGTWVLVTAARPGFLTNSVPWRVDKLPLYASVSLYLLPERPATLILYEDLVHILLGSPGCARHCGWCWEPR

SEQ ID NO: 29750 - protein, 159 aa, Homo sapiens; identical to SEQ ID NO: 29749
  Payload ID: 5814
  Gene Symbol: FAM171A2
  Gene Name: family with sequence similarity 171, member A2
  ENSP ID: ENSP00000466493

SEQ ID NO: 29751 - protein, 826 aa, Homo sapiens
  Payload ID: 5815
  Gene Symbol: FAM171B
  Gene Name: family with sequence similarity 171, member B
  Uniprot ID: Q6P995
  ENSP ID: ENSP00000304108
MARLCRRVPCTLLLGLAVVLLKARLVPAAARAELSRSDLSLIQQQQQQQQQQQQQQKQLEEAEEERTEVPGATSTLTVPVSVFMLKVQVNDIISRQYLSQAVVEVFVNYTKTNSTVTKSNGAVLIKVPYKLGLSLTIIAYKDGYVLTPLPWKTRRMPIYSSVTLSLFPQSQANIWLFEDTVLITGKLADAKSQPSVQFSKALIKLPDNHHISNVTGYLTVLQQFLKVDNFLHTTGITLNKPGFENIELTPLAAICVKIYSGGKELKVNGSIQVSLPLLRLNDISAGDRIPAWTFDMNTGAWVNHGRGMVKEHNNHLIWTYDAPHLGYWIAAPLPGTRGSGINEDSKDITAYHTVFLTAILGGTIVIVIGFFAVLLCYCRDKCGTPQKRERNITKLEVLKRDQTTSTTHINHISTVKVALKAEDKSQLFNAKNSSYSPQKKEPSKAETEERVSMVKTRDDFKIYNEDVSFLSVNQNNYSRNPTQSLEPNVGSKQPKHINNNLSSSLGDAQDEKRYLTGNEEAYGRSHIPEQLMHIYSQPIAILQTSDLFSTPEQLHTAKSATLPRKGQLVYGQLMEPVNRENFTQTLPKMPIHSHAQPPDAREEDIILEGQQSLPSQASDWSRYSSSLLESVSVPGTLNEAVVMTPFSSELQGISEQTLLELSKGKPSPHPRAWFVSLDGKPVAQVRHSFIDLKKGKRTQSNDTSLDSGVDMNELHSSRKLEREKTFIKSMHQPKILYLEDLDLSSSESGTTVCSPEDPALRHILDGGSGVIMEHPGEESPGRKSTVEDFEANTSPTKRRGRPPLAKRDSKTNIWKKREERPLIPIN

SEQ ID NO: 29752 - protein, 238 aa, Homo sapiens
  Payload ID: 5815
  Gene Symbol: FAM171B
  Gene Name: family with sequence similarity 171, member B
  ENSP ID: ENSP00000478477
MARLCRRVPCTLLLGLAVVLLKARLVPAAARAELSRSDLSLIQQQQQQQQQQQQQQKQLEEAEEERTEVPGATSTLTVPVSVFMLKVQVNDIISRQYLSQAVVEVFVNYTKTNSTVTKSNGAVLIKVPYKLGLSLTIIAYKDGYVLTPLPWKTRRMPIYSSVTLSLFPQSQANIWLFEDTVLITGKLADAKSQPSVQFSKALIKLPDNHHISNVTGYLTVLQQFLKVDNFLHTTGITQ

SEQ ID NO: 29753 - protein, 416 aa, Homo sapiens
  Payload ID: 5816
  Gene Symbol: FAM172A
  Gene Name: family with sequence similarity 172, member A
  Uniprot ID: Q8WUF8
  ENSP ID: ENSP00000379294
MSISLSSLILLPIWINMAQIQQGGPDEKEKTTALKDLLSRIDLDELMKKDEPPLDFPDTLEGFEYAFNEKGQLRHIKTGEPFVFNYREDLHRWNQKRYEALGEIITKYVYELLEKDCNLKKVSIPVDATESEPKSFIFMSEDALTNPQKLMVLIHGSGVVRAGQWARRLIINEDLDSGTQIPFIKRAVAEGYGVIVLNPNENYIEVEKPKIHVQSSSDSSDEPAEKRERKDKVSKETKKRRDFYEKYRNPQREKEMMQLYIRENGSPEEHAIYVWDHFIAQAAAENVFFVAHSYGGLAFVELMIQREADVKNKVTAVALTDSVHNVWHQEAGKTIREWMRENCCNWVSSSEPLDTSVESMLPDCPRVSAGTDRHELTSWKSFPSIFKFFTEASEAKTSSLKPAVTRRSHRIKHEEL

SEQ ID NO: 29754 - protein, 269 aa, Homo sapiens
  Payload ID: 5816
  Gene Symbol: FAM172A
  Gene Name: family with sequence similarity 172, member A
  ENSP ID: ENSP00000421834
MNRLLIFLIPWKDLNMLLMKIITKYVYELLEKDCNLKKVSIPEGYGVIVLNPNENYIEVEKPKIHVQSSSDSSDEPAEKRERKDKVSKETKKRRDFYEKYRNPQREKEMMQLYIRENGSPEEHAIYVWDHFIAQAAAENVFFVAHSYGGLAFVELMIQREADVKNKVTAVALTDSVHNVWHQEAGKTIREWMRENCCNWVSSSEPLDTSVESMLPDCPRVSAGTDRHELTSWKSFPSIFKFFTEASEAKTSSLKPAVTRRSHRIKHEEL

SEQ ID NO: 29755 - protein, 370 aa, Homo sapiens
  Payload ID: 5816
  Gene Symbol: FAM172A
  Gene Name: family with sequence similarity 172, member A
  Uniprot ID: Q8WUF8
  ENSP ID: ENSP00000423841
MKKDEPPLDFPDTLEGFEYAFNEKGQLRHIKTGEPFVFNYREDLHRWNQKRYEALGEIITKYVYELLEKDCNLKKVSIPVDATESEPKSFIFMSEDALTNPQKLMVLIHGSGVVRAGQWARRLIINEDLDSGTQIPFIKRAVAEGYGVIVLNPNENYIEVEKPKIHVQSSSDSSDEPAEKRERKDKVSKETKKRRDFYEKYRNPQREKEMMQLYIRENGSPEEHAIYVWDHFIAQAAAENVFFVAHSYGGLAFVELMIQREADVKNKVTAVALTDSVHNVWHQEAGKTIREWMRENCCNWVSSSEPLDTSVESMLPDCPRVSAGTDRHELTSWKSFPSIFKFFTEASEAKTSSLKPAVTRRSHRIKHEEL

SEQ ID NO: 29756 - protein, 305 aa, Homo sapiens
  Payload ID: 5816
  Gene Symbol: FAM172A
  Gene Name: family with sequence similarity 172, member A
  ENSP ID: ENSP00000424097
MNRLLIFLIPWKDLNMLLMKIITKYVYELLEKDCNLKKVSIPVDATESEPKSFIFMSEDALTNPQKLMVLIHGSGVVRAGQWARRLIINEDLDSGTQIPFIKRAVAEGYGVIVLNPNENYIEVEKPKIHVQSSSDSSDEPAEKRERKDKVSKETKKRRDFYEKYRNPQREKEMMQLYIRENGSPEEHAIYVWDHFIAQAAAENVFFVAHSYGGLAFVELMIQREADVKNKVTAVALTDSVHNVWHQEAGKTIREWMRENCCNWVSSSEPLDTSVESMLPDCPRVSAGFSCCQMQSHEDLLLCFLL

SEQ ID NO: 29757 - protein, 306 aa, Homo sapiens
  Payload ID: 5816
  Gene Symbol: FAM172A
  Gene Name: family with sequence similarity 172, member A
  Uniprot ID: Q8WUF8
  ENSP ID: ENSP00000426284
MKKDEPPLDFPDTLEGFEYAFNEKGQLRHIKTGEPFVFNYREDLHRWNQKRYEALGEIITKYVYELLEKDCNLKKVSIPEGYGVIVLNPNENYIEVEKPKIHVQSSSDSSDEPAEKRERKDKVSKETKKRRDFYEKYRNPQREKEMMQLYIRENGSPEEHAIYVWDHFIAQAAAENVFFVAHSYGGLAFVELMIQREADVKNKVTAVALTDSVHNVWHQEAGKTIREWMRENCCNWVSSSEPLDTSVESMLPDCPRVSAGTDRHELTSWKSFPSIFKFFTEASEAKTSSLKPAVTRRSHRIKHEEL

SEQ ID NO: 29758 - protein, 218 aa, Homo sapiens
  Payload ID: 5817
  Gene Symbol: FAM173A
  Gene Name: family with sequence similarity 173, member A
  ENSP ID: ENSP00000219535
MEQDDPVEALTELRERRLGALELLQAAAGSGLAAYAVWALLLQPGFRRVPLRLQVPYVGASARQVEHVLSLLRGRPGKTVDLGSGDGRIVLAAHRCGLRPAVGYELNPWLVALARLHAWRAGCAGSVCYRRKDLWKLPLLEDKLRTELPAGARVVSGRFPLPTWQPVTAVGEGLDRVWAYDVPEGGQAGEAASSRIPIQAAPGPSSAPIPGGLISQAS

SEQ ID NO: 29759 - protein, 235 aa, Homo sapiens
  Payload ID: 5817
  Gene Symbol: FAM173A
  Gene Name: family with sequence similarity 173, member A
  Uniprot ID: Q9BQD7
  ENSP ID: ENSP00000454380
MEQDDPVEALTELRERRLGALELLQAAAGSGLAAYAVWALLLQPGFRRVPLRLQVPYVGASARQVEHVLSLLRGRPGKTVDLGSGDGRIVLAAHRCGLRPAVGYELNPWLVALARLHAWRAGCAGSVCYRRKDLWKVSLRDCRNVSVFLAPSVLPLLEDKLRTELPAGARVVSGRFPLPTWQPVTAVGEGLDRVWAYDVPEGGQAGEAASSRIPIQAAPGPSSAPIPGGLISQAS

SEQ ID NO: 29760 - protein, 174 aa, Homo sapiens
  Payload ID: 5817
  Gene Symbol: FAM173A
  Gene Name: family with sequence similarity 173, member A
  ENSP ID: ENSP00000455283
MEQDDPVEALTELRERRLGALELLQAAAGSGLAAYAVWALLLQPGFRRVPLRLQVPYVGASARQVEHVLSLLRGRPGKTVDLGSGDGRIVLAAHRCGLRPAVGYELNPWLVALARLHAWRAGCAGSVCYRRKDLWKVSLRDCRNVSVFLAPSVVGAGLPAPLGSPSHTPGCLLL

SEQ ID NO: 29761 - protein, 140 aa, Homo sapiens
  Payload ID: 5817
  Gene Symbol: FAM173A
  Gene Name: family with sequence similarity 173, member A
  ENSP ID: ENSP00000455962
  MOD_RES (1)..(1): Any amino acid
XVDLGSGDGRIVLAAHRCGLRPAVGYELNPWLVALARLHAWRAGCAGSVCYRRKDLWKLPLLEDKLRTELPAGARVVSGRFPLPTWQPVTAVGEGLDRVWAYDVPEGGQAGEAASSRIPIQAAPGPSSAPIPGGLISQAS

SEQ ID NO: 29762 - protein, 69 aa, Homo sapiens
  Payload ID: 5818
  Gene Symbol: FAM173B
  Gene Name: family with sequence similarity 173, member B
  ENSP ID: ENSP00000280330
MMLQLEKKLERELEDDARVIACRFPFPHWTPDHVTGEGIDTVWAYDASTFRGREKRPCTSMHFQLPIQA

SEQ ID NO: 29763 - protein, 216 aa, Homo sapiens
  Payload ID: 5818
  Gene Symbol: FAM173B
  Gene Name: family with sequence similarity 173, member B
  Uniprot ID: Q6P4H8
  ENSP ID: ENSP00000420876
MEGGGGIPLETLKEESQSRHVLPASFEVNSLQKSNWGFLLTGLVGGTLVAVYAVATPFVTPALRKVCLPFVPATTKQIENVVKMLRCRRGSLVDIGSGDGRIVIAAAKKGFTAVGYELNPWLVWYSRYRAWREGVHGSAKFYISDLWKMLQLEKKLERELEDDARVIACRFPFPHWTPDHVTGEGIDTVWAYDASTFRGREKRPCTSMHFQLPIQA

SEQ ID NO: 29764 - protein, 233 aa, Homo sapiens
  Payload ID: 5818
  Gene Symbol: FAM173B
  Gene Name: family with sequence similarity 173, member B
  Uniprot ID: Q6P4H8
  ENSP ID: ENSP00000422338
MEGGGGIPLETLKEESQSRHVLPASFEVNSLQKSNWGFLLTGLVGGTLVAVYAVATPFVTPALRKVCLPFVPATTKQIENVVKMLRCRRGSLVDIGSGDGRIVIAAAKKGFTAVGYELNPWLVWYSRYRAWREGVHGSAKFYISDLWKVTFSQYSNVVIFGVPQMMLQLEKKLERELEDDARVIACRFPFPHWTPDHVTGEGIDTVWAYDASTFRGREKRPCTSMHFQLPIQA

SEQ ID NO: 29765 - protein, 109 aa, Homo sapiens
  Payload ID: 5818
  Gene Symbol: FAM173B
  Gene Name: family with sequence similarity 173, member B
  ENSP ID: ENSP00000424210
MEGGGGIPLETLKEESQSRHVLPASFEVNSLQKSNWGFLLTGLVGGTLVAVYAVATPFVTPALRKVCLPFVPATTKQIENVVKMLRCRRGSLVDIGSGDGRIVSSAKTF

SEQ ID NO: 29766 - protein, 149 aa, Homo sapiens
  Payload ID: 5818
  Gene Symbol: FAM173B
  Gene Name: family with sequence similarity 173, member B
  ENSP ID: ENSP00000427453
MEGGGGIPLETLKEESQSRHVLPASFEVNSLQKSNWGFLLTGLVGGTLVAVYAVATPFVTPALRKVCLPFVPATTKQIENVVKMLRCRRGSLVDIGSGDGRIVIFIAYYYLFTKPSSQTLSFHCCCASPLMERCSGFSAMFCSTSPGVG

SEQ ID NO: 29767 - protein, 190 aa, Homo sapiens
  Payload ID: 5819
  Gene Symbol: FAM174A
  Gene Name: family with sequence similarity 174, member A
  Uniprot ID: Q8TBP5
  ENSP ID: ENSP00000307954
MKASQCCCCLSHLLASVLLLLLLPELSGPLAVLLQAAEAAPGLGPPDPRPRTLPPLPPGPTPAQQPGRGLAEAAGPRGSEGGNGSNPVAGLETDDHGGKAGEGSVGGGLAVSPNPGDKPMTQRALTVLMVVSGAVLVYFVVRTVRMRRRNRKTRRYGVLDTNIENMELTPLEQDDEDDDNTLFDANHPRR

SEQ ID NO: 29768 - protein, 159 aa, Homo sapiens
  Payload ID: 5820
  Gene Symbol: FAM174B
  Gene Name: family with sequence similarity 174, member B
  Uniprot ID: Q3ZCQ3
  ENSP ID: ENSP00000329040
MRAVPLPAPLLPLLLLALLAAPAARASRAESVSAPWPEPERESRPPPGPGPGNTTRFGSGAAGGSGSSSSNSSGDALVTRISILLRDLPTLKAAVIVAFAFTTLLIACLLLRVFRSGKRLKKTRKYDIITTPAERVEMAPLNEEDDEDEDSTVFDIKYR

SEQ ID NO: 29769 - protein, 113 aa, Homo sapiens
  Payload ID: 5820
  Gene Symbol: FAM174B
  Gene Name: family with sequence similarity 174, member B
  ENSP ID: ENSP00000452295
MKRMMKMRTPQYSTSNTGKTCFPAWWHPVESWSAATWGVKDWTWKPSCVGGVETKTNVMYKTPAPSCVSGICSDCHWQARFHVTTMELLLPPFGHPFKVPPTSTPHVRGFVPC

SEQ ID NO: 29770 - protein, 109 aa, Homo sapiens
  Payload ID: 5820
  Gene Symbol: FAM174B
  Gene Name: family with sequence similarity 174, member B
  ENSP ID: ENSP00000455213
MKRMMKMRTPQYSTSNTGKTCFPAWWHPVESWSAATWGVKDWTWKPSCVGGVETKTNVMYKTPAPSCVSGICSDCHWQARFHVTTMELLLPPFGHPFKVPPTSTPHVRG

SEQ ID NO: 29771 - protein, 91 aa, Homo sapiens
  Payload ID: 5820
  Gene Symbol: FAM174B
  Gene Name: family with sequence similarity 174, member B
  ENSP ID: ENSP00000455517
MKRMMKMRTPQYSTSNTGKTCFPAWWHPVESWSAATWGVKDWTWKPSCVGGVETKTNVMYKTPAPSCVSGICSDCHWQARFHVTTMELLLP

SEQ ID NO: 29772 - protein, 113 aa, Homo sapiens; identical to SEQ ID NO: 29769
  Payload ID: 5820
  Gene Symbol: FAM174B
  Gene Name: family with sequence similarity 174, member B
  ENSP ID: ENSP00000455765

SEQ ID NO: 29773 - protein, 67 aa, Homo sapiens
  Payload ID: 5820
  Gene Symbol: FAM174B
  Gene Name: family with sequence similarity 174, member B
  ENSP ID: ENSP00000456099
MMKMRTPQYSTSNTGKTCFPAWWHPVESWSAATWGVKDWTWKPSCVGGVETKTNVMYKTPAPSCVSG

SEQ ID NO: 29774 - protein, 113 aa, Homo sapiens; identical to SEQ ID NO: 29769
  Payload ID: 5820
  Gene Symbol: FAM174B
  Gene Name: family with sequence similarity 174, member B
  ENSP ID: ENSP00000456619

SEQ ID NO: 29775 - protein, 37 aa, Homo sapiens
  Payload ID: 5820
  Gene Symbol: FAM174B
  Gene Name: family with sequence similarity 174, member B
  ENSP ID: ENSP00000457201
MKRMMKMRTPQYSTSNTGLSGDSREPGHLAAVRPLNL

SEQ ID NO: 29776 - protein, 409 aa, Homo sapiens
  Payload ID: 5821
  Gene Symbol: FAM175A
  Gene Name: family with sequence similarity 175, member A
  Uniprot ID: Q6UWZ7
  ENSP ID: ENSP00000369857
MEGESTSAVLSGFVLGALAFQHLNTDSDTEGFLLGEVKGEAKNSITDSQMDDVEVVYTIDIQKYIPCYQLFSFYNSSGEVNEQALKKILSNVKKNVVGWYKFRRHSDQIMTFRERLLHKNLQEHFSNQDLVFLLLTPSIITESCSTHRLEHSLYKPQKGLFHRVPLVVANLGMSEQLGYKTVSGSCMSTGFSRAVQTHSSKFFEEDGSLKEVHKINEMYASLQEELKSICKKVEDSEQAVDKLVKDVNRLKREIEKRRGAQIQAAREKNIQKDPQENIFLCQALRTFFPNSEFLHSCVMSLKNRHVSKSSCNYNHHLDVVDNLTLMVEHTDIPEASPASTPQIIKHKALDLDDRWQFKRSRLLDTQDKRSKADTGSSNQDKASKMSSPETDEEIEKMKGFGEYSRSPTF

SEQ ID NO: 29777 - protein, 82 aa, Homo sapiens
  Payload ID: 5821
  Gene Symbol: FAM175A
  Gene Name: family with sequence similarity 175, member A
  ENSP ID: ENSP00000421068
MMLKLFIQLMESHSVAQTGVKWHDLGSLQPLPLEVKRFSCLGLRSSWDYRHTQPCPANFFCIFSRDGVSPCWPGWSRTPDLK

SEQ ID NO: 29778 - protein, 37 aa, Homo sapiens
  Payload ID: 5821
  Gene Symbol: FAM175A
  Gene Name: family with sequence similarity 175, member A
  ENSP ID: ENSP00000421876
MEGESTSAVLSGFVLGALAFQHLNTDSDTVGRGGSRL

SEQ ID NO: 29779 - protein, 74 aa, Homo sapiens
  Payload ID: 5821
  Gene Symbol: FAM175A
  Gene Name: family with sequence similarity 175, member A
  ENSP ID: ENSP00000426080
MEGESTSAVLSGFVLGALAFQHLNTDSDTEGFLLGEVKGEAKNSITDSQMDDVEVVYTIDIQKYIPCYQLFRMW

SEQ ID NO: 29780 - protein, 360 aa, Homo sapiens
  Payload ID: 5821
  Gene Symbol: FAM175A
  Gene Name: family with sequence similarity 175, member A
  ENSP ID: ENSP00000426763
MDDVEVVYTIDIQKYIPCYQLFSFYNSSGEVNEQALKKILSNVKKNVVGWYKFRRHSDQIMTFRERLLHKNLQEHFSNQDLVFLLLTPSIITESCSTHRLEHSLYKPQKGLFHRVPLVVANLGMSEQLGYKTVSGSCMSTGFSRAVQTHSSKFFEEDGSLKEVHKINEMYASLQEELKSICKKVEDSEQAVDKLVKDVNRLKREIEKRRGAQIQAAREKNIQKDPQENIFLCQALRTFFPNSEFLHSCVMSLKNRHVSKSSCNYNHHLDVVDNLTLMVEHTDIPEASPASTPQIIKHKALDLDDRWQFKRSRLLDTQDKRSKADTGSSNQDKASKMSSPETDEEIEKMKGFGEYSRSPTF

SEQ ID NO: 29781 - protein, 220 aa, Homo sapiens
  Payload ID: 5821
  Gene Symbol: FAM175A
  Gene Name: family with sequence similarity 175, member A
  ENSP ID: ENSP00000480277
MKTSSPKENCLFLCFTSMKNGQEGFLLGEVKGEAKNSITDSQMDDVEVVYTIDIQKYIPCYQLFSFYNSSGEVNEQALKKILSNVKKNVVGWYKFRRHSDQIMTFRERLLHKNLQEHFSNQDLVFLLLTPSIITESCSTHRLEHSLYKPQKGLFHRVPLVVANLGMSEQLGYKTVSGSCMSTGFSRAVQTHSSKFFEEDGSLKEVHKINEMYASLQEELK

SEQ ID NO: 29782 - protein, 189 aa, Homo sapiens
  Payload ID: 5821
  Gene Symbol: FAM175A
  Gene Name: family with sequence similarity 175, member A
  ENSP ID: ENSP00000481099
MEGESTSAVLSGFVLGALAFQHLNTDSDTVSRGTGRGPASPGKSPARGLPPRCCSGPRPLPRRRRASSLRSRLCLLSPSAVPEEGFLLGEVKGEAKNSITDSQMDDVEVVYTIDIQKYIPCYQLFSFYNSSGEVNEQALKKILSNVKKNVVGWYKFRRHSDQIMTFRERLLHKNLQEHFSNQDLVFLLL

SEQ ID NO: 29783 - protein, 198 aa, Homo sapiens
  Payload ID: 5821
  Gene Symbol: FAM175A
  Gene Name: family with sequence similarity 175, member A
  ENSP ID: ENSP00000482434
LLHKNLQEHFSNQDLVFLLLTPSIITESCSTHRLEHSLYKPQKGLFHRVPLVVANLGMSEQLGYKTVSGSCMSTGFSRAVQTHSSKFFEEDGSLKEVHKINEMYASLQEELKLYSFSECHLHPGSRLKEQPLFGTCPHGIRQRARKLVDYRREPPQLAHELIFQFISVYFQRTNWHDKSCINEKLHVKKHFTTYKAYL

SEQ ID NO: 29784 - protein, 415 aa, Homo sapiens
  Payload ID: 5822
  Gene Symbol: FAM175B
  Gene Name: family with sequence similarity 175, member B
  Uniprot ID: Q15018
  ENSP ID: ENSP00000298492
MAASISGYTFSAVCFHSANSNADHEGFLLGEVRQEETFSISDSQISNTEFLQVIEIHNHQPCSKLFSFYDYASKVNEESLDRILKDRRKKVIGWYRFRRNTQQQMSYREQVLHKQLTRILGVPDLVFLLFSFISTANNSTHALEYVLFRPNRRYNQRISLAIPNLGNTSQQEYKVSSVPNTSQSYAKVIKEHGTDFFDKDGVMKDIRAIYQVYNALQEKVQAVCADVEKSERVVESCQAEVNKLRRQITQRKNEKEQERRLQQAVLSRQMPSESLDPAFSPRMPSSGFAAEGRSTLGDAEASDPPPPYSDFHPNNQESTLSHSRMERSVFMPRPQAVGSSNYASTSAGLKYPGSGADLPPPQRAAGDSGEDSDDSDYENLIDPTEPSNSEYSHSKDSRPMAHPDEDPRNTQTSQI

SEQ ID NO: 29785 - protein, 236 aa, Homo sapiens
  Payload ID: 5823
  Gene Symbol: FAM177A1
  Gene Name: family with sequence similarity 177, member A1
  Uniprot ID: Q8N128
  ENSP ID: ENSP00000280987
MEVGLPAITLFLTSASSPVVATTMDQEPVGGVERGEAVAASGAAAAAAFGESAGQMSNERGFENVELGVIGKKKKVPRRVIHFVSGETMEEYSTDEDEVDGLEKKDVLPTVDPTKLTWGPYLWFYMLRAATSTLSVCDFLGEKIASVLGISTPKYQYAIDEYYRMKKEEEEEEEENRMSEEAEKQYQQNKLQTDSIVQTDQPETVISSSFVNVNFEMEGDSEVIMESKQNPVSVPP

SEQ ID NO: 29786 - protein, 213 aa, Homo sapiens
  Payload ID: 5823
  Gene Symbol: FAM177A1
  Gene Name: family with sequence similarity 177, member A1
  Uniprot ID: Q8N128
  ENSP ID: ENSP00000371843
MDQEPVGGVERGEAVAASGAAAAAAFGESAGQMSNERGFENVELGVIGKKKKVPRRVIHFVSGETMEEYSTDEDEVDGLEKKDVLPTVDPTKLTWGPYLWFYMLRAATSTLSVCDFLGEKIASVLGISTPKYQYAIDEYYRMKKEEEEEEEENRMSEEAEKQYQQNKLQTDSIVQTDQPETVISSSFVNVNFEMEGDSEVIMESKQNPVSVPP

SEQ ID NO: 29787 - protein, 213 aa, Homo sapiens; identical to SEQ ID NO: 29786
  Payload ID: 5823
  Gene Symbol: FAM177A1
  Gene Name: family with sequence similarity 177, member A1
  Uniprot ID: Q8N128
  ENSP ID: ENSP00000379734

SEQ ID NO: 29788 - protein, 7 aa, Homo sapiens
  Payload ID: 5823
  Gene Symbol: FAM177A1
  Gene Name: family with sequence similarity 177, member A1
  ENSP ID: ENSP00000450424
  MOD_RES (1)..(1): Any amino acid
XLRGPLF

SEQ ID NO: 29789 - protein, 36 aa, Homo sapiens
  Payload ID: 5823
  Gene Symbol: FAM177A1
  Gene Name: family with sequence similarity 177, member A1
  ENSP ID: ENSP00000451165
AAAAAFGESAGQVGGAAEADVRGAEPPPCLLRGPLF

SEQ ID NO: 29790 - protein, 75 aa, Homo sapiens
  Payload ID: 5823
  Gene Symbol: FAM177A1
  Gene Name: family with sequence similarity 177, member A1
  ENSP ID: ENSP00000451508
MDQEPVGGVERGEAVAASGAAAAAAFGESAGQMSNERGFENVELGVIGKKKKVPRRVIHFVSGETMEEYSTDEDE

SEQ ID NO: 29791 - protein, 140 aa, Homo sapiens
  Payload ID: 5823
  Gene Symbol: FAM177A1
  Gene Name: family with sequence similarity 177, member A1
  ENSP ID: ENSP00000452223
MSNERGFENVELGVIGKKKKVPRRVIHFVSGETMEEYSTDEDEVDGLEKKDVLPTVDPTKLTWGPYLWFYMLRAATSTLSVCDFLGEKIASVLGISTPKYQYAIDEYYRMKKEEEEEEEENRMSEEAEKQYQQNKLQTDS

SEQ ID NO: 29792 - protein, 49 aa, Homo sapiens
  Payload ID: 5823
  Gene Symbol: FAM177A1
  Gene Name: family with sequence similarity 177, member A1
  ENSP ID: ENSP00000452425
  MOD_RES (1)..(1): Any amino acid
XNKLQTDSIVQTDQPETVISSSFVNVNFEMEGDSEVIMESKQNPVSVPP

SEQ ID NO: 29793 - protein, 39 aa, Homo sapiens
  Payload ID: 5823
  Gene Symbol: FAM177A1
  Gene Name: family with sequence similarity 177, member A1
  ENSP ID: ENSP00000473546
  MOD_RES (1)..(1): Any amino acid
XAFGESAGQEIKGSKKLSHGPKGNVDVRTAIAKFYLKDE

SEQ ID NO: 29794 - protein, 89 aa, Homo sapiens
  Payload ID: 5823
  Gene Symbol: FAM177A1
  Gene Name: family with sequence similarity 177, member A1
  ENSP ID: ENSP00000484619
MEVGLPAITLFLTSASSPVVATTMDQEPVGGVERGEAVAASGAAAAAAFGESAGQNLTLLPRLKFMARSRLAATSTSRVQAILLPQPPV

SEQ ID NO: 29795 - protein, 158 aa, Homo sapiens
  Payload ID: 5824
  Gene Symbol: FAM177B
  Gene Name: family with sequence similarity 177, member B
  Uniprot ID: A6PVY3
  ENSP ID: ENSP00000354070
MEIDGFQQLDLEKSVPSKKTTPKRIIHFVDGDIMEEYSTEEEEEEEKEEQSTNSTLDPSKLSWGPYLRFWAGRIASTSFSTCEFLGGRFAVFFGLTQPKYQYVLNEFYRIQNKKSDNKSERRGSKAQAAEVPNEKCHLEAGVQEYGTIQQDVTEAIPQ

SEQ ID NO: 29796 - protein, 120 aa, Homo sapiens
  Payload ID: 5824
  Gene Symbol: FAM177B
  Gene Name: family with sequence similarity 177, member B
  Uniprot ID: A6PVY3
  ENSP ID: ENSP00000375752
MEIDGFQQLDLEKSVPSKKTTPKRIIHFVDGDIMEEYSTEEEEEEEKEEQSTNSTLDPSKLSWGPYLRFWAGRIASTSFSMLSLQATLLLKAEKEGLKQLLRSLSGCMEEFLMWVLVTLD

SEQ ID NO: 29797 - protein, 100 aa, Homo sapiens
  Payload ID: 5824
  Gene Symbol: FAM177B
  Gene Name: family with sequence similarity 177, member B
  ENSP ID: ENSP00000391615
MEIDGFQQLDLEKSVPSKKTTPKRIIHFVDGDIMEEYSTEEEEEEEKEEQSTNSTLDPSKLSWGPYLRFWAGRIASTSFSTCEFLGGRFAVFFGLTQPKY

SEQ ID NO: 29798 - protein, 99 aa, Homo sapiens
  Payload ID: 5824
  Gene Symbol: FAM177B
  Gene Name: family with sequence similarity 177, member B
  ENSP ID: ENSP00000400233
MEIDGFQQLDLEKSVPSKKTTPKRIIHFVDGDIMEEYSTEEEEEEEKEEQSTNSTLDPSKLSWGPYLRFWAGRIASTSFSTCEFLGGRFAVFFGLTQPK

SEQ ID NO: 29799 - protein, 158 aa, Homo sapiens; identical to SEQ ID NO: 29795
  Payload ID: 5824
  Gene Symbol: FAM177B
  Gene Name: family with sequence similarity 177, member B
  Uniprot ID: A6PVY3
  ENSP ID: ENSP00000414451

SEQ ID NO: 29800 - protein, 119 aa, Homo sapiens
  Payload ID: 5825
  Gene Symbol: FAM178B
  Gene Name: family with sequence similarity 178, member B
  Uniprot ID: Q8IXR5
  ENSP ID: ENSP00000377160
MRPSSLRQYLDSVPLPPCQEQQPKASAELDHKACYLCHSLLMLAGVVVSCQDITPDQWGELQLLCMQLDRHISTQIRESPQAMHRTMLKDLATQTYIRWQELLTHCQPQAQYFSPWKDI

SEQ ID NO: 29801 - protein, 679 aa, Homo sapiens
  Payload ID: 5825
  Gene Symbol: FAM178B
  Gene Name: family with sequence similarity 178, member B
  Uniprot ID: Q8IXR5
  ENSP ID: ENSP00000429896
MWPRLPGAGLAPQLRRQDQRLHFTGQMSHGLQMAGPQETVLALPLREGVQAAATVPILLYNLEDGLSDHPLDQGPRCPARRPCSPASAPAPTSPKKPKIQAPGETFPTDWSPPPVEFLNPRVLQASREAPAQRWVGVVGPQGLRRLAGELPEELEQEHLDLDPKRGLALPEKLFWNTSGLSQQAAAPEFSWGGSGSYFNNLDYLLQEKREQALEQERERLLLQECLNLNSLDLDEEEVPLTPEHRMLVEKYSVSLQTIPPVHPGETVFLPRCHPLPCILDSSLLKPRSHLEGLFLSSPPAQQLSFLRSGLLNILYLHMPDCPVSLLQWLFQLLTWPPETSLGAFGLLWDLIVDGIFLQPDEDKHLWCPSLQEVREAFHSLGAHSPALYPLGPFWHGGRVLPGEAGLNENEEQDAPQEIALDISLGHIYKFLALCAQAQPGAYTDENLMGLIELLCRTSLDVGLRLLPKVDLQQLLLLLLENIREWPGKLQELCCTLSWVSDHHHNLLALVQFFPDMTSRSRRLRSQLSLVVIARMLGQQEMLPLWQEKTQLSSLSRLLGLMRPSSLRQYLDSVPLPPCQEQQPKASAELDHKACYLCHSLLMLAGVVVSCQDITPDQWGELQLLCMQLDRHISTQIRESPQAMHRTMLKDLATQTYIRWQELLTHCQPQAQYFSPWKDI

SEQ ID NO: 29802 - protein, 1019 aa, Homo sapiens
  Payload ID: 5826
  Gene Symbol: FAM179A
  Gene Name: family with sequence similarity 179, member A
  Uniprot ID: Q6ZUX3
  ENSP ID: ENSP00000368876
MGTRDDVPEAKVLVPVAVYCGSIPRTSAGPRVLPPGSINSSLPHGEGSLQPEPRALLNNEEPSQLLRGLGQLGGLKLDTPSKGWQARNGHPRNLRALSLGDQPLVLLPSPESEANSVARDTIQIKDKLKKRRLSEGLAASSRASLDPGGGPQGVPLHSTIPRATSQRLLRVPRPMPLIQSIPTTPEASGVKEKGLDLPGSIPGPHELRPGAQEAQISWQYLHCNDEKMQKSLGAIVIPPIPKARTVAATPSRVPGSLPSPLPPGQGVLTGLRAPRTRLARGSGPREKTPASLEPKPLASPIRDRPAAAKKPALPFSQSAPTLTAFSFDCAREACPPLKEEDQKEIGTKIQVTISKSAREKMQLKQMKEMELLRRLEEPRTGQELTSQCLGSQRAFMKEGLLPLRGSGTLSVPTRLSGPCRNDVSIILRKWASRASLPSIPISRQEPRFARHASANSLPAVLTLGSPEWEEEEEMDLRACKELRPFSNPELGLRDALQCLNSSDWQMKEKGLVSIQRLAACHSEVLTGKLHDVCLVVTGEVTNLRSKVSHLAISTLGDLFQALKKNMDQEAEEIARCLLQKMADTNEFIQRAAGQSLRAMVENVTLARSLVVLTSAGVYHRNPLIRKYAAEHLSAVLEQIGAEKLLSGTRDSTDMLVHNLVRLAQDSNQDTRFYGRKMVNILMANTKFDAFLKQSLPSYDLQKVMAAIKQQGIEDNDELPSAKGRKVLRSLVVCENGLPIKEGLSCNGPRLVGLRSTLQGRGEMVEQLRELTRLLEAKDFRSRMEGVGQLLELCKAKTELVTAHLVQVFDAFTPRLQDSNKKVNQWALESFAKMIPLLRESLHPMLLSIIITVADNLNSKNSGIYAAAVAVLDAMVESLDNLCLLPALAGRVRFLSGRAVLDVTDRLAVLVASVYPRKPQAVERHVLPILWHFLNTATRNGTLPGPSGNIRGVVCRLSRSLQEHMGSRLLDFAASQPKHVLKTLQELLDSESLGGSRKATDRGVAPDSKTTGSSYPFQLD

SEQ ID NO: 29803 - protein, 162 aa, Homo sapiens
  Payload ID: 5826
  Gene Symbol: FAM179A
  Gene Name: family with sequence similarity 179, member A
  ENSP ID: ENSP00000384897
MDQEAEEIARCLLQKMADTNEFIQRAAGQSLRAMVENVTLARSLVVLTSAGVYHRNPLIRKYAAEHLSAVLEQIGAEKLLSGTRDSTDMLVHNLVRLAQDSNQDTRFYGRKMVNILMANTKFDAFLKQSLPSYDLQKVMAAIKQQGIEDNDELPSAKGRKVL

SEQ ID NO: 29804 - protein, 112 aa, Homo sapiens
  Payload ID: 5826
  Gene Symbol: FAM179A
  Gene Name: family with sequence similarity 179, member A
  ENSP ID: ENSP00000396739
MKEKGLVSIQRLAACHSEVLTGKLHDVCLVVTGEVTNLRSKVSHLAISTLGDLFQALKKNMDQEAEEIARCLLQKMADTNEFIQRAAGQSLRAMVENVTLARSLVVLTSAGV

SEQ ID NO: 29805 - protein, 69 aa, Homo sapiens
  Payload ID: 5826
  Gene Symbol: FAM179A
  Gene Name: family with sequence similarity 179, member A
  ENSP ID: ENSP00000402415
MGTRDDVPEAKVLVPVAVYCGSIPRTSAGPRVLPPGSINSSLPHGEGSLQPEPRALLNNEEPSQLLRGL

SEQ ID NO: 29806 - protein, 1773 aa, Homo sapiens
  Payload ID: 5827
  Gene Symbol: FAM179B
  Gene Name: family with sequence similarity 179, member B
  ENSP ID: ENSP00000354917
MAAAPSALLLLPPFPVLSTYRLQSRSRPSAPETDDSRVGGIMRGEKNYYFRGAAGDHGSCPTTTSPLASALLMPSEAVSSSWSESGGGLSGGDEEDTRLLQLLRTARDPSEAFQALQAALPRRGGRLGFPRRKEALYRALGRVLVEGGSDEKRLCLQLLSDVLRGQGEAGQLEEAFSLALLPQLVVSLREENPALRKDALQILHICLKRSPGEVLRTLIQQGLESTDARLRASTALLLPILLTTEDLLLGLDLTEVIISLARKLGDQETEEESETAFSALQQIGERLGQDRFQSYISRLPSALRRHYNRRLESQFGSQVPYYLELEASGFPEDPLPCAVTLSNSNLKFGIIPQELHSRLLDQEDYKNRTQAVEELKQVLGKFNPSSTPHSSLVGFISLLYNLLDDSNFKVVHGTLEVLHLLVIRLGEQVQQFLGPVIAASVKVLADNKLVIKQEYMKIFLKLMKEVGPQQVLCLLLEHLKHKHSRVREEVVNICICSLLTYPSEDFDLPKLSFDLAPALVDSKRRVRQAALEAFAVLASSMGSGKTSILFKAVDTVELQDNGDGVMNAVQARLARKTLPRLTEQGFVEYAVLMPSSAGGRSNHLAHGADTDWLLAGNRTQSAHCHCGDHVRDSMHIYGSYSPTICTRRVLSAGKGKNKLPWENEQPGIMGENQTSTSKDIEQFSTYDFIPSAKLKLSQGMPVNDDLCFSRKRVSRNLFQNSRDFNPDCLPLCAAGTTGTHQTNLSGKCAQLGFSQICGKTGSVGSDLQFLGTTSSHQEKVYASLNFGSKTQQTFGSQTECTSSNGQNPSPGAYILPSYPVSSPRTSPKHTSPLIISPKKSQDNSVNFSNSWPLKSFEGLSKPSPQKKLVSQKSSDPTGRNHGENSQEKPPVQLTPALVRSPSSRRGLNGTKPVPPIPRGISLLPDKADLSTVGHKKKEPDDIWKCEKDSLPIDLSELNFKDKDLDQEEMHSSLRSLRNSAAKKRAKLSGSTSDLESPDSAMKLDLTMDSPSLSSSPNINSYSESGVYSQESLTSSLSTTPQGKRIMSDIFPTFGSKPCPTRLSSAKKKISHIAEQSPSAGSSSNPQQISSFDFTTTKALSEDSVVVVGKGVFGSLSSAPATCSQSVISSVENGDTFSIKQSIEPPSGIYGRSVQQNISSYLDVENEKDAKVSISKSTYNKMRQKRKEEKELFHNKDCEKKEKNSWERMRHTGTEKMASESETPTGAISQYKERMPSVTHSPEIMDLSELRPFSKPEIALTEALRLLADEDWEKKIEGLNFIRCLAAFHSEILNTKLHETNFAVVQEVKNLRSGVSRAAVVCLSDLFTYLKKSMDQELDTTVKVLLHKAGESNTFIREDVDKALRAMVNNVTPARAVVSLINGGQSHLHIAVRRCTAQHLSDVLEFMEPERILSAAKDMAERILPAAAKFAQDSSQETRYYGRKMLFFMMCHPNFEKMLEKYVPSKDLPYIKDSVRNLQQKGLGEIPLDTPSAKGRRSHTGSVGNTRSSSVSRDAFNSAERAVTEVREVTRKSVPRNSLESAEYLKLITGLLNAKDFRDRINGIKQLLSDTENNQDLVVGNIVKIFDAFKSRLHDSNSKVNLVALETMHKMIPLLRDHLSPIINMLIPAIVDNNLNSKNPGIYAAATNVVQALSQHVDNYLLLQPFCTKAQFLNGKAKQDMTEKLADIVTELYQRKPHATEQKVLVVLWHLLGNMTNSGSLPGAGGNIRTATAKLSKALFAQMGQNLLNQAASQPPHIKKSLEELLDMTILNEL

SEQ ID NO: 29807 - protein, 1720 aa, Homo sapiens
  Payload ID: 5827
  Gene Symbol: FAM179B
  Gene Name: family with sequence similarity 179, member B
  Uniprot ID: Q9Y4F4
  ENSP ID: ENSP00000355045
MAAAPSALLLLPPFPVLSTYRLQSRSRPSAPETDDSRVGGIMRGEKNYYFRGAAGDHGSCPTTTSPLASALLMPSEAVSSSWSESGGGLSGGDEEDTRLLQLLRTARDPSEAFQALQAALPRRGGRLGFPRRKEALYRALGRVLVEGGSDEKRLCLQLLSDVLRGQGEAGQLEEAFSLALLPQLVVSLREENPALRKDALQILHICLKRSPGEVLRTLIQQGLESTDARLRASTALLLPILLTTEDLLLGLDLTEVIISLARKLGDQETEEESETAFSALQQIGERLGQDRFQSYISRLPSALRRHYNRRLESQFGSQVPYYLELEASGFPEDPLPCAVTLSNSNLKFGIIPQELHSRLLDQEDYKNRTQAVEELKQVLGKFNPSSTPHSSLVGFISLLYNLLDDSNFKVVHGTLEVLHLLVIRLGEQVQQFLGPVIAASVKVLADNKLVIKQEYMKIFLKLMKEVGPQQVLCLLLEHLKHKHSRVREEVVNICICSLLTYPSEDFDLPKLSFDLAPALVDSKRRVRQAALEAFAVLASSMGSGKTSILFKAVDTVELQDNGDGVMNAVQARLARKTLPRLTEQGFVEYAVLMPSSAGGRSNHLAHGADTDWLLAGNRTQSAHCHCGDHVRDSMHIYGSYSPTICTRRVLSAGKGKNKLPWENEQPGIMGENQTSTSKDIEQFSTYDFIPSAKLKLSQGMPVNDDLCFSRKRVSRNLFQNSRDFNPDCLPLCAAGTTGTHQTNLSGKCAQLGFSQICGKTGSVGSDLQFLGTTSSHQEKVYASLNFGSKTQQTFGSQTECTSSNGQNPSPGAYILPSYPVSSPRTSPKHTSPLIISPKKSQDNSVNFSNSWPLKSFEGLSKPSPQKKLVSQKSSDPTGRNHGENSQEKPPVQLTPALVRSPSSRRGLNGTKPVPPIPRGISLLPDKADLSTVGHKKKEPDDIWKCEKDSLPIDLSELNFKDKDLDQEEMHSSLRSLRNSAAKKRAKLSGSTSDLESPDSAMKLDLTMDSPSLSSSPNINSYSESGVYSQESLTSSLSTTPQGKRIMSDIFPTFGSKPCPTRLSSAKKKISHIAEQSPSAGSSSNPQQISSFDFTTTKALSEDSVVVVGKGVFGSLSSAPATCSQSVISSVENGDTFSIKQSIEPPSGIYGRSVQQNISSYLDVENEKDAKVSISKSTYNKMRQKRKEEKELFHNKDCEKKEKNSWERMRHTGTEKMASESETPTGAISQYKERMPSVTHSPEIMDLSELRPFSKPEIALTEALRLLADEDWEKKIEGLNFIRCLAAFHSEILNTKLHETNFAVVQEVKNLRSGVSRAAVVCLSDLFTYLKKSMDQELDTTVKVLLHKAGESNTFIREDVDKALRAMVNNVTPARAVVSLINGGQRYYGRKMLFFMMCHPNFEKMLEKYVPSKDLPYIKDSVRNLQQKGLGEIPLDTPSAKGRRSHTGSVGNTRSSSVSRDAFNSAERAVTEVREVTRKSVPRNSLESAEYLKLITGLLNAKDFRDRINGIKQLLSDTENNQDLVVGNIVKIFDAFKSRLHDSNSKVNLVALETMHKMIPLLRDHLSPIINMLIPAIVDNNLNSKNPGIYAAATNVVQALSQHVDNYLLLQPFCTKAQFLNGKAKQDMTEKLADIVTELYQRKPHATEQKVLVVLWHLLGNMTNSGSLPGAGGNIRTATAKLSKALFAQMGQNLLNQAASQPPHIKKSLEELLDMTILNEL

SEQ ID NO: 29808 - protein, 155 aa, Homo sapiens
  Payload ID: 5827
  Gene Symbol: FAM179B
  Gene Name: family with sequence similarity 179, member B
  ENSP ID: ENSP00000450465
SRLHDSNSKVNLVALETMHKMIPLLRDHLSPIINMLIPAIVDNNLNSKNPGIYAAATNVVQALSQHVDIVTELYQRKPHATEQKVLVVLWHLLGNMTNSGSLPGAGGNIRTATAKLSKALFAQMGQNLLNQAASQPPHIKKSLEELLDMTILNEL

SEQ ID NO: 29809 - protein, 160 aa, Homo sapiens
  Payload ID: 5827
  Gene Symbol: FAM179B
  Gene Name: family with sequence similarity 179, member B
  ENSP ID: ENSP00000451013
  MOD_RES (1)..(1): Any amino acid
XFSRKRVSRNLFQNSRDFNPDCLPLCAAGTTGTHQTNLSGKCAQLGFSQICGKTGSVGSDLQFLGTTSSHQEKGENSQEKPPVQLTPALVRSPSSRRGLNGTKPVPPIPRGISLLPDKADLSTVGHKKKEPDDIWKCEKDSLPIDLSELNFKDKDLDQEE

SEQ ID NO: 29810 - protein, 174 aa, Homo sapiens
  Payload ID: 5827
  Gene Symbol: FAM179B
  Gene Name: family with sequence similarity 179, member B
  ENSP ID: ENSP00000451141
MFSTYDFIPSAKLKLSQGMPVNDDLCFSRKRVSRNLFQNSRDFNPDCLPLCAAGTTGTHQTNLSGKCAQLGFSQICGKTGSVGSDLQFLGTTSSHQEKVYASLNFGSKTQQTFGSQTECTSSNGQNPSPGAYILPSYPVSSPRTSPKHTSPLIISPKKSQDNSVNFSNSWPLKS

SEQ ID NO: 29811 - protein, 995 aa, Homo sapiens
  Payload ID: 5827
  Gene Symbol: FAM179B
  Gene Name: family with sequence similarity 179, member B
  Uniprot ID: Q9Y4F4
  ENSP ID: ENSP00000451829
MAAAPSALLLLPPFPVLSTYRLQSRSRPSAPETDDSRVGGIMRGEKNYYFRGAAGDHGSCPTTTSPLASALLMPSEAVSSSWSESGGGLSGGDEEDTRLLQLLRTARDPSEAFQALQAALPRRGGRLGFPRRKEALYRALGRVLVEGGSDEKRLCLQLLSDVLRGQGEAGQLEEAFSLALLPQLVVSLREENPALRKDALQILHICLKRSPGEVLRTLIQQGLESTDARLRASTALLLPILLTTEDLLLGLDLTEVIISLARKLGDQETEEESETAFSALQQIGERLGQDRFQSYISRLPSALRRHYNRRLESQFGSQVPYYLELEASGFPEDPLPCAVTLSNSNLKFGIIPQELHSRLLDQEDYKNRTQAVEELKQVLGKFNPSSTPHSSLVGFISLLYNLLDDSNFKVVHGTLEVLHLLVIRLGEQVQQFLGPVIAASVKVLADNKLVIKQEYMKIFLKLMKEVGPQQVLCLLLEHLKHKHSRVREEVVNICICSLLTYPSEDFDLPKLSFDLAPALVDSKRRVRQAALEAFAVLASSMGSGKTSILFKAVDTVELQDNGDGVMNAVQARLARKTLPRLTEQGFVEYAVLMPSSAGGRSNHLAHGADTDWLLAGNRTQSAHCHCGDHVRDSMHIYGSYSPTICTRRVLSAGKGKNKLPWENEQPGIMGENQTSTSKDIEQFSTYDFIPSAKLKLSQGMPVNDDLCFSRKRVSRNLFQNSRDFNPDCLPLCAAGTTGTHQTNLSGKCAQLGFSQICGKTGSVGSDLQFLGTTSSHQEKVYASLNFGSKTQQTFGSQTECTSSNGQNPSPGAYILPSYPVSSPRTSPKHTSPLIISPKKSQDNSVNFSNSWPLKSFEGLSKPSPQKKLVSQKSSDPTGRNHGENSQEKPPVQLTPALVRSPSSRRGLNGTKPVPPIPRGISLLPDKADLSTVGHKKKEPDDIWKCEKDSLPIDLSELNFKDKDLDQEEVRHISNIWVKTLSNKTFFCKEKNFSYC

SEQ ID NO: 29812 - protein, 173 aa, Homo sapiens
  Payload ID: 5828
  Gene Symbol: FAM180A
  Gene Name: family with sequence similarity 180, member A
  Uniprot ID: Q6UWF9
  ENSP ID: ENSP00000342336
MHWKMLLLLLLYYNAEASMCHRWSRAVLFPAAHRPKRSSSLPLNPVLQTSLEEVELLYEFLLAELEISPDLQISIKDEELASLRKASDFRTVCNNVIPKSIPDIRRLSASLSSHPGILKKEDFERTVLTLAYTAYRTALSHGHQKDIWAQSLVSLFQALRHDLMRSSQPGVPP

SEQ ID NO: 29813 - protein, 173 aa, Homo sapiens; identical to SEQ ID NO: 29812
  Payload ID: 5828
  Gene Symbol: FAM180A
  Gene Name: family with sequence similarity 180, member A
  Uniprot ID: Q6UWF9
  ENSP ID: ENSP00000395467

SEQ ID NO: 29814 - protein, 173 aa, Homo sapiens; identical to SEQ ID NO: 29812
  Payload ID: 5828
  Gene Symbol: FAM180A
  Gene Name: family with sequence similarity 180, member A
  Uniprot ID: Q6UWF9
  ENSP ID: ENSP00000406553

SEQ ID NO: 29815 - protein, 201 aa, Homo sapiens
  Payload ID: 5829
  Gene Symbol: FAM180B
  Gene Name: family with sequence similarity 180, member B
  ENSP ID: ENSP00000443133
MREQRTAEQSETQRTWLSMAATLQFLVCLVVAICLLSGVTTTQPHAGQPMDSTSVGGGLQEPEAPEVMFELLWAGLELDVMGQLHIQDEELASTHPGRRLRLLLQHHVPSDLEGTEQWLQQLQDLRKGPPLSTWDFEHLLLTGLSCVYRLHAASEAEERGRWAQVFALLAQETLWDLCKGFCPQDRPPSLGSWASILDPFP

SEQ ID NO: 29816 - protein, 354 aa, Homo sapiens
  Payload ID: 5830
  Gene Symbol: FAM181A
  Gene Name: family with sequence similarity 181, member A
  Uniprot ID: Q8N9Y4
  ENSP ID: ENSP00000267594
MPLEERRSSGERNDAAPTNHRRPGEKRASTAKQVSSVPFLGAAGHQQSLPSSWKASCSGPLVMASDSDVKMLLNFVNLASSDIKAALDKSAPCRRSVDHRKYLQKQLKRFSQKYSRLPRGLPGRAAEPYLKRGSEDRPRRLLLDLGPDSSPGGGGGCKEKVLRNPYREECLAKEQLPQRQHPEAAQPGQVPMRKRQLPASFWEEPRPTHSYHVGLEGGLGPREGPPYEGKKNCKGLEPLGPETTLVSMSPRALAEKEPLKMPGVSLVGRVNAWSCCPFQYHGQPIYPGPLGALPQSPVPSLGLWRKSPAFPGELAHLCKDVDGLGQKVCRPVVLKPIPTKPAVPPPIFNVFGYL

SEQ ID NO: 29817 - protein, 292 aa, Homo sapiens
  Payload ID: 5830
  Gene Symbol: FAM181A
  Gene Name: family with sequence similarity 181, member A
  Uniprot ID: Q8N9Y4
  ENSP ID: ENSP00000451445
MASDSDVKMLLNFVNLASSDIKAALDKSAPCRRSVDHRKYLQKQLKRFSQKYSRLPRGLPGRAAEPYLKRGSEDRPRRLLLDLGPDSSPGGGGGCKEKVLRNPYREECLAKEQLPQRQHPEAAQPGQVPMRKRQLPASFWEEPRPTHSYHVGLEGGLGPREGPPYEGKKNCKGLEPLGPETTLVSMSPRALAEKEPLKMPGVSLVGRVNAWSCCPFQYHGQPIYPGPLGALPQSPVPSLGLWRKSPAFPGELAHLCKDVDGLGQKVCRPVVLKPIPTKPAVPPPIFNVFGYL

SEQ ID NO: 29818 - protein, 292 aa, Homo sapiens; identical to SEQ ID NO: 29817
  Payload ID: 5830
  Gene Symbol: FAM181A
  Gene Name: family with sequence similarity 181, member A
  Uniprot ID: Q8N9Y4
  ENSP ID: ENSP00000451678

SEQ ID NO: 29819 - protein, 292 aa, Homo sapiens; identical to SEQ ID NO: 29817
  Payload ID: 5830
  Gene Symbol: FAM181A
  Gene Name: family with sequence similarity 181, member A
  Uniprot ID: Q8N9Y4
  ENSP ID: ENSP00000451802

SEQ ID NO: 29820 - protein, 232 aa, Homo sapiens
  Payload ID: 5830
  Gene Symbol: FAM181A
  Gene Name: family with sequence similarity 181, member A
  ENSP ID: ENSP00000452393
MASDSDVKMLLNFVNLASSDIKAALDKSAPCRRSVDHRKYLQKQLKRFSQKYSRLPRGLPGRAAEPYLKRGSEDRPRRLLLDLGPDSSPGGGGGCKEKVLRNPYREECLAKEQLPQRQHPEAAQPGQVPMRKRQLPASFWEEPRPTHSYHVGLEGGLGPREGPPYEGKKNCKGLEPLGPETTLVSMSPRALAEKEPLKMPGVSLVGRVNAWSCCPFQYHGQPIYPGPLGALP

SEQ ID NO: 29821 - protein, 292 aa, Homo sapiens; identical to SEQ ID NO: 29817
  Payload ID: 5830
  Gene Symbol: FAM181A
  Gene Name: family with sequence similarity 181, member A
  Uniprot ID: Q8N9Y4
  ENSP ID: ENSP00000478207

SEQ ID NO: 29822 - protein, 292 aa, Homo sapiens; identical to SEQ ID NO: 29817
  Payload ID: 5830
  Gene Symbol: FAM181A
  Gene Name: family with sequence similarity 181, member A
  Uniprot ID: Q8N9Y4
  ENSP ID: ENSP00000478780

SEQ ID NO: 29823 - protein, 354 aa, Homo sapiens; identical to SEQ ID NO: 29816
  Payload ID: 5830
  Gene Symbol: FAM181A
  Gene Name: family with sequence similarity 181, member A
  Uniprot ID: Q8N9Y4
  ENSP ID: ENSP00000479410

SEQ ID NO: 29824 - protein, 232 aa, Homo sapiens; identical to SEQ ID NO: 29820
  Payload ID: 5830
  Gene Symbol: FAM181A
  Gene Name: family with sequence similarity 181, member A
  ENSP ID: ENSP00000486055

SEQ ID NO: 29825 - protein, 292 aa, Homo sapiens; identical to SEQ ID NO: 29817
  Payload ID: 5830
  Gene Symbol: FAM181A
  Gene Name: family with sequence similarity 181, member A
  Uniprot ID: Q8N9Y4
  ENSP ID: ENSP00000486422

SEQ ID NO: 29826 - protein, 426 aa, Homo sapiens
  Payload ID: 5831
  Gene Symbol: FAM181B
  Gene Name: family with sequence similarity 181, member B
  Uniprot ID: A6NEQ2
  ENSP ID: ENSP00000365295
MAVQAALLSTHPFVPFGFGGSPDGLGGAFGALDKGCCFEDDETGAPAGALLSGAEGGDVREATRDLLSFIDSASSNIKLALDKPGKSKRKVNHRKYLQKQIKRCSGLMGAAPPGPPSPSAADTPAKRPLAAPSAPTVAAPAHGKAAPRREASQAAAAASLQSRSLAALFDSLRHVPGGAEPAGGEVAAPAAGLGGAGTGGAGGDVAGPAGATAIPGARKVPLRARNLPPSFFTEPSRAGGGGCGPSGPDVSLGDLEKGAEAVEFFELLGPDYGAGTEAAVLLAAEPLDVFPAGASVLRGPPELEPGLFEPPPAVVGNLLYPEPWSVPGCSPTKKSPLTAPRGGLTLNEPLSPLYPAAADSPGGEDGRGHLASFAPFFPDCALPPPPPPHQVSYDYSAGYSRTAYSSLWRSDGVWEGAPGEEGAHRD

SEQ ID NO: 29827 - protein, 152 aa, Homo sapiens
  Payload ID: 5832
  Gene Symbol: FAM182B
  Gene Name: family with sequence similarity 182, member B
  Uniprot ID: Q5T319
  ENSP ID: ENSP00000365585
MQEMVRELWMWNVEEEEHEVGICTWGGQHCGCPAKSLPGPHPGGVSAPQSASQLMVKLLVWQKSVHKLRKVSATSSIAVYPCPGQSSGGAESPAPGPGLAGWSHLCGAALAEVQAAPVSQAAVSDASLGPEWSQEGCRPGLTSGQHGGRDGR

SEQ ID NO: 29828 - protein, 151 aa, Homo sapiens
  Payload ID: 5832
  Gene Symbol: FAM182B
  Gene Name: family with sequence similarity 182, member B
  ENSP ID: ENSP00000365586
LEMVRELWMWNVEEEEHEVGICTWGGQHCGCPAKSLPGPHPGGVSAPQSASQLMVKLLVWQKSVHKLRKVSATSSIAVYPCPGQSSGGAESPAPGPGLAGWSHLCGAALAEVQAAPVSQAAVSDASLGPEWSQEGCRPGLTSGQHGGRDGR

SEQ ID NO: 29829 - protein, 107 aa, Homo sapiens
  Payload ID: 5832
  Gene Symbol: FAM182B
  Gene Name: family with sequence similarity 182, member B
  ENSP ID: ENSP00000464534
MQVSFDFSCLEMVRELWMWNVEEEEHEVGICTWGGQHCGCPAKSLPGPHPGGVSAPQSASQLMVKLLVWQKSVHKLRKVSATSSIAVYPCPGQSSGGAESPAPGPGL

SEQ ID NO: 29830 - protein, 134 aa, Homo sapiens
  Payload ID: 5833
  Gene Symbol: FAM183A
  Gene Name: family with sequence similarity 183, member A
  Uniprot ID: A6NL82
  ENSP ID: ENSP00000334415
MAGHPKEKVIPDEVHQNQILRELYLKELRTQKLYTQYHVNPLRKIHTVTRKPMSWHDNLEEPADARFLNLIHHAAQGPRKKYPETQTENQEVGWDLEPLINPERHDRRLNHFRVCSDITLYKAKTWGLGDDHHK

SEQ ID NO: 29831 - protein, 58 aa, Homo sapiens
  Payload ID: 5833
  Gene Symbol: FAM183A
  Gene Name: family with sequence similarity 183, member A
  ENSP ID: ENSP00000387018
MAGHPKEKVIPDEVHQNQILRELYLKELRTQKLYTQYHVNPLRKSESSYSHQEAHVLA

SEQ ID NO: 29832 - protein, 106 aa, Homo sapiens
  Payload ID: 5833
  Gene Symbol: FAM183A
  Gene Name: family with sequence similarity 183, member A
  ENSP ID: ENSP00000387249
MKRRVKSGTHLMCSLEVHTVTRKPMSWHDNLEEPADARFLNLIHHAAQGPRKKYPETQTENQEVGWDLEPLINPERHDRRLNHFRVCSDITLYKAKTWGLGDDHHK

SEQ ID NO: 29833 - protein, 139 aa, Homo sapiens
  Payload ID: 5833
  Gene Symbol: FAM183A
  Gene Name: family with sequence similarity 183, member A
  ENSP ID: ENSP00000387254
MAGHPKEKVIPDEVHQNQILRELYLKELRTQKLYTQYHVNPLRKIHTVTRKPMSWHDNLEEPADARFLNLIHHAAQGPRKKYPETQTENQEVGWDLEPLVSVAPSSGNTRKHSSNINPERHDRRLNHFRVCSDITLYKA

SEQ ID NO: 29834 - protein, 971 aa, Homo sapiens
  Payload ID: 5834
  Gene Symbol: FAM184A
  Gene Name: family with sequence similarity 184, member A
  Uniprot ID: Q8NB25
  ENSP ID: ENSP00000326608
MKQQALTEFEAYKHRVEDMQLCAEAQHVQRIVTMSREVEEIRRKFEEKLRSFGQLQVQFEKDKRLALEDLQAAHRREIQELLKSQQDHSASVNKGQEKAEELHRMEVESLNKMLEELRLERKKLIEDYEGKLNKAQSFYERELDTLKRSQLFTAESLQASKEKEADLRKEFQGQEAILRKTIGKLKTELQMVQDEAGSLLDKCQKLQTALAIAENNVQVLQKQLDDAKEGEMALLSKHKEVESELAAARERLQQQASDLVLKASHIGMLQATQMTQEVTIKDLESEKSRVNERLSQLEEERAFLRSKTQSLDEEQKQQILELEKKVNEAKRTQQEYYERELKNLQSRLEEEVTQLNEAHSKTLEELAWKHHMAIEAVHSNAIRDKKKLQMDLEEQHNKDKLNLEEDKNQLQQELENLKEVLEDKLNTANQEIGHLQDMVRKSEQGLGSAEGLIASLQDSQERLQNELDLTKDSLKETKDALLNVEGELEQERQQHEETIAAMKEEEKLKVDKMAHDLEIKWTENLRQECSKLREELRLQHEEDKKSAMSQLLQLKDREKNAARDSWQKKVEDLLNQISLLKQNLEIQLSQSQTSLQQLQAQFTQERQRLTQELEELEEQHQQRHKSLKEAHVLAFQTMEEEKEKEQRALENHLQQKHSAELQSLKDAHRESMEGFRIEMEQELQTLRFELEDEGKAMLASLRSELNHQHAAAIDLLRHNHHQELAAAKMELERSIDISRRQSKEHICRITDLQEELRHREHHISELDKEVQHLHENISALTKELEFKGKEILRIRSESNQQIRLEEMEEKYLMRESKPEDIQMITELKAMLTERDQIIKKLIEDNKFYQLELVNRETNFNKVFNSSPTVGVINPLAKQKKKNDKSPTNRFVSVPNLSALESGGVGNGHPNRLDPIPNSPVHDIEFNSSKPLPQPVPPKGPKTFLSPAQSEASPVASPDPQRQEWFARYFTF

SEQ ID NO: 29835 - protein, 1140 aa, Homo sapiens
  Payload ID: 5834
  Gene Symbol: FAM184A
  Gene Name: family with sequence similarity 184, member A
  Uniprot ID: Q8NB25
  ENSP ID: ENSP00000342604
MATPGMSWQQHYYGGSAAKFAPSPATAQLAGHSMDYSQEMHLKMSKKIAQLTKVIYALNTKNDEHESAIQALKDAHEEEIQQILAETREKILQYKSKVTEELDLRRKIQVLESSLEDHIKMKQQALTEFEAYKHRVEDMQLCAEAQHVQRIVTMSREVEEIRRKFEEKLRSFGQLQVQFEKDKRLALEDLQAAHRREIQELLKSQQDHSASVNKGQEKAEELHRMEVESLNKMLEELRLERKKLIEDYEGKLNKAQSFYERELDTLKRSQLFTAESLQASKEKEADLRKEFQGQEAILRKTIGKLKTELQMVQDEAGSLLDKCQKLQTALAIAENNVQVLQKQLDDAKEGEMALLSKHKEVESELAAARERLQQQASDLVLKASHIGMLQATQMTQEVTIKDLESEKSRVNERLSQLEEERAFLRSKTQSLDEEQKQQILELEKKVNEAKRTQQEYYERELKNLQSRLEEEVTQLNEAHSKTLEELAWKHHMAIEAVHSNAIRDKKKLQMDLEEQHNKDKLNLEEDKNQLQQELENLKEVLEDKLNTANQEIGHLQDMVRKSEQGLGSAEGLIASLQDSQERLQNELDLTKDSLKETKDALLNVEGELEQERQQHEETIAAMKEEEKLKVDKMAHDLEIKWTENLRQECSKLREELRLQHEEDKKSAMSQLLQLKDREKNAARDSWQKKVEDLLNQISLLKQNLEIQLSQSQTSLQQLQAQFTQERQRLTQELEELEEQHQQRHKSLKEAHVLAFQTMEEEKEKEQRALENHLQQKHSAELQSLKDAHRESMEGFRIEMEQELQTLRFELEDEGKAMLASLRSELNHQHAAAIDLLRHNHHQELAAAKMELERSIDISRRQSKEHICRITDLQEELRHREHHISELDKEVQHLHENISALTKELEFKGKEILRIRSESNQQIRLHEQDLNKRLEKELDVMTADHLREKNIMRADFNKTNELLKEINAALQVSLEEMEEKYLMRESKPEDIQMITELKAMLTERDQIIKKLIEDNKFYQLELVNRETNFNKVFNSSPTVGVINPLAKQKKKNDKSPTNRFVSVPNLSALESGGVGNGHPNRLDPIPNSPVHDIEFNSSKPLPQPVPPKGPKTFLSPAQSEASPVASPDPQRQEWFARYFTF

SEQ ID NO: 29836 - protein, 165 aa, Homo sapiens
  Payload ID: 5834
  Gene Symbol: FAM184A
  Gene Name: family with sequence similarity 184, member A
  ENSP ID: ENSP00000357457
MTADHLREKNIMRADFNKTNELLKEINAALQVSLEEMEEKYLMRESKPEDIQMITELKAMLTERDQIIKKLIEDNKFYQLELVNRETNFNKVFNSSPTVGVINPLAKVSVRCMCMSSRNMTTGVSITHCCVPCNFPQRRPAQSEASPVASPDPQRQEWFARYFTF

SEQ ID NO: 29837 - protein, 936 aa, Homo sapiens
  Payload ID: 5834
  Gene Symbol: FAM184A
  Gene Name: family with sequence similarity 184, member A
  ENSP ID: ENSP00000357460
MKQQALTEFEAYKHRVEDMQLCAEAQHVQRIVTMSREVEEIRRKFEEKLRSFGQLQVQFEKDKRLALEDLQAAHRREIQELLKSQQDHSASVNKGQEKAEELHRMEVESLNKMLEELRLERKKLIEDYEGKLNKAQSFYERELDTLKRSQLFTAESLQASKEKEADLRKEFQGQEAILRKTIGKLKTELQMVQDEAGSLLDKCQKLQTALAIAENNVQVLQKQLDDAKEGEMALLSKHKEVESELAAARERLQQQASDLVLKASHIGMLQATQMTQEVTIKDLESEKSRVNERLSQLEEERAFLRSKTQSLDEEQKQQILELEKKVNEAKRTQQEYYERELKNLQSRLEEEVTQLNEAHSKTLEELAWKHHMAIEAVHSNAIRDKKKLQMDLEEQHNKDKLNLEEDKNQLQQELENLKEVLEDKLNTANQEIGHLQDMVRKSEQGLGSAEGLIASLQDSQERLQNELDLTKDSLKETKDALLNVEGELEQERQQHEETIAAMKEEEKLKVDKMAHDLEIKWTENLRQECSKLREELRLQHEEDKKSAMSQLLQLKDREKNAARDSWQKKVEDLLNQISLLKQNLEIQLSQSQTSLQQLQAQFTQERQRLTQELEELEEQHQQRHKSLKEAHVLAFQTMEEEKEKEQRALENHLQQKHSAELQSLKDAHRESMEGFRIEMEQELQTLRFELEDEGKAMLASLRSELNHQHAAAIDLLRHNHHQELAAAKMELERSIDISRRQSKEHICRITDLQEELRHREHHISELDKEVQHLHENISALTKELEFKGKEILRIRSESNQQIRLEEMEEKYLMRESKPEDIQMITELKAMLTERDQIIKKLIQKKKNDKSPTNRFVSVPNLSALESGGVGNGHPNRLDPIPNSPVHDIEFNSSKPLPQPVPPKGPKTFLSPAQSEASPVASPDPQRQEWFARYFTF

SEQ ID NO: 29838 - protein, 141 aa, Homo sapiens
  Payload ID: 5834
  Gene Symbol: FAM184A
  Gene Name: family with sequence similarity 184, member A
  ENSP ID: ENSP00000403472
  MOD_RES (1)..(1): Any amino acid
XQLEEERAFLRSKTQSLDEEQKQQILELEKKVNEAKRTQQEYYERELKNLQSRLEEEVTQLNEAHSKTLEELAWKHHMAIEAVHSNAIRDKKKLQMDLEEQHNKDKLNLEEDKNQLQQELENLKEVLEDKLNTANQEARIL

SEQ ID NO: 29839 - protein, 371 aa, Homo sapiens
  Payload ID: 5834
  Gene Symbol: FAM184A
  Gene Name: family with sequence similarity 184, member A
  ENSP ID: ENSP00000429080
  MOD_RES (1)..(1): Any amino acid
XLKEAHVLAFQTMEEEKEKEQRALENHLQQKHSAELQSLKDAHRESMEGFRIEMEQELQTLRFELEDEGKAMLASLRSELNHQHAAAIDLLRHNHHQELAAAKMELERSIDISRRQSKEHICRITDLQEELRHREHHISELDKEVQHLHENISALTKELEFKGKEILRIRSESNQQIRLHEQDLNKRLEKELDVMTADHLREKNIMRADFNKTNELLKEINAALQVSLEEMEEKYLMRESKPEDIQMITELKAMLTERDQIIKKLIEDNKFYQLELVNRETNFNKVFNSSPTVGVINPLAKQKKKNDKSPTNRFVSVPNLSALESGGVGNGHPNRLDPIPNSPVHDIEFNSSKPLPQPVPPKGPKTFLRYQ

SEQ ID NO: 29840 - protein, 268 aa, Homo sapiens
  Payload ID: 5834
  Gene Symbol: FAM184A
  Gene Name: family with sequence similarity 184, member A
  ENSP ID: ENSP00000429151
HNHHQELAAAKMELERSIDISRRQSKEHICRITDLQEELRHREHHISELDKEVQHLHENISALTKELEFKGKEILRIRSESNQQIRLHEQDLNKRLEKELDVMTADHLREKNIMRADFNKTNELLKEINAALQVSLEEMEEKYLMRESKPEDIQMITELKAMLTERDQIIKKLIQKKKNDKSPTNRFVSVPNLSALESGGVGNGHPNRLDPIPNSPVHDIEFNSSKPLPQPVPPKGPKTFLSPAQSEASPVASPDPQRQEWFARYFTF

SEQ ID NO: 29841 - protein, 74 aa, Homo sapiens
  Payload ID: 5834
  Gene Symbol: FAM184A
  Gene Name: family with sequence similarity 184, member A
  ENSP ID: ENSP00000429306
  MOD_RES (1)..(1): Any amino acid
XNRETNFNKVFNSSPTVGVINPLAKGLSSHVLFLMQQKKKNDKSPTNSPAQSEASPVASPDPQRQEWFARYFTF

SEQ ID NO: 29842 - protein, 529 aa, Homo sapiens
  Payload ID: 5834
  Gene Symbol: FAM184A
  Gene Name: family with sequence similarity 184, member A
  ENSP ID: ENSP00000429826
MKQQALTEFEAYKHRVEDMQLCAEAQHVQRIVTMSREVEEIRRKFEEKLRSFGQLQVQFEKDKRLALEDLQAAHRREIQELLKSQQDHSASVNKGQEKAEELHRMEVESLNKMLEELRLERKKLIEDYEGKLNKAQSFYERELDTLKRSQLFTAESLQASKEKEADLRKEFQGQEAILRKTIGKLKTELQMVQDEAGSLLDKCQKLQTALAIAENNVQVLQKQLDDAKEGEMALLSKHKEVESELAAARERLQQQASDLVLKASHIGMLQATQMTQEVTIKDLESEKSRVNERLSQLEEERAFLRSKTQSLDEEQKQQILELEKKVNEAKRTQQEYYERELKNLQSRLEEEVTQLNEAHSKTLEELAWKHHMAIEAVHSNAIRDKKKLQMDLEEQHNKDKLNLEEDKNQLQQELENLKEVLEDKLNTANQEIGHLQDMVRKSEQGLGSAEGLIASLQDSQERLQNELDLTKDSLKETKDALLNVELLVAPGILGIRQHNFHLCLSSHLKRIPGILEQGLILLQFDIILT

SEQ ID NO: 29843 - protein, 1056 aa, Homo sapiens
  Payload ID: 5834
  Gene Symbol: FAM184A
  Gene Name: family with sequence similarity 184, member A
  Uniprot ID: Q8NB25
  ENSP ID: ENSP00000430442
MATPGMSWQQHYYGGSAAKFAPSPATAQLAGHSMDYSQEMHLKMSKKIAQLTKVIYALNTKNDEHESAIQALKDAHEEEIQQILAETREKILQYKSKVTEELDLRRKIQVLESSLEDHIKMKQQALTEFEAYKHRVEDMQLCAEAQHVQRIVTMSREVEEIRRKFEEKLRSFGQLQVQFEKDKRLALEDLQAAHRREIQELLKSQQDHSASVNKGQEKAEELHRMEVESLNKMLEELRLERKKLIEDYEGKLNKAQSFYERELDTLKRSQLFTAESLQASKEKEADLRKEFQGQEAILRKTIGKLKTELQMVQDEAGSLLDKCQKLQTALAIAENNVQVLQKQLDDAKEGEMALLSKHKEVESELAAARERLQQQASDLVLKASHIGMLQATQMTQEVTIKDLESEKSRVNERLSQLEEERAFLRSKTQSLDEEQKQQILELEKKVNEAKRTQQEYYERELKNLQSRLEEEVTQLNEAHSKTLEELAWKHHMAIEAVHSNAIRDKKKLQMDLEEQHNKDKLNLEEDKNQLQQELENLKEVLEDKLNTANQEIGHLQDMVRKSEQGLGSAEGLIASLQDSQERLQNELDLTKDSLKETKDALLNVEGELEQERQQHEETIAAMKEEEKLKVDKMAHDLEIKWTENLRQECSKLREELRLQHEEDKKSAMSQLLQLKDREKNAARDSWQKKVEDLLNQISLLKQNLEIQLSQSQTSLQQLQAQFTQERQRLTQELEELEEQHQQRHKSLKEAHVLAFQTMEEEKEKEQRALENHLQQKHSAELQSLKDAHRESMEGFRIEMEQELQTLRFELEDEGKAMLASLRSELNHQHAAAIDLLRHNHHQELAAAKMELERSIDISRRQSKEHICRITDLQEELRHREHHISELDKEVQHLHENISALTKELEFKGKEILRIRSESNQQIRLEEMEEKYLMRESKPEDIQMITELKAMLTERDQIIKKLIQKKKNDKSPTNRFVSVPNLSALESGGVGNGHPNRLDPIPNSPVHDIEFNSSKPLPQPVPPKGPKTFLSPAQSEASPVASPDPQRQEWFARYFTF

SEQ ID NO: 29844 - protein, 70 aa, Homo sapiens
  Payload ID: 5834
  Gene Symbol: FAM184A
  Gene Name: family with sequence similarity 184, member A
  ENSP ID: ENSP00000430643
  MOD_RES (1)..(1): Any amino acid
XFYQLELVNRETNFNKVFNSSPTVGVINPLAKQKKKNDKSPTNSPAQSEASPVASPDPQRQEWFARYFTF

SEQ ID NO: 29845 - protein, 268 aa, Homo sapiens
  Payload ID: 5834
  Gene Symbol: FAM184A
  Gene Name: family with sequence similarity 184, member A
  ENSP ID: ENSP00000484054
MELERSIDISRRQSKEHICRITDLQEELRHREHHISELDKEVQHLHENISALTKELEFKGKEILRIRSESNQQIRLHEQDLNKRLEKELDVMTADHLREKNIMRADFNKTNELLKEINAALQVSLEEMEEKYLMRESKPEDIQMITELKAMLTERDQIIKKLIEDNKFYQLELVNRETNFNKVFNSSPTVGVINPLAKQKKKNDKSPTNRFVSVPNLSALESGGVGNGHPNRLDPIPNSPVHDIEFNSSKPLPQPVPPKGPKTFLRYQ

SEQ ID NO: 29846 - protein, 1098 aa, Homo sapiens
  Payload ID: 5834
  Gene Symbol: FAM184A
  Gene Name: family with sequence similarity 184, member A
  ENSP ID: ENSP00000484827
MSKKIAQLTKVIYALNTKNDEHESAIQALKDAHEEEIQQILAETREKILQYKSKVTEELDLRRKIQVLESSLEDHIKMKQQALTEFEAYKHRVEDMQLCAEAQHVQRIVTMSREVEEIRRKFEEKLRSFGQLQVQFEKDKRLALEDLQAAHRREIQELLKSQQDHSASVNKGQEKAEELHRMEVESLNKMLEELRLERKKLIEDYEGKLNKAQSFYERELDTLKRSQLFTAESLQASKEKEADLRKEFQGQEAILRKTIGKLKTELQMVQDEAGSLLDKCQKLQTALAIAENNVQVLQKQLDDAKEGEMALLSKHKEVESELAAARERLQQQASDLVLKASHIGMLQATQMTQEVTIKDLESEKSRVNERLSQLEEERAFLRSKTQSLDEEQKQQILELEKKVNEAKRTQQEYYERELKNLQSRLEEEVTQLNEAHSKTLEELAWKHHMAIEAVHSNAIRDKKKLQMDLEEQHNKDKLNLEEDKNQLQQELENLKEVLEDKLVNLQKKEIGHLQDMVRKSEQGLGSAEGLIASLQDSQERLQNELDLTKDSLKETKDALLNVEGELEQERQQHEETIAAMKEEEKLKVDKMAHDLEIKWTENLRQECSKLREELRLQHEEDKKSAMSQLLQLKDREKNAARDSWQKKVEDLLNQISLLKQNLEIQLSQSQTSLQQLQAQFTQERQRLTQELEELEEQHQQRHKSLKEAHVLAFQTMEEEKEKEQRALENHLQQKHSAELQSLKDAHRESMEGFRIEMEQELQTLRFELEDEGKAMLASLRSELNHQHAAAIDLLRHNHHQELAAAKMELERSIDISRRQSKEHICRITDLQEELRHREHHISELDKEVQHLHENISALTKELEFKGKEILRIRSESNQQIRLHEQDLNKRLEKELDVMTADHLREKNIMRADFNKTNELLKEINAALQVSLEEMEEKYLMRESKPEDIQMITELKAMLTERDQIIKKLIEDNKFYQLELVNRETNFNKVFNSSPTVGVINPLAKQKKKNDKSPTNRFVSVPNLSALESGGVGNGHPNRLDPIPNSPVHDIEFNSSKPLPQPVPPKGPKTFLSPAQSEASPVASPDPQRQEWFARYFTF

SEQ ID NO: 29847 - protein, 1060 aa, Homo sapiens
  Payload ID: 5835
  Gene Symbol: FAM184B
  Gene Name: family with sequence similarity 184, member B
  Uniprot ID: Q9ULE4
  ENSP ID: ENSP00000265018
MASALNSKINPPGTCQGSKADGGAGWRMDCDPQMHVKMCKKIAQLTKVIYALNTRQDEAEASMEALREAHQEELQNAVAETKARLLQEQGCAEEEALLQRIQALESALELQKRLTEEALAESASCRLETKERELRVEAEHAERVLTLSREMLELKADYERRLQHLTSHEATPQGRLPQESPETKSEPGQGPEMQEVLLEVQRLRVENQQLSKDYARKAEELQATYERENEAIRQAMQQSVSQALWQWQEKESDLRKNFQVQESALQAQVRKLEGDLEHRGRKISDLKKYAQKLKERIQDLDVQLKEARQENSELKGTAKKLGEKLAVAKDRMMLQECRGTQQTDAMKTELVSENKVLREENDLEAGNLHPQQDQSCLKECPCMKGGTDMQTKKEASAETEYMKQQYEEDLRKIKHQTEEEKKHLKDQLVKRLEDLVKKHTVEIKSVRSSVEAERKKLQREVEAQLEEVRKKSEKEIKQLEEEKAALNVKLQNSLLEVLRLEEFIQQNKTRPTGAEESPQELGRQHCSILETQDPCLKLDETSPRGEEYQDKLAAEEGTSSDEEERTKVLLKEGSDPQPPLGSLLKEKTSKIQRLEEDWQSQKAKLQAQVSQMQQALEQCTSNYREDLQALKQLSDLEREKLQRELQETTQQNHAMKAQLEASHQRALRMLEKARHQELKATEERLKKESSHSLQIQHQTHRLELQALEEKARQELQEERERMQAQQALLLESLRQELSEQQAACSGHQKDLEALQAELRALGRQQASSQCPGDSKDHIIATEERGGPGQAGSPPGAAGQGSGEGCGLWEENAQLQDAVRRLRAEVEQHQQEAQKLRDQRRFLEETQQAQRAREVETLRQEHRKEMQAMVADFSSAQAQLQARLAALEAELKDSGEKPGKGASRPEDLQLIGRLQTRLKEREDIIKQLTEERRFHYAAFPSAMSHRNRSFSFNPHPGYLTPSMKKKKVEDVPSRVVSVPNLASYAKNFLSGDLSSRINAPPITTSPSLDPSPSCGRTYKPNQSTDAKTATRTPDGETAQAKEVQQKQGSPHQEWFTKYFSF

SEQ ID NO: 29848 - protein, 275 aa, Homo sapiens
  Payload ID: 5836
  Gene Symbol: FAM185A
  Gene Name: family with sequence similarity 185, member A
  Uniprot ID: Q8N0U4
  ENSP ID: ENSP00000387066
MLAPCSGWELGCFRLCLRQVRLWAGAGRWACWACQARPYSSGGSERWPGSETEVPPPGPGRRTLKEWTLQGQKLHVQTKGGKVICLGTVYGNIDIHASDKSAVTIDKLQGSSVTVSTEDGLLKAKYLYTESSFLSSAAGDITLGSVHGNITLQSKMGNITVDSSSGCLKASTNQGAIDVYVSQLGKVELKSHKGSIIVKVPSSLQAHLQLSGKEVDVNSEVHVQEMAEVRKDDVVTVTGLMNQASKREKWIKADAPKGTVSFRRQSWFQSLKLQD

SEQ ID NO: 29849 - protein, 392 aa, Homo sapiens
  Payload ID: 5836
  Gene Symbol: FAM185A
  Gene Name: family with sequence similarity 185, member A
  Uniprot ID: Q8N0U4
  ENSP ID: ENSP00000395340
MLAPCSGWELGCFRLCLRQVRLWAGAGRWACWACQARPYSSGGSERWPGSETEVPPPGPGRRTLKEWTLQVSPFGRLRARLPCHLAVRPLDPLTYPDGDRVLVAVCGVEGGVRGLDGLQVKYDEDLEEMAIVSDTIHPQASVEVNAPLKFGLDIKSSGSGCVKVQSIEGDNCKIETEHGTSILQSVKGQKLHVQTKGGKVICLGTVYGNIDIHASDKSAVTIDKLQGSSVTVSTEDGLLKAKYLYTESSFLSSAAGDITLGSVHGNITLQSKMGNITVDSSSGCLKASTNQGAIDVYVSQLGKVELKSHKGSIIVKVPSSLQAHLQLSGKEVDVNSEVHVQEMAEVRKDDVVTVTGLMNQASKREKWIKADAPKGTVSFRRQSWFQSLKLQD

SEQ ID NO: 29850 - protein, 71 aa, Homo sapiens
  Payload ID: 5836
  Gene Symbol: FAM185A
  Gene Name: family with sequence similarity 185, member A
  ENSP ID: ENSP00000400947
MLAPCSGWELGCFRLCLRQVRLWAGAGRWACWACQARPYSSGGSERWPGSETEVPPPGPGRRTLKEWTLQV

SEQ ID NO: 29851 - protein, 194 aa, Homo sapiens
  Payload ID: 5836
  Gene Symbol: FAM185A
  Gene Name: family with sequence similarity 185, member A
  ENSP ID: ENSP00000410034
MLAPCSGWELGCFRLCLRQVRLWAGAGRWACWACQARPYSSGGSERWPGSETEVPPPGPGRRTLKEWTLQVSPFGRLRARLPCHLAVRPLDPLTYPDGDRVLVAVCGVEGGVRGLDGLQVKYDEDLEEMAIVSDTIHPQASVEVNAPLKFGLDIKSSGSGCVKVQSIEGDNCKIETEHGTSILQSVKGQKLHVQ

SEQ ID NO: 29852 - protein, 144 aa, Homo sapiens
  Payload ID: 5836
  Gene Symbol: FAM185A
  Gene Name: family with sequence similarity 185, member A
  Uniprot ID: Q8N0U4
  ENSP ID: ENSP00000410226
MLAPCSGWELGCFRLCLRQVRLWAGAGRWACWACQARPYSSGGSERWPGSETEVPPPGPGRRTLKEWTLQVSPFGRLRARLPCHLAVRPLDPLTYPDGDRVLVAVCGVEGGVRGLDGLQVKYDEDLEEMAIVSDTIHPQASVEV

SEQ ID NO: 29853 - protein, 2351 aa, Homo sapiens
  Payload ID: 5837
  Gene Symbol: FAM186A
  Gene Name: family with sequence similarity 186, member A
  Uniprot ID: A6NE01
  ENSP ID: ENSP00000329995
MFFKMKNEIDNDPESEKCIKDSTIMRREPQNILSPLMLPNLEIPFSVKDIISRIERAQLHRAREDIDMQLSEIMNNVHRIMTRYTLVFNSSSERNVSLTEHKKKQRTNFLEKMATYAKTIEIREKTLANILAWLEEWNDVLSEMTLMDVDEHHHWIAQMELLPDTLKAIENNVKILSRFSTSFLDEKKKQKKKILSRGTLWKSWKERVIKRPSTARALRPDQMISDQLATNTKVSEIQGMLQELIGTTMFSTLENNAIKYISSTIVNLSTALSMLNDELKCVNFQSSTVYAHETSEAEKELSLKIIRDLSNENEMLQQKLQDAEEKCEQLIRSKIVIEQLYAKLSTSSTLKVLPGPSPQSSRAIIKVGDTEDNMDNILDKELENIVDEVQRKETKDSGIKWDSTISYTAQAERTPDLTELRQQPVASEDISEDSTKDNVSLKKGDFYQEDETDEYQSWKRSHKKATYVYETSGPNLSDNKSGQKVSEAKPSQYYELQVLKKKRKEMKSFSEDKSKSPTEAKRKHLSLTETKSQGGKSGTSMMMLEQFRKVKRESPFDKRPTAAEIKVEPTTESLDKEGKGEIRSLVEPLSMIQFDDTAEPQKGKIKGKKHHISSGTITSKEEKTEEKEELTKQVKSHQLVKSLSRVAKETSESTRVLESPDGKSEQSNLEEFQEAIMAFLKQKIDNIGKAFDKKTVPKEEELLKRAEAEKLGIIKAKMEEYFQKVAETVTKILRKYKDTKKEEQVGEKPIKQKKVVSFMPGLHFQKSPISAKSESSTLLSYESTDPVINNLIQMILAEIESERDIPTVSTVQKDHKEKEKQRQEQYLQEGQEQMSGMSLKQQLLGERNLLKEHYEKISENWEEKKAWLQMKEGKQEQQSQKQWQEEEMWKEEQKQATPKQAEQEEKQKQRGQEEEELPKSSLQRLEEGTQKMKTQGLLLEKENGQMRQIQKEAKHLGPHRRREKGKEKQKPERGLEDLERQIKTKDQMQMKETQPKELEKMVIQTPMTLSPRWKSVLKDVQRSYEGKEFQRNLKTLENLPDEKEPISITPPPSLQYSLPGALPISGQPLTKCIHLTPQQAQEVGITLTPQQAQAQGITLTLQQAQELGIPLTPQQAQALEILFTPQQAQALGIPLTPQQTQVQGITLTPQQDQAPGISLTTQQAQKLGIPLTPQQAQALGIPLTPQQAQELGIPLTPQQAQALRVSLTPQQAQELGIPLTPQQAQALGITLTLQQAQQLGIPLTPQQAQALGITLTPKQVQELGIPLTPQQAQALGITLTPKQAQELGIPLNPQQAQTLGIPLTPKQAQALGIPFTPQQAQALGIPLTPQQAQTQEITLTPQQAQALGMPLTTQQAQELGIPLTPQHAQALGMPLTTQQAQELGIPLTPQQAQALGMPLTTQQAQELGIPLTPQQAQELGIPFTPQQAQAQEITLTPQQAQALGMPLTAQQAQELGITLTPQQAQELGIPLTPQQAQALGIPLIPPQAQELGIPLTPQQAQALGILLIPPQAQELGIPLTPQQAQALGIPLIPPQAQELGIPLTPQQVQALGIPLIPPQAQELEIPLTPQQAQALGIPLTPQQAQELGIPLTPQQAQELGIPLTPQQAQAQGIPLTPQQAQALGISLTPQQAQAQGITLTPQQAQALGVPITPVNAWVSAVTLTSEQTHALESPMNLEQAQEQLLKLGVPLTLDKAHTLGSPLTLKQVQWSHRPFQKSKASLPTGQSIISRLSPSLRLSLASSAPTAEKSSIFGVSSTPLQISRVPLNQGPFAPGKPLEMGILSEPGKLGAPQTLRSSGQTLVYGGQSTSAQFPAPQAPPSPGQLPISRAPPTPGQPFIAGVPPTSGQIPSLWAPLSPGQPLVPEASSIPGDLLESGPLTFSEQLQEFQPPATAEQSPYLQAPSTPGQHLATWTLPGRASSLWIPPTSRHPPTLWPSPAPGKPQKSWSPSVAKKRLAIISSLKSKSVLIHPSAPDFKVAQVPFTTKKFQMSEVSDTSEETQILRDTFAIESFRTFQSHFTKYRTPVYQTPYTDERALLTLMKPTTSPSSLTTLLRTSQISPLEWYQKSRFPPIDKPWILSSVSDTKKPKVMVPPSSPQELEEKRYFVDVEAQKKNLILLNQAIKTCGLPSQLHTMARTLIIEILHMDTVQLGYLFRKYIAYRLIQHARNNIMKRLKAIQNTGKGYEARNLHMMLSRLDDYGKKVMQVWTEKQKSLGQKRNQCLKKMIHVFNQLKKIHELNLSQPIPLIIEEKQIPASTTFVQKPFLKLLMEEDRTSDICKKFRQQEDQTEAIWNVDLSTSSYPIAEKTSMHSLWAQLGGYPDIPRLLQLEVQSTFRKSLASLQSRVKKIPK

SEQ ID NO: 29854 - protein, 73 aa, Homo sapiens
  Payload ID: 5837
  Gene Symbol: FAM186A
  Gene Name: family with sequence similarity 186, member A
  ENSP ID: ENSP00000437706
  MOD_RES (1)..(1): Any amino acid
XNNIMKRLKAIQNTGKGYEARNLHMMLSRLDDYGKKVMQVWTEKQKSLGQKRNQCLKKMIHATRGPDRGHLEC

SEQ ID NO: 29855 - protein, 2348 aa, Homo sapiens
  Payload ID: 5837
  Gene Symbol: FAM186A
  Gene Name: family with sequence similarity 186, member A
  ENSP ID: ENSP00000441337
MFFKMKNEIDNDPESEKCIKDSTIMRREPQNILSPLMLPNLEIPFSVKDIISRIERAQLHRAREDIDMQLSEIMNNVHRIMTRYTLVFNSSSERNVSLTEHKKKQRTNFLEKMATYAKTIEIREKTLANILAWLEEWNDVLSEMTLMDVDEHHHWIAQMELLPDTLKAIENNVKILSRFSTSFLDEKKKQKKKILSRGTLWKSWKERVIKRPSTARALRPDQMISDQLATNTKVSEIQGMLQELIGTTMFSTLENNAIKYISSTIVNLSTALSMLNDELKCVNFQSSTVYAHETSEAEKELSLKIIRDLSNENEMLQQKLQDAEEKCEQLIRSKIVIEQLYAKLSTSSTLKVLPGPSPQSSRAIIKVGDTEDNMDNILDKELENIVDEVQRKETKDSGIKWDSTISYTAQAERTPDLTELRQQPVASEDISEDSTKDNVSLKKGDFYQEDETDEYQSWKRSHKKATYVYETSGPNLSDNKSGQKVSEAKPSQYYELQVLKKKRKEMKSFSEDKSKSPTEAKRKHLSLTETKSQGGKSGTSMMMLEQFRKVKRESPFDKRPTAAEIKVEPTTESLDKEGKGEIRSLVEPLSMIQFDDTAEPQKGKIKGKKHHISSGTITSKEEKTEEKEELTKQVKSHQLVKSLSRVAKETSESTRVLESPDGKSEQSNLEEFQEAIMAFLKQKIDNIGKAFDKKTVPKEEELLKRAEAEKLGIIKAKMEEYFQKVAETVTKILRKYKDTKKEEQVGEKPIKQKKVVSFMPGLHFQKSPISAKSESSTLLSYESTDPVINNLIQMILAEIESERDIPTVSTVQKDHKEKEKQRQEQYLQEGQEQMSGMSLKQQLLGERNLLKEHYEKISENWEEKKAWLQMKEGKQEQQSQKQWQEEEMWKEEQKQATPKQAEQEEKQKQRGQEEEELPKSSLQRLEEGTQKMKTQGLLLEKENGQMRQIQKEAKHLGPHRRREKGKEKQKPERGLEDLERQIKTKDQMQMKETQPKELEKMVIQTPMTLSPRWKSVLKDVQRSYEGKEFQRNLKTLENLPDEKEPISITPPPSLQYSLPGALPISGQPLTKCIHLTPQQAQEVGITLTPQQAQAQGITLTLQQAQELGIPLTPQQAQALEILFTPQQAQALGIPLTPQQTQVQGITLTPQQDQAPGISLTTQQAQKLGIPLTPQQAQALGIPLTPQQAQELGIPLTPQQAQALRVSLTPQQAQELGIPLTPQQAQALGITLTLQQAQQLGIPLTPQQAQALGITLTPKQVQELGIPLTPQQAQALGITLTPKQAQELGIPLNPQQAQTLGIPLTPKQAQALGIPFTPQQAQALGIPLTPQQAQTQEITLTPQQAQALGMPLTTQQAQELGIPLTPQHAQALGMPLTTQQAQELGIPLTPQQAQALGMPLTTQQAQELGIPLTPQQAQELGIPFTPQQAQAQEITLTPQQAQALGMPLTAQQAQELGITLTPQQAQELGIPLTPQQAQALGIPLIPPQAQELGIPLTPQQAQALGILLIPPQAQELGIPLTPQQAQALGIPLIPPQAQELGIPLTPQQVQALGIPLIPPQAQELEIPLTPQQAQALGIPLTPQQAQELGIPLTPQQAQELGIPLTPQQAQAQGIPLTPQQAQALGISLTPQQAQAQGITLTPQQAQALGVPITPVNAWVSAVTLTSEQTHALESPMNLEQAQEQLLKLGVPLTLDKAHTLGSPLTLKQVQWSHRPFQKSKASLPTGQSIISRLSPSLRLSLASSAPTAEKSSIFGVSSTPLQISRVPLNQGPFAPGKPLEMGILSEPGKLGAPQTLRSSGQTLVYGGQSTSAQFPAPQAPPSPGQLPISRAPPTPGQPFIAGVPPTSGQIPSLWAPLSPGQPLVPEASSIPGDLLESGPLTFSEQLQEFQPPATAEQSPYLQAPSTPGQHLATWTLPGRASSLWIPPTSRHPPTLWPSPAPGKPQKSWSPSVAKKRLAIISSLKSKSVLIHPSAPDFKVAQVPFTTKKFQMSEVSDTSEETQILRDTFAIESFRTFQSHFTKYRTPVYQTPYTDERALLTLMKPTTSPSSLTTLLRTSQISPLEWYQKSRFPPIDKPWILSSVSDTKKPKVMVPPSSPQELEEKRYFVDVEAQKKNLILLNQAIKTCGLPSQLHTMARTLIIEILHMDTVQLGYLFRKYIAYRLIQHARNNIMKRLKAIQNTGKGYEARNLHMMLSRLDDYGKKVMQVWTEKQKSLGQKRNQCLKKMIHVFNQLKKIHELNLSQPIPLIIEEKQIPASTTFVQKPFLKLLMEEDRTSDICKKFRQQEDQTEAIWNVDLSTSSYPIAEKTSMHSLWAQLGGYPDIPRLLQLEVQSTFRKSLASLQSRSSG

SEQ ID NO: 29856 - protein, 359 aa, Homo sapiens
  Payload ID: 5837
  Gene Symbol: FAM186A
  Gene Name: family with sequence similarity 186, member A
  ENSP ID: ENSP00000443703
MSEVSDTSEETQILRDTFAIESFRTFQSHFTKYRTPVYQTPYTDERALLTLMKPTTSPSSLTTLLRTSQISPLEWYQKSRFPPIDKPWILSSVSDTKKPKVMVPPSSPQELEEKRYFVDVEAQKKNLILLNQAIKTCGLPSQLHTMARTLIIEILHMDTVQLGYLFRKYIAYRLIQHARNNIMKRLKAIQNTGKGYEARNLHMMLSRLDDYGKKVMQVWTEKQKSLGQKRNQCLKKMIHVFNQLKKIHELNLSQPIPLIIEEKQIPASTTFVQKPFLKLLMEEDRTSDICKKFRQQEDQTEAIWNVDLSTSSYPIAEKTSMHSLWAQLGGYPDIPRLLQLEVQSTFRKSLASLQSRSSG

SEQ ID NO: 29857 - protein, 893 aa, Homo sapiens
  Payload ID: 5838
  Gene Symbol: FAM186B
  Gene Name: family with sequence similarity 186, member B
  Uniprot ID: Q8IYM0
  ENSP ID: ENSP00000257894
MEKDDPPQLVTPTSVKAIILRIEAAQLTRAQEDISTQLSDILDNVNCVINRFQEELGYDLKENAKSQQRDPKGKKRFILLEKIASFSKDAMMKEKHLYDILRWLGDWGDTLTYEIGPRKSEEEAAALDEWIEVTEKVLPLSLIATKRGIESLTALCSTLIEGQKKRSQVSKRTFWQGWQGRSPQTSPSHPQPLSPEQMLQDQHTMNTKASEVTSMLQELLDSTMFSKGEVRAIRYMATVVENLNKALILQHKENRSLETKYRHLQMQATKELSSQRLHFQQFMEVLESRRDALLKQVEILGGRYHDLLLMKQALEFQLKKAQNATGQAEDLAEVSVDSPGPSERETLPRKETVMEESQQEPMKEEQLFSPLPPSPMAMIRDSGAIAAGHQPLSTMTVRSRVADVFGSKDTESLEPVLLPLVDRRFPKKWERPVAESLGHKDKDQEDYFQKGGLQIKFHCSKQLSLESSRQVTSESQEEPWEEEFGREMRRQLWLEEEEMWQQRQKKWALLEQEHQEKLRQWNLEDLAREQQRRWVQLEKEQESPRREPEQLGEDVERRIFTPTSRWRDLEKAELSLVPAPSRTQSAHQSRRPHLPMSPSTQQPALGKQRPMSSVEFTYRPRTRRVPTKPKKSASFPVTGTSIRRLTWPSLQISPANIKKKVYHMDMEAQRKNLQLLSEESELRLPHYLRSKALELTTTTMELGALRLQYLCHKYIFYRRLQSLRQEAINHVQIMKETEASYKAQNLYIFLENIDRLQSLRLQAWTDKQKGLEEKHRECLSSMVTMFPKLQLEWNVHLNIPEVTSPKPKKCKLPAASPRHIRPSGPTYKQPFLSRHRACVPLQMARQQGKQMEAVWKTEVASSSYAIEKKTPASLPRDQLRGHPDIPRLLTLDV

SEQ ID NO: 29858 - protein, 57 aa, Homo sapiens
  Payload ID: 5838
  Gene Symbol: FAM186B
  Gene Name: family with sequence similarity 186, member B
  ENSP ID: ENSP00000433047
MEKDDPPQLVTPTSVKAIILRIEAAQLTRAQEVAPEMKESLLHWDLMRRLGADPRFE

SEQ ID NO: 29859 - protein, 506 aa, Homo sapiens
  Payload ID: 5838
  Gene Symbol: FAM186B
  Gene Name: family with sequence similarity 186, member B
  ENSP ID: ENSP00000436995
GHQPLSTMTVRSRVADVFGSKDTESLEPVLLPLVDRRFPKKWERPVAESLGHKDKDQEDYFQKGGLQIKFHCSKQLSLESSRQVTSESQEEPWEEEFGREMRRQLWLEEEEMWQQRQKKWALLEQEHQEKLRQWNLEDLAREQQRRWVQLEKEQESPRREPEQLGEDVERRIFTPTSRWRDLEKAELSLVPAPSRTQSAHQSRRPHLPMSPSTQQPALGKQRPMSSVEFTYRPRTRRVPTKPKKSASFPVTGTSIRRLTWPSLQISPANIKKKVYHMDMEAQRKNLQLLSEESELRLPHYLRSKALELTTTTMELGALRLQYLCHKYIFYRRLQSLRQEAINHVQIMKETEASYKAQNLYIFLENIDRLQSLRLQAWTDKQKGLEEKHRECLSSMVTMFPKLQLEWNVHLNIPEVTSPKPKKCKLPAASPRHIRPSGPTYKQPFLSRHRACVPLQMARQQGKQMEAVWKTEVASSSYAIEKKTPASLPRDQLRGHPDIPRLLTLDV

SEQ ID NO: 29860 - protein, 241 aa, Homo sapiens
  Payload ID: 5838
  Gene Symbol: FAM186B
  Gene Name: family with sequence similarity 186, member B
  ENSP ID: ENSP00000448656
MEKDDPPQLVTPTSVKAIILRIEAAQLTRAQEDISTQLSDILDNVNCVINRFQEELGYDLKENAKSQQRDPKGKKRFILLEKIASFSKDAMMKEKHLYDILRWLGDWGDTLTYEIGPRKSEEEAAALDEWIEVTEKVLPLSLIATKRGIESLTALCSTLIEGQKKRSQVSKRTFWQGWQGRSPQTSPSHPQPLSPEQMLQDQHTMNTKASERTKGRNARNLQMNPLSLFKKSQASHSLEPK

SEQ ID NO: 29861 - protein, 117 aa, Homo sapiens
  Payload ID: 5838
  Gene Symbol: FAM186B
  Gene Name: family with sequence similarity 186, member B
  ENSP ID: ENSP00000448989
  MOD_RES (1)..(1): Any amino acid
XCLSSMVTMFPKLQLEWNVHLNIPEVTSPKPKKCKLPAASPRHIRPSGPTYKQPFLSRHRACVPLQMARQQGKQMEAVWKTEVASSSYAIEKKTPASLPRDQLRGHPDIPRLLTLDV

SEQ ID NO: 29862 - protein, 413 aa, Homo sapiens
  Payload ID: 5839
  Gene Symbol: FAM187A
  Gene Name: family with sequence similarity 187, member A
  Uniprot ID: A6NFU0
  ENSP ID: ENSP00000329499
MHLALTTVLLWAWGLQAFEIVEKENIFQRTPCPAFLMFENAAYLADMSFELPCHCKPEEVPAVVWFYQKHLGSSHTKVLTDFDGRVLTEAAQVRVGSDMLTRFSIRMFSLLVFRAQSEDSGLYFCGTRKGDYFYAYDVDIQNSEGMVATFQDKGQEPFADEYYGHLHVFTTFWEWTPCDRCGVRGEQWRIGLCYLQSPDLSPRYLKAVPDVVSCGSRAVPRKLRTKARDHTPEVLVRSCLVPCEKTKTIREGVLAIINYVSKVGSRPWVPQVPIQFHQQRLGHGLIISCPGARPEHAVAWDKDRQHLYRTQYLKGVNRSMRVFIDHGNQLHIRFTQLDDRGIYYCWRQGVLVAGFRLGVTSHGHYPASFSDPETRSAVELTLIGYLLITAVFVTIHFCRCCCYLFHCCPSFSP

SEQ ID NO: 29863 - protein, 242 aa, Homo sapiens; identical to SEQ ID NO: 18211
  Payload ID: 5839
  Gene Symbol: FAM187A
  Gene Name: family with sequence similarity 187, member A
  ENSP ID: ENSP00000391869

SEQ ID NO: 29864 - protein, 369 aa, Homo sapiens
  Payload ID: 5840
  Gene Symbol: FAM187B
  Gene Name: family with sequence similarity 187, member B
  Uniprot ID: Q17R55
  ENSP ID: ENSP00000323355
MPPMLWLLLHFAAPALGFYFSISCPSGKQCQQALLSGNDILLYCNSSGAHWYYLFTQGKKGRLTSLTNISNMEIMPEGSLLIKDPLPSQTGLYHCWNKNGRQVVQYEIDFQDVTTLHITHKDLGQRPLQNETLHLGSKQLIFTWWEPWQDCNRCEEPGECKRLGYRYIEEPLEEAMPCWLYLGEVLVWSSRLRPELQVEACHVQCTNNTQLRVDYVIFDNFRLDEKTEFVWLDCPLGSMYRPVNWRANDTPLTWESQLSGQDFTTFLDPSTGGRQLQVFQPAVYKCFVQQELVAQFKPAASLETLEAQWRENDAQWREARKALRGRADSVLKGLKLVLLVVTVLALLGALLKCIHPSPGRRSTQVLVVK

SEQ ID NO: 29865 - protein, 445 aa, Homo sapiens
  Payload ID: 5841
  Gene Symbol: FAM188A
  Gene Name: family with sequence similarity 188, member A
  Uniprot ID: Q9H8M7
  ENSP ID: ENSP00000277632
MSELTKELMELVWGTKSSPGLSDTIFCRWTQGFVFSESEGSALEQFEGGPCAVIAPVQAFLLKKLLFSSEKSSWRDCSEEEQKELLCHTLCDILESACCDHSGSYCLVSWLRGKTTEETASISGSPAESSCQVEHSSALAVEELGFERFHALIQKRSFRSLPELKDAVLDQYSMWGNKFGVLLFLYSVLLTKGIENIKNEIEDASEPLIDPVYGHGSQSLINLLLTGHAVSNVWDGDRECSGMKLLGIHEQAAVGFLTLMEALRYCKVGSYLKSPKFPIWIVGSETHLTVFFAKDMALVAPEAPSEQARRVFQTYDPEDNGFIPDSLLEDVMKALDLVSDPEYINLMKNKLDPEGLGIILLGPFLQEFFPDQGSSGPESFTVYHYNGLKQSNYNEKVMYVEGTAVVMGFEDPMLQTDDTPIKRCLQTKWPYIELLWTTDRSPSLN

SEQ ID NO: 29866 - protein, 150 aa, Homo sapiens
  Payload ID: 5841
  Gene Symbol: FAM188A
  Gene Name: family with sequence similarity 188, member A
  ENSP ID: ENSP00000367275
MALVAPEAPSEQARRVFQTYDPEDNGFIPDSLLEDVMKALDLVSDPEYINLMKNKLDPEGLGIILLGPFLQEFFPDQGSSGPESFTVYHYNGLKQSNYNEKVMYVEGTAVVMGFEDPMLQTDDTPIKRCLQTKWPYIELLWTTDRSPSLN

SEQ ID NO: 29867 - protein, 182 aa, Homo sapiens
  Payload ID: 5841
  Gene Symbol: FAM188A
  Gene Name: family with sequence similarity 188, member A
  ENSP ID: ENSP00000388661
LPELKDAVLDQYSMWGNKFGVLLFLYSVLLTKGIENIKNEIEDASEPLIDPVYGHGSQSLINLLLTGHAVSNVWDGDRECSGMKLLGIHEQAAVGFLTLMEALRYCKVGSYLKSPKFPIWIVGSETHLTVFFAKDMALVAPEAPSEQARRVFQTYDPEDNGFIPDSLLEDVMKALDLVSDPE

SEQ ID NO: 29868 - protein, 164 aa, Homo sapiens
  Payload ID: 5841
  Gene Symbol: FAM188A
  Gene Name: family with sequence similarity 188, member A
  ENSP ID: ENSP00000389883
MKRFPAKKRSFRSLPELKDAVLDQYSMWGNKFGVLLFLYSVLLTKGIENIKNEIEDASEPLIDPVYGHGSQSLINLLLTGHAVSNVWDGDRECSGMKLLGIHEQAAVGFLTLMEALRYCKVGSYLKSPKFPIWIVGSETHLTVFFAKDMALVAPEAPSEQARRV

SEQ ID NO: 29869 - protein, 757 aa, Homo sapiens
  Payload ID: 5842
  Gene Symbol: FAM188B
  Gene Name: family with sequence similarity 188, member B
  Uniprot ID: Q4G0A6
  ENSP ID: ENSP00000265299
MDSLFVEEVAASLVREFLSRKGLKKTCVTMDQERPRSDLSINNRNDLRKVLHLEFLYKENKAKENPLKTSLELITRYFLDHFGNTANNFTQDTPIPALSVPKKNNKVPSRCSETTLVNIYDLSDEDAGWRTSLSETSKARHDNLDGDVLGNFVSSKRPPHKSKPMQTVPGETPVLTSAWEKIDKLHSEPSLDVKRMGENSRPKSGLIVRGMMSGPIASSPQDSFHRHYLRRSSPSSSSTQPQEESRKVPELFVCTQQDILASSNSSPSRTSLGQLSELTVERQKTTASSPPHLPSKRLPPWDRARPRDPSEDTPAVDGSTDTDRMPLKLYLPGGNSRMTQERLERAFKRQGSQPAPVRKNQLLPSDKVDGELGALRLEDVEDELIREEVILSPVPSVLKLQTASKPIDLSVAKEIKTLLFGSSFCCFNEEWKLQSFSFSNTASLKYGIVQNKGGPCGVLAAVQGCVLQKLLFEGDSKADCAQGLQPSDAHRTRCLVLALADIVWRAGGRERAVVALASRTQQFSPTGKYKADGVLETLTLHSLTCYEDLVTFLQQSIHQFEVGPYGCILLTLSAILSRSTELIRQDFDVPTSHLIGAHGYCTQELVNLLLTGKAVSNVFNDVVELDSGDGNITLLRGIAARSDIGFLSLFEHYNMCQVGCFLKTPRFPIWVVCSESHFSILFSLQPGLLRDWRTERLFDLYYYDGLANQQEQIRLTIDTTQTISEDTDNDLVPPLELCIRTKWKGASVNWNGSDPIL

SEQ ID NO: 29870 - protein, 539 aa, Homo sapiens
  Payload ID: 5843
  Gene Symbol: FAM189A1
  Gene Name: family with sequence similarity 189, member A1
  Uniprot ID: O60320
  ENSP ID: ENSP00000261275
MPPAGGPRAPRPAALPRSLSRLRECPGRSRIVLALGATQMALGCLIVAVSFAALALTTSARVRHSCPFWAGFSVLLSGLIGVVSWKRPLSLVITFFMLLSAVCVMLNLAGSILSCQNAQLVNSLEGCQLIKFDSVEVCVCCELQHQSSGCSNLGETLKLNPLQENCNAVRLTLKDLLFSVCALNVLSTIVCALATAMCCMQMVSSDVLQMFLPQRSHPANPTCVTPHGTVLHQTLDFDEFIPPLPPPPYYPPEYTCTPSTEAQRGLHLDFAPSPFGTLYDVAINSPGLLYPAELPPPYEAVVGQPPASQVTSIGQQVAESSSGDPNTSAGFSTPVPADSTSLLVSEGTATPGSSPSPDGPVGAPAPSEPALPPGHVSPEDPGMGSQVQPGPGRVSRSTSDPTLCTSSMAGDASSHRPSCSQDLEAGLSEAVPGSASMSRSATAACRAQLSPAGDPDTWKTDQRPTPEPFPATSKERPRSLVDSKAYADARVLVAKFLEHSHCALPTEAQHMVGAMRLAVTNEERLEEEAVFGADVLDQV

SEQ ID NO: 29871 - protein, 78 aa, Homo sapiens
  Payload ID: 5843
  Gene Symbol: FAM189A1
  Gene Name: family with sequence similarity 189, member A1
  ENSP ID: ENSP00000452860
MLLSAVCVMLNLAGSILSCQNAQLVNSLEGCQLIKFDSVEVCVCCELQHQSSGCSNLGETLKLNPLQENCNAVRLTLK

SEQ ID NO: 29872 - protein, 539 aa, Homo sapiens
  Payload ID: 5843
  Gene Symbol: FAM189A1
  Gene Name: family with sequence similarity 189, member A1
  ENSP ID: ENSP00000483918
MPPAGGPRAPRPAALPRSLSRLRECPGRSRIVLALGATQMALGCLIVAVSFAALALTTSARVRHSCPFWAGFSVLLSGLIGVVSWKRPLSLVITFFMLLSAVCVMLNLAGSILSCQNAQLVNSLEGCQLIKFDSVEVCVCCELQHQSSGCSNLGETLKLNPLQENCNAVRLTLKDLLFSVCALNVLSTIVCALATAMCCMQMVSSDVLQMFLPQRSHPANPTCVTPHGTVLHQTLDFDEFIPPLPPPPYYPPEYTCTPSTEAQRGLHLDFAPSPFGTLYDVAINSPGLLYPAELPPPYEAVVGQPPASQVTSIGQQVAESSSGDPNTSAGFSTPVPADSTSLLVSEGTATPGSSPSPDGPVGAPAPSEPALPPGRVSPEDPGMGSQVQPGPGHVSRSTSDPTLCTSSMAGDASSHRPSCSQDLEAGLSEAVPGSASMSRSATAACRAQLSPAGDPDTWKTDQRPTPEPFPATSKERPRSLVDSKAYADARVLVAKFLEHSHCALPTEAQHMVGAMRLAVTNEERLEEEAVFGADVLDQV

SEQ ID NO: 29873 - protein, 450 aa, Homo sapiens
  Payload ID: 5844
  Gene Symbol: FAM189A2
  Gene Name: family with sequence similarity 189, member A2
  Uniprot ID: Q15884
  ENSP ID: ENSP00000257515
MILLVNLFVLLSVVCVLLNLAGFILGCQGAQFVSSVPRCDLVDLGEGKICFCCEEFQPAKCTDKENALKLFPVQPCSAVHLLLKKVLFALCALNALTTTVCLVAAALRYLQIFATRRSCIDESQISAEEAEDHGRIPDPDDFVPPVPPPSYFATFYSCTPRMNRRMVGPDVIPLPHIYGARIKGVEVFCPLDPPPPYEAVVSQMDQEQGSSFQMSEGSEAAVIPLDLGCTQVTQDGDIPNIPAEENASTSTPSSTLVRPIRSRRALPPLRTRSKSDPVLHPSEERAAPVLSCEAATQTERRLDLAAVTLRRGLRSRASRCRPRSLIDYKSYMDTKLLVARFLEQSSCTMTPDIHELVENIKSVLKSDEEHMEEAITSASFLEQIMAPLQPSTSRAHKLPSRRQPGLLHLQSCGDLHTFTPAGRPRAERRPRRVEAERPHSLIGVIRETVL

SEQ ID NO: 29874 - protein, 285 aa, Homo sapiens [sequence omitted]

SEQ ID NO: 29875 - protein, 237 aa, Homo sapiens
  Payload ID: 5844
  Gene Symbol: FAM189A2
  Gene Name: family with sequence similarity 189, member A2
  ENSP ID: ENSP00000366422
MTCFGPYPIGTGLQGITLCCFPSFCKMKSRMCMAISICQMLSMLSFVVCAFRYRHMFKRGWPMGTCCLFLPTAAPVLSCEAATQTERRLDLAAVTLRRGLRSRASRCRPRSLIDYKSYMDTKLLVARFLEQSSCTMTPDIHELVENIKSVLKSDEEHMEEAITSASFLEQIMAPLQPSTSRAHKLPSRRQPGLLHLQSCGDLHTFTPAGRPRAERRPRRVEAERPHSLIGVIRETVL

SEQ ID NO: 29876 - protein, 450 aa, Homo sapiens; identical to SEQ ID NO: 29873
  Payload ID: 5844
  Gene Symbol: FAM189A2
  Gene Name: family with sequence similarity 189, member A2
  Uniprot ID: Q15884
  ENSP ID: ENSP00000395675

SEQ ID NO: 29877 - protein, 572 aa, Homo sapiens
  Payload ID: 5845
  Gene Symbol: FAM189B
  Gene Name: family with sequence similarity 189, member B
  Uniprot ID: P81408
  ENSP ID: ENSP00000307128
MMPSPSDSSRSLTSRPSTRGLTHLRLHRPWLQALLTLGLVQVLLGILVVTFSMVASSVTTTESIKRSCPSWAGFSNLLFSVCGLTICAAIICTLSAIVCCIQIFSLDLVHTLAPERSVSGPLGPLGCTSPPPAPLLHTMLDLEEFVPPVPPPPYYPPEYTCSSETDAQSITYNGSMDSPVPLYPTDCPPSYEAVMGLRGDSQATLFDPQLHDGSCICERVASIVDVSMDSGSLVLSAIGDLPGGSSPSEDSCLLELQGSVRSVDYVLFRSIQRSRAGYCLSLDCGLRGPFEESPLPRRPPRAARSYSCSAPEAPPPLGAPTAARSCHRLEGWPPWVGPCFPELRRRVPRGGGRPAAAPPTRAPTRRFSDSSGSLTPPGHRPPHPASPPPLLLPRSHSDPGITTSSDTADFRDLYTKVLEEEAASVSSADTGLCSEACLFRLARCPSPKLLRARSAEKRRPVPTFQKVPLPSGPAPAHSLGDLKGSWPGRGLVTRFLQISRKAPDPSGTGAHGHKQVPRSLWGRPGRESLHLRSCGDLSSSSSLRRLLSGRRLERGTRPHSLSLNGGSRETGL

SEQ ID NO: 29878 - protein, 668 aa, Homo sapiens
  Payload ID: 5845
  Gene Symbol: FAM189B
  Gene Name: family with sequence similarity 189, member B
  Uniprot ID: P81408
  ENSP ID: ENSP00000354958
MMPSPSDSSRSLTSRPSTRGLTHLRLHRPWLQALLTLGLVQVLLGILVVTFSMVASSVTTTESIKRSCPSWAGFSLAFSGVVGIVSWKRPFTLVISFFSLLSVLCVMLSMAGSVLSCKNAQLARDFQQCSLEGKVCVCCPSVPLLRPCPESGQELKVAPNSTCDEARGALKNLLFSVCGLTICAAIICTLSAIVCCIQIFSLDLVHTLAPERSVSGPLGPLGCTSPPPAPLLHTMLDLEEFVPPVPPPPYYPPEYTCSSETDAQSITYNGSMDSPVPLYPTDCPPSYEAVMGLRGDSQATLFDPQLHDGSCICERVASIVDVSMDSGSLVLSAIGDLPGGSSPSEDSCLLELQGSVRSVDYVLFRSIQRSRAGYCLSLDCGLRGPFEESPLPRRPPRAARSYSCSAPEAPPPLGAPTAARSCHRLEGWPPWVGPCFPELRRRVPRGGGRPAAAPPTRAPTRRFSDSSGSLTPPGHRPPHPASPPPLLLPRSHSDPGITTSSDTADFRDLYTKVLEEEAASVSSADTGLCSEACLFRLARCPSPKLLRARSAEKRRPVPTFQKVPLPSGPAPAHSLGDLKGSWPGRGLVTRFLQISRKAPDPSGTGAHGHKQVPRSLWGRPGRESLHLRSCGDLSSSSSLRRLLSGRRLERGTRPHSLSLNGGSRETGL

SEQ ID NO: 29879 - protein, 650 aa, Homo sapiens
  Payload ID: 5845
  Gene Symbol: FAM189B
  Gene Name: family with sequence similarity 189, member B
  Uniprot ID: P81408
  ENSP ID: ENSP00000357352
MMPSPSDSSRSLTSRPSTRGLTHLRLHRPWLQALLTLGLVQVLLGILVVTFSMVASSVTTTESIKRSCPSWAGFSISFFSLLSVLCVMLSMAGSVLSCKNAQLARDFQQCSLEGKVCVCCPSVPLLRPCPESGQELKVAPNSTCDEARGALKNLLFSVCGLTICAAIICTLSAIVCCIQIFSLDLVHTQLAPERSVSGPLGPLGCTSPPPAPLLHTMLDLEEFVPPVPPPPYYPPEYTCSSETDAQSITYNGSMDSPVPLYPTDCPPSYEAVMGLRGDSQATLFDPQLHDGSCICERVASIVDVSMDSGSLVLSAIGDLPGGSSPSEDSCLLELQGSVRSVDYVLFRSIQRSRAGYCLSLDCGLRGPFEESPLPRRPPRAARSYSCSAPEAPPPLGAPTAARSCHRLEGWPPWVGPCFPELRRRVPRGGGRPAAAPPTRAPTRRFSDSSGSLTPPGHRPPHPASPPPLLLPRSHSDPGITTSSDTADFRDLYTKVLEEEAASVSSADTGLCSEACLFRLARCPSPKLLRARSAEKRRPVPTFQKVPLPSGPAPAHSLGDLKGSWPGRGLVTRFLQISRKAPDPSGTGAHGHKQVPRSLWGRPGRESLHLRSCGDLSSSSSLRRLLSGRRLERGTRPHSLSLNGGSRETGL

SEQ ID NO: 29880 - protein, 325 aa, Homo sapiens
  Payload ID: 5845
  Gene Symbol: FAM189B
  Gene Name: family with sequence similarity 189, member B
  ENSP ID: ENSP00000427011
MMPSPSDSSRSLTSRPSTRGLTHLRLHRPWLQALLTLGLVQVLLGILVVTFSMVASSVTTTESIKRSCPSWAGFSNLLFSVCGLTICAAIICTLSAIVCCIQIFSLDLVHTLAPERSVSGPLGPLGCTSPPPAPLLHTMLDLEEFVPPVPPPPYYPPEYTCSSETDAQSITYNGSMDSPVPLYPTDCPPSYEAVMGLRGDSQATLFDPQLHDGSCICERVASIVDADFRDLYTKVLEEEAASVSSADTGLCSEACLFRLARCPSPKLLRARSAEKRRPVPTFQKVPLPSGPAPAHSLGDLKGSWPGRGLVTRFLQISRKAPDPSG

SEQ ID NO: 29881 - protein, 144 aa, Homo sapiens
  Payload ID: 5845
  Gene Symbol: FAM189B
  Gene Name: family with sequence similarity 189, member B
  ENSP ID: ENSP00000427520
MMPSPSDSSRSLTSRPSTRGLTHLRLHRPWLQALLTLGLVQVLLGILVVTFSMVASSVTTTESIKRSCPSWAGFSNLLFSVCGLTICAAIICTLSAIVCCIQIFSLDLVHTLTSGTFIPKCLRKKLLLFPLQIQGSALKPASSA

SEQ ID NO: 29882 - protein, 650 aa, Homo sapiens; identical to SEQ ID NO: 29879
  Payload ID: 5845
  Gene Symbol: FAM189B
  Gene Name: family with sequence similarity 189, member B
  Uniprot ID: P81408
  ENSP ID: ENSP00000458501

SEQ ID NO: 29883 - protein, 325 aa, Homo sapiens; identical to SEQ ID NO: 29880
  Payload ID: 5845
  Gene Symbol: FAM189B
  Gene Name: family with sequence similarity 189, member B
  ENSP ID: ENSP00000458955

SEQ ID NO: 29884 - protein, 572 aa, Homo sapiens; identical to SEQ ID NO: 29877
  Payload ID: 5845
  Gene Symbol: FAM189B
  Gene Name: family with sequence similarity 189, member B
  Uniprot ID: P81408
  ENSP ID: ENSP00000460960

SEQ ID NO: 29885 - protein, 668 aa, Homo sapiens; identical to SEQ ID NO: 29878
  Payload ID: 5845
  Gene Symbol: FAM189B
  Gene Name: family with sequence similarity 189, member B
  Uniprot ID: P81408
  ENSP ID: ENSP00000461152

SEQ ID NO: 29886 - protein, 144 aa, Homo sapiens; identical to SEQ ID NO: 29881
  Payload ID: 5845
  Gene Symbol: FAM189B
  Gene Name: family with sequence similarity 189, member B
  ENSP ID: ENSP00000461337

SEQ ID NO: 29887 - protein, 242 aa, Homo sapiens
  Payload ID: 5845
  Gene Symbol: FAM189B
  Gene Name: family with sequence similarity 189, member B
  ENSP ID: ENSP00000479033
MMPSPSDSSRSLTSRPSTRGLTHLRLHRPWLQALLTLGLVQVLLGILVVTFSMVASSVTTTESIKRSCPSWAGFSNLLFSVCGLTICAAIICTLSAIVCCIQIFSLDLVHTLAPERSVSGPLGPLGCTSPPPAPLLHTMLDLEEFVPPVPPPPYYPPEYTCSSETDAQSITYNGSMDSPVPLYPTDCPPSYEAVMGLRGGKQILVPLRMRVALSDLQGHYGQGKGMAQVFKYRVTCAYAMGW

SEQ ID NO: 29888 - protein, 242 aa, Homo sapiens; identical to SEQ ID NO: 29887
  Payload ID: 5845
  Gene Symbol: FAM189B
  Gene Name: family with sequence similarity 189, member B
  ENSP ID: ENSP00000479323

SEQ ID NO: 29889 - protein, 133 aa, Homo sapiens [sequence omitted]

SEQ ID NO: 29890 - protein, 133 aa, Homo sapiens [sequence omitted]

SEQ ID NO: 29891 - protein, 52 aa, Homo sapiens [sequence omitted]

SEQ ID NO: 29892 - protein, 131 aa, Homo sapiens
  Payload ID: 5847
  Gene Symbol: FAM19A2
  Gene Name: family with sequence similarity 19 (chemokine (C-C motif)-like), member A2
  Uniprot ID: Q8N3H0
  ENSP ID: ENSP00000393987
MSKRYLQKATKGKLLIIIFIVTLWGKVVSSANHHKAHHVKTGTCEVVALHRCCNKNKIEERSQTVKCSCFPGQVAGTTRAAPSCVDASIVEQKWWCHMQPCLEGEECKVLPDRKGWSCSSGNKVKTTRVTH

SEQ ID NO: 29893 - protein, 101 aa, Homo sapiens
  Payload ID: 5847
  Gene Symbol: FAM19A2
  Gene Name: family with sequence similarity 19 (chemokine (C-C motif)-like), member A2
  ENSP ID: ENSP00000447280
MVTPITRMSKRYLQKATKGKLLIIIFIVTLWGKVVSSANHHKAHHVKTGTCEVVALHRCCNKNKIEERSQTVKCSCFPGQVAGTTRAAPSCVDASIVEQKW

SEQ ID NO: 29894 - protein, 131 aa, Homo sapiens; identical to SEQ ID NO: 29892
  Payload ID: 5847
  Gene Symbol: FAM19A2
  Gene Name: family with sequence similarity 19 (chemokine (C-C motif)-like), member A2
  Uniprot ID: Q8N3H0
  ENSP ID: ENSP00000447305

SEQ ID NO: 29895 - protein, 131 aa, Homo sapiens
  Payload ID: 5847
  Gene Symbol: FAM19A2
  Gene Name: family with sequence similarity 19 (chemokine (C-C motif)-like), member A2
  ENSP ID: ENSP00000447584
MSKRYLQKATKGKLLIIIFIVTLWGKVVSSANHHKAHHVKTGTCEVVALHRCCNKNKIEERSQTVKCSCFPGQVAGTTRAAPSCVDASIVEQKWWCHMQPCLEGEECKVLPDRKGWSCSSGNKVKTTRANV

SEQ ID NO: 29896 - protein, 87 aa, Homo sapiens
  Payload ID: 5847
  Gene Symbol: FAM19A2
  Gene Name: family with sequence similarity 19 (chemokine (C-C motif)-like), member A2
  ENSP ID: ENSP00000449310
MMSKRYLQKATKGKLLIIIFIVTLWGKVVSSANHHKAHHVKTGTCEVVALHRCCNKNKIEERSQTVKCSCFPGQVAGTTRAAPSCVD

SEQ ID NO: 29897 - protein, 34 aa, Homo sapiens
  Payload ID: 5847
  Gene Symbol: FAM19A2
  Gene Name: family with sequence similarity 19 (chemokine (C-C motif)-like), member A2
  Uniprot ID: Q8N3H0
  ENSP ID: ENSP00000449457
MQPCLEGEECKVLPDRKGWSCSSGNKVKTTRVTH

SEQ ID NO: 29898 - protein, 110 aa, Homo sapiens
  Payload ID: 5847
  Gene Symbol: FAM19A2
  Gene Name: family with sequence similarity 19 (chemokine (C-C motif)-like), member A2
  ENSP ID: ENSP00000449516
MMSKRYLQKATKGKLLIIIFIVTLWGKVVSSANHHKAHHVKTGTCEVVALHRCCNKNKIEERSQTVKCSCFPGQVAGTTRAAPSCVDASIVEQKWWCHMQPCLEGEECKV

SEQ ID NO: 29899 - protein, 49 aa, Homo sapiens
  Payload ID: 5847
  Gene Symbol: FAM19A2
  Gene Name: family with sequence similarity 19 (chemokine (C-C motif)-like), member A2
  ENSP ID: ENSP00000449632
MSKRYLQKATKGKLLIIIFIVTLWGKVVSSANHHKGNPLTQEKSSDPQG

SEQ ID NO: 29900 - protein, 133 aa, Homo sapiens
  Payload ID: 5848
  Gene Symbol: FAM19A3
  Gene Name: family with sequence similarity 19 (chemokine (C-C motif)-like), member A3
  Uniprot ID: Q7Z5A8
  ENSP ID: ENSP00000355042
MSERVERNWSTGGWLLALCLAWLWTHLTLAALQPPTATVLVQQGTCEVIAAHRCCNRNRIEERSQTVKCSCFSGQVAGTTRAKPSCVDASIVLQRWWCQMEPCLPGEECKVLPDLSGWSCSSGHKVKTTKVTR

SEQ ID NO: 29901 - protein, 169 aa, Homo sapiens
  Payload ID: 5848
  Gene Symbol: FAM19A3
  Gene Name: family with sequence similarity 19 (chemokine (C-C motif)-like), member A3
  Uniprot ID: Q7Z5A8
  ENSP ID: ENSP00000358644
MSERVERNWSTGGWLLALCLAWLWTHLTLAALQPPTATVLVQQGTCEVIAAHRCCNRNRIEERSQTVKCSCFSGQVAGTTRAKPSCVDDLLLAAHCARRDPRAALRLLLPQPPSSCRDGGVRWSPACRGRSVRCSRTCRDGAAAVDTKSKPPRSHDSSWGSRPGQERLD

SEQ ID NO: 29902 - protein, 140 aa, Homo sapiens
  Payload ID: 5849
  Gene Symbol: FAM19A4
  Gene Name: family with sequence similarity 19 (chemokine (C-C motif)-like), member A4
  Uniprot ID: Q96LR4
  ENSP ID: ENSP00000295569
MRSPRMRVCAKSVLLSHWLFLAYVLMVCCKLMSASSQHLRGHAGHHQIKQGTCEVVAVHRCCNKNRIEERSQTVKCSCFPGQVAGTTRAQPSCVEASIVIQKWWCHMNPCLEGEDCKVLPDYSGWSCSSGNKVKTTKVTR

SEQ ID NO: 29903 - protein, 77 aa, Homo sapiens
  Payload ID: 5849
  Gene Symbol: FAM19A4
  Gene Name: family with sequence similarity 19 (chemokine (C-C motif)-like), member A4
  ENSP ID: ENSP00000419439
MRSPRMRVCAKSVLLSHWLFLAYVLMVCCKLMSASSQHLRGHAGHHQIKQGTCEVVAVHRCCNKNRIEERSQTVKCS

SEQ ID NO: 29904 - protein, 57 aa, Homo sapiens
  Payload ID: 5849
  Gene Symbol: FAM19A4
  Gene Name: family with sequence similarity 19 (chemokine (C-C motif)-like), member A4
  ENSP ID: ENSP00000489092
MRSPRMRVCAKSVLLSHWLFLAYVLMVCCKLMSASSQHLRGHAGHHQIKQGTCEVVA

SEQ ID NO: 29905 - protein, 181 aa, Homo sapiens
  Payload ID: 5850
  Gene Symbol: FAM19A5
  Gene Name: family with sequence similarity 19 (chemokine (C-C motif)-like), member A5
  ENSP ID: ENSP00000336812
MAPSPRTGSRQDATALPSMSSTFWAFMILASLLIAYCSQLAAGTCEIVTLDRDSSQPRRTIARQTARCACRKGQIAGTTRARPACVDARIIKTKQWCDMLPCLEGEGCDLLINRSGWTCTQPGGRIKTTTSPSKPPKRAPPGIPSCRQRAGGSLGSRDLRTSLLCQGSHLADRRRWLRPSQ

SEQ ID NO: 29906 - protein, 125 aa, Homo sapiens
  Payload ID: 5850
  Gene Symbol: FAM19A5
  Gene Name: family with sequence similarity 19 (chemokine (C-C motif)-like), member A5
  Uniprot ID: Q7Z5A7
  ENSP ID: ENSP00000351043
MQLLKALWALAGAALCCFLVLVIHAQFLKEGQLAAGTCEIVTLDRDSSQPRRTIARQTARCACRKGQIAGTTRARPACVDARIIKTKQWCDMLPCLEGEGCDLLINRSGWTCTQPGGRIKTTTVS

SEQ ID NO: 29907 - protein, 132 aa, Homo sapiens
  Payload ID: 5850
  Gene Symbol: FAM19A5
  Gene Name: family with sequence similarity 19 (chemokine (C-C motif)-like), member A5
  Uniprot ID: Q7Z5A7
  ENSP ID: ENSP00000383933
MAPSPRTGSRQDATALPSMSSTFWAFMILASLLIAYCSQLAAGTCEIVTLDRDSSQPRRTIARQTARCACRKGQIAGTTRARPACVDARIIKTKQWCDMLPCLEGEGCDLLINRSGWTCTQPGGRIKTTTVS

SEQ ID NO: 29908 - protein, 53 aa, Homo sapiens
  Payload ID: 5850
  Gene Symbol: FAM19A5
  Gene Name: family with sequence similarity 19 (chemokine (C-C motif)-like), member A5
  Uniprot ID: Q7Z5A7
  ENSP ID: ENSP00000385603
MYHHREWPARIIKTKQWCDMLPCLEGEGCDLLINRSGWTCTQPGGRIKTTTVS

SEQ ID NO: 29909 - protein, 254 aa, Homo sapiens
  Payload ID: 5851
  Gene Symbol: FAM192A
  Gene Name: family with sequence similarity 192, member A
  Uniprot ID: Q9GZU8
  ENSP ID: ENSP00000335808
MDGGDDGNLIIKKRFVSEAELDERRKRRQEEWEKVRKPEDPEECPEEVYDPRSLYERLQEQKDRKQQEYEEQFKFKNMVRGLDEDETNFLDEVSRQQELIEKQRREEELKELKEYRNNLKKVGISQENKKEVEKKLTVKPIETKNKFSQAKLLAGAVKHKSSESGNSVKRLKPDPEPDDKNQEPSSCKSLGNTSLSGPSIHCPSAAVCIGILPGLGAYSGSSDSESSSDSEGTINATGKIVSSIFRTNTFLEAP

SEQ ID NO: 29910 - protein, 254 aa, Homo sapiens; identical to SEQ ID NO: 29909
  Payload ID: 5851
  Gene Symbol: FAM192A
  Gene Name: family with sequence similarity 192, member A
  Uniprot ID: Q9GZU8
  ENSP ID: ENSP00000374098

SEQ ID NO: 29911 - protein, 165 aa, Homo sapiens
  Payload ID: 5851
  Gene Symbol: FAM192A
  Gene Name: family with sequence similarity 192, member A
  ENSP ID: ENSP00000454596
MDGGDDGNLIIKKRFVSEAELDERRKRRQEEWEKVRKPEDPEECPEEVYDPRSLYERLQEQKDRKQQEYEEQFKFKNMVRGLDEDETNFLDEVSRQQELIEKQRREEELKELKEYRNNLKKVGISQENKKEVEKKLTVKPIETKNKFSQAKLLAGAVKHKSSESG

SEQ ID NO: 29912 - protein, 64 aa, Homo sapiens
  Payload ID: 5851
  Gene Symbol: FAM192A
  Gene Name: family with sequence similarity 192, member A
  ENSP ID: ENSP00000454649
MDGGDDGNLIIKKRFVSEAELDERRKRRQEEWEKVRKPEDPEECPEEVYDPRSLYERLQEQKDR

SEQ ID NO: 29913 - protein, 154 aa, Homo sapiens
  Payload ID: 5851
  Gene Symbol: FAM192A
  Gene Name: family with sequence similarity 192, member A
  ENSP ID: ENSP00000454901
  MOD_RES (1)..(1): Any amino acid
XNGAKGGKKNGRKFENLKIQKVGISQENKKEVEKKLTVKPIETKNKFSQAKLLAGAVKHKSSESGNSVKRLKPDPEPDDKNQEPSSCKSLGNTSLSGPSIHCPSAAVCIGILPGLGAYSGSSDSESSSDSEGTINATGKIVSSIFRTNTFLEAP

SEQ ID NO: 29914 - protein, 81 aa, Homo sapiens
  Payload ID: 5851
  Gene Symbol: FAM192A
  Gene Name: family with sequence similarity 192, member A
  ENSP ID: ENSP00000455082
MDGGDDGNLIIKKRFVSEAELDERRKRRQEEWEKVRKPEDPEECPEEVYDPRSLYERLQEQKDRKQQEYEEQFKFKNMFDP

SEQ ID NO: 29915 - protein, 148 aa, Homo sapiens
  Payload ID: 5851
  Gene Symbol: FAM192A
  Gene Name: family with sequence similarity 192, member A
  ENSP ID: ENSP00000455170
MDGGDDGNLIIKKRFVSEAELDERRKRRQEEWEKVRKPEDPEECPEEVYDPRSLYERLQEQKDRKQQEYEEQFKFKNMVRGLDEDETNFLDEVSRQQELIEKQRREEELKELKEYRNNLKKVGISQENKKEVEKKLTVKPIETKNKFS

SEQ ID NO: 29916 - protein, 27 aa, Homo sapiens
  Payload ID: 5851
  Gene Symbol: FAM192A
  Gene Name: family with sequence similarity 192, member A
  ENSP ID: ENSP00000455299
MDGGDDGNLIIKKRFVSEAELDERRKR

SEQ ID NO: 29917 - protein, 24 aa, Homo sapiens
  Payload ID: 5851
  Gene Symbol: FAM192A
  Gene Name: family with sequence similarity 192, member A
  ENSP ID: ENSP00000455325
MDGGDDGNLIIKKRFVSEAELDER

SEQ ID NO: 29918 - protein, 96 aa, Homo sapiens
  Payload ID: 5851
  Gene Symbol: FAM192A
  Gene Name: family with sequence similarity 192, member A
  ENSP ID: ENSP00000455890
MDGGDDGNLIIKKRFVSEAELDERRKRRQEEWEKVRKPEDPEECPEEVYDPRSLYERLQEQKDRKQQEYEEQFKFKNMVRGLDEDETNFLDEVSRQ

SEQ ID NO: 29919 - protein, 254 aa, Homo sapiens; identical to SEQ ID NO: 29909
  Payload ID: 5851
  Gene Symbol: FAM192A
  Gene Name: family with sequence similarity 192, member A
  Uniprot ID: Q9GZU8
  ENSP ID: ENSP00000456211

SEQ ID NO: 29920 - protein, 88 aa, Homo sapiens
  Payload ID: 5851
  Gene Symbol: FAM192A
  Gene Name: family with sequence similarity 192, member A
  ENSP ID: ENSP00000456673
MDGGDDGNLIIKKRFVSEAELDERRKRRQEEWEKVRKPEDPEECPEEVYDPRSLYERLQEQKDRKQQEYEEQFKFKNMVRGLDEDETN

SEQ ID NO: 29921 - protein, 140 aa, Homo sapiens
  Payload ID: 5851
  Gene Symbol: FAM192A
  Gene Name: family with sequence similarity 192, member A
  ENSP ID: ENSP00000456931
MDGGDDGNLIIKKRFVSEAELDERRKRRQEEWEKVRKPEDPEECPEEVYDPRSLYERLQEQKDRKQQEYEEQFKFKNMVRGLDEDETNFLDEVSRQQELIEKQRREEELKELKEYRNNLKKVGISQENKKEVEKKLTVKP

SEQ ID NO: 29922 - protein, 106 aa, Homo sapiens
  Payload ID: 5851
  Gene Symbol: FAM192A
  Gene Name: family with sequence similarity 192, member A
  ENSP ID: ENSP00000457185
MDGGDDGNLIIKKRFVSEAELDERRKRRQEEWEKVRKPEDPEECPEEVYDPRSLYERLQEQKDRKQQEYEEQFKFKNMVRGLDEDETNFLDEVSRQQELIEKQRRE

SEQ ID NO: 29923 - protein, 130 aa, Homo sapiens
  Payload ID: 5851
  Gene Symbol: FAM192A
  Gene Name: family with sequence similarity 192, member A
  ENSP ID: ENSP00000457269
MDGGDDGNLIIKKRFVSEAELDERRKRRQEEWEKVRKPEDPEECPEEVYDPRSLYERLQEQKDRKQQEYEEQFKFKNMVRGLDEDETNFLDEVSRQQELIEKQRREEELKELKEYRNNLKKVGISQENKK

SEQ ID NO: 29924 - protein, 177 aa, Homo sapiens
  Payload ID: 5851
  Gene Symbol: FAM192A
  Gene Name: family with sequence similarity 192, member A
  ENSP ID: ENSP00000457532
MVRGLDEDETNFLDEVSRQQELIEKQRREEELKELKEYRNNLKKVGISQENKKEVEKKLTVKPIETKNKFSQAKLLAGAVKHKSSESGNSVKRLKPDPEPDDKNQEPSSCKSLGNTSLSGPSIHCPSAAVCIGILPGLGAYSGSSDSESSSDSEGTINATGKIVSSIFRTNTFLEAP

SEQ ID NO: 29925 - protein, 160 aa, Homo sapiens
  Payload ID: 5851
  Gene Symbol: FAM192A
  Gene Name: family with sequence similarity 192, member A
  ENSP ID: ENSP00000457695
MDGGDDGNLIIKKRFVSEAELDERRKRRQEEWEKVRKPEDPEECPEEVYDPRSLYERLQEQKDRKQQEYEEQFKFKNMVRGLDEDETNFLDEVSRQQELIEKQRREEELKELKEYRNNLKKVGISQENKKEVEKKLTVKPIETKNKFSQAKLLAGAVKHK

SEQ ID NO: 29926 - protein, 254 aa, Homo sapiens; identical to SEQ ID NO: 29909
  Payload ID: 5851
  Gene Symbol: FAM192A
  Gene Name: family with sequence similarity 192, member A
  Uniprot ID: Q9GZU8
  ENSP ID: ENSP00000457740

SEQ ID NO: 29927 - protein, 254 aa, Homo sapiens; identical to SEQ ID NO: 29909
  Payload ID: 5851
  Gene Symbol: FAM192A
  Gene Name: family with sequence similarity 192, member A
  Uniprot ID: Q9GZU8
  ENSP ID: ENSP00000457850

SEQ ID NO: 29928 - protein, 1265 aa, Homo sapiens
  Payload ID: 5852
  Gene Symbol: FAM193A
  Gene Name: family with sequence similarity 193, member A
  Uniprot ID: P78312
  ENSP ID: ENSP00000324587
MKVRLLRQLSAAAKVKAPSGLQGPPQAHQFISLLLEEYGALCQAARSISTFLGTLENEHLKKFQVTWELHNKHLFENLVFSEPLLQSNLPALVSQIRLGTTTHDTCSEDTYSTLLQRYQRSEEELRRVAEEWLECQKRIDAYVDEQMTMKTKQRMLTEDWELFKQRRFIEEQLTNKKAVTGENNFTDTMRHMLSSRLSMPDCPNCNYRRRCACDDCSLSHILTCGIMDPPVTDDIHIHQLPLQVDPAPDYLAERSPPSVSSASSGSGSSSPITIQQHPRLILTDSGSAPTFCSDDEDVAPLSAKFADIYPLSNYDDTEVVANMNGIHSELNGGGENMALKDESPQISSTSSSSSEADDEEADGESSGEPPGAPKEDGVLGSRSPRTEESKADSPPPSYPTQQAEQAPNTCECHVCKQEASGLTPSAMTAGALPPGHQFLSPEKPTHPALHLYPHIHGHVPLHTVPHLPRPLIHPTLYATPPFTHSKALPPAPVQNHTNKHQVFNASLQDHIYPSCFGNTPEWNSSKFISLWGSEVMNDKNWNPGTFLPDTISGSEILGPTLSETRPEALPPPSSNETPAVSDSKEKKNAAKKKCLYNFQDAFMEANKVVMATSSATSSVSCTATTVQSSNSQFRVSSKRPPSVGDVFHGISKEDHRHSAPAAPRNSPTGLAPLPALSPAALSPAALSPASTPHLANLAAPSFPKTATTTPGFVDTRKSFCPAPLPPATDGSISAPPSVCSDPDCEGHRCENGVYDPQQDDGDESADEDSCSEHSSSTSTSTNQKEGKYCDCCYCEFFGHGGPPAAPTSRNYAEMREKLRLRLTKRKEEQPKKMDQISERESVVDHRRVEDLLQFINSSETKPVSSTRAAKRARHKQRKLEEKARLEAEARAREHLHLQEEQRRREEEEDEEEEEDRFKEEFQRLQELQKLRAVKKKKKERPSKDCPKLDMLTRNFQAATESVPNSGNIHNGSLEQTEEPETSSHSPSRHMNHSEPRPGLGADGDAADPVDTRDSKFLLPKEVNGKQHEPLSFFFDIMQHHKEGNGKQKLRQTSKASSEPARRPTEPPKATEGQSKPRAQTESKAKVVDLMSITEQKREERKVNSNNNNKKQLNHIKDEKSNPTPMEPTSPGEHQQNSKLVLAESPQPKGKNKKNKKKKGDRVNNSIDGVSLLLPSLGYNGAILAHCNLRLPGSSDCAASASQVVGITDDVFLPKDIDLDSVDMDETEREVEYFKRFCLDSARQTRQRLSINWSNFSLKKATFAAH

SEQ ID NO: 29929 - protein, 1224 aa, Homo sapiens
  Payload ID: 5852
  Gene Symbol: FAM193A
  Gene Name: family with sequence similarity 193, member A
  Uniprot ID: P78312
  ENSP ID: ENSP00000372290
MKVRLLRQLSAAAKVKAPSGLQGPPQAHQFISLLLEEYGALCQAARSISTFLGTLENEHLKKFQVTWELHNKHLFENLVFSEPLLQSNLPALVSQIRLGTTTHDTCSEDTYSTLLQRYQRSEEELRRVAEEWLECQKRIDAYVDEQMTMKTKQRMLTEDWELFKQRRFIEEQLTNKKAVTGENNFTDTMRHMLSSRLSMPDCPNCNYRRRCACDDCSLSHILTCGIMDPPVTDDIHIHQLPLQVDPAPDYLAERSPPSVSSASSGSGSSSPITIQQHPRLILTDSGSAPTFCSDDEDVAPLSAKFADIYPLSNYDDTEVVANMNGIHSELNGGGENMALKDESPQISSTSSSSSEADDEEADGESSGEPPGAPKEDGVLGSRSPRTEESKADSPPPSYPTQQAEQAPNTCECHVCKQEASGLTPSAMTAGALPPGHQFLSPEKPTHPALHLYPHIHGHVPLHTVPHLPRPLIHPTLYATPPFTHSKALPPAPVQNHTNKHQVFNASLQDHIYPSCFGNTPEWNSSKFISLWGSEVMNDKNWNPGTFLPDTISGSEILGPTLSETRPEALPPPSSNETPAVSDSKEKKNAAKKKCLYNFQDAFMEANKVVMATSSATSSVSCTATTVQSSNSQFRVSSKRPPSVGDVFHGISKEDHRHSAPAAPRNSPTGLAPLPALSPAALSPAALSPASTPHLANLAAPSFPKTATTTPGFVDTRKSFCPAPLPPATDGSISAPPSVCSDPDCEGHRCENGVYDPQQDDGDESADEDSCSEHSSSTSTSTNQKEGKYCDCCYCEFFGHGGPPAAPTSRNYAEMREKLRLRLTKRKEEQPKKMDQISERESVVDHRRVEDLLQFINSSETKPVSSTRAAKRARHKQRKLEEKARLEAEARAREHLHLQEEQRRREEEEDEEEEEDRFKEEFQRLQELQKLRAVKKKKKERPSKDCPKLDMLTRNFQAATESVPNSGNIHNGSLEQTEEPETSSHSPSRHMNHSEPRPGLGADGDAADPVDTRDSKFLLPKEVNGKQHEPLSFFFDIMQHHKEGNGKQKLRQTSKASSEPARRPTEPPKATEGQSKPRAQTESKAKVVDLMSITEQKREERKVNSNNNNKKQLNHIKDEKSNPTPMEPTSPGEHQQNSKLVLAESPQPKGKNKKNKKKKGDRVNNSIDDVFLPKDIDLDSVDMDETEREVEYFKRFCLDSARQTRQRLSINWSNFSLKKATFAAH

SEQ ID NO: 29930 - protein, 1211 aa, Homo sapiens
  Payload ID: 5852
  Gene Symbol: FAM193A
  Gene Name: family with sequence similarity 193, member A
  Uniprot ID: P78312
  ENSP ID: ENSP00000421200
MKVRLLRQLSAAAKVKAPSGLQGPPQAHQFISLLLEEYGALCQAARSISTFLGTLENEHLKKFQVTWELHNKHLFENLVFSEPLLQSNLPALVSQIRLGTTTHDTCSEDTYSTLLQRYQRSEEELRRVAEEWLECQKRIDAYVDEQMTMKTKQRMLTEDWELFKQRRFIEEQLTNKKAVTGENNFTDTMRHMLSSRLSMPDCPNCNYRRRCACDDCSLSHILTCGIMDPPVTDDIHIHQLPLQVDPAPDYLAERSPPSVSSASSGSGSSSPITIQQHPRLILTDSGSAPTFCSDDEDVAPLSAKFADIYPLSNYDDTEVVANMNGIHSELNGGGENMALKDESPQISSTSSSSSEADDEEADGESSGEPPGAPKEDGVLGSRSPRTEESKADSPPPSYPTQQAEQAPNTCECHVCKQEASGLTPSAMTAGALPPGHQFLSPEKPTHPALHLYPHIHGHVPLHTVPHLPRPLIHPTLYATPPFTHSKALPPAPVQNHTNKHQVFNASLQDHIYPSCFGNTPEWNSSKFISLWGSEVMNDKNWNPGTFLPDTISGSEILGPTLSETRPEALPPPSSNETPAVSDSKEKKNAAKKKCLYNFQDAFMEANKVVMATSSATSSVSCTATTVQSSNSQFRVSSKRPPSVGDVFHGISKEDHRHSAPAAPRNSPTGLAPLPALSPAALSPAALSPASTPHLANLAAPSFPKTATTTPGFVDTRKSFCPAPLPPATDGSISAPPSVCSDPDCEGHRCENGVYDPQQDDGDESADEDSCSEHSSSTSTSTNQKEGKYCDCCYCEFFGHGGPPAAPTSRNYAEMREKLRLRLTKRKEEQPKKMDQISERESVVDHRRVEDLLQFINSSETKPVSSTRAAKRARHKQRKLEEKARLEAEARAREHLHLQEEQRRREEEEDEEEEEDRFKEEFQRLQELQKLRAVKKKKKERPSKDCPKLDMLTRNFQAATESVPNSGNIHNGSLEQTEEPETSSHSPSRHMNHSEPRPGLGADGDAADPVDTRDSKFLLPKEVNGKQHEPLSFFFDIMQHHKEGNGKQKLRQTSKASSEPARRPTEPPKATEGQSKPRAQTESKAKVVDLMSITEQKREERKVNSNNNNKKQLNHIKDEKSNPTPMEPTSPGEHQQNSKLVLAESPQPKGKNKKNKKKKGDRVNNSIDDVFLPKDIDLDSVDMDETEREVEYFKRDGVSPHCPGWSRTPGLK

SEQ ID NO: 29931 - protein, 804 aa, Homo sapiens
  Payload ID: 5852
  Gene Symbol: FAM193A
  Gene Name: family with sequence similarity 193, member A
  ENSP ID: ENSP00000421369
MKVRLLRQLSAAAKVKAPSGLQGPPQAHQFISLLLEEYGALCQAARSISTFLGTLENEHLKKFQVTWELHNKHLFENLVFSEPLLQSNLPALVSQIRLGTTTHDTCSEDTYSTLLQRYQRSEEELRRVAEEWLECQKRIDAYVDEQMTMKTKQRMLTEDWELFKQRRFIEEQLTNKKAVTGENNFTDTMRHMLSSRLSMPDCPNCNYRRRCACDDCSLSHILTCGIMDPPVTDDIHIHQLPLQVDPAPDYLAERSPPSVSSASSGSGSSSPITIQQHPRLILTDSGSAPTFCSDDEDVAPLSAKFADIYPLSNYDDTEVVANMNGIHSELNGGGENMALKDESPQISSTSSSSSEADDEEADGESSGEPPGAPKEDGVLGSRSPRTEESKADSPPPSYPTQQAEQAPNTCECHVCKQEASGLTPSAMTAGALPPGHQFLSPEKPTHPALHLYPHIHGHVPLHTVPHLPRPLIHPTLYATPPFTHSKALPPAPVQNHTNKHQVFNASLQDHIYPSCFGNTPEWNSSKFISLWGSEVMNDKNWNPGTFLPDTISGSEILGPTLSETRPEALPPPSSNETPAVSDSKEKKNAAKKKCLYNFQDAFMEANKVVMATSSATSSVSCTATTVQSSNSQFRVSSKRPPSVGDVFHGISKEDHRHSAPAAPRNSPTGLAPLPALSPAALSPAALSPASTPHLANLAAPSFPKTATTTPGFVDTRKSFCPAPLPPATDGSISAPPSVCSDPDCEGHRCENGVYDPQQDDGDESADEDSCSEHSSSTSTSTNQKEGKYCDCCYCEFFGHGGVSA

SEQ ID NO: 29932 - protein, 43 aa, Homo sapiens
  Payload ID: 5852
  Gene Symbol: FAM193A
  Gene Name: family with sequence similarity 193, member A
  ENSP ID: ENSP00000423292
MKVRLLRQLSAAAKVKAPSGLQGPPQAHQFISLLLEEYGALCQ

SEQ ID NO: 29933 - protein, 792 aa, Homo sapiens
  Payload ID: 5852
  Gene Symbol: FAM193A
  Gene Name: family with sequence similarity 193, member A
  Uniprot ID: P78312
  ENSP ID: ENSP00000423852
MKVRLLRQLSAAAKVKAPSGLQGPPQAHQFISLLLEEYGALCQAARSISTFLGTLENEHLKKFQVTWELHNKHLFENLVFSEPLLQSNLPALVSQIRLGTTTHDTCSEDTYSTLLQRYQRSEEELRRVAEEWLECQKRIDAYVDEQMTMKTKQRMLTEDWELFKQRRFIEEQLTNKKAVTGENNFTDTMRHMLSSRLSMPDCPNCNYRRRCACDDCSLSHILTCGIMDPPVTDDIHIHQLPLQVDPAPDYLAERSPPSVSSASSGSGSSSPITIQQHPRLILTDSGSAPTFCSDDEDVAPLSAKFADIYPLSNYDDTEVVANMNGIHSELNGGGENMALKDESPQISSTSSSSSEADDEEADGESSGEPPGAPKEDGVLGSRSPRTEESKADSPPPSYPTQQAEQAPNTCECHVCKQEASGLTPSAMTAGALPPGHQFLSPEKPTHPALHLYPHIHGHVPLHTVPHLPRPLIHPTLYATPPFTHSKALPPAPVQNHTNKHQVFNASLQDHIYPSCFGNTPEWNSSKFISLWGSEVMNDKNWNPGTFLPDTISGSEILGPTLSETRPEALPPPSSNETPAVSDSKEKKNAAKKKCLYNFQDAFMEANKVVMATSSATSSVSCTATTVQSSNSQFRVSSKRPPSVGDVFHGISKEDHRHSAPAAPRNSPTGLAPLPALSPAALSPAALSPASTPHLANLAAPSFPKTATTTPGFVDTRKSFCPAPLPPATDGSISAPPSVCSDPDCEGHRCENGVYDPQQDDGDESADEDSCSEHSSSTSTSTNQKEASSCTNK

SEQ ID NO: 29934 - protein, 1006 aa, Homo sapiens
  Payload ID: 5852
  Gene Symbol: FAM193A
  Gene Name: family with sequence similarity 193, member A
  ENSP ID: ENSP00000427260
MTMKTKQRMLTEDWELFKQRRFIEEQLTNKKAVTGENNFTDTMRHMLSSRLSMPDCPNCNYRRRCACDDCSLSHILTCGIMDPPVTDDIHIHQLPLQVDPAPDYLAERSPPSVSSASSGSGSSSPITIQQHPRLILTDSGSAPTFCSDDEDVAPLSAKFADIYPLSNYDDTEVVANMNGIHSELNGGGENMALKDESPQISSTSSSSSEADDEEADGESSGEPPGAPKEDGVLGSRSPRTEESKADSPPPSYPTQQAEQAPNTCECHVCKQEASGLTPSAMTAGALPPGHQFLSPEKPTHPALHLYPHIHGHVPLHTVPHLPRPLIHPTLYATPPFTHSKALPPAPVQNHTNKHQVFNASLQDHIYPSCFGNTPEWNSSKFISLWGSEVMNDKNWNPGTFLPDTISGSEILGPTLSETRPEALPPPSSNETPAVSDSKEKKNAAKKKCLYNFQDAFMEANKVVMATSSATSSVSCTATTVQSSNSQFRVSSKRPPSVGDVFHGISKEDHRHSAPAAPRNSPTGLAPLPALSPAALSPAALSPASTPHLANLAAPSFPKTATTTPGFVDTRKSFCPAPLPPATDGSISAPPSVCSDPDCEGHRCENGVYDPQQDDGDESADEDSCSEHSSSTSTSTNQKEGKYCDCCYCEFFGHGGPPAAPTSRNYAEMREKLRLRLTKRKEEQPKKMDQISERESVVDHRRVEDLLQFINSSETKPVSSTRAAKRARHKQRKLEEKARLEAEARAREHLHLQEEQRRREEEEDEEEEEDRFKEEFQRLQELQKLRAVKKKKKERPSKDCPKLDMLTRNFQAATESVPNSGNIHNGSLEQTEEPETSSHSPSRHMNHSEPRPGLGADGDAADPVDTRDSKFLLPKEVNGKQHEPLSFFFDIMQHHKEGNGKQKLRQTSKASSEPARRPTEPPKATEGQSKPRAQTESKAKVVDLMSITEQKREERKVNSNNNNKKQLNHIKDEKSNPTPMEPTSPGEHQQNSKLVLAESPQPKGKNK

SEQ ID NO: 29935 - protein, 1246 aa, Homo sapiens
  Payload ID: 5852
  Gene Symbol: FAM193A
  Gene Name: family with sequence similarity 193, member A
  Uniprot ID: P78312
  ENSP ID: ENSP00000427505
MKVRLLRQLSAAAKVKAPSGLQGPPQAHQFISLLLEEYGALCQAARSISTFLGTLENEHLKKFQVTWELHNKHLFENLVFSEPLLQSNLPALVSQIRLGTTTHDTCSEDTYSTLLQRYQRSEEELRRVAEEWLECQKRIDAYVDEQDLQTSVNKSIDTGTLVQSWLRGAAMTMKTKQRMLTEDWELFKQRRFIEEQLTNKKAVTGENNFTDTMRHMLSSRLSMPDCPNCNYRRRCACDDCSLSHILTCGIMDPPVTDDIHIHQLPLQVDPAPDYLAERSPPSVSSASSGSGSSSPITIQQHPRLILTDSGSAPTFDDEDVAPLSAKFADIYPLSNYDDTEVVANMNGIHSELNGGGENMALKDESPQISSTSSSSSEADDEEADGESSGEPPGAPKEDGVLGSRSPRTEESKADSPPPSYPTQQAEQAPNTCECHVCKQEASGLTPSAMTAGALPPGHQFLSPEKPTHPALHLYPHIHGHVPLHTVPHLPRPLIHPTLYATPPFTHSKALPPAPVQNHTNKHQVFNASLQDHIYPSCFGNTPEWNSSKFISLWGSEVMNDKNWNPGTFLPDTISGSEILGPTLSETRPEALPPPSSNETPAVSDSKEKKNAAKKKCLYNFQDAFMEANKVVMATSSATSSVSCTATTVQSSNSQFRVSSKRPPSVGDVFHGISKEDHRHSAPAAPRNSPTGLAPLPALSPAALSPAALSPASTPHLANLAAPSFPKTATTTPGFVDTRKSFCPAPLPPATDGSISAPPSVCSDPDCEGHRCENGVYDPQQDDGDESADEDSCSEHSSSTSTSTNQKEGKYCDCCYCEFFGHGGPPAAPTSRNYAEMREKLRLRLTKRKEEQPKKMDQISERESVVDHRRVEDLLQFINSSETKPVSSTRAAKRARHKQRKLEEKARLEAEARAREHLHLQEEQRRREEEEDEEEEEDRFKEEFQRLQELQKLRAVKKKKKERPSKDCPKLDMLTRNFQAATESVPNSGNIHNGSLEQTEEPETSSHSPSRHMNHSEPRPGLGADGDAADPVDTRDSKFLLPKEVNGKQHEPLSFFFDIMQHHKEGNGKQKLRQTSKASSEPARRPTEPPKATEGQSKPRAQTESKAKVVDLMSITEQKREERKVNSNNNNKKQLNHIKDEKSNPTPMEPTSPGEHQQNSKLVLAESPQPKGKNKKNKKKKGDRVNNSIDDVFLPKDIDLDSVDMDETEREVEYFKRFCLDSARQTRQRLSINWSNFSLKKATFAAH

SEQ ID NO: 29936 - protein, 1211 aa, Homo sapiens; identical to SEQ ID NO: 29930
  Payload ID: 5852
  Gene Symbol: FAM193A
  Gene Name: family with sequence similarity 193, member A
  Uniprot ID: P78312
  ENSP ID: ENSP00000443617

SEQ ID NO: 29937 - protein, 822 aa, Homo sapiens
  Payload ID: 5853
  Gene Symbol: FAM193B
  Gene Name: family with sequence similarity 193, member B
  Uniprot ID: Q96PV7
  ENSP ID: ENSP00000422131
MTRRRSRPSGGAGRRERARAAGPQKPQAPEPPPPPSLEAGAGAGPPEAPAEPDHDGPREDDEPNLVPGPQVPPASSQPVQTCCLLCHRERKGWEEGPSQNGLVLQGEKLPPDFMPKLVKNLLGEMPLWVCQSCRKSMEEDERQTGREHAVAISLSHTSCKSQSCGDDSHSSSSSSSSSSSSSSSSCPGNSGDWDPSSFLSAHKLSGLWNSPHSSGAMPGSSLGSPPTIPGEAFPVSEHHQHSDLTAPPNSPTGHHPQPASLIPSHPSSFGSPPHPHLLPTTPAAPFPAQASECPVAAATAPHTPGPCQSSHLPSTSMPLLKMPPPFSGCSHPCSGHCGGHCSGPLLPPPSSQPLPSTHRDPGCKGHKFAHSGLACQLPQPCEADEGLGEEEDSSSERSSCTSSSTHQRDGKFCDCCYCEFFGHNAEKEKAQLAAEALKQANRVSGSREPRPARERLLEWPDRELDRVNSFLSSRLQEIKNTVKDSIRASFSVCELSMDSNGFSKEGAAEPEPQSLPPSNLSGSSEQQPDINLDLSPLTLGSPQNHTLQAPGEPAPPWAEMRGPHPPWTEVRGPPPGIVPENGLVRRLNTVPNLSRVIWVKTPKPGYPSSEEPSSKEVPSCKQELPEPVSSGGKPQKGKRQGSQAKKSEASPAPRPPASLEVPSAKGQVAGPKQPGRVLELPKVGSCAEAGEGSRGSRPGPGWAGSPKTEKEKGSSWRNWPGEAKARPQEQESVQPSGPARPQSLPQGKGRSRRSRNKQEKPASSLDDVFLPKDMDGVEMDETDREVEYFKRFCLDSAKQTRQKVAVNWTNFSLKKTTPSTAQ

SEQ ID NO: 29938 - protein, 30 aa, Homo sapiens
  Payload ID: 5853
  Gene Symbol: FAM193B
  Gene Name: family with sequence similarity 193, member B
  ENSP ID: ENSP00000423855
  MOD_RES (1)..(1): Any amino acid
XDMDGVEMDETDREVEYFKSTLGGRGGWIT

SEQ ID NO: 29939 - protein, 72 aa, Homo sapiens
  Payload ID: 5853
  Gene Symbol: FAM193B
  Gene Name: family with sequence similarity 193, member B
  ENSP ID: ENSP00000423911
MPKLVKNLLGEMPLWVCQSCRKSMEEDERQTGREHAVAISLSHTSCKSQSCGDDSHSSSSSSSSSSSSSSSS

SEQ ID NO: 29940 - protein, 139 aa, Homo sapiens
  Payload ID: 5853
  Gene Symbol: FAM193B
  Gene Name: family with sequence similarity 193, member B
  ENSP ID: ENSP00000424052
SAKGQVAGPKQPGRVLELPKVGSCAEAGEGSRGSRPGPGWAGSPKTEKEKGSSWRNWPGEAKARPQEQESVQPSGPARPQSLPQGKGRSRRSRNKQEKPASSLDDVFLPKDMDGVEMDETDREVEYFKSTLGGRGGWIT

SEQ ID NO: 29941 - protein, 73 aa, Homo sapiens
  Payload ID: 5853
  Gene Symbol: FAM193B
  Gene Name: family with sequence similarity 193, member B
  ENSP ID: ENSP00000424300
EAGAGAGPPEAPAEPDHDGPREDDEPNLVPGPQRLQPRPPQQLCLLAPPRHTQQSSWSRQPGCPEEFLVGFLH

SEQ ID NO: 29942 - protein, 78 aa, Homo sapiens
  Payload ID: 5853
  Gene Symbol: FAM193B
  Gene Name: family with sequence similarity 193, member B
  ENSP ID: ENSP00000424652
MPKLVKNLLGEMPLWVCQSCRKSMEEDERQTGREHAVAISLSHTSCKSQSCGDDSHSSSSSSSSSSSSSSSSCPGNSG

SEQ ID NO: 29943 - protein, 142 aa, Homo sapiens
  Payload ID: 5853
  Gene Symbol: FAM193B
  Gene Name: family with sequence similarity 193, member B
  ENSP ID: ENSP00000424961
MTRRRSRPSGGAGRRERARAAGPQKPQAPEPPPPPSLEAGAGAGPPEAPAEPDHDGPREDDEPNLVPGPQVGASGETSAARALSPSPSGSGSGAGLGMGHPAAAGVAAFPRVRRRSFLPRGGNGGWTPLPKAEARSALLRLG

SEQ ID NO: 29944 - protein, 120 aa, Homo sapiens
  Payload ID: 5853
  Gene Symbol: FAM193B
  Gene Name: family with sequence similarity 193, member B
  ENSP ID: ENSP00000425002
MPKLVKNLLGEMPLWVCQSCRKSMEEDERQTGREHAVAISLSHTSCKSQSCGDDSHSSSSSSSSSSSSSSSSCPGNSGDWDPSSFLSAHKLSGLWNSPHSSGAMPGSSLGSPPTIPACRS

SEQ ID NO: 29945 - protein, 45 aa, Homo sapiens
  Payload ID: 5853
  Gene Symbol: FAM193B
  Gene Name: family with sequence similarity 193, member B
  ENSP ID: ENSP00000425173
MPKLVKNLLGEMPLWVCQSCRKSMEEDERQTGREHAVAISLSHTS

SEQ ID NO: 29946 - protein, 108 aa, Homo sapiens
  Payload ID: 5853
  Gene Symbol: FAM193B
  Gene Name: family with sequence similarity 193, member B
  ENSP ID: ENSP00000425310
  MOD_RES (1)..(1): Any amino acid
XPSSQPLPSTHRDPGCKGHKFAHSGLACQLPQPCEADEGLGEEEDSSSERSSCTSSSTHQRDGKFCDCCYCEFFGHNARSERLGVMKAEWKQKGSQSPKCDSQPRDRP

SEQ ID NO: 29947 - protein, 508 aa, Homo sapiens
  Payload ID: 5853
  Gene Symbol: FAM193B
  Gene Name: family with sequence similarity 193, member B
  ENSP ID: ENSP00000432463
  MOD_RES (1)..(1): Any amino acid
XERSSCTSSSTHQRDGKFCDCCYCEFFGHNAPPAAPTSRNYTEIREKLRSRLTRRKEELPMKGGTLGGIPGEPAVDHRDVDELLEFINSTEPKVPNSARAAKRARHKLKKKEKEKAQLAAEALKQANRVSGSREPRPARERLLEWPDRELDRVNSFLSSRLQEIKNTVKDSIRASFSVCELSMDSNGFSKEGAAEPEPQSLPPSNLSGSSEQQPDINLDLSPLTLGSPQNHTLQAPGEPAPPWAEMRGPHPPWTEVRGPPPGIVPENGLVRRLNTVPNLSRVIWVKTPKPGYPSSEEPSSKEVPSCKQELPEPVSSGGKPQKGKRQGSQAKKSEASPAPRPPASLEVPSAKGQVAGPKQPGRVLELPKVGSCAEAGEGSRGSRPGPGWAGSPKTEKEKGSSWRNWPGEAKARPQEQESVQPSGPARPQSLPQGKGRSRRSRNKQEKPASSLDDVFLPKDMDGVEMDETDREVEYFKRFCLDSAKQTRQKVAVNWTNFSLKKTTPSTAQ

SEQ ID NO: 29948 - protein, 160 aa, Homo sapiens
  Payload ID: 5854
  Gene Symbol: FAM195A
  Gene Name: family with sequence similarity 195, member A
  Uniprot ID: Q9BUT9
  ENSP ID: ENSP00000305138
MYTITKGPSKLVAQRRTGPTQQQVEGRLGELLKCRQPAPPTSQPPRAQPFAQPPGPWPLSSPGPRLVFNRVNGRRAPSTSPSFEGTQETYTVAHEENVRFVSEAWQQVQQQLDGGPAGEGGPRPVQYVERTPNPRLQNFVPIDLDEWWAQQFLARITSCS

SEQ ID NO: 29949 - protein, 75 aa, Homo sapiens
  Payload ID: 5854
  Gene Symbol: FAM195A
  Gene Name: family with sequence similarity 195, member A
  Uniprot ID: Q9BUT9
  ENSP ID: ENSP00000433876
MYTITKGPSKLVAQRRTGPTQQQVEGRLGELLKCRQPAPPTSQPPRAQPFAQPPGPWPLSSLAAGATAAGWWPSR

SEQ ID NO: 29950 - protein, 65 aa, Homo sapiens
  Payload ID: 5854
  Gene Symbol: FAM195A
  Gene Name: family with sequence similarity 195, member A
  ENSP ID: ENSP00000458625
MYTITKGPSKLVAQRRTGPTQQQVEGRLGELLKCRQPAPPTSQPPRAQPFAQPPGPWPLSSAPLS

SEQ ID NO: 29951 - protein, 65 aa, Homo sapiens; identical to SEQ ID NO: 29950
  Payload ID: 5854
  Gene Symbol: FAM195A
  Gene Name: family with sequence similarity 195, member A
  ENSP ID: ENSP00000486924

SEQ ID NO: 29952 - protein, 118 aa, Homo sapiens
  Payload ID: 5855
  Gene Symbol: FAM195B
  Gene Name: family with sequence similarity 195, member B
  ENSP ID: ENSP00000408827
MLPHQRLRGSGGGALGSDAPAMTSSPVSRVVYNGKRTSSPRSPPSSSEIFTPAHEENVRFIYEAWQGVERDLRGQVPGGERGLVEEYVEKVPNPSLKTFKPIDLSDLKRRSTQDAKKS

SEQ ID NO: 29953 - protein, 97 aa, Homo sapiens
  Payload ID: 5855
  Gene Symbol: FAM195B
  Gene Name: family with sequence similarity 195, member B
  Uniprot ID: C9JLW8
  ENSP ID: ENSP00000409009
MTSSPVSRVVYNGKRTSSPRSPPSSSEIFTPAHEENVRFIYEAWQGVERDLRGQVPGGERGLVEEYVEKVPNPSLKTFKPIDLSDLKRRSTQDAKKS

SEQ ID NO: 29954 - protein, 97 aa, Homo sapiens; identical to SEQ ID NO: 29953
  Payload ID: 5855
  Gene Symbol: FAM195B
  Gene Name: family with sequence similarity 195, member B
  Uniprot ID: C9JLW8
  ENSP ID: ENSP00000445543

SEQ ID NO: 29955 - protein, 97 aa, Homo sapiens; identical to SEQ ID NO: 29953
  Payload ID: 5855
  Gene Symbol: FAM195B
  Gene Name: family with sequence similarity 195, member B
  Uniprot ID: C9JLW8
  ENSP ID: ENSP00000458707

SEQ ID NO: 29956 - protein, 97 aa, Homo sapiens; identical to SEQ ID NO: 29953
  Payload ID: 5855
  Gene Symbol: FAM195B
  Gene Name: family with sequence similarity 195, member B
  Uniprot ID: C9JLW8
  ENSP ID: ENSP00000458720

SEQ ID NO: 29957 - protein, 92 aa, Homo sapiens
  Payload ID: 5855
  Gene Symbol: FAM195B
  Gene Name: family with sequence similarity 195, member B
  ENSP ID: ENSP00000459769
MTRVVYNGKRTSSPRSPPSSSEIFTPAHEENVRFIYEAWQGVERDLRGQVPGGERGLVEEYVEKVPNPSLKTFKPIDLSDLKRRSTQDAKKS

SEQ ID NO: 29958 - protein, 117 aa, Homo sapiens
  Payload ID: 5855
  Gene Symbol: FAM195B
  Gene Name: family with sequence similarity 195, member B
  ENSP ID: ENSP00000460100
MTSSPVSRVVYNGKRTSSPRSPPSSSEIFTPAHEENVRFIYEAWQGVERDLRGQVPGGERGLVEEYVEKVPNPSLKSEWGLTWGQGWAGRPGLMGRRGLCPPPTALSPGSLQAHRPE

SEQ ID NO: 29959 - protein, 63 aa, Homo sapiens
  Payload ID: 5855
  Gene Symbol: FAM195B
  Gene Name: family with sequence similarity 195, member B
  ENSP ID: ENSP00000460299
MTSSPVSRVVYNGKRTSSPRSPPSSSEIFTPAHEENVRFIYEAFKPIDLSDLKRRSTQDAKKS

SEQ ID NO: 29960 - protein, 78 aa, Homo sapiens
  Payload ID: 5855
  Gene Symbol: FAM195B
  Gene Name: family with sequence similarity 195, member B
  ENSP ID: ENSP00000460329
MRQAPPAPPSPESCTTARGPAAPAPHPAAARSSPQPTRRTSASFTKPGRVWSETCEARCRVASGAWWRSMWRRSLTPA

SEQ ID NO: 29961 - protein, 118 aa, Homo sapiens; identical to SEQ ID NO: 29952
  Payload ID: 5855
  Gene Symbol: FAM195B
  Gene Name: family with sequence similarity 195, member B
  ENSP ID: ENSP00000460461

SEQ ID NO: 29962 - protein, 118 aa, Homo sapiens; identical to SEQ ID NO: 29952
  Payload ID: 5855
  Gene Symbol: FAM195B
  Gene Name: family with sequence similarity 195, member B
  ENSP ID: ENSP00000461433

SEQ ID NO: 29963 - protein, 455 aa, Homo sapiens
  Payload ID: 5856
  Gene Symbol: FAM196A
  Gene Name: family with sequence similarity 196, member A
  Uniprot ID: Q6ZSG2
  ENSP ID: ENSP00000428730
MVSKDTGKCILTTSESEVEPAACLALEMKYALDPNRQIKKRNKALQVRFKDICEAQNEQRDTQLSSGQLGEKREAKPVSCRAAYRKYMTVPARRSIPNVTKSTGVQTSPDLKKCYQTFPLDRKKGNLKSLPAADPFKSQNNGFLTDAKEKNEAGPMEEARPCGAGRVHKTTALVFHSNQHMNTVDQPLGVNCTEPCKSPEPLSYGEAALQNSTRPPSEEPDYQLLGRAKQDRGRPNSEEPAPPALRRVFKTEVATVYAPALSARAPEPGLSDSAAASQWSLCPADDERRRATHLNGLQAPSETALACSPPMQCLSPECSEQPSQTHTPPGLGNQPSPTAVAAGEECQRIVPHTEVVDLKAQLQMMENLISSSQETIKVLLGVIQELEKGEAHREGVELDFKQQEDKLQPVLRKLHPIEETQVIPSPYSQETYSSTPKQKSKTESKKHGRWKLWFL

SEQ ID NO: 29964 - protein, 479 aa, Homo sapiens
  Payload ID: 5856
  Gene Symbol: FAM196A
  Gene Name: family with sequence similarity 196, member A
  Uniprot ID: Q6ZSG2
  ENSP ID: ENSP00000429763
MVSKDTGKCILTTSESEVEPAACLALEMKYALDPNRQIKKRNKALQVRFKDICEAQNEQRDTQLSSGQLGEKREAKPVSCRAAYRKYMTVPARRSIPNVTKSTGVQTSPDLKKCYQTFPLDRKKGNLKSLPAADPFKSQNNGFLTDAKEKNEAGPMEEARPCGAGRVHKTTALVFHSNQHMNTVDQPLGVNCTEPCKSPEPLSYGEAALQNSTRPPSEEPDYQLLGRAKQDRGRPNSEEPAPPALRRVFKTEVATVYAPALSARAPEPGLSDSAAASQWSLCPADDERRRATHLNGLQAPSETALACSPPMQCLSPECSEQPSQTHTPPGLGNQPSPTAVAAGEECQRIVPHTEVVDLKAQLQMMENLISSSQETIKVLLGVIQELEKGEAHREGLSYRTGQDTANCDTCRNSACIIYSVELDFKQQEDKLQPVLRKLHPIEETQVIPSPYSQETYSSTPKQKSKTESKKHGRWKLWFL

SEQ ID NO: 29965 - protein, 455 aa, Homo sapiens; identical to SEQ ID NO: 29963
  Payload ID: 5856
  Gene Symbol: FAM196A
  Gene Name: family with sequence similarity 196, member A
  Uniprot ID: Q6ZSG2
  ENSP ID: ENSP00000479733

SEQ ID NO: 29966 - protein, 535 aa, Homo sapiens
  Payload ID: 5857
  Gene Symbol: FAM196B
  Gene Name: family with sequence similarity 196, member B
  Uniprot ID: A6NMK8
  ENSP ID: ENSP00000366582
MAQQNMKVRPVLLKRNSLESVEFVKQPHHRRSKSQQVRFKEDGTTKNPTGLAEVDVQTPEDPAVMGKTQATRHHLPPTYSLSFPRSQKAGGFRNIAIQTSPSLRKHFPVFKRKRLTASKSLVEMPTASQSAIQVNGNLSEQDIVSSDLAYLRLAQHLEDGPRRVKVSHAFLPRVPKVQSNGPVSICLEAGTWRSLEKATAAIQVPDDIYHSPSWEARESALSPDRSAEVSNSIHPLDDTRPGDGRRVTPLDSEKSTSCLNATSVASHTPGTEELKPELLLPKDNSDDKDLGSLSSQSKETCVPSSPRTHSSPSQGSHSQPAHPGRASDCPSSSNNHQNLVSLKTNSASKSAPGCQEQTANNPTESDTLEFPNCPGSNHLPSSLSRSETKLQSNREISDINQIHLARGELCDLQGRLQSVEESLHSNQEKIKVLLNVIQDLEKARALTEGRNFYRTGQDLNNCSTCQNTACIIYSVEYDFRQQEGRFHEVLQSLEEAEPVEEASPPPKSPAEPPAPEKQDLRRKTKKVKKKCFWWI

SEQ ID NO: 29967 - protein, 575 aa, Homo sapiens
  Payload ID: 5858
  Gene Symbol: FAM198A
  Gene Name: family with sequence similarity 198, member A
  Uniprot ID: Q9UFP1
  ENSP ID: ENSP00000273146
MASWLRRKLRGKRRPVIAFCLLMILSAMAVTRFPPQRPSAGPDPGPMEPQGVTGAPATHIRQALSSSRRQRARNMGFWRSRALPRNSILVCAEEQGHRARVDRSRESPGGDLRHPGRVRRDITLSGHPRLSTQHVVLLREDEVGDPGTKDLGHPQHGSPIQETQSEVVTLVSPLPGSDMAALPAWRATSGLTLWPHTAEGRDLLGAENRALTGGQQAEDPTLASGAHQWPGSVEKLQGSVWCDAETLLSSSRTGGQAPPWLTDHDVQMLRLLAQGEVVDKARVPAHGQVLQVGFSTEAALQDLSSPRLSQLCSQGLCGLIKRPGDLPEVLSFHVDRVLGLRRSLPAVARRFHSPLLPYRYTDGGARPVIWWAPDVQHLSDPDEDQNSLALGWLQYQALLAHSCNWPGQAPCPGIHHTEWARLALFDFLLQVHDRLDRYCCGFEPEPSDPCVEERLREKCQNPAELRLVHILVRSSDPSHLVYIDNAGNLQHPEDKLNFRLLEGIDGFPESAVKVLASGCLQNMLLKSLQMDPVFWESQGGAQGLKQVLQTLEQRGQVLLGHIQKHNLTLFRDEDP

SEQ ID NO: 29968 - protein, 575 aa, Homo sapiens; identical to SEQ ID NO: 29967
  Payload ID: 5858
  Gene Symbol: FAM198A
  Gene Name: family with sequence similarity 198, member A
  Uniprot ID: Q9UFP1
  ENSP ID: ENSP00000407301

SEQ ID NO: 29969 - protein, 140 aa, Homo sapiens
  Payload ID: 5858
  Gene Symbol: FAM198A
  Gene Name: family with sequence similarity 198, member A
  ENSP ID: ENSP00000439905
MVHDRLDRYCCGFEPEPSDPCVEERLREKCQNPAELRLVHILVRSSDPSHLVYIDNAGNLQHPEDKLNFRLLEGIDGFPESAVKVLASGCLQNMLLKSLQMDPVFWESQGGAQGLKQVLQTLEQRGQVLLGHIQKHNLTL

SEQ ID NO: 29970 - protein, 519 aa, Homo sapiens
  Payload ID: 5859
  Gene Symbol: FAM198B
  Gene Name: family with sequence similarity 198, member B
  Uniprot ID: Q6UWH4
  ENSP ID: ENSP00000296530
MTCPDKPGQLINWFICSLCVPRVRKLWSSRRPRTRRNLLLGTACAIYLGFLVSQVGRASLQHGQAAEKGPHRSRDTAEPSFPEIPLDGTLAPPESQGNGSTLQPNVVYITLRSKRSKPANIRGTVKPKRRKKHAVASAAPGQEALVGPSLQPQEAAREADAVAPGYAQGANLVKIGERPWRLVRGPGVRAGGPDFLQPSSRESNIRIYSESAPSWLSKDDIRRMRLLADSAVAGLRPVSSRSGARLLVLEGGAPGAVLRCGPSPCGLLKQPLDMSEVFAFHLDRILGLNRTLPSVSRKAEFIQDGRPCPIILWDASLSSASNDTHSSVKLTWGTYQQLLKQKCWQNGRVPKPESGCTEIHHHEWSKMALFDFLLQIYNRLDTNCCGFRPRKEDACVQNGLRPKCDDQGSAALAHIIQRKHDPRHLVFIDNKGFFDRSEDNLNFKLLEGIKEFPASAVSVLKSQHLRQKLLQSLFLDKVYWESQGGRQGIEKLIDVIEHRAKILITYINAHGVKVLPMNE

SEQ ID NO: 29971 - protein, 527 aa, Homo sapiens
  Payload ID: 5859
  Gene Symbol: FAM198B
  Gene Name: family with sequence similarity 198, member B
  Uniprot ID: Q6UWH4
  ENSP ID: ENSP00000377396
MTCPDKPGQLINWFICSLCVPRVRKLWSSRRPRTRRNLLLGTACAIYLGFLVSQVGRASLQHGQAAEKGPHRSRDTAEPSFPEIPLDGTLAPPESQGNGSTLQPNVVYITLRSKRSKPANIRGTVKPKRRKKHAVASAAPGQEALVGPSLQPQEAAREADAVAPGYAQGANLVKIGERPWRLVRGPGVRAGGPDFLQPSSRESNIRIYSESAPSWLSKDDIRRMRLLADSAVAGLRPVSSRSGARLLVLEGGAPGAVLRCGPSPCGLLKQPLDMSEVFAFHLDRILGLNRTLPSVSRKAEFIQAAAAACLSMRLAFFIFPAWEDMRVPGKCCIGHARLTWGTYQQLLKQKCWQNGRVPKPESGCTEIHHHEWSKMALFDFLLQIYNRLDTNCCGFRPRKEDACVQNGLRPKCDDQGSAALAHIIQRKHDPRHLVFIDNKGFFDRSEDNLNFKLLEGIKEFPASAVSVLKSQHLRQKLLQSLFLDKVYWESQGGRQGIEKLIDVIEHRAKILITYINAHGVKVLPMNE

SEQ ID NO: 29972 - protein, 108 aa, Homo sapiens
  Payload ID: 5859
  Gene Symbol: FAM198B
  Gene Name: family with sequence similarity 198, member B
  ENSP ID: ENSP00000465491
MALFDFLLQIYNRLDTNCCGFRPRKEDACVQNGLRPKCDDQGSAALAHIIQRKHDPRHLVFIDNKGFFDRSEDNLNFKLLEGIKEFPASAVSVLKSQHLRQKLLQSLF

SEQ ID NO: 29973 - protein, 519 aa, Homo sapiens; identical to SEQ ID NO: 29970
  Payload ID: 5859
  Gene Symbol: FAM198B
  Gene Name: family with sequence similarity 198, member B
  Uniprot ID: Q6UWH4
  ENSP ID: ENSP00000465976

SEQ ID NO: 29974 - protein, 9 aa, Homo sapiens
  Payload ID: 5859
  Gene Symbol: FAM198B
  Gene Name: family with sequence similarity 198, member B
  ENSP ID: ENSP00000466595
MTCPDKPGQ

SEQ ID NO: 29975 - protein, 187 aa, Homo sapiens
  Payload ID: 5859
  Gene Symbol: FAM198B
  Gene Name: family with sequence similarity 198, member B
  ENSP ID: ENSP00000466811
MLLISETLQDGRPCPIILWDASLSSASNDTHSSVKLTWGTYQQLLKQKCWQNGRVPKPESGCTEIHHHEWSKMALFDFLLQIYNRLDTNCCGFRPRKEDACVQNGLRPKCDDQGSAALAHIIQRKHDPRHLVFIDNKGFFDRSEDNLNFKLLEGIKEFPASAVSVLKSQHLRQKLLQSLFLDKVYWE

SEQ ID NO: 29976 - protein, 331 aa, Homo sapiens
  Payload ID: 5859
  Gene Symbol: FAM198B
  Gene Name: family with sequence similarity 198, member B
  Uniprot ID: Q6UWH4
  ENSP ID: ENSP00000466873
MTCPDKPGQLINWFICSLCVPRVRKLWSSRRPRTRRNLLLGTACAIYLGFLVSQVGRASLQHGQAAEKGPHRSRDTAEPSFPEIPLDGTLAPPESQGNGSTLQPNVVYITLRSKRSKPANIRGTVKPKRRKKHAVASAAPGQEALVGPSLQPQEAAREADAVAPGYAQGANLVKIGERPWRLVRGPGVRAGGPDFLQPSSRESNIRIYSESAPSWLSKDDIRRMRLLADSAVAGLRPVSSRSGARLLVLEGGAPGAVLRCGPSPCGLLKQPLDMSEVFAFHLDRILGLNRTLPSVSRKAEFIQGNRFTCFVICSCWGFWFIFFFPSLSFSK

SEQ ID NO: 29977 - protein, 191 aa, Homo sapiens
  Payload ID: 5859
  Gene Symbol: FAM198B
  Gene Name: family with sequence similarity 198, member B
  ENSP ID: ENSP00000468648
  MOD_RES (1)..(1): Any amino acid
XFSTHGSHLDSSSSSVSFHALGILYFPSLGGYESSREMLYWTCKNGRPCPIILWDASLSSASNDTHSSVKLTWGTYQQLLKQKCWQNGRVPKPESGCTEIHHHEWSKMALFDFLLQIYNRLDTNCCGFRPRKEDACVQNGLRPKCDDQGSAALAHIIQRKHDPRHLVFIDNKGFFDRSEDNLNFKLLEGIK

SEQ ID NO: 29978 - protein, 388 aa, Homo sapiens
  Payload ID: 5860
  Gene Symbol: FAM199X
  Gene Name: family with sequence similarity 199, X-linked
  Uniprot ID: Q6PEV8
  ENSP ID: ENSP00000417581
MSDEASAITSYEKFLTPEEPFPLLGPPRGVGTCPSEEPGCLDISDFGCQLSSCHRTDPLHRFHTNRWNLTSCGTSVASSEGSEELFSSVSVGDQDDCYSLLDDQDFTSFDLFPEGSVCSDVSSSISTYWDWSDSEFEWQLPGSDIASGSDVLSDVIPSIPSSPCLLPKKKNKHRNLDELPWSAMTNDEQVEYIEYLSRKVSTEMGLREQLDIIKIIDPSAQISPTDSEFIIELNCLTDEKLKQVRNYIKEHSPRQRPAREAWKRSNFSCASTSGVSGASASASSSSASMVSSASSSGSSVGNSASNSSANMSRAHSDSNLSASAAERIRDSKKRSKQRKLQQKAFRKRQLKEQRQARKERLSGLFLNEEVLSLKVTEEDHEADVDVLM

SEQ ID NO: 29979 - protein, 127 aa, Homo sapiens
  Payload ID: 5861
  Gene Symbol: FAM20A
  Gene Name: family with sequence similarity 20, member A
  ENSP ID: ENSP00000464910
  MOD_RES (1)..(1): Any amino acid
XFHLWPQVQRQLRPRERPRGCPCTGRASSLARDSAAAASDPGTIVHNFSRTEPRTEPAGGSHSGSSSKLQALFAHPLYNVPEEPPLLGAEDSLLASQEALRYYRRKVARWNRPQFLLLKGRGGVCDP

SEQ ID NO: 29980 - protein, 21 aa, Homo sapiens
  Payload ID: 5861
  Gene Symbol: FAM20A
  Gene Name: family with sequence similarity 20, member A
  ENSP ID: ENSP00000467884
QRHNAEIAAFHLDREYGPAPL

SEQ ID NO: 29981 - protein, 541 aa, Homo sapiens
  Payload ID: 5861
  Gene Symbol: FAM20A
  Gene Name: family with sequence similarity 20, member A
  Uniprot ID: Q96MK3
  ENSP ID: ENSP00000468308
MPGLRRDRLLTLLLLGALLSADLYFHLWPQVQRQLRPRERPRGCPCTGRASSLARDSAAAASDPGTIVHNFSRTEPRTEPAGGSHSGSSSKLQALFAHPLYNVPEEPPLLGAEDSLLASQEALRYYRRKVARWNRRHKMYREQMNLTSLDPPLQLRLEASWVQFHLGINRHGLYSRSSPVVSKLLQDMRHFPTISADYSQDEKALLGACDCTQIVKPSGVHLKLVLRFSDFGKAMFKPMRQQRDEETPVDFFYFIDFQRHNAEIAAFHLDRILDFRRVPPTVGRIVNVTKEILEVTKNEILQSVFFVSPASNVCFFAKCPYMCKTEYAVCGNPHLLEGSLSAFLPSLNLAPRLSVPNPWIRSYTLAGKEEWEVNPLYCDTVKQIYPYNNSQRLLNVIDMAIFDFLIGNMDRHHYEMFTKFGDDGFLIHLDNARGFGRHSHDEISILSPLSQCCMIKKKTLLHLQLLAQADYRLSDVMRESLLEDQLSPVLTEPHLLALDRRLQTILRTVEGCIVAHGQQSVIVDGPVEQLAPDSGQANLTS

SEQ ID NO: 29982 - protein, 145 aa, Homo sapiens
  Payload ID: 5861
  Gene Symbol: FAM20A
  Gene Name: family with sequence similarity 20, member A
  ENSP ID: ENSP00000481085
MFTSPSEGKPGNMDRHHYEMFTKFGDDGFLIHLDNARGFGRHSHDEISILSPLSQCCMIKKKTLLHLQLLAQADYRLSDVMRESLLEDQLSPVLTEPHLLALDRRLQTILRTVEGCIVAHGQQSVIVDGPVEQLAPDSGQANLTS

SEQ ID NO: 29983 - protein, 409 aa, Homo sapiens
  Payload ID: 5862
  Gene Symbol: FAM20B
  Gene Name: family with sequence similarity 20, member B
  Uniprot ID: O75063
  ENSP ID: ENSP00000263733
MKLKQRVVLLAILLVIFIFTKVFLIDNLDTSAANREDQRAFHRMMTGLRVELAPKLDHTLQSPWEIAAQWVVPREVYPEETPELGAVMHAMATKKIIKADVGYKGTQLKALLILEGGQKVVFKPKRYSRDHVVEGEPYAGYDRHNAEVAAFHLDRILGFHRAPLVVGRFVNLRTEIKPVATEQLLSTFLTVGNNTCFYGKCYYCRETEPACADGDIMEGSVTLWLPDVWPLQKHRHPWGRTYREGKLARWEYDESYCDAVKKTSPYDSGPRLLDIIDTAVFDYLIGNADRHHYESFQDDEGASMLILLDNAKSFGNPSLDERSILAPLYQCCIIRVSTWNRLNYLKNGVLKSALKSAMAHDPISPVLSDPHLDAVDQRLLSVLATVKQCTDQFGMDTVLVEDRMPLSHL

SEQ ID NO: 29984 - protein, 138 aa, Homo sapiens
  Payload ID: 5862
  Gene Symbol: FAM20B
  Gene Name: family with sequence similarity 20, member B
  ENSP ID: ENSP00000404005
MKLKQRVVLLAILLVIFIFTKVFLIDNLDTSAANREDQRAFHRMMTGLRVELAPKLDHTLQSPWEIAAQWVVPREVYPEETPELGAVMHAMATKKIIKADVGYKGTQLKALLILEGGQKVVFKPKRYSRDHVVEGEPY

SEQ ID NO: 29985 - protein, 584 aa, Homo sapiens
  Payload ID: 5863
  Gene Symbol: FAM20C
  Gene Name: family with sequence similarity 20, member C
  Uniprot ID: Q8IXL6
  ENSP ID: ENSP00000322323
MKMMLVRRFRVLILMVFLVACALHIALDLLPRLERRGARPSGEPGCSCAQPAAEVAAPGWAQVRGRPGEPPAASSAAGDAGWPNKHTLRILQDFSSDPSSNLSSHSLEKLPPAAEPAERALRGRDPGALRPHDPAHRPLLRDPGPRRSESPPGPGGDASLLARLFEHPLYRVAVPPLTEEDVLFNVNSDTRLSPKAAENPDWPHAGAEGAEFLSPGEAAVDSYPNWLKFHIGINRYELYSRHNPAIEALLHDLSSQRITSVAMKSGGTQLKLIMTFQNYGQALFKPMKQTREQETPPDFFYFSDYERHNAEIAAFHLDRILDFRRVPPVAGRMVNMTKEIRDVTRDKKLWRTFFISPANNICFYGECSYYCSTEHALCGKPDQIEGSLAAFLPDLSLAKRKTWRNPWRRSYHKRKKAEWEVDPDYCEEVKQTPPYDSSHRILDVMDMTIFDFLMGNMDRHHYETFEKFGNETFIIHLDNGRGFGKYSHDELSILVPLQQCCRIRKSTYLRLQLLAKEEYKLSLLMAESLRGDQVAPVLYQPHLEALDRRLRVVLKAVRDCVERNGLHSVVDDDLDTEHRAASAR

SEQ ID NO: 29986 - protein, 261 aa, Homo sapiens
  Payload ID: 5863
  Gene Symbol: FAM20C
  Gene Name: family with sequence similarity 20, member C
  ENSP ID: ENSP00000485770
MKMMLVRRFRVLILMVFLVACALHIALDLLPRLERRGARPSGEPGCSCAQPAAEVAAPGWAQVRGRPGEPPAASSAAGDAGWPNKHTLRILQDFSSDPSSNLSSHSLEKLPPAAEPAERALRGRDPGALRPHDPAHRPLLRDPGPRRSESPPGPGGDASLLARLFEHPLYRVAVPPLTEEDVLFNVNSDTRLSPKAAENPDWPHAGAEGAEFLSPGEAAVDSYPNWLKFHIGINRYELYSRHNPAIEALLHDLSSQRITSV

SEQ ID NO: 29987 - protein, 261 aa, Homo sapiens; identical to SEQ ID NO: 29986
  Payload ID: 5863
  Gene Symbol: FAM20C
  Gene Name: family with sequence similarity 20, member C
  ENSP ID: ENSP00000488297

SEQ ID NO: 29988 - protein, 535 aa, Homo sapiens
  Payload ID: 5864
  Gene Symbol: FAM200A
  Gene Name: family with sequence similarity 200, member A
  ENSP ID: ENSP00000386191
MTPESRDTTDLSPGGTQEMEGIVIVKVEEEDEEDHFQKERNKVESSPQVLSRSTTMNERALLSSYLVAYRVAKEKMAHTAAEKIILPACMDMVRTIFDDKSADKLRTIPLSDNTISRRICTIAKHLEAMLITRLQSGIDFAIQLDESTDIASCPTLLVYVRYVWQDDFVEDLLCCLNLNSHITGLDLFTELENCLLGQYKLNWKHCKGISSDGTANMTGKHSRLTEKLLEATHNNAVWNHCFIHREALVSKEISPSLMDVLKNAVKTVNFIKGSSLNSRLLEIFCSEIGVNHTHLLFHTEVRWLSQGKVLSRVYELRNEIYIFLVEKQSHLANIFEDDIWVTKLAYLSDIFGILNELSLKMQGKNNDIFQYLEHILGFQKTLLLWQARLKSNRPSYYMFPTLLQHIEENIINEDCLKEIKLEILLHLTSLSQTFNYYFPEEKFESLKENIWMKDPFAFQNPESIIELNLEPEEENELLQLSSSFTLKNYYKILSLSAFWIKIKDDFPLLSRKSILLLLPFTTTYLCELGFSILTR

SEQ ID NO: 29989 - protein, 573 aa, Homo sapiens
  Payload ID: 5864
  Gene Symbol: FAM200A
  Gene Name: family with sequence similarity 200, member A
  Uniprot ID: Q8TCP9
  ENSP ID: ENSP00000411372
MTPESRDTTDLSPGGTQEMEGIVIVKVEEEDEEDHFQKERNKVESSPQVLSRSTTMNERALLSSYLVAYRVAKEKMAHTAAEKIILPACMDMVRTIFDDKSADKLRTIPLSDNTISRRICTIAKHLEAMLITRLQSGIDFAIQLDESTDIASCPTLLVYVRYVWQDDFVEDLLCCLNLNSHITGLDLFTELENCLLGQYKLNWKHCKGISSDGTANMTGKHSRLTEKLLEATHNNAVWNHCFIHREALVSKEISPSLMDVLKNAVKTVNFIKGSSLNSRLLEIFCSEIGVNHTHLLFHTEVRWLSQGKVLSRVYELRNEIYIFLVEKQSHLANIFEDDIWVTKLAYLSDIFGILNELSLKMQGKNNDIFQYLEHILGFQKTLLLWQARLKSNRPSYYMFPTLLQHIEENIINEDCLKEIKLEILLHLTSLSQTFNYYFPEEKFESLKENIWMKDPFAFQNPESIIELNLEPEEENELLQLSSSFTLKNYYKILSLSAFWIKIKDDFPLLSRKSILLLLPFTTTYLCELGFSILTRLKTKKRNRLNSAPDMRVALSSCVPDWKELMNRQAHPSH

SEQ ID NO: 29990 - protein, 657 aa, Homo sapiens
  Payload ID: 5865
  Gene Symbol: FAM200B
  Gene Name: family with sequence similarity 200, member B
  Uniprot ID: P0CF97
  ENSP ID: ENSP00000393017
MDHFFIKRKRNSEVKYTEACSSSSVESGIVNSDNIEKNTDSNLQTSTSFEPHFKKKKVSARRYNEDYLKYGFIKCEKPFENDRPQCVICNNILANESLKPSKLKRHLETQHAELIDKPLEYFQRKKKDIKLSTQFLSCSTAVSEKALLSSYLVAYRVAKEKIANTAAEKIILPACLDMVRTIFDDKSADKLKTIPNDNTVSLRICTIAEHLETMLITRLQSGIDFAIQLDESTDIGSCTTLLVYVRYAWQDDFLEDFLCFLNLTSHLSGLDIFTELERRIVGQYKLNWKNCKGITSDGTATMTGKHSRVIKKLLEVTNNGAVWNHCFIHREGLASREIPQNLMEVLKNAVKVVNFIKGSSLNSRLLETFCSEIGTNHTHLLYHTKIRWLSQGKILSRVYELRNEIHFFLIEKKSHLASIFEDDTWVTKLAYLTDIFSILNELSLKLQGKNSDVFQHVERIQGFRKTLLLWQVRLKSNRPSYYMFPRFLQHIEENIINENILKEIKLEILLHLTSLSQTFNHFFPEEKFETLRENSWVKDPFAFRHPESIIELNLVPEEENELLQLSSSYTLKNDYETLSLSAFWMKVKEDFPLLSRKSVLLLLPFTTTSLCELGFSILTQLKTKERNGLNCAAVMRVALSSCVPDWNELMNRQAHPS

SEQ ID NO: 29991 - protein, 24 aa, Homo sapiens
  Payload ID: 5865
  Gene Symbol: FAM200B
  Gene Name: family with sequence similarity 200, member B
  ENSP ID: ENSP00000422751
MDHFFIKRKRNSEVKYTEACSSSS

SEQ ID NO: 29992 - protein, 657 aa, Homo sapiens; identical to SEQ ID NO: 29990
  Payload ID: 5865
  Gene Symbol: FAM200B
  Gene Name: family with sequence similarity 200, member B
  Uniprot ID: P0CF97
  ENSP ID: ENSP00000483930

SEQ ID NO: 29993 - protein, 151 aa, Homo sapiens
  Payload ID: 5866
  Gene Symbol: FAM204A
  Gene Name: family with sequence similarity 204, member A
  ENSP ID: ENSP00000358168
MWSGLLPPGLNESDAESNSEDEATLENSGLNLQEDKEDESIRKTEIIDFSTDEPKTETESNVNAYEECPSGIPIDMWNKFQELHKKHSEQKSTTSRFRGKRRKRSRKDKLKNEKELHSEPSSNETQWKELTQYFGVNDRFDPPVKRKKVEK

SEQ ID NO: 29994 - protein, 233 aa, Homo sapiens
  Payload ID: 5866
  Gene Symbol: FAM204A
  Gene Name: family with sequence similarity 204, member A
  Uniprot ID: Q9H8W3
  ENSP ID: ENSP00000358170
MWSGLLPPGLNESDAESNSEDEATLENSGLNLQEDKEDESIRKTEIIDFSTDEPKTETESNVNAYEECPSGIPIDMWNKFQELHKKHSEQKSTTSRFRGKRRKRSRKDKLKNEKELHSEPSSNETQWKELTQYFGVNDRFDPPVKRKKVEKSGLEKRIDQAVEEWNIEKAEELSNQLATRELGVKIAKAVACHNFVKAKKEVENSQAARKKKKLAWGFEAKKRWETKSNMGYM

SEQ ID NO: 29995 - protein, 233 aa, Homo sapiens; identical to SEQ ID NO: 29994
  Payload ID: 5866
  Gene Symbol: FAM204A
  Gene Name: family with sequence similarity 204, member A
  Uniprot ID: Q9H8W3
  ENSP ID: ENSP00000358183

SEQ ID NO: 29996 - protein, 219 aa, Homo sapiens
  Payload ID: 5866
  Gene Symbol: FAM204A
  Gene Name: family with sequence similarity 204, member A
  ENSP ID: ENSP00000432701
MWSGLLPPGLNESDAESNSEDEATLENSGLNLQEDKEDESIRKTEIIDFSTDEPKTETESNVNAYEECPSGIPIDMWNKFQELHKKHSEQKSTTSRFRGKRRKRSRKDKLKNEKELHSEPSSNETQWKELTQYFGVNDRFDPPVKRKKVEKSGLEKRIDQAVEEWNIEKAEELSNQLATREENHGSNVVCFSVSAIQRLVLSLCPFPDGVTSINYFSLV

SEQ ID NO: 29997 - protein, 1335 aa, Homo sapiens
  Payload ID: 5867
  Gene Symbol: FAM205A
  Gene Name: family with sequence similarity 205, member A
  Uniprot ID: Q6ZU69
  ENSP ID: ENSP00000417711
MLSPTFVLWEVGYPLYIYGSIFIVIVIIWQVKRSHHELSSEPKRSCCRCHQKVRQRARDAASTARRRSREEAEKPQKLLSIIKSQGWLPLERSVRRILCADPCCQICNSVALEIQQLLVGENNQISLTLSGPLQGSSCLEMLSTSSMSLDQSLEFHSWHTRELSLSSVTPTLSQLTDQKSLTQSAAQSTYADGIQDYWADHLQLGQEFQVPDVLRGPNTIASSRIEKPRAPLNQEEMTQSNPSLVQGNQGQHHLNSQVSLLSLNPETLNRMHPMALHMVLPAHLPFLSPEVLRLLEVHVKKWMHFQRWGLPRRVEESLRQLMPNPPLYYQPGNDQPVSFNLKNTPQVSLHRFETISLQTWCSCVAGQPIQTFWVSEWSTMNPEQRHHCQQTPNPMALALPSPALKALSGPHPQSGGQDNDSGSDLQQKYSQLFCGLPSLHSESLVATFMGSQGLPKIENVPKPPLKDPFLFNELSFPQLLPKTSPQSAPPSSPLSPNWMSPSDHQRAQINVPFLTLAEYEALEWHLLQRQLQLQWGWPAALQRSQHTQCLMQHEPCGKAQSPETTTASQTGKSISVLTRELLFFPEHARKLLEFHIQKQLIRHRWGLPQKIQQSIQLLLTSTDQQTVSSSSTALANVSIPQPVALEANGACDVLSPIAAPVSIPRPHLLTQVKAILQSHIDSKCGQIHQGKIPACVHRSWDCRISGVLAVAPFPCIPESQFLELQTASDPDLHHKVMPWMPTALDQQQQALPGTVTEHPKLLRVLSVEAIEKLETTLRHKHLAFLSGLPALYYVALPRALAPAVTSQSVITEMEPSPVEIPAEPLIQMVSFEEQCISLGPCPQGNNESCTDVAKEFQPAVPVKGTMETLPLESQTHPTSPHSLQTHILTKLNFHLRKKVLEIQWGIPIRARKSREQTVAAPENISTQKSLESLNHQGETLLQELPIPPDTLPAPNPEGVHLKEQLANDLKAVQQNQKQSNSKAVPQGSAHSVSKISQPSGDMTEAHMPCVQVEANVNKPSLEEPCGPEPQSPSKSKDPAHVPMLAGNREDPEETKAARDHREGDAGFGRSSTREERRPAEDQRPAGMLPNKTPRGSWRWSRSFHLADPCQHSPQHHPQLKLPQLPPRVPGEKESEKDLQDSQTKLTVILEPATIPENAQTVLPQASQGQPFLSQPTQAKPLQGQTLQGQVLHGLVMPVHAQKKPSLTESSFRNKIKCFLQHINPKTKGKGHEDSMFSAAAKVAKTRKENVAKSLAPAKSPVGRSKTEKPTGCSKAQSRPAQKLVGPAFLDGPQSLDDKLRLHSRQPGSASALGYPRHCPRHCPREACANKPGHPT

SEQ ID NO: 29998 - protein, 128 aa, Homo sapiens
  Payload ID: 5868
  Gene Symbol: FAM205C
  Gene Name: family with sequence similarity 205, member C
  ENSP ID: ENSP00000489523
MLSPTFVLWDVGYPLYTYGSICIIALIIWQVKKSCQKLSLVPNRSCCRCHRRVQQKSGDRTSRARRTSQEEAEKLWKLLFLMKSQGWLPQEGSVRRILCADPCCQICNVMALEIKQLLKLQKLAWITR

SEQ ID NO: 29999 - protein, 208 aa, Homo sapiens
  Payload ID: 5868
  Gene Symbol: FAM205C
  Gene Name: family with sequence similarity 205, member C
  ENSP ID: ENSP00000489571
MLSPTFVLWDVGYPLYTYGSICIIALIIWQVKKSCQKLSLVPNRSCCRCHRRVQQKSGDRTSRARRTSQEEAEKLWKLLFLMKSQGWLPQEGSVRRILCADPCCQICNVMALEIKQLLAAPEVGLDNKMKLFLHWINPEMKDRRHEESILLSKAETVTQDRTKNIEKSPTVTKDHVWGATTQKTTEDPEAQPPSTEEEGLIFCDAPSA

SEQ ID NO: 30000 - protein, 338 aa, Homo sapiens
  Payload ID: 5868
  Gene Symbol: FAM205C
  Gene Name: family with sequence similarity 205, member C
  Uniprot ID: A6NFA0
  ENSP ID: ENSP00000489585
MLSPTFVLWDVGYPLYTYGSICIIALIIWQVKKSCQKLSLVPNRSCCRCHRRVQQKSGDRTSRARRTSQEEAEKLWKLLFLMKSQGWLPQEGSVRRILCADPCCQICNVMALEIKQLLAGENNQISLTSLGPSQGSSCLEALSTSSVSFKHSQDLGSPKSKELSLASVTPTLSQLMDQKSLTQSAARSAGADSVQDSWADHFQRGQRSQVPAVSQVMGSLSSNFEKPGIPLSQQERTKNNSKFVLENQEAPEVGLDNKMKLFLHWINPEMKDRRHEESILLSKAETVTQDRTKNIEKSPTVTKDHVWGATTQKTTEDPEAQPPSTEEEGLIFCDAPSA

SEQ ID NO: 30001 - protein, 181 aa, Homo sapiens
  Payload ID: 5869
  Gene Symbol: FAM206A
  Gene Name: family with sequence similarity 206, member A
  Uniprot ID: Q9NX38
  ENSP ID: ENSP00000363753
MATEPEAAEPVVPSLVDRYFTRWYKPDVKGKFCEDHCILQHSNRICVITLAESHPVLQSGKTIKSISYQISTNCSRLQNKVSGKFKRGAQFLTELAPLCKIYCSDGEEYTVSSCVRGRLMEVNENILHKPSILQEKPSTEGYIAVVLPKFEESKSITEGLLTQKQYEEVMVKRINATTATS

SEQ ID NO: 30002 - protein, 115 aa, Homo sapiens
  Payload ID: 5869
  Gene Symbol: FAM206A
  Gene Name: family with sequence similarity 206, member A
  ENSP ID: ENSP00000363754
MATEPEAAEPVVPSLVDRYFTRWYKPDVKGKFCEDHCILQHSNRICVITLAESHPVLQSGKTIKSISYQISTNCSRLQNKVSGKFKRRIIYLEKVEDVIKRKMMPLSLGLHLPHS

SEQ ID NO: 30003 - protein, 129 aa, Homo sapiens
  Payload ID: 5869
  Gene Symbol: FAM206A
  Gene Name: family with sequence similarity 206, member A
  ENSP ID: ENSP00000398018
ILHSLVQTGICVITLAESHPVLQSGKTIKSISYQISTNCSRLQNKVSGKFKRGAQFLTELAPLCKIYCSDGEEYTVSSCVRGRLMEVNENILHKPSILQEKPSTEGYIAVVLPKFEESKSITEGLLTQK

SEQ ID NO: 30004 - protein, 230 aa, Homo sapiens
  Payload ID: 5870
  Gene Symbol: FAM207A
  Gene Name: family with sequence similarity 207, member A
  Uniprot ID: Q9NSI2
  ENSP ID: ENSP00000291634
MGKVRGLRARVHQAAVRPKGEAAPGPAPPAPEATPPPASAAGKDWAFINTNIFARTKIDPSALVQKLELDVRSVTSVRRGEAGSSARSVPSIRRGAEAKTVLPKKEKMKLRREQWLQKIEAIKLAEQKHREERRRRATVVVGDLHPLRDALPELLGLEAGSRRQARSRESNKPRPSELSRMSAAQRQQLLEEERTRFQELLASPAYRASPLVAIGQTLARQMQLEDGGQL

SEQ ID NO: 30005 - protein, 215 aa, Homo sapiens
  Payload ID: 5870
  Gene Symbol: FAM207A
  Gene Name: family with sequence similarity 207, member A
  Uniprot ID: Q9NSI2
  ENSP ID: ENSP00000380926
MGKVRGLRARVHQAAVRPKGEAAPGPAPPAPEATPPPASAAGKDWAFINTNIFARTKIDPSALVQKLELDVRSVTSVRRGAEAKTVLPKKEKMKLRREQWLQKIEAIKLAEQKHREERRRRATVVVGDLHPLRDALPELLGLEAGSRRQARSRESNKPRPSELSRMSAAQRQQLLEEERTRFQELLASPAYRASPLVAIGQTLARQMQLEDGGQL

SEQ ID NO: 30006 - protein, 203 aa, Homo sapiens
  Payload ID: 5870
  Gene Symbol: FAM207A
  Gene Name: family with sequence similarity 207, member A
  ENSP ID: ENSP00000404964
MGKVRGLRARVHQAAVRPKGEAAPGPAPPAPEATPPPASAAGKDWAFINTNIFARTKIDPSALVQKLELDVRSVTSVRRGAEAKTVLPKKEKMKLRREQWLQKIEAIKLAEQKHREERRRRATVVVGDLHPLRDALPELLGLEAGSRRQARRKQGLCAVSNLGSILSWPSCPGSRVAGHALQAQAAPGWHPAAEAPEHWVQNR

SEQ ID NO: 30007 - protein, 1609 aa, Homo sapiens
  Payload ID: 5871
  Gene Symbol: FAM208A
  Gene Name: family with sequence similarity 208, member A
  Uniprot ID: Q9UK61
  ENSP ID: ENSP00000347845
MATAVETEACQPTDASWESGGGGDDEMKQALPELESSQQNGGGGGLNIAEPSGGAGREENAGAEAAQSLSHEQPQDSSEAGAAALPRGPEEPERPVRRSFQIPRKSREKKALFQPLTPGSREFEDVVNILHSSYLEPTSVTNFNYRRACLVHNELLEKEFTEKRRELKFDGRLDKELSESYAFLMVDRYQVQTICEKGLHVGQSKITILGSPSMGVYLSRYADLLQANPLDTGAMGDVVIFKIMKGKIKSIYDPMGVKSLESMLNKSALDPTPKHECHVSKNANRITSLLAYRAYELTQYYFYEYGFDELRRRPRHVCPYAVVSFTYKDDIQTPKFVPSSRSNSFNTDRNIDKYNYTLWKGQLLNKGKLLCYISLRSATRAFLPIKLPEKLDVETVMSIDHLKQKIPPALFYKETYLGPNEVLKNGMYCSLYEVVEKTRIGSNMESLLQKLDREKLVLVKPLGDRGYLFLLSPYQMVPPYEYQTAKSRVLHALFLFQEPRSIVTSQKGSTNAAPQERHESMPDVLKIAQFLQFSLIQCRKEFKNISAINFHSVVEKYVSEFFKRGFGSGKREFIMFPYDSRLDDKKFLYSAPRNKSHIDTCLHAYIFRPEVYQLPICKLKELFEENRKLQQFSPLSDYEGQEEEMNGTKMKFGKRNNSRGEAIISGKQRSSHSLDYDKDRVKELINLIQCRKKSVGGDSDTEDMRSKTVLKRKLEDLPENMRKLAKTSNLSENCHLYEESPQPIGSLGHDADLRRQQQDTCNSGIADIHRLFNWLSETLANARHSDASLTDTVNKALGLSTDDAYEELRQKHEYELNSTPDKKDYEQPTCAKVENAQFKGTQSLLLEVDATSKYSVAISTSEVGTDHKLHLKEDPNLISVNNFEDCSLCPSVPIEHGFRRQQSKSNNVEETEIHWKLIPITDTLKGTTEDDVLTGQVEEQCVPAAEAEPPAVSETTERTVLGEYNLFSRKIEEILKQKNVSYVSTVSTPIFSTQEKMKRLSEFIYSKTSKAGVQEFVDGLHEKLNTIIIKASAKGGNLPPVSPNDSGAKIASNPLERHVIPVSSSDFNNKHLLEPLCSDPLKDTNSDEQHSTSALTEVEMNQPQHATELMVTSDHIVPGDMAREPVEETTKSPSDVNISAQPALSNFISQLEPEVFNSLVKIMKDVQKNTVKFYIHEEEESVLCKEIKEYLIKLGNTECHPEQFLERRSKLDKLLIIIQNEDIAGFIHKIPGLVTLKKLPCVSFAGVDSLDDVKNHTYNELFVSGGFIVSDESILNPEVVTVENLKNFLTFLEELSTPEGKWQWKVHCKFQKKLKELGRLNAKALSLLTLLNVYQKKHLVEILSYHNCDSQTRNAPELDCLIRLQAQNIQQRHIVFLTEKNIKMLSSYTDNGIVVATAEDFMQNFKNLVGYHNSITEENLPQLGANENLESQSALLENDEKDEEDMSLDSGDEISHIEVCSNFHSEIWEKETKGSRGTDQKKNTQIELQSSPDVQNSLLEDKTYLDSEERTSIDIVCSEGENSNSTEQDSYSNFQVYHSQLNMSHQFSHFNVLTHQTFLGTPYALSSSQSQENENYFLSAYTESLDRDKSPPPLSWGKSDSSRPYSQEK

SEQ ID NO: 30008 - protein, 1233 aa, Homo sapiens
  Payload ID: 5871
  Gene Symbol: FAM208A
  Gene Name: family with sequence similarity 208, member A
  Uniprot ID: Q9UK61
  ENSP ID: ENSP00000399410
MSIDHLKQKIPPALFYKETYLGPNEVLKNGMYCSLYEVVEKTRIGSNMESLLQKLDREKLVLVKPLGDRGYLFLLSPYQMVPPYEYQTAKSRVLHALFLFQEPRSIVTSQKGSTNAAPQERHESMPDVLKIAQFLQFSLIQCRKEFKNISAINFHSVVEKYVSEFFKRGFGSGKREFIMFPYDSRLDDKKFLYSAPRNKSHIDTCLHAYIFRPEVYQLPICKLKELFEENRKLQQFSPLSDYEGQEEEMNGTKMKFGKRNNSRGEAIISGKQRSSHSLDYDKDRVKELINLIQCRKKSVGGDSDTEDMRSKTVLKRKLEDLPENMRKLAKTSNLSENCHLYEESPQPIGSLGHDADLRRQQQDTCNSGIADIHRLFNWLSETLANARHSDASLTDTVNKALGLSTDDAYEELRQKHEYELNSTPDKKDYEQPTCAKVENAQFKGTQSLLLEVDATSKYSVAISTSEVGTDHKLHLKEDPNLISVNNFEDCSLCPSVPIEHGFRRQQSKSNNVEETEIHWKLIPITGGNARSPEDQLGKHGEKQTPDTLKGTTEDDVLTGQVEEQCVPAAEAEPPAVSETTERTVLGEYNLFSRKIEEILKQKNVSYVSTVSTPIFSTQEKMKRLSEFIYSKTSKAGVQEFVDGLHEKLNTIIIKASAKGGNLPPVSPNDSGAKIASNPLERHVIPVSSSDFNNKHLLEPLCSDPLKDTNSDEQHSTSALTEVEMNQPQHATELMVTSDHIVPGDMAREPVEETTKSPSDVNISAQPALSNFISQLEPEVFNSLVKIMKDVQKNTVKFYIHEEEESVLCKEIKEYLIKLGNTECHPEQFLERRSKLDKLLIIIQNEDIAGFIHKIPGLVTLKKLPCVSFAGVDSLDDVKNHTYNELFVSGGFIVSDESILNPEVVTVENLKNFLTFLEELSTPEGKWQWKVHCKFQKKLKELGRLNAKALSLLTLLNVYQKKHLVEILSYHNCDSQTRNAPELDCLIRLQAQNIQQRHIVFLTEKNIKMLSSYTDNGIVVATAEDFMQNFKNLVGYHNSITEENLPQLGANENLESQSALLENDEKDEEDMSLDSGDEISHIEVCSNFHSEIWEKETKGSRGTDQKKNTQIELQSSPDVQNSLLEDKTYLDSEERTSIDIVCSEGENSNSTEQDSYSNFQVYHSQLNMSHQFSHFNVLTHQTFLGTPYALSSSQSQENENYFLSAYTESLDRDKSPPPLSWGKSDSSRPYSQEK

SEQ ID NO: 30009 - protein, 1512 aa, Homo sapiens
  Payload ID: 5871
  Gene Symbol: FAM208A
  Gene Name: family with sequence similarity 208, member A
  Uniprot ID: Q9UK61
  ENSP ID: ENSP00000417509
MATAVETEACQPTDASWESGGGGDDEMKQALPELESSQQNGGGGGLNIAEPSGGAGREENAGAEAAQSLSHEQPQDSSEAGAAALPRGPEEPERPVRRSFQIPRKSREKKALFQPLTPGSREFEDVVNILHSSYLEPTSVTNFNYRRACLVHNELLEKEFTEKRRELKFDGRLDKELSESYAFLMVDRYQVQTICEKGLHVGQSKITILGSPSMGVYLSRYADLLQANPLDTGAMGDVVIFKIMKGKIKSIYDPMGVKSLESMLNKSALDPTPKHECHVSKNANRITSLLAYRAYELTQYYFYEYGFDELRRRPRHVCPYAVVSFTYKDDIQTPKFVPSSRSNSFNTDRNIDKYNYTLWKGQLLNKGKLLCYISLRSATRAFLPIKLPEKLDVETVMSIDHLKQKIPPALFYKETYLGPNEVLKNGMYCSLYEVVEKTRIGSNMESLLQKLDREKLVLVKPLGDRGYLFLLSPYQMVPPYEYQTAKSRVLHALFLFQEPRSIVTSQKGSTNAAPQERHESMPDVLKIAQFLQFSLIQCRKEFKNISAINFHSVVEKYVSEFFKRGFGSGKREFIMFPYDSRLDDKKFLYSAPRNKSHIDTCLHAYIFRPEVYQLPICKLKELFEENRKLQQFSPLSDYEGQEEEMNGTKMKFGKRNNSRGEAIISGKQRSSHSLDYDKDRVKELINLIQCRKKSVGGDSDTEDMRSKTVLKRKLEDLPENMRKLAKTSNLSENCHLYEESPQPIGSLGHDADLRRQQQDTCNSGIADIHRLFNWLSETLANARHSDASLTDTVNKALGLSTDDAYEELRQKHEYELNSTPDKKDYEQPTCAKVENAQFKGTQSLLLEVDATSKYSVAISTSEVGTDHKLHLKEDPNLISVNNFEDCSLCPSVPIEHGFRRQQSKSNNVEETEIHWKLIPITGGNARSPEDQLGKHGEKQTPGMKSPEEQLVCVPPQEAFPNDPRVINRQRSSDYQFPSSPFTDTLKGTTEDDVLTGQVEEQCVPAAEAEPPAVSETTERTVLGEYNLFSRKIEEILKQKNVSYVSTVSTPIFSTQEKMKRLSEFIYSKTSKAGVQEFVDGLHEKLNTIIIKASAKGGNLPPVSPNDSGAKIASNPLERHVIPVSSSDFNNKHLLEPLCSDPLKDTNSDEQHSTSALTEVEMNQPQHATELMVTSDHIVPGDMAREPVEETTKSPSDVNISAQPALSNFISQLEPEVFNSLVKIMKDVQKNTVKFYIHEEEESVLCKEIKEYLIKLGNTECHPEQFLERRSKLDKLLIIIQNEDIAGFIHKIPGLVTLKKLPCVSFAGVDSLDDVKNHTYNELFVSGGFIVSDESILNPEVVTVENLKNFLTFLEELSTPEGKWQWKVHCKFQKKLKELGRLNAKALSLLTLLNVYQKKHLVEILSYHNCDSQTRNAPELDCLIRLQAQNIQQRHIVFLTEKNIKMLSSYTDNGIVVATAEDFMQNFKNLVGYHNSITEENLPQLGANENLESQSDAVLTLTPLELGVGISQH

SEQ ID NO: 30010 - protein, 1035 aa, Homo sapiens
  Payload ID: 5871
  Gene Symbol: FAM208A
  Gene Name: family with sequence similarity 208, member A
  ENSP ID: ENSP00000483340
MFPYDSRLDDKKFLYSAPRNKSHIDTCLHAYIFRPEVYQLPICKLKELFEENRKLQQFSPLSDYEGQEEEMNGTKMKFGKRNNSRGEAIISGKQRSSHSLDYDKDRVKELINLIQCRKKSVGGDSDTEDMRSKTVLKRKLEDLPENMRKLAKTSNLSENCHLYEESPQPIGSLGHDADLRRQQQDTCNSGIADIHRLFNWLSETLANARHSDASLTDTVNKALGLSTDDAYEELRQKHEYELNSTPDKKDYEQPTCAKVENAQFKGTQSLLLEVDATSKYSVAISTSEVGTDHKLHLKEDPNLISVNNFEDCSLCPSVPIEHGFRRQQSKSNNVEETEIHWKLIPITDTLKGTTEDDVLTGQVEEQCVPAAEAEPPAVSETTERTVLGEYNLFSRKIEEILKQKNVSYVSTVSTPIFSTQEKMKRLSEFIYSKTSKAGVQEFVDGLHEKLNTIIIKASAKGGNLPPVSPNDSGAKIASNPLERHVIPVSSSDFNNKHLLEPLCSDPLKDTNSDEQHSTSALTEVEMNQPQHATELMVTSDHIVPGDMAREPVEETTKSPSDVNISAQPALSNFISQLEPEVFNSLVKIMKDVQKNTVKFYIHEEEESVLCKEIKEYLIKLGNTECHPEQFLERRSKLDKLLIIIQNEDIAGFIHKIPGLVTLKKLPCVSFAGVDSLDDVKNHTYNELFVSGGFIVSDESILNPEVVTVENLKNFLTFLEELSTPEGKWQWKVHCKFQKKLKELGRLNAKALSLLTLLNVYQKKHLVEILSYHNCDSQTRNAPELDCLIRLQAQNIQQRHIVFLTEKNIKMLSSYTDNGIVVATAEDFMQNFKNLVGYHNSITEENLPQLGANENLESQSALLENDEKDEEDMSLDSGDEISHIEVCSNFHSEIWEKETKGSRGTDQKKNTQIELQSSPDVQNSLLEDKTYLDSEERTSIDIVCSEGENSNSTEQDSYSNFQVYHSQLNMSHQFSHFNVLTHQTFLGTPYALSSSQSQENENYFLSAYTESLDRDKSPPPLSWGKSDSSRPYSQEK

SEQ ID NO: 30011 - protein, 2430 aa, Homo sapiens
  Payload ID: 5872
  Gene Symbol: FAM208B
  Gene Name: family with sequence similarity 208, member B
  Uniprot ID: Q5VWN6
  ENSP ID: ENSP00000328426
MAPPAHKSILERSENVLMSPWKGKLIVQDRMLCDIALWSTYGAMIPTQLPQELDFKYVMKVSSLKKRLPEAAFRKQNYLEEKVCFQDLCFNLYEVELSNRQGENIDKLTECIKNKQLAIIKCLEDRGFFILLTSSALLSEPDFGGKQMGLHGLHLFRSPLSTGVKDLKVEDDISMKVIPILSTLNCALLETKKSLPEERIHPNTLVKRHFQELYKADRSPSLSVAPQDRMKDPTFLGKLPSGFDLIPPAEKCPSESLTQLNSYFSDPSAYILEVSTALDLLAEHPQSPCVSDGICDAGFSLVMTPDPEFLVSEAEVRKETETKKDSEEMLKAKKRVFPLSPASNLRVQPKRKASMPHMVQSKKVNLCRPFPKRTASRADNSSDSPTTLKLVKGQFPQKRKRGAEVLTAQFVQKTKLDRKNQEAPISKDVPVPTNAKRARKQEKSPVKTVPRAKPPVKKSPQKQRVNIVKGNENPRNRKQLQPVKGETASKLQSEISRGCQEDGISINSVQPENTTAAHNDLPENSIVNYDSQALNMLADLALSSATSSTPVSEARNLHCSSELPQNDVLLSKENSLRGTSDHEYHRGVKTQKGELLPNPSSDRKSNSGSDLTVSQDEESLVPCSQAPAKAQSALTEEMLESSDASQSSSVSVEHSYALLLTEHSKKHLQEREILSPLFPRNGTKSPEAATPVGKVMPFRHQPGLLLQQKPPDDPVVKPKDRPPSARVKKSSCSRIVLSCDDSVKITFKCETEYAFSLDSKYTNNPLEKTVVRALHGPWNTDLPDNVEEVKLLLHMWVALFYSNQNKIIRSSRKVVEHSNPAKYVSINSTLESCELREIEESLGLEKCSADSLLETNEISRAHAAEVSFRDPNCLLPFIKTPLTQGLELCVQNEQKKTFARECDPDTQEDQNFICSYNNEVTGEEAKQESLETSNLVLSGIGSTQTNGPSVPSEEEIVQPLDSTRVASYSGTVTQATFTRTYDGPGSQPVICQSSVYGTLENKVDILDAAVQTKTGTLQDLIQHGSPINNECHPSLERKDDNMGCAVINPEPITLTFEKNAHVPIQTEGVNTADERTTFKKELIKQVSPAASLRHPVSTSENARTQGLRDIPSLVVAGQKGTKYLCASSVGGETLDKAVCSLQKETPLPVSLPSDKTMVMEALSLAKSSSHLSPSEEVRCTQDFLSQTQSLLGLSSEGLLELTQVEVDSSSASTTLGRQCSLNCISSGCHTSGDSLELRKNHKNGPNTENMNLEAFDSVFIKQTSLSVSREVSLELSEEDSDIDLALTISPPTSPREEMPAGEIEQFEEAPFSNLELQDVAEEIGEPEEVALTESREVSSADNVSVYPSVSEEPVENKERKGDNLQPVTLILSKENCTLEIAEEINVTSDFPFDSVIEEVSPASSPEPPVPVKETRPYQAVTPCILKLHGTQCEKSNQISQCESEDLGITEKENVFVGPTHPVGQDNFTQVQQMQVSAEMPLILTDHPGRTGRPTLPGKVTEEIVSSEHDEGLSFSGKVQCYGRELNQPASAAKCTGDFSPSPEKLVKSGNPLQPVSIENRNLDLKHLVLESSEPPFGPRNVIENKSLSDTLVSTTAPSGIVNVSVKQQTSPKSSQNHLFPGDLKTDEGIYLQVKSLTAASVDGAYSTQGCMCSVVPTLCSSSDNATLTHYVRPINAEPVFQAQEIPAGRMASLLKNGEPEAELHKETTGPGTAGPQSNTTSSLKGERKAIHTLQDVSTCETKELLNVGVSSLCAGPYQNTADTKENLSKEPLASFVSESFDTSVCGIATEHVEIENSGEGLRAEAGSETLGRDGEVGVNSDMHYELSGDSDLDLLGDCRNPRLDLEDSYTLRGSYTRKKDVPTDGYESSLNFHNNNQEDWGCSSWVPGMETSLPPGHWTAAVKKEEKCVPPYVQIRDLHGILRTYANFSITKELKDTMRTSHGLRRHPSFSANCGLPSSWTSTWQVADDLTQNTLDLEYLRFAHKLKQTIKNGDSQHSASSANVFPKESPTQISIGAFPSTKISEAPFLHPAPRSRSPLLVTVVESDPRPQGQPRRGYTASSLDSSSSWRERCSHNRDLRNSQRNHTVSFHLNKLKYNSTVKESRNDISLILNEYAEFNKVMKNSNQFIFQDKELNDVSGEATAQEMYLPFPGRSASYEDIIIDVCTNLHVKLRSVVKEACKSTFLFYLVETEDKSFFVRTKNLLRKGGHTEIEPQHFCQAFHRENDTLIIIIRNEDISSHLHQIPSLLKLKHFPSVIFAGVDSPGDVLDHTYQELFRAGGFVISDDKILEAVTLVQLKEIIKILEKLNGNGRWKWLLHYRENKKLKEDERVDSTAHKKNIMLKSFQSANIIELLHYHQCDSRSSTKAEILKCLLNLQIQHIDARFAVLLTDKPTIPREVFENSGILVTDVNNFIENIEKIAAPFRSSYW

SEQ ID NO: 30012 - protein, 246 aa, Homo sapiens
  Payload ID: 5872
  Gene Symbol: FAM208B
  Gene Name: family with sequence similarity 208, member B
  ENSP ID: ENSP00000369623
  MOD_RES (1)..(1): Any amino acid
XLSVAPQDRMKDPTFLGKLPSGFDLIPPAEKCPSESLTQLNSYFSDPSAYILEVSTALDLLAEHPQSPCVSDGICDAGFSLVMTPDPEFLVSEAEVRKETETKKDSEEMLKAKKRVFPLSPASNLRVQPKRKASMPHMVQSKKVNLCRPFPKRTASRADNSSDSPTTLKLVKGQFPQKRKRVKGETASKLQSEISRGCQEDGISINSVQPENTTAAHNDLPENSIVNYDSQALNMLADLALSSATS

SEQ ID NO: 30013 - protein, 8 aa, Homo sapiens
  Payload ID: 5872
  Gene Symbol: FAM208B
  Gene Name: family with sequence similarity 208, member B
  ENSP ID: ENSP00000434941
MAPPAHKS

SEQ ID NO: 30014 - protein, 171 aa, Homo sapiens
  Payload ID: 5873
  Gene Symbol: FAM209A
  Gene Name: family with sequence similarity 209, member A
  Uniprot ID: Q5JX71
  ENSP ID: ENSP00000360379
MWTLKSSLVLLLCLTCSYAFMFSSLRQKTSEPQGKVQYGEHFRIRQNLPEHTQGWLGSKWLWLLFVVVPFVILQCQRDSEKNKEQSPPGLRGGQLHSPLKKKRNASPNKDCAFNTLMELEVELMKFVSKVRNLKRAMATGSGSNLRLRKSEMPADPYHVTICEIWGEESSS

SEQ ID NO: 30015 - protein, 171 aa, Homo sapiens
  Payload ID: 5874
  Gene Symbol: FAM209B
  Gene Name: family with sequence similarity 209, member B
  Uniprot ID: Q5JX69
  ENSP ID: ENSP00000360376
MWTLKSSLVLLLCLTCSYAFMFSSLRQKTSEPQGKVPCGEHFRIRQNLPEHTQGWLGSKWLWLLFAVVPFVILQCQRDSEKNKEQSPPGLRGFPFRTPLKKNQNASLYKDCVFNTLNELEVELLKFVSEVQNLKGAMATGSGSNLKLRRSEMPADPYHVTICKIWGEESSS

SEQ ID NO: 30016 - protein, 1341 aa, Homo sapiens
  Payload ID: 5875
  Gene Symbol: FAM21A
  Gene Name: family with sequence similarity 21, member A
  Uniprot ID: Q641Q2
  ENSP ID: ENSP00000282633
MMNRTTPDQELAPASEPVWERPWSVEEIRRSSQSWSLAADAGLLQFLQEFSQQTISRTHEIKKQVDGLIRETKATDCRLHNVFNDFLMLSNTQFIENRVYDEEVEEPVLKAEAEKTEQEKTREQKEVDLIPKVQEAVNYGLQVLDSAFEQLDIKAGNSDSEEDDANGRVELILEPKDLYIDRPLPYLIGSKLFMEQEDVGLGELSSEEGSVGSDRGSIVDTEEEKEEEESDEDFAHHSDNEQNRHTTQMSDEEEDDDGCDLFADSEKEEEDIEDIEENTRPKRSRPTSFADELAARIKGDAVGRVDEEPTTLPSGEAKPRKTLKEKKERRTPSDDEEDNLFAPPKLTDEDFSPFGSGGGLFSGGKGLFDDEDEESDLFTEAPQDRQAGASVKEESSSSKPGKKIPAGAVSVFLGDTDVFGAASVPSMKEPQKPEQPTPRKSPYGPPPTGLFDDDDGDDDDDFFSAPHSKPSKTGKVQSTADIFGDEEGDLFKEKAVASPEATVSQTDENKARAEKKVTLSSSKNLKPSSETKTQKGLFSDEEDSEDLFSSQSASKLKGASLLPGKLPTLVSLFDDEDEEDNLFGGTAAKKQTLCLQAQREEKAKASELSKKKASALLFSSDEEDQWNIPASQTHLASDSRSKGEPRDSGTLQSQEAKAVKKTSLFEEDEEDDLFAIAKDSQKKTQRVSLLFEDDVDSGGSLFGSPPTSVPPATKKKETVSEAPPLLFSDEEEKEAQLGVKSVDKKVESAKESLKFGRTDVAESEKEGLLTRSAQETVKHSDLFSSSSPWDKGTKPRTKTVLSLFDEEEDKMEDQNIIQAPQKEVGKGRDPDAHPKSTGVFQDEELLFSHKLQKDNDPDVDLFAGTKKTKLLEPSVGSLFGDDEDDDLFSSAKSQPLVQEKKRVVKKDHSVDSFKNQKHPESIQGSKEKGIWKPETPQDSSGLAPFKTKEPSTRIGKIQANLAINPAALLPTAASQISEVKPVLPELAFPSSEHRRSHGLESVPVLPGSGEAGVSFDLPAQADTLHSANKSRVKMRGKRRPQTRAARRLAAQESSETEDMSVPRGPIAQWADGAISPNGHRPQLRAASGEDSTEEALAAAAAPWEGGPVPGVDRSPFAKSLGHSRGEADLFDSGDIFSTGTGSQSVERTKPKAKIAENPANPPVGGKAKSPMFPALGEASSDDDLFQSAKPKPAKKTNPFPLLEDEDDLFTDQKVKKNETKSNSQQDVILTTQDIFEDDIFATEAIKPSQKTREKEKTLESNLFDDNIDIFADLTVKPKEKSKKKVEAKSIFDDDMDDIFSSGIQAKTTKPKSRSAQAAPEPRFEHKVSNIFDDPLNAFGGQ

SEQ ID NO: 30017 - protein, 1279 aa, Homo sapiens
  Payload ID: 5875
  Gene Symbol: FAM21A
  Gene Name: family with sequence similarity 21, member A
  ENSP ID: ENSP00000314417
MMNRTTPDQELAPASEPVWERPWSVEEIRRSSQSWSLAADAGLLQFLQEFSQQTISRTHEIKKQVDGLIRETKATDCRLHNVFNDFLMLSNTQFIENRVYDEEVEEPVLKAEAEKTEQEKTREQKEVDLIPKVQEAVNYGLQVLDSAFEQLDIKAGNSDSEEDDANGRVELILEPKDLYIDRPLPYLIGSKLFMEQEDVGLGELSSEEGSVGSDRGSIVDTEEEKEEEESDEDFAHHSDNEQNRHTTQMSDEEEDDDGCDLFADSEKEEEDIEDIEENTRPKRSRPTSFADELAARIKGDAVGRVDEEPTTLPSGEAKPRKTLKEKKERRTPSDDEEDNLFAPPKLTDEDFSPFGSGGGLFSGGKGLFDDEDEESDLFTEAPQDRQAGASVKEESSSSKPGKKIPAGAVSVFLGDTDVFGAASVPSMKEPQKPEQPTPRKSPYGPPPTGLFDDDDGDDDDDFFSAPHSKPSKTGKVQSTADIFGDEEGDLFKEKAVASPEATVSQTDENKARAEKKVTLSSSKNLKPSSETKTQKGLFSDEEDSEDLFSSQSASKLKGASLLPGKLPTLVSLFDDEDEEDNLFGGTAAKKQTLCLQAQREEKAKASELSKKKASALLFSSDEEDQWNIPASQTHLASDSRSKGEPRDSGTLQSQEAKAVKKTSLFEEDEEDDLFAIAKDSQKKTQRVSLLFEDDVDSGGSLFGSPPTSVPPATKKKETVSEAPPLLFSDEEEKEAQLGVKSVDKKVESAKESLKFGRTDVAESEKEGLLTRSAQETVKHSDLFSSSSPWDKGTKPRTKTVLSLFDEEEDKMEDQNIIQAPQKEVGKGRDPDAHPKSTGVFQDEELLFSHKLQKDNDPDVDLFAGTKKTKLLEPSVGSLFGDDEDDDLFSSAKSQPLANLAINPAALLPTAASQISEVKPVLPELAFPSSEHRRSHGLESVPVLPGSGEAGVSFDLPAQADTLHSANKSRVKMRGKRRPQTRAARRLAAQESSETEDMSVPRGPIAQWADGAISPNGHRPQLRAASGEDSTEEALAAAAAPWEGGPVPGVDRSPFAKSLGHSRGEADLFDSGDIFSTGTGSQSVERTKPKAKIAENPANPPVGGKAKSPMFPALGEASSDDDLFQSAKPKPAKKTNPFPLLEDEDDLFTDQKVKKNETKSNSQQDVILTTQDIFEDDIFATEAIKPSQKTREKEKTLESNLFDDNIDIFADLTVKPKEKSKKKVEAKSIFDDDMDDIFSSGIQAKTTKPKSRSAQAAPEPRFEHKVSNIFDDPLNAFGGQ

SEQ ID NO: 30018 - protein, 1320 aa, Homo sapiens
  Payload ID: 5875
  Gene Symbol: FAM21A
  Gene Name: family with sequence similarity 21, member A
  Uniprot ID: Q641Q2
  ENSP ID: ENSP00000344037
MMNRTTPDQELAPASEPVWERPWSVEEIRRSSQSWSLAADAGLLQFLQEFSQQTISRTHEIKKQVDGLIRETKATDCRLHNVFNDFLMLSNTQFIENRVYDEEVEEPVLKAEAEKTEQEKTREQKEVDLIPKVQEAVNYGLQVLDSAFEQLDIKAGNSDSEEDDANGRVELILEPKDLYIDRPLPYLIGSKLFMEQEDVGLGELSSEEGSVGSDRGSIVDTEEEKEEEESDEDFAHHSDNEQNRHTTQMSDEEEDDDGCDLFADSEKEEEDIEDIEENTRPKRSRPTSFADELAARIKGDAVGRVDEEPTTLPSGEAKPRKTLKEKKERRTPSDDEEDNLFAPPKLTDEDFSPFGSGGGLFSGGKGLFDDEDEESDLFTEAPQDRQAGASVKEESSSSKPGKKIPAGAVSVFLGDTDVFGAASVPSMKEPQKPEQPTPRKSPYGPPPTGLFDDDDGDDDDDFFSAPHSKPSKTGKVQSTADIFGDEEGDLFKEKAVASPEATVSQTDENKARAEKKVTLSSSKNLKPSSETKTQKGLFSDEEDSEDLFSSQSASKLKGASLLPGKLPTLVSLFDDEDEEDNLFGGTAAKKQTLCLQAQREEKAKASELSKKKASALLFSSDEEDQWNIPASQTHLASDSRSKGEPRDSGTLQSQEAKAVKKTSLFEEDEEDDLFAIAKDSQKKTQRVSLLFEDDVDSGGSLFGSPPTSVPPATKKKETVSEAPPLLFSDEEEKEAQLGVKSVDKKVESAKESLKFGRTDVAESEKEGLLTRSAQETVKHSDLFSSSSPWDKGTKPRTKTVLSLFDEEEDKMEDQNIIQAPQKEVGKGRDPDAHPKSTGVFQDEELLFSHKLQKDNDPDVDLFAGTKKTKLLEPSVGSLFGDDEDDDLFSSAKSQPLVQEKKRVVKKDHSVDSFKNQKHPESIQGSKEKGIWKPETPQANLAINPAALLPTAASQISEVKPVLPELAFPSSEHRRSHGLESVPVLPGSGEAGVSFDLPAQADTLHSANKSRVKMRGKRRPQTRAARRLAAQESSETEDMSVPRGPIAQWADGAISPNGHRPQLRAASGEDSTEEALAAAAAPWEGGPVPGVDRSPFAKSLGHSRGEADLFDSGDIFSTGTGSQSVERTKPKAKIAENPANPPVGGKAKSPMFPALGEASSDDDLFQSAKPKPAKKTNPFPLLEDEDDLFTDQKVKKNETKSNSQQDVILTTQDIFEDDIFATEAIKPSQKTREKEKTLESNLFDDNIDIFADLTVKPKEKSKKKVEAKSIFDDDMDDIFSSGIQAKTTKPKSRSAQAAPEPRFEHKVSNIFDDPLNAFGGQ

SEQ ID NO: 30019 - protein, 1253 aa, Homo sapiens
  Payload ID: 5875
  Gene Symbol: FAM21A
  Gene Name: family with sequence similarity 21, member A
  ENSP ID: ENSP00000382277
MPRLSGKSVRVYDEEVEEPVLKAEAEKTEQEKTREQKEVDLIPKVQEAVNYGLQVLDSAFEQLDIKAGNSDSEEDDANGRVELILEPKDLYIDRPLPYLIGSKLFMEQEDVGLGELSSEEGSVGSDRGSIVDTEEEKEEEESDEDFAHHSDNEQNRHTTQMSDEEEDDDGCDLFADSEKEEEDIEDIEENTRPKRSRPTSFADELAARIKGDAVGRVDEEPTTLPSGEAKPRKTLKEKKERRTPSDDEEDNLFAPPKLTDEDFSPFGSGGGLFSGGKGLFDDEDEESDLFTEAPQDRQAGASVKEESSSSKPGKKIPAGAVSVFLGDTDVFGAASVPSMKEPQKPEQPTPRKSPYGPPPTGLFDDDDGDDDDDFFSAPHSKPSKTGKVQSTADIFGDEEGDLFKEKAVASPEATVSQTDENKARAEKKVTLSSSKNLKPSSETKTQKGLFSDEEDSEDLFSSQSASKLKGASLLPGKLPTLVSLFDDEDEEDNLFGGTAAKKQTLCLQAQREEKAKASELSKKKASALLFSSDEEDQWNIPASQTHLASDSRSKGEPRDSGTLQSQEAKAVKKTSLFEEDEEDDLFAIAKDSQKKTQRVSLLFEDDVDSGGSLFGSPPTSVPPATKKKETVSEAPPLLFSDEEEKEAQLGVKSVDKKVESAKESLKFGRTDVAESEKEGLLTRSAQETVKHSDLFSSSSPWDKGTKPRTKTVLSLFDEEEDKMEDQNIIQAPQKEVGKGRDPDAHPKSTGVFQDEELLFSHKLQKDNDPDVDLFAGTKKTKLLEPSVGSLFGDDEDDDLFSSAKSQPLVQEKKRVVKKDHSVDSFKNQKHPESIQGSKEKGIWKPETPQDSSGLAPFKTKEPSTRIGKIQANLAINPAALLPTAASQISEVKPVLPELAFPSSEHRRSHGLESVPVLPGSGEAGVSFDLPAQADTLHSANKSRVKMRGKRRPQTRAARRLAAQESSETEDMSVPRGPIAQWADGAISPNGHRPQLRAASGEDSTEEALAAAAAPWEGGPVPGVDRSPFAKSLGHSRGEADLFDSGDIFSTGTGSQSVERTKPKAKIAENPANPPVGGKAKSPMFPALGEASSDDDLFQSAKPKPAKKTNPFPLLEDEDDLFTDQKVKKNETKSNSQQDVILTTQDIFEDDIFATEAIKPSQKTREKEKTLESNLFDDNIDIFADLTVKPKEKSKKKVEAKSIFDDDMDDIFSSGIQAKTTKPKSRSAQAAPEPRFEHKVSNIFDDPLNAFGGQ

SEQ ID NO: 30020 - protein, 156 aa, Homo sapiens
  Payload ID: 5875
  Gene Symbol: FAM21A
  Gene Name: family with sequence similarity 21, member A
  ENSP ID: ENSP00000398095
SPWDKGTKPRTKTVLSLFDEEEDKMEDQNIIQAPQKEVGKGRDPDAHPKSTGVFQDEELLFSHKLQKDNDPDVDLFAGTKKTKLLEPSVGSLFGDDEDDDLFSSAKSQPLVQEKKRVVKKDHSVDSFKNQKHPESIQGSKEKGIWKPETPQVRNPL

SEQ ID NO: 30021 - protein, 106 aa, Homo sapiens
  Payload ID: 5875
  Gene Symbol: FAM21A
  Gene Name: family with sequence similarity 21, member A
  ENSP ID: ENSP00000403781
MMNRTTPDQELAPASEPVWERPWSVEEIRRSSQSWSLAADAGLLQFLQEFSQQTISRTHEIKKQVDGLIRETKATDCRLHNVFNDFLMLSNTQFIENRVYDEEKAL

SEQ ID NO: 30022 - protein, 1245 aa, Homo sapiens
  Payload ID: 5875
  Gene Symbol: FAM21A
  Gene Name: family with sequence similarity 21, member A
  ENSP ID: ENSP00000481763
MMNRTTPDQELAPASEPVWERPWSVEEIRRSSQSWSLAADAGLLQFLQEFSQQTISRTHEIKKQVDGLIRETKATDCRLHNVFNDFLMLSNTQFIENRVYDEEVEEPVLKAEAEKTEQEKTREQKEVDLIPKVQEAVNYGLQVLDSAFEQLDIKAGNSDSEEDDANGRVELILEPKDLYIDRPLPYLIGSKLFMEQEDVGLGELSSEEGSVGSDRGSIVDTEEEKEEEESDEDFAHHSDNEQNRHTTQMSDEEEDDDGCDLFADSEKEEEDIEDIEENTRPKRSRPTSFADELAARIKGDAVGRVDEEPTNEEDNLFAPPKLTDEDFSPFGSGGGLFSGGKGLFDDEDEESDLFTEAPQDRQAGASVKEESSSSKPGKKIPAGAVSVFLGDTDVFGAASVPSMKEPQKPEQPTPRKSPYGPPPTGLFDDDDGDDDDDFFSAPHSKPSKTGKVQSTADIFGDEEGDLFKEKAVASPEATVSQTDENKARAEKKVTLSSSKNLKPSSETKTQKGLFSDEEDSEDLFSSQSASKLKGASLLPGKLPTLVSLFDDEDEEDNLFGGTAAKKQTLCLQAQREEKAKASELSKKKASALLFSSDEEDQWNIPASQTHLASDSRSKGEPRDSGTLQSQEAKAVKKTSLFEEDEEDDLFAIAKDSQKKTQRVSLLFEDDVDSGGSLFGSPPTSVPPATKEGLLTRSAQETVKHSDLFSSSSPWDKGTKPRTKTVLSLFDEEEDKMEDQNIIQAPQKEVGKGRDPDAHPKSTGVFQDEELLFSHKLQKDNDPDVDLFAGTKKTKLLEPSVGSLFGDDEDDDLFSSAKSQPLVQEKKRVVKKDHSVDSFKNQKHPESIQGSKEKGIWKPETPQANLAINPAALLPTAASQISEVKPVLPELAFPSSEHRRSHGLESVPVLPGSGEAGVSFDLPAQADTLHSANKSRVKMRGKRRPQTRAARRLAAQESSETEDMSVPRGPIAQWADGAISPNGHRPQLRAASGEDSTEEALAAAAAPWEGGPVPGVDRSPFAKSLGHSRGEADLFDSGDIFSTGTGSQSVERTKPKAKIAENPANPPVGGKAKSPMFPALGEASSDDDLFQSAKPKPAKKTNPFPLLEDEDDLFTDQKVKKNETKSNSQQDVILTTQDIFEDDIFATEAIKPSQKTREKEKTLESNLFDDNIDIFADLTVKPKEKSKKKVEAKSIFDDDMDDIFSSGIQAKTTKPKSRSAQAAPEPRFEHKVSNIFDDPLNAFGGQ

SEQ ID NO: 30023 - protein, 1341 aa, Homo sapiens [sequence omitted]

SEQ ID NO: 30024 - protein, 1262 aa, Homo sapiens
  Payload ID: 5876
  Gene Symbol: FAM21C
  Gene Name: family with sequence similarity 21, member C
  ENSP ID: ENSP00000352922
MNRTTPDQELVPASEPVWERPWSVEEIRRSSQSWSLAADAGRVYDEEVEEPVLKAEAEKTEQEKTREQKEVDLIPKVQEAVNYGLQVLDSAFEQLDIKAGNSDSEEDDANGRVELILEPKDLYIDRPLPYLIGSKLFMEQEDVGLGELSSEEGSVGSDRGSIVDTEEEKEEEESDEDFAHHSDNEQNQHTTQMSDEEEDDDGCDLFADSEKEEEDIEDIEENTRPKRSRPTSFADELAARIKGDAMGRVDEEPTTLPSGEAKPRKTLKEKKERRTPSDDEEDNLFAPPKLTDEDFSPFGSGGGLFSGGKGLFDDEDEESDLFTEASQDRQAGASVKEESSSSKPGKKIPAGAVSVFLGDTDVFGAASVPSLKEPQKPEQPTPRKSPYGPPPTGLFDDDDGDDDDDFFSAPHSKPSKTRKVQSTADIFGDEEGDLFKEKAVASPEATVSQTDENKARAEKKVTLSYSKNLKPSSETKTQKGLFSDEEDSEDLFSSQSASNLKGASLLPGKLPTSVSLFDDEDEEDNLFGGTAAKKQTLSLQAQREEKAKASELSKKKASALLFSSDEEWNIPASQTHLASDSRSKGEPRDSGTLQSQEAKAVKKTSLFEEDKEDDLFAIAKDSQKKTQRVSLLFEDDVDSGGSLFGSPPTSVPPATKKKETVSEAPPLLFSDEEEKEAQLGVKSVDKKVESAKESLKFGRTDVAESEKEGLLTRSAQETVKHSDLFSSSSPWDKGTKPRTKTVLSLFDEEEDKMEDQNIIQAPQKEVGKGCDPDAHPKSTGVFQDEELLFSHKLQKDNDPDVDLFAGTKKTKLLEPSVGSLFGDDEDDDLFSSAKSQPLVQEKKRVVKKDHSVNSFKNQKHPESIQGSKEKGIWKPETPQANLAINPAALLPTAASQISEVKPVLPELAFPSSEHRRSHGLESVPVLPGSGEAGVSFDLPAQADTLHSANKSRVKMRGKRRPQTRAARRLAAQESSEAEDMSVPRGPIAQWADGAISPNGHRPQLRAASGEDSTEEALAAAAAPWEGGPVPGVDTSPFAKSLGHSRGEADLFDSGDIFSTGTGSQSVERTKPKAKIAENPANPPVGGKAKSPMFPALGEASSDDDLFQSAKPKPAKKTNPFPLLEDEDDLFTDQKVKKNETKSSSQQDVILTTQDIFEDDIFATEAIKPSQKTREKEKTLESNLFDDNIDIFADLTVKPKEKSKKKVEAKSIFDDDMDDIFSTGIQAKTTKPKSRSAQAAPEPRFEHKVSNIFDDPLNAFGGQ

SEQ ID NO: 30025 - protein, 1320 aa, Homo sapiens
  Payload ID: 5876
  Gene Symbol: FAM21C
  Gene Name: family with sequence similarity 21, member C
  Uniprot ID: Q9Y4E1
  ENSP ID: ENSP00000363482
MMNRTTPDQELVPASEPVWERPWSVEEIRRSSQSWSLAADAGLLQFLQEFSQQTISRTHEIKKQVDGLIRETKATDCRLHNVFNDFLMLSNTQFIENRVYDEEVEEPVLKAEAEKTEQEKTREQKEVDLIPKVQEAVNYGLQVLDSAFEQLDIKAGNSDSEEDDANGRVELILEPKDLYIDRPLPYLIGSKLFMEQEDVGLGELSSEEGSVGSDRGSIVDTEEEKEEEESDEDFAHHSDNEQNQHTTQMSDEEEDDDGCDLFADSEKEEEDIEDIEENTRPKRSRPTSFADELAARIKGDAMGRVDEEPTTLPSGEAKPRKTLKEKKERRTPSDDEEDNLFAPPKLTDEDFSPFGSGGGLFSGGKGLFDDEDEESDLFTEASQDRQAGASVKEESSSSKPGKKIPAGAVSVFLGDTDVFGAASVPSLKEPQKPEQPTPRKSPYGPPPTGLFDDDDGDDDDDFFSAPHSKPSKTRKVQSTADIFGDEEGDLFKEKAVASPEATVSQTDENKARAEKKVTLSYSKNLKPSSETKTQKGLFSDEEDSEDLFSSQSASNLKGASLLPGKLPTSVSLFDDEDEEDNLFGGTAAKKQTLSLQAQREEKAKASELSKKKASALLFSSDEEDQWNIPASQTHLASDSRSKGEPRDSGTLQSQEAKAVKKTSLFEEDKEDDLFAIAKDSQKKTQRVSLLFEDDVDSGGSLFGSPPTSVPPATKKKETVSEAPPLLFSDEEEKEAQLGVKSVDKKVESAKESLKFGRTDVAESEKEGLLTRSAQETVKHSDLFSSSSPWDKGTKPRTKTVLSLFDEEEDKMEDQNIIQAPQKEVGKGCDPDAHPKSTGVFQDEELLFSHKLQKDNDPDVDLFAGTKKTKLLEPSVGSLFGDDEDDDLFSSAKSQPLVQEKKRVVKKDHSVNSFKNQKHPESIQGSKEKGIWKPETPQANLAINPAALLPTAASQISEVKPVLPELAFPSSEHRRSHGLESVPVLPGSGEAGVSFDLPAQADTLHSANKSRVKMRGKRRPQTRAARRLAAQESSEAEDMSVPRGPIAQWADGAISPNGHRPQLRAASGEDSTEEALAAAAAPWEGGPVPGVDTSPFAKSLGHSRGEADLFDSGDIFSTGTGSQSVERTKPKAKIAENPANPPVGGKAKSPMFPALGEASSDDDLFQSAKPKPAKKTNPFPLLEDEDDLFTDQKVKKNETKSSSQQDVILTTQDIFEDDIFATEAIKPSQKTREKEKTLESNLFDDNIDIFADLTVKPKEKSKKKVEAKSIFDDDMDDIFSTGIQAKTTKPKSRSAQAAPEPRFEHKVSNIFDDPLNAFGGQ

SEQ ID NO: 30026 - protein, 279 aa, Homo sapiens
  Payload ID: 5876
  Gene Symbol: FAM21C
  Gene Name: family with sequence similarity 21, member C
  ENSP ID: ENSP00000416630
MMNRTTPDQELVPASEPVWERPWSVEEIRRSSQSWSLAADAGRVYDEEVEEPVLKAEAEKTEQEKTREQKEVDLIPKVQEAVNYGLQVLDSAFEQLDIKAGNSDSEEDDANGRVELILEPKDLYIDRPLPYLIGSKLFMEQEDVGLGELSSEEGSVGSDRGSIVDTEEEKEEEESDEDFAHHSDNEQNQHTTQMSDEEEDDDGCDLFADSEKEEEDIEDIEENTRPKRSRPTSFADELAARIKGDAMGRVDEEPTTLPSGEAKPRKTLKEKKERRTPSD

SEQ ID NO: 30027 - protein, 1279 aa, Homo sapiens
  Payload ID: 5876
  Gene Symbol: FAM21C
  Gene Name: family with sequence similarity 21, member C
  Uniprot ID: Q9Y4E1
  ENSP ID: ENSP00000439811
MMNRTTPDQELVPASEPVWERPWSVEEIRRSSQSWSLAADAGLLQFLQEFSQQTISRTHEIKKQVDGLIRETKATDCRLHNVFNDFLMLSNTQFIENRVYDEEVEEPVLKAEAEKTEQEKTREQKEVDLIPKVQEAVNYGLQVLDSAFEQLDIKAGNSDSEEDDANGRVELILEPKDLYIDRPLPYLIGSKLFMEQEDVGLGELSSEEGSVGSDRGSIVDTEEEKEEEESDEDFAHHSDNEQNQHTTQMSDEEEDDDGCDLFADSEKEEEDIEDIEENTRPKRSRPTSFADELAARIKGDAMGRVDEEPTTLPSGEAKPRKTLKEKKERRTPSDDEEDNLFAPPKLTDEDFSPFGSGGGLFSGGKGLFDDEDEESDLFTEASQDRQAGASVKEESSSSKPGKKIPAGAVSVFLGDTDVFGAASVPSLKEPQKPEQPTPRKSPYGPPPTGLFDDDDGDDDDDFFSAPHSKPSKTRKVQSTADIFGDEEGDLFKEKAVASPEATVSQTDENKARAEKKVTLSYSKNLKPSSETKTQKGLFSDEEDSEDLFSSQSASNLKGASLLPGKLPTSVSLFDDEDEEDNLFGGTAAKKQTLSLQAQREEKAKASELSKKKASALLFSSDEEDQWNIPASQTHLASDSRSKGEPRDSGTLQSQEAKAVKKTSLFEEDKEDDLFAIAKDSQKKTQRVSLLFEDDVDSGGSLFGSPPTSVPPATKKKETVSEAPPLLFSDEEEKEAQLGVKSVDKKVESAKESLKFGRTDVAESEKEGLLTRSAQETVKHSDLFSSSSPWDKGTKPRTKTVLSLFDEEEDKMEDQNIIQAPQKEVGKGCDPDAHPKSTGVFQDEELLFSHKLQKDNDPDVDLFAGTKKTKLLEPSVGSLFGDDEDDDLFSSAKSQPLANLAINPAALLPTAASQISEVKPVLPELAFPSSEHRRSHGLESVPVLPGSGEAGVSFDLPAQADTLHSANKSRVKMRGKRRPQTRAARRLAAQESSEAEDMSVPRGPIAQWADGAISPNGHRPQLRAASGEDSTEEALAAAAAPWEGGPVPGVDTSPFAKSLGHSRGEADLFDSGDIFSTGTGSQSVERTKPKAKIAENPANPPVGGKAKSPMFPALGEASSDDDLFQSAKPKPAKKTNPFPLLEDEDDLFTDQKVKKNETKSSSQQDVILTTQDIFEDDIFATEAIKPSQKTREKEKTLESNLFDDNIDIFADLTVKPKEKSKKKVEAKSIFDDDMDDIFSTGIQAKTTKPKSRSAQAAPEPRFEHKVSNIFDDPLNAFGGQ

SEQ ID NO: 30028 - protein, 1245 aa, Homo sapiens
  Payload ID: 5876
  Gene Symbol: FAM21C
  Gene Name: family with sequence similarity 21, member C
  Uniprot ID: Q9Y4E1
  ENSP ID: ENSP00000442128
MMNRTTPDQELVPASEPVWERPWSVEEIRRSSQSWSLAADAGLLQFLQEFSQQTISRTHEIKKQVDGLIRETKATDCRLHNVFNDFLMLSNTQFIENRVYDEEVEEPVLKAEAEKTEQEKTREQKEVDLIPKVQEAVNYGLQVLDSAFEQLDIKAGNSDSEEDDANGRVELILEPKDLYIDRPLPYLIGSKLFMEQEDVGLGELSSEEGSVGSDRGSIVDTEEEKEEEESDEDFAHHSDNEQNQHTTQMSDEEEDDDGCDLFADSEKEEEDIEDIEENTRPKRSRPTSFADELAARIKGDAMGRVDEEPTNEEDNLFAPPKLTDEDFSPFGSGGGLFSGGKGLFDDEDEESDLFTEASQDRQAGASVKEESSSSKPGKKIPAGAVSVFLGDTDVFGAASVPSLKEPQKPEQPTPRKSPYGPPPTGLFDDDDGDDDDDFFSAPHSKPSKTRKVQSTADIFGDEEGDLFKEKAVASPEATVSQTDENKARAEKKVTLSYSKNLKPSSETKTQKGLFSDEEDSEDLFSSQSASNLKGASLLPGKLPTSVSLFDDEDEEDNLFGGTAAKKQTLSLQAQREEKAKASELSKKKASALLFSSDEEDQWNIPASQTHLASDSRSKGEPRDSGTLQSQEAKAVKKTSLFEEDKEDDLFAIAKDSQKKTQRVSLLFEDDVDSGGSLFGSPPTSVPPATKEGLLTRSAQETVKHSDLFSSSSPWDKGTKPRTKTVLSLFDEEEDKMEDQNIIQAPQKEVGKGCDPDAHPKSTGVFQDEELLFSHKLQKDNDPDVDLFAGTKKTKLLEPSVGSLFGDDEDDDLFSSAKSQPLVQEKKRVVKKDHSVNSFKNQKHPESIQGSKEKGIWKPETPQANLAINPAALLPTAASQISEVKPVLPELAFPSSEHRRSHGLESVPVLPGSGEAGVSFDLPAQADTLHSANKSRVKMRGKRRPQTRAARRLAAQESSEAEDMSVPRGPIAQWADGAISPNGHRPQLRAASGEDSTEEALAAAAAPWEGGPVPGVDTSPFAKSLGHSRGEADLFDSGDIFSTGTGSQSVERTKPKAKIAENPANPPVGGKAKSPMFPALGEASSDDDLFQSAKPKPAKKTNPFPLLEDEDDLFTDQKVKKNETKSSSQQDVILTTQDIFEDDIFATEAIKPSQKTREKEKTLESNLFDDNIDIFADLTVKPKEKSKKKVEAKSIFDDDMDDIFSTGIQAKTTKPKSRSAQAAPEPRFEHKVSNIFDDPLNAFGGQ

SEQ ID NO: 30029 - protein, 1341 aa, Homo sapiens
  Payload ID: 5876
  Gene Symbol: FAM21C
  Gene Name: family with sequence similarity 21, member C
  ENSP ID: ENSP00000485513
MMNRTTPDQELVPASEPVWERPWSVEEIRRSSQSWSLAADAGLLQFLQEFSQQTISRTHEIKKQVDGLIRETKATDCRLHNVFNDFLMLSNTQFIENRVYDEEVEEPVLKAEAEKTEQEKTREQKEVDLIPKVQEAVNYGLQVLDSAFEQLDIKAGNSDSEEDDANGRVELILEPKDLYIDRPLPYLIGSKLFMEQEDVGLGELSSEEGSVGSDRGSIVDTEEEKEEEESDEDFAHHSDNEQNQHTTQMSDEEEDDDGCDLFADSEKEEEDIEDIEENTRPKRSRPTSFADELAARIKGDAMGRVDEEPTTLPSGEAKPRKTLKEKKERRTPSDDEEDNLFAPPKLTDEDFSPFGSGGGLFSGGKGLFDDEDEESDLFTEASQDRQAGASVKEESSSSKPGKKIPAGAVSVFLGDTDVFGAASVPSLKEPQKPEQPTPRKSPYGPPPTGLFDDDDGDDDDDFFSAPHSKPSKTRKVQSTADIFGDEEGDLFKEKAVASPEATVSQTDENKARAEKKVTLSYSKNLKPSSETKTQKGLFSDEEDSEDLFSSQSASNLKGASLLPGKLPTSVSLFDDEDEEDNLFGGTAAKKQTLSLQAQREEKAKASELSKKKASALLFSSDEEDQWNIPASQTHLASDSRSKGEPRDSGTLQSQEAKAVKKTSLFEEDKEDDLFAIAKDSQKKTQRVSLLFEDDVDSGGSLFGSPPTSVPPATKKKETVSEAPPLLFSDEEEKEAQLGVKSVDKKVESAKESLKFGRTDVAESEKEGLLTRSAQETVKHSDLFSSSSPWDKGTKPRTKTVLSLFDEEEDKMEDQNIIQAPQKEVGKGCDPDAHPKSTGVFQDEELLFSHKLQKDNDPDVDLFAGTKKTKLLEPSVGSLFGDDEDDDLFSSAKSQPLVQEKKRVVKKDHSVNSFKNQKHPESIQGSKEKGIWKPETPQDSSGLAPFKTKEPSTRIGKIQANLAINPAALLPTAASQISEVKPVLPELAFPSSEHRRSHGLESVPVLPGSGEAGVSFDLPAQADTLHSANKSRVKMRGKRRPQTRAARRLAAQESSEAEDMSVPRGPIAQWADGAISPNGHRPQLRAASGEDSTEEALAAAAAPWEGGPVPGVDTSPFAKSLGHSRGEADLFDSGDIFSTGTGSQSVERTKPKAKIAENPANPPVGGKAKSPMFPALGEASSDDDLFQSAKPKPAKKTNPFPLLEDEDDLFTDQKVKKNETKSSSQQDVILTTQDIFEDDIFATEAIKPSQKTREKEKTLESNLFDDNIDIFADLTVKPKEKSKKKVEAKSIFDDDMDDIFSTGIQAKTTKPKSRSAQAAPEPRFEHKVSNIFDDPLNAFGGQ

SEQ ID NO: 30030 - protein, 272 aa, Homo sapiens
  Payload ID: 5877
  Gene Symbol: FAM210A
  Gene Name: family with sequence similarity 210, member A
  Uniprot ID: Q96ND0
  ENSP ID: ENSP00000323635
MQWNVPRTVSRLARRTCLEPHNAGLFGHCQNVKGPLLLYNAESKVVLVQGPQKQWLHLSAAQCVAKERRPLDAHPPQPGVLRHKQGKQHVSFRRVFSSSATAQGTPEKKEEPDPLQDKSISLYQRFKKTFRQYGKVLIPVHLITSGVWFGTFYYAALKGVNVVPFLELIGLPDSVVSILKNSQSGNALTAYALFKIATPARYTVTLGGTSVTVKYLRSHGYMSTPPPVKEYLQDRMEETKELITEKMEETKDRLTEKLQETKEKVSFKKKVE

SEQ ID NO: 30031 - protein, 272 aa, Homo sapiens; identical to SEQ ID NO: 30030
  Payload ID: 5877
  Gene Symbol: FAM210A
  Gene Name: family with sequence similarity 210, member A
  Uniprot ID: Q96ND0
  ENSP ID: ENSP00000386115

SEQ ID NO: 30032 - protein, 268 aa, Homo sapiens
  Payload ID: 5877
  Gene Symbol: FAM210A
  Gene Name: family with sequence similarity 210, member A
  ENSP ID: ENSP00000465396
MQWNVPRTVSRLARRTCLEPHNAGLFGHCQNVKGPLLLYNAESKVVLVQGPQKQWLHLSAAQCVAKERRPLDAHPPQPGVLRHKQGKQHVSFRRVFSSSATAQGTPEKKEEPDPLQDKSISLYQRFKKTFRQYGKVLIPVHLITSGVWFGTFYYAALKGVNVVPFLELIGLPDSVVSILKNSQSGNALTAYALFKIATPARYTVTLGGTSVTVKYLRSHGYMSTPPPVKEYLQDRMEETKELITEKMEETKDRLTEKLQETKEKVSFK

SEQ ID NO: 30033 - protein, 67 aa, Homo sapiens
  Payload ID: 5877
  Gene Symbol: FAM210A
  Gene Name: family with sequence similarity 210, member A
  ENSP ID: ENSP00000467381
GLPDSVVSILKNSQSGNALTAYALFKAGVQWRDLGSPQPLPPGFKQFSCFSLPSSWDYRLQHLLGIP

SEQ ID NO: 30034 - protein, 178 aa, Homo sapiens
  Payload ID: 5877
  Gene Symbol: FAM210A
  Gene Name: family with sequence similarity 210, member A
  ENSP ID: ENSP00000468361
MQWNVPRTVSRLARRTCLEPHNAGLFGHCQNVKGPLLLYNAESKVVLVQGPQKQWLHLSAAQCVAKERRPLDAHPPQPGVLRHKQGKQHVSFRRVFSSSATAQGTPEKKEEPDPLQDKSISLYQRFKKTFRQYGKVLIPVHLITSGVWFGTFYYAALKGVNVVPFLELIGLPDSVVSI

SEQ ID NO: 30035 - protein, 192 aa, Homo sapiens
  Payload ID: 5878
  Gene Symbol: FAM210B
  Gene Name: family with sequence similarity 210, member B
  Uniprot ID: Q96KR6
  ENSP ID: ENSP00000360437
MAGLLALLGPAGRVGARVRPRATWLLGATAPCAPPPLALALLPPRLDARLLRTARGDCRGHQDPSQATGTTGSSVSCTEEKKQSKSQQLKKIFQEYGTVGVSLHIGISLISLGIFYMVVSSGVDMPAILLKLGFKESLVQSKMAAGTSTFVVAYAIHKLFAPVRISITLVSVPLIVRYFRKVGFFKPPAAKP

SEQ ID NO: 30036 - protein, 52 aa, Homo sapiens
  Payload ID: 5878
  Gene Symbol: FAM210B
  Gene Name: family with sequence similarity 210, member B
  ENSP ID: ENSP00000389768
  MOD_RES (1)..(1): Any amino acid
XPLALALLPPRLDARLLRTARGDCRGHQSDRWHTGLGDPLQSGTFCTHRAAS

SEQ ID NO: 30037 - protein, 287 aa, Homo sapiens
  Payload ID: 5879
  Gene Symbol: FAM212A
  Gene Name: family with sequence similarity 212, member A
  Uniprot ID: Q96EL1
  ENSP ID: ENSP00000329735
MDMHSARLDSFLSQLRWELLCGRDTGSPSMPGPLQPTSQTGPDVQPSHQLRASGALEEDSVCCVEEEEEEEEEAVVTEDRDAALGGPREHALDWDSGFSEVSGSTWREEELPVSQRPAPSAQPLRRQCLSVSGLPMPSRAPVASVPPVHHPRPKSTPDACLEHWQGLEAEDWTAALLNRGRSRQPLVLGDNCFADLVHNWMELPETGSEGGDGGGHRARARPPQFLLGLSEQLRRRLARARRTAMAGKRLSCPPRPEPELPADVSRFAALMSCRSRQPIICNDVSYL

SEQ ID NO: 30038 - protein, 297 aa, Homo sapiens
  Payload ID: 5880
  Gene Symbol: FAM212B
  Gene Name: family with sequence similarity 212, member B
  Uniprot ID: Q9NTI7
  ENSP ID: ENSP00000349805
MTMESREMDCYLRRLKQELMSMKEVGDGLQDQMNCMMGALQELKLLQVQTALEQLEISGGGPVPGSPEGPRTQCEHPCWEGGRGPARPTVCSPSSQPSLGSSTKFPSHRSVCGRDLAPLPRTQPHQSCAQQGPERVEPDDWTSTLMSRGRNRQPLVLGDNVFADLVGNWLDLPELEKGGEKGETGGAREPKGEKGQPQELGRRFALTANIFKKFLRSVRPDRDRLLKEKPGWVTPMVPESRTGRSQKVKKRSLSKGSGHFPFPGTGEHRRGENPPTSCPKALEHSPSGFDINTAVWV

SEQ ID NO: 30039 - protein, 282 aa, Homo sapiens
  Payload ID: 5880
  Gene Symbol: FAM212B
  Gene Name: family with sequence similarity 212, member B
  Uniprot ID: Q9NTI7
  ENSP ID: ENSP00000408238
MRQLMSMKEVGDGLQDQMNCMMGALQELKLLQVQTALEQLEISGGGPVPGSPEGPRTQCEHPCWEGGRGPARPTVCSPSSQPSLGSSTKFPSHRSVCGRDLAPLPRTQPHQSCAQQGPERVEPDDWTSTLMSRGRNRQPLVLGDNVFADLVGNWLDLPELEKGGEKGETGGAREPKGEKGQPQELGRRFALTANIFKKFLRSVRPDRDRLLKEKPGWVTPMVPESRTGRSQKVKKRSLSKGSGHFPFPGTGEHRRGENPPTSCPKALEHSPSGFDINTAVWV

SEQ ID NO: 30040 - protein, 114 aa, Homo sapiens
  Payload ID: 5880
  Gene Symbol: FAM212B
  Gene Name: family with sequence similarity 212, member B
  ENSP ID: ENSP00000436075
MTMESREMDCYLRRLKQELMSMKEVGDGLQDQMNCMMGALQELKLLQVQTALEQLEISGGGPVPGSPEGPRTQCEHPCWEGGRGPARPTVCSPSSQPSLEQPEPTSGAFPIRCS

SEQ ID NO: 30041 - protein, 181 aa, Homo sapiens
  Payload ID: 5880
  Gene Symbol: FAM212B
  Gene Name: family with sequence similarity 212, member B
  ENSP ID: ENSP00000437205
MTMESREMDCYLRRLKQELAPCFLSPLQMSMKEVGDGLQDQMNCMMGALQELKLLQVQTALEQLEISGGGPVPGSPEGPRTQCEHPCWEGGRGPARPTVCSPSSQPSLGSSTKFPSHRSVCGRDLAPLPRTQPHQSCAQQGPERVEPDDWTSTLMSRGRNRQPLVLGDNVFADLVGNWLDL

SEQ ID NO: 30042 - protein, 229 aa, Homo sapiens
  Payload ID: 5881
  Gene Symbol: FAM213A
  Gene Name: family with sequence similarity 213, member A
  Uniprot ID: Q9BRX8
  ENSP ID: ENSP00000361254
MSFLQDPSFFTMGMWSIGAGALGAAALALLLANTDVFLSKPQKAALEYLEDIDLKTLEKEPRTFKAKELWEKNGAVIMAVRRPGCFLCREEAADLSSLKSMLDQLGVPLYAVVKEHIRTEVKDFQPYFKGEIFLDEKKKFYGPQRRKMMFMGFIRLGVWYNFFRAWNGGFSGNLEGEGFILGGVFVVGSGKQGILLEHREKEFGDKVNLLSVLEAAKMIKPQTLASEKK

SEQ ID NO: 30043 - protein, 218 aa, Homo sapiens
  Payload ID: 5881
  Gene Symbol: FAM213A
  Gene Name: family with sequence similarity 213, member A
  Uniprot ID: Q9BRX8
  ENSP ID: ENSP00000361259
MGMWSIGAGALGAAALALLLANTDVFLSKPQKAALEYLEDIDLKTLEKEPRTFKAKELWEKNGAVIMAVRRPGCFLCREEAADLSSLKSMLDQLGVPLYAVVKEHIRTEVKDFQPYFKGEIFLDEKKKFYGPQRRKMMFMGFIRLGVWYNFFRAWNGGFSGNLEGEGFILGGVFVVGSGKQGILLEHREKEFGDKVNLLSVLEAAKMIKPQTLASEKK

SEQ ID NO: 30044 - protein, 229 aa, Homo sapiens; identical to SEQ ID NO: 30042
  Payload ID: 5881
  Gene Symbol: FAM213A
  Gene Name: family with sequence similarity 213, member A
  Uniprot ID: Q9BRX8
  ENSP ID: ENSP00000361261

SEQ ID NO: 30045 - protein, 229 aa, Homo sapiens; identical to SEQ ID NO: 30042
  Payload ID: 5881
  Gene Symbol: FAM213A
  Gene Name: family with sequence similarity 213, member A
  Uniprot ID: Q9BRX8
  ENSP ID: ENSP00000361262

SEQ ID NO: 30046 - protein, 229 aa, Homo sapiens; identical to SEQ ID NO: 30042
  Payload ID: 5881
  Gene Symbol: FAM213A
  Gene Name: family with sequence similarity 213, member A
  Uniprot ID: Q9BRX8
  ENSP ID: ENSP00000478152

SEQ ID NO: 30047 - protein, 229 aa, Homo sapiens; identical to SEQ ID NO: 30042
  Payload ID: 5881
  Gene Symbol: FAM213A
  Gene Name: family with sequence similarity 213, member A
  Uniprot ID: Q9BRX8
  ENSP ID: ENSP00000482445

SEQ ID NO: 30048 - protein, 231 aa, Homo sapiens
  Payload ID: 5882
  Gene Symbol: FAM213B
  Gene Name: family with sequence similarity 213, member B
  ENSP ID: ENSP00000367681
MSRERGSRSEEPGAGNRESGSREPGLAAAAMSTVDLARVGACILKHAVTGEAVELRSLWREHACVVAGLRRFGCVVCRWIAQDLSSLAGLLDQHGVRLVGVGPEALGLQEFLDGDYFAGELYLDESKQLYKELGFKRLWTQASPEFGQATWCLRRYNSLSILPAALGKPVRDVAAKAKAVGIQGNLSGDLLQSGGLLVVSKEVPRRLRPQGAHPAGPGHLCGGLCQRPASV

SEQ ID NO: 30049 - protein, 192 aa, Homo sapiens
  Payload ID: 5882
  Gene Symbol: FAM213B
  Gene Name: family with sequence similarity 213, member B
  ENSP ID: ENSP00000367682
MSRERGSRSEEPGAGNRESGSREPGLAAAAMSTVDLARVGACILKHAVTGEAVELRSLWREHACVVAGLRRFGCVVCRWIAQDLSSLAGLLDQHGVRLVGVGPEALGLQEFLDGDYFAGELYLDESKQLYKELGFKRYNSLSILPAALGKPVRDVAAKKSPGDYVPKEHILQVLGISAEVCASDPPQCDREV

SEQ ID NO: 30050 - protein, 213 aa, Homo sapiens
  Payload ID: 5882
  Gene Symbol: FAM213B
  Gene Name: family with sequence similarity 213, member B
  ENSP ID: ENSP00000367684
  MOD_RES (1)..(1): Any amino acid
XSRERGSRSEEPGAGNRESGSREPGLAAAAMSTVDLARVGACILKHAVTGEAVELRSLWREHACVVAGLRRFGCVVCRWIAQDLSSLAGLLDQHGVRLVGVGPEALGLQEFLDGDYFAGELYLDESKQLYKELGFKRYNSLSILPAALGKPVRDVAAKAKAVGIQGNLSGDLLQSGGLLVVSKEVPRRLRPQGAHPAGPGHLCGGLCQRPASV

SEQ ID NO: 30051 - protein, 228 aa, Homo sapiens
  Payload ID: 5882
  Gene Symbol: FAM213B
  Gene Name: family with sequence similarity 213, member B
  Uniprot ID: Q8TBF2
  ENSP ID: ENSP00000394405
MSRERGSRSEEPGAGNRESGSREPGLAAAAMSTVDLARVGACILKHAVTGEAVELRSLWREHACVVAGLRRFGCVVCRWIAQDLSSLAGLLDQHGVRLVGVGPEALGLQEFLDGDYFAGELYLDESKQLYKELGFKRYNSLSILPAALGKPVRDVAAKAKAVGIQGNLSGDLLQSGGLLVVSKGGDKVLLHFVQKSPGDYVPKEHILQVLGISAEVCASDPPQCDREV

SEQ ID NO: 30052 - protein, 246 aa, Homo sapiens
  Payload ID: 5882
  Gene Symbol: FAM213B
  Gene Name: family with sequence similarity 213, member B
  ENSP ID: ENSP00000413218
MSRERGSRSEEPGAGNRESGSREPGLAAAAMSTVDLARVGACILKHAVTGEAVELRSLWREHACVVAGLRRFGCVVCRWIAQDLSSLAGLLDQHGVRLVGVGPEALGLQEFLDGDYFAGELYLDESKQLYKELGFKRLWTQASPEFGQATWCLRRYNSLSILPAALGKPVRDVAAKAKAVGIQGNLSGDLLQSGGLLVVSKGGDKVLLHFVQKSPGDYVPKEHILQVLGISAEVCASDPPQCDREV

SEQ ID NO: 30053 - protein, 191 aa, Homo sapiens
  Payload ID: 5882
  Gene Symbol: FAM213B
  Gene Name: family with sequence similarity 213, member B
  Uniprot ID: Q8TBF2
  ENSP ID: ENSP00000443605
MSRERGSRSEEPGAGNRESGSREPGLAAAAMSTVDLARVGACILKHAVTGEAVELRSLWREHACVVAGLRRFGCVVCRWIAQDLSSLAGLLDQHGVRLVGVGPEALGLQEFLDGDYFAGELYLDESKQLYKELGFKRYNSLSILPAALGKPVRDVAAKSPGDYVPKEHILQVLGISAEVCASDPPQCDREV

SEQ ID NO: 30054 - protein, 196 aa, Homo sapiens
  Payload ID: 5882
  Gene Symbol: FAM213B
  Gene Name: family with sequence similarity 213, member B
  ENSP ID: ENSP00000462185
  MOD_RES (1)..(1): Any amino acid
XAGNRESGSREPGLAAAAMSTVDLARVGACILKHAVTGEAVELRSLWREHACVVAGLRRFGCVVCRWIAQDLSSLAGLLDQHGVRLVGVGPEALGLQEFLDGDYFAGELYLDESKQLYKELGFKRYNSLSILPAALGKPVRDVAAKAVPTPDRPRLLASRGTCLGTCCRAEGCWWSAKVVIKCSCISSRSPQATTS

SEQ ID NO: 30055 - protein, 154 aa, Homo sapiens
  Payload ID: 5882
  Gene Symbol: FAM213B
  Gene Name: family with sequence similarity 213, member B
  ENSP ID: ENSP00000463127
AAAMSTVDLARVGACILKHAVTGEAVELRSLWREHACVVAGLRRFGCVVCRWIAQDLSSLAGLLDQHGVRLVGVGPEALGLQEFLDGDYFAGELYLDESKQLYKELGFKRYNSLSILPAALGKPVRDVAAKVVIKCSCISSRSPQATTSPRSTS

SEQ ID NO: 30056 - protein, 246 aa, Homo sapiens; identical to SEQ ID NO: 30052
  Payload ID: 5882
  Gene Symbol: FAM213B
  Gene Name: family with sequence similarity 213, member B
  ENSP ID: ENSP00000477600

SEQ ID NO: 30057 - protein, 192 aa, Homo sapiens; identical to SEQ ID NO: 30049
  Payload ID: 5882
  Gene Symbol: FAM213B
  Gene Name: family with sequence similarity 213, member B
  ENSP ID: ENSP00000479869

SEQ ID NO: 30058 - protein, 213 aa, Homo sapiens; identical to SEQ ID NO: 30050
  Payload ID: 5882
  Gene Symbol: FAM213B
  Gene Name: family with sequence similarity 213, member B
  ENSP ID: ENSP00000485906
  MOD_RES (1)..(1): Any amino acid

SEQ ID NO: 30059 - protein, 231 aa, Homo sapiens; identical to SEQ ID NO: 30048
  Payload ID: 5882
  Gene Symbol: FAM213B
  Gene Name: family with sequence similarity 213, member B
  ENSP ID: ENSP00000485959

SEQ ID NO: 30060 - protein, 228 aa, Homo sapiens; identical to SEQ ID NO: 30051
  Payload ID: 5882
  Gene Symbol: FAM213B
  Gene Name: family with sequence similarity 213, member B
  Uniprot ID: Q8TBF2
  ENSP ID: ENSP00000485968

SEQ ID NO: 30061 - protein, 196 aa, Homo sapiens; identical to SEQ ID NO: 30054
  Payload ID: 5882
  Gene Symbol: FAM213B
  Gene Name: family with sequence similarity 213, member B
  ENSP ID: ENSP00000487007
  MOD_RES (1)..(1): Any amino acid

SEQ ID NO: 30062 - protein, 191 aa, Homo sapiens; identical to SEQ ID NO: 30053
  Payload ID: 5882
  Gene Symbol: FAM213B
  Gene Name: family with sequence similarity 213, member B
  Uniprot ID: Q8TBF2
  ENSP ID: ENSP00000487468

SEQ ID NO: 30063 - protein, 154 aa, Homo sapiens; identical to SEQ ID NO: 30055
  Payload ID: 5882
  Gene Symbol: FAM213B
  Gene Name: family with sequence similarity 213, member B
  ENSP ID: ENSP00000487590

SEQ ID NO: 30064 - protein, 1076 aa, Homo sapiens
  Payload ID: 5883
  Gene Symbol: FAM214A
  Gene Name: family with sequence similarity 214, member A
  Uniprot ID: Q32MH5
  ENSP ID: ENSP00000261844
MKPDRDTLDEYFEYDAEEFLVSLALLITEGRTPECSVKGRTESFHCPPAQSCYPVTTKHECSDKLAQCRQARRTRSEVTLLWKNNLPIMVEMMLLPDCCYSDDGPTTEGIDLNDPAIKQDALLLERWILEPVPRQNGDRFIEEKTLLLAVRSFVFFSQLSAWLSVSHGAIPRNILYRISAADVDLQWNFSQTPIEHVFPVPNVSHNVALKVSVQSLPRQSNYPVLTCSIHTNIGLYEKRIQQHKLKTHQHHNPNEAEQCGTNSSQRLCSKQTWTMAPESVLHAKSGPSPEYTAAVKNIKLYPGTGSKSDHGTSQANILGFSGIGDIKSQETSVRTLKSFSMVDSSISNRQSFWQSAGETNPLIGSLIQERQEIIARIAQHLIHCDPSTSHVSGRPFNTQESSSLHSKLFRVSQENENVGKGKEAFSMTFGSPEFSSPEDTNEGKIRLKPETPRSETCISNDFYSHMPVGETNPLIGSLLQERQDVIARIAQHLEHIDPTASHIPRQSFNMHDSSSVASKVFRSSYEDKNLLKKNKDESSVSISHTKCSLLGDISDGKNLVPNKCFTSFKNNSKEKCSLKHQTRNQCQNNPSEIIQSTYQETQNKSSSLSTSSILSQHKENNLDLTSRFKEQEMSNGIDKQYSNCTTIDKQICTNKYKEKIINENYNPKFFGNLQSDDSKKNDSKIKVTVLEMSEYLNKYESMSSNKDSKRPKTCEQNTQLNSIENYLNKDNEGFKCKKSDQLKNEQDKQEDPTNEKSQNYSQRRSIKDCLSTCEQPKNTEVLRTTLKHSNVWRKHNFHSLDGTSTRAFHPQTGLPLLSSPVPQRKTQSGCFDLDSSLLHLKSFSSRSPRPCLNIEDDPDIHEKPFLSSSAPPITSLSLLGNFEESVLNYRFDPLGIVDGFTAEVGASGAFCPTHLTLPVEVSFYSVSDDNAPSPYMGVITLESLGKRGYRVPPSGTIQVTLFNPNKTVVKMFVVIYDLRDMPANHQTFLRQRTFSVPVKQEVKRSVNKENIRHTEERLLRYLIHLRFQSSKSGKIYLHRDVRLLFSRKSMEVDSGAAYELKSYTESPTNPQFSPRC

SEQ ID NO: 30065 - protein, 938 aa, Homo sapiens
  Payload ID: 5883
  Gene Symbol: FAM214A
  Gene Name: family with sequence similarity 214, member A
  ENSP ID: ENSP00000382153
MVEMMLLPDCCYSDDGPTTEGIDLNDPAIKQDALLLERWILEPVPRQNGDRFIEEKTLLLAVRSFVFFSQLSAWLSVSHGAIPRNILYRISAADVDLQWNFSQTPIEHVFPVPNVSHNVALKVSVQSLPRQSNYPVLTCSIHTNIGLYEKRIQQHKLKTHQHHNPNEAEQCGTNSSQRLCSKQTWTMAPESVLHAKSGPSPEYTAAVKNIKLYPGTGSKSDHGTSQANILGFSGIGDIKSQETSVRTLKSFSMVDSSISNRQSFWQSAGETNPLIGSLIQERQEIIARIAQHLIHCDPSTSHVSGRPFNTQESSSLHSKLFRVSQENENVGKGKEAFSMTFGSPEFSSPEDTNEGKIRLKPETPRSETCISNDFYSHMPVGETNPLIGSLLQERQDVIARIAQHLEHIDPTASHIPRQSFNMHDSSSVASKVFRSSYEDKNLLKKNKDESSVSISHTKCSLLGDISDGKNLVPNKCFTSFKNNSKEKCSLKHQTRNQCQNNPSEIIQSTYQETQNKSSSLSTSSILSQHKENNLDLTSRFKEQEMSNGIDKQYSNCTTIDKQICTNKYKEKIINENYNPKFFGNLQSDDSKKNDSKIKVTVLEMSEYLNKYESMSSNKDSKRPKTCEQNTQLNSIENYLNKDNEGFKCKKSDQLKNEQDKQEDPTNEKSQNYSQRRSIKDCLSTCEQPKNTEVLRTTLKHSNVWRKHNFHSLDGTSTRAFHPQTGLPLLSSPVPQRKTQSGCFDLDSSLLHLKSFSSRSPRPCLNIEDDPDIHEKPFLSSSAPPITSLSLLGNFEESVLNYRFDPLGIVDGFTAEVGASGAFCPTHLTLPVEVSFYSVSDDNAPSPYMGVITLESLGKRGYRVPPSGTIQVTLFNPNKTVVKMFVVIYDLRDMPANHQTFLRQRTFSVPVKQEVKRSVNKENIRHTEERLLRYLIHLR

SEQ ID NO: 30066 - protein, 1083 aa, Homo sapiens
  Payload ID: 5883
  Gene Symbol: FAM214A
  Gene Name: family with sequence similarity 214, member A
  Uniprot ID: Q32MH5
  ENSP ID: ENSP00000443598
MVFSGNKGLHREDTLDEYFEYDAEEFLVSLALLITEGRTPECSVKGRTESFHCPPAQSCYPVTTKHECSDKLAQCRQARRTRSEVTLLWKNNLPIMVEMMLLPDCCYSDDGPTTEGIDLNDPAIKQDALLLERWILEPVPRQNGDRFIEEKTLLLAVRSFVFFSQLSAWLSVSHGAIPRNILYRISAADVDLQWNFSQTPIEHVFPVPNVSHNVALKVSVQSLPRQSNYPVLTCSIHTNIGLYEKRIQQHKLKTHQHHNPNEAEQCGTNSSQRLCSKQTWTMAPESVLHAKSGPSPEYTAAVKNIKLYPGTGSKSDHGTSQANILGFSGIGDIKSQETSVRTLKSFSMVDSSISNRQSFWQSAGETNPLIGSLIQERQEIIARIAQHLIHCDPSTSHVSGRPFNTQESSSLHSKLFRVSQENENVGKGKEAFSMTFGSPEFSSPEDTNEGKIRLKPETPRSETCISNDFYSHMPVGETNPLIGSLLQERQDVIARIAQHLEHIDPTASHIPRQSFNMHDSSSVASKVFRSSYEDKNLLKKNKDESSVSISHTKCSLLGDISDGKNLVPNKCFTSFKNNSKEKCSLKHQTRNQCQNNPSEIIQSTYQETQNKSSSLSTSSILSQHKENNLDLTSRFKEQEMSNGIDKQYSNCTTIDKQICTNKYKEKIINENYNPKFFGNLQSDDSKKNDSKIKVTVLEMSEYLNKYESMSSNKDSKRPKTCEQNTQLNSIENYLNKDNEGFKCKKSDQLKNEQDKQEDPTNEKSQNYSQRRSIKDCLSTCEQPKNTEVLRTTLKHSNVWRKHNFHSLDGTSTRAFHPQTGLPLLSSPVPQRKTQSGCFDLDSSLLHLKSFSSRSPRPCLNIEDDPDIHEKPFLSSSAPPITSLSLLGNFEESVLNYRFDPLGIVDGFTAEVGASGAFCPTHLTLPVEVSFYSVSDDNAPSPYMGVITLESLGKRGYRVPPSGTIQVTLFNPNKTVVKMFVVIYDLRDMPANHQTFLRQRTFSVPVKQEVKRSVNKENIRHTEERLLRYLIHLRFQSSKSGKIYLHRDVRLLFSRKSMEVDSGAAYELKSYTESPTNPQFSPRC

SEQ ID NO: 30067 - protein, 963 aa, Homo sapiens
  Payload ID: 5883
  Gene Symbol: FAM214A
  Gene Name: family with sequence similarity 214, member A
  Uniprot ID: Q32MH5
  ENSP ID: ENSP00000444447
MKPDRDTLDEYFEYDAEEFLVSLALLITEGRTPECSVKGRTESFHCPPAQSCYPVTTKHECSDKLAQCRQARRTRSEVTLLWKNNLPIMVEMMLLPDCCYSDDGPTTEGIDLNDPAIKQDALLLERWILEPVPRQNGDRFIEEKTLLLAVRSFVFFSQLSAWLSVSHGAIPRNILYRISAADVDLQWNFSQTPIEHVFPVPNVSHNVALKVSVQSLPRQSNYPVLTCSIHTNIGLYEKRIQQHKLKTHQHHNPNEAEQCGTNSSQRLCSKQTWTMAPESVLHAKSGPSPEYTAAVKNIKLYPGTGSKSDHGTSQANILGFSGIGDIKSQETSVRTLKSFSMVDSSISNRQSFWQSAGETNPLIGSLIQERQEIIARIAQHLIHCDPSTSHVSGRPFNTQESSSLHSKLFRVSQENENVGKGKEAFSMTFGSPEFSSPEDTNEGKIRLKPETPRSETCISNDFYSHMPVGETNPLIGSLLQERQDVIARIAQHLEHIDPTASHIPRQSFNMHDSSSVASKVFRSSYEDKNLLKKNKDESSVSISHTKCSLLGDISDGKNLVPNKCFTSFKNNSKEKCSLKHQTRNQCQNNPSEIIQSTYQETQNKSSSLSTSSILSQHKENNLDLTSRFKEQEMSNGIDKQYSNCTTIDKQICTNKYKEKIINENYNPKFFGNLQSDDSKKNDSKIKVTVLEMSEYLNKYESMSSNKDSKRPKTCEQNTQLNSIENYLNKDNEGFKCKKSDQLKNEQDKQEDPTNEKSQNYSQRRSIKDCLSTCEQPKNTEVLRTTLKHSNVWRKHNFHSLDGTSTRAFHPQTGLPLLSSPVPQRKTQSGCFDLDSSLLHLKSFSSRSPRPCLNIEDDPDIHEKPFLSSSAPPITSLSLLGNFEESVLNYRFDPLGIVDGFTAEVGASGAFCPTHLTLPVEVSFYSVSDDNAPSPYMGVITLESLGKRGYRVPPSGTIQVVCVL

SEQ ID NO: 30068 - protein, 45 aa, Homo sapiens
  Payload ID: 5883
  Gene Symbol: FAM214A
  Gene Name: family with sequence similarity 214, member A
  ENSP ID: ENSP00000455002
RAFHPQTGLPLLSSPVPQRKTQSGCFDLDSSLLHLKSFSSRRNLS

SEQ ID NO: 30069 - protein, 126 aa, Homo sapiens
  Payload ID: 5883
  Gene Symbol: FAM214A
  Gene Name: family with sequence similarity 214, member A
  ENSP ID: ENSP00000455578
MKPDRDTLDEYFEYDAEEFLVSLALLITEGRTPECSVKGRTESFHCPPAQSCYPVTTKHECSDKLAQCRQARRTRSEVTLLWKNNLPIMVEMMLLPDCCYSDDGPTTEGIDLNDPAIKQDALLLER

SEQ ID NO: 30070 - protein, 89 aa, Homo sapiens
  Payload ID: 5883
  Gene Symbol: FAM214A
  Gene Name: family with sequence similarity 214, member A
  ENSP ID: ENSP00000456725
MKPDRDTLDEYFEYDAEEFLVSLALLITEGRTPECSVKGRTESFHCPPAQSCYPVTTKHECSDKLAQCRQARRTRSEVTLLWKNNLPIM

SEQ ID NO: 30071 - protein, 95 aa, Homo sapiens
  Payload ID: 5883
  Gene Symbol: FAM214A
  Gene Name: family with sequence similarity 214, member A
  ENSP ID: ENSP00000457120
MKPDRDTLDEYFEYDAEEFLVSLALLITEGRTPECSVKGRTESFHCPPAQSCYPVTTKHECSDKLAQCRQARRTRSEVTLLWKNNLPIMVEMMLL

SEQ ID NO: 30072 - protein, 118 aa, Homo sapiens
  Payload ID: 5883
  Gene Symbol: FAM214A
  Gene Name: family with sequence similarity 214, member A
  ENSP ID: ENSP00000457402
MKPDRDTLDEYFEYDAEEFLVSLALLITEGRTPECSVKGRTESFHCPPAQSCYPVTTKHECSDKLAQCRQARRTRSEVTLLWKNNLPIMVEMMLLPDCCYSDDGPTTEGIDLNDPAIK

SEQ ID NO: 30073 - protein, 142 aa, Homo sapiens
  Payload ID: 5883
  Gene Symbol: FAM214A
  Gene Name: family with sequence similarity 214, member A
  ENSP ID: ENSP00000457666
MKPDRDTLDEYFEYDAEEFLVSLALLITEGRTPECSVKGRTESFHCPPAQSCYPVTTKHECSDKLAQCRQARRTRSEVTLLWKNNLPIMVEMMLLPDCCYSDDGPTTEGIDLNDPAIKQDALLLERWILEPVPRQNGDRFIE

SEQ ID NO: 30074 - protein, 222 aa, Homo sapiens
  Payload ID: 5883
  Gene Symbol: FAM214A
  Gene Name: family with sequence similarity 214, member A
  ENSP ID: ENSP00000458036
  MOD_RES (1)..(1): Any amino acid
XPQRKTQSGCFDLDSSLLHLKSFSSRSPRPCLNIEDDPDIHEKPFLSSSAPPITSLSLLGNFEESVLNYRFDPLGIVDGFTAEVGASGAFCPTHLTLPVEVSFYSVSDDNAPSPYMTLFNPNKTVVKMFVVIYDLRDMPANHQTFLRQRTFSVPVKQEVKRSVNKENIRHTEERLLRYLIHLRFQSSKSGKIYLHRDVRLLFSRKSMEVDSGAAYELKSYTE

SEQ ID NO: 30075 - protein, 30 aa, Homo sapiens
  Payload ID: 5883
  Gene Symbol: FAM214A
  Gene Name: family with sequence similarity 214, member A
  ENSP ID: ENSP00000479280
MKPDRETRSHSVAQPGLKLMSSSNLPVSAS

SEQ ID NO: 30076 - protein, 1076 aa, Homo sapiens; identical to SEQ ID NO: 30064
  Payload ID: 5883
  Gene Symbol: FAM214A
  Gene Name: family with sequence similarity 214, member A
  Uniprot ID: Q32MH5
  ENSP ID: ENSP00000484641

SEQ ID NO: 30077 - protein, 538 aa, Homo sapiens
  Payload ID: 5884
  Gene Symbol: FAM214B
  Gene Name: family with sequence similarity 214, member B
  Uniprot ID: Q7L5A3
  ENSP ID: ENSP00000319897
MRHVQAEPSPSSEPEAGPSQPPVRQGALQGGLLMGYSPAGGATSPGVYQVSIFSPPAGTSEPHRALKRQAPSTEGPRELKRGPGLGAREGLPPEEPSTVGLLGPEGPGLGLGVASQHFSHRGLCVVEQRSSVTSSWTSGAWSPPCPPSNASCNTLHTRDWASPDPGGQGSLGESPGPAPPGQLHTLDTDLHSLAQIGGKSPVAGVGNGGSLWPRESPGTANGHSPEHTPPGPGPPGPCPTKRRLLPAGEAPDVSSEEEGPAPRRRRGSLGHPTAANSSDAKATPFWSHLLPGPKEPVLDPTDCGPMGRRLKGARRLKLSPLRSLRKGPGLLSPPSASPVPTPAVSRTLLGNFEESLLRGRFAPSGHIEGFTAEIGASGSYCPQHVTLPVTVTFFDVSEQNAPAPFLGIVDLNPLGRKGYSVPKVGTVQVTLFNPNQTVVKMFLVTFDFSDMPAAHMTFLRHRLFLVPVGEEGNANPTHRLLCYLLHLRFRSSRSGRLSLHGDIRLLFSRRSLELDTGLPYELQAVTEAPHNPRYSPLP

SEQ ID NO: 30078 - protein, 538 aa, Homo sapiens; identical to SEQ ID NO: 30077
  Payload ID: 5884
  Gene Symbol: FAM214B
  Gene Name: family with sequence similarity 214, member B
  Uniprot ID: Q7L5A3
  ENSP ID: ENSP00000367819

SEQ ID NO: 30079 - protein, 538 aa, Homo sapiens; identical to SEQ ID NO: 30077
  Payload ID: 5884
  Gene Symbol: FAM214B
  Gene Name: family with sequence similarity 214, member B
  Uniprot ID: Q7L5A3
  ENSP ID: ENSP00000367823

SEQ ID NO: 30080 - protein, 233 aa, Homo sapiens
  Payload ID: 5884
  Gene Symbol: FAM214B
  Gene Name: family with sequence similarity 214, member B
  Uniprot ID: Q7L5A3
  ENSP ID: ENSP00000367829
MGRRLKGARRLKLSPLRSLRKGPGLLSPPSASPVPTPAVSRTLLGNFEESLLRGRFAPSGHIEGFTAEIGASGSYCPQHVTLPVTVTFFDVSEQNAPAPFLGIVDLNPLGRKGYSVPKVGTVQVTLFNPNQTVVKMFLVTFDFSDMPAAHMTFLRHRLFLVPVGEEGNANPTHRLLCYLLHLRFRSSRSGRLSLHGDIRLLFSRRSLELDTGLPYELQAVTEAPHNPRYSPLP

SEQ ID NO: 30081 - protein, 538 aa, Homo sapiens; identical to SEQ ID NO: 30077
  Payload ID: 5884
  Gene Symbol: FAM214B
  Gene Name: family with sequence similarity 214, member B
  Uniprot ID: Q7L5A3
  ENSP ID: ENSP00000474335

SEQ ID NO: 30082 - protein, 538 aa, Homo sapiens; identical to SEQ ID NO: 30077
  Payload ID: 5884
  Gene Symbol: FAM214B
  Gene Name: family with sequence similarity 214, member B
  Uniprot ID: Q7L5A3
  ENSP ID: ENSP00000474833

SEQ ID NO: 30083 - protein, 538 aa, Homo sapiens; identical to SEQ ID NO: 30077
  Payload ID: 5884
  Gene Symbol: FAM214B
  Gene Name: family with sequence similarity 214, member B
  Uniprot ID: Q7L5A3
  ENSP ID: ENSP00000475120

SEQ ID NO: 30084 - protein, 273 aa, Homo sapiens
  Payload ID: 5885
  Gene Symbol: FAM216A
  Gene Name: family with sequence similarity 216, member A
  Uniprot ID: Q8WUB2
  ENSP ID: ENSP00000366901
MLGQLLPHTARGLGAAEMPGQGPGSDWTERSSSAEPPAVAGTEGGGGGSAGYSCYQNSKGSDRIKDGYKVNSHIAKLQELWKTPQNQTIHLSKSMMEASFFKHPDLTTGQKRYLCSIAKIYNANYLKMLMKRQYMHVLQHSSQKPGVLTHHRSRLSSRYSQKQHYPCTTWRHQLEREDSGSSDIAAASAPEMLIQHSLWRPVRNKEGIKTGYASKTRCKSLKIFRRPRKLFMQTVSSDDSESHMSEEKKEEDLLNNFMQSMSIEEQGEHLMLT

SEQ ID NO: 30085 - protein, 77 aa, Homo sapiens
  Payload ID: 5885
  Gene Symbol: FAM216A
  Gene Name: family with sequence similarity 216, member A
  ENSP ID: ENSP00000448777
MLGQLLPHTARGLGAAEMPGQGPGSDWTERSSSAEPPAVAGTEGGGGGSAGYSCYQNSKGSASRPHHRPEALPVQHC

SEQ ID NO: 30086 - protein, 139 aa, Homo sapiens
  Payload ID: 5886
  Gene Symbol: FAM216B
  Gene Name: family with sequence similarity 216, member B
  Uniprot ID: Q8N7L0
  ENSP ID: ENSP00000319336
MGQNWKRQQKLWNVPQLPFIRVPPSIYDTSLLKALNQGQQRYFYSIMRIYNSRPQWEALQTRYIHSLQHQQLLGYITQREALSYALVLRDSTKRASAKVAPQRTIPRKTSAMTRRCPSVLPVSVVLPRAQSKRRQVLRN

SEQ ID NO: 30087 - protein, 139 aa, Homo sapiens; identical to SEQ ID NO: 30086
  Payload ID: 5886
  Gene Symbol: FAM216B
  Gene Name: family with sequence similarity 216, member B
  Uniprot ID: Q8N7L0
  ENSP ID: ENSP00000445786

SEQ ID NO: 30088 - protein, 508 aa, Homo sapiens
  Payload ID: 5887
  Gene Symbol: FAM217A
  Gene Name: family with sequence similarity 217, member A
  Uniprot ID: Q8IXS0
  ENSP ID: ENSP00000274673
MGRRNENCANSLRVSNISQENLSHWNLDSEVPVSENKNLPAGRDGAAGGKINKNYLEIPVEQLMLEPNLSVHSQKSTQNSKQGIFQLWNCPLNEGSTIEKREFKKSSVETGFNVINHPIRVFTLNHPLTIASVDKQVGPYPGLPMPLGLCWPYADGDFFKNRNEIHVSSCSTIENNDGETLPAPNWNLKHGNSSVEENFTDESDLSENEKTNDTLLSYFKKVDLNLKPETIKNVEEPFTEEPNEVFPYPDFLPPPFSALDLHNLALSKSDNWKVTVDPAETSVEHLITRLLELERLQHMTIQKERPRLQTTFCTPAVTERPSSSKATPKVRQPKLCDSLSLQIPCVDKSQEKSKNNSGSCKLEQNALKRNWSNAGKYRWNSRPLSLKSSSTPKQLIETYDKNPKSSILSPCQELSFKPTIGHTNQSMVKMVSTRCLPWRSPMPVSPIPLTFPENQKEEIKAPKRNFGTKKKLYRQNIVLNRPFSIQKLNCLSPSLIAKDKCCSPIEQK

SEQ ID NO: 30089 - protein, 32 aa, Homo sapiens
  Payload ID: 5887
  Gene Symbol: FAM217A
  Gene Name: family with sequence similarity 217, member A
  ENSP ID: ENSP00000418339
MLEPNLSVHSQKSTQNSKQGIFQLWNCPLNEG

SEQ ID NO: 30090 - protein, 47 aa, Homo sapiens
  Payload ID: 5887
  Gene Symbol: FAM217A
  Gene Name: family with sequence similarity 217, member A
  ENSP ID: ENSP00000418500
MLEPNLSVHSQKSTQNSKQGIFQLWNCPLNEGSTIEKREFKKSSVET

SEQ ID NO: 30091 - protein, 383 aa, Homo sapiens
  Payload ID: 5888
  Gene Symbol: FAM217B
  Gene Name: family with sequence similarity 217, member B
  Uniprot ID: Q9NTX9
  ENSP ID: ENSP00000351040
MNAGPSWNKVQHSKNSSGKRQSKSQVPHASSQPRSSLTAVTQPTEEKLKESISPEARRKRNPLGSRCQGASGNKLFLDFQSMKIIKENADEDSASDLSDSERIPIPPSPLTPPDLNLRAEEIDPVYFDLHPGQGHTKPEYYYPNFLPSPFSSWDLRDMALLLNAENKTEAVPRVGGLLGKYIDRLIQLEWLQVQTVQCEKAKGGKARPPTAPGTSGALKSPGRSKLIASALSKPLPHQEGASKSGPSRKKAFHHEEIHPSHYAFETSPRPIDVLGGTRFCSQRQTLEMRTEEKKKKSSKSTKLQRWDLSGSGSSSKVETSGHIRVPKQAAVILDSADSCKASKTQAHAHPRKKGKAESCGHATVSSEKKLKTNGVKQNTYKLK

SEQ ID NO: 30092 - protein, 383 aa, Homo sapiens; identical to SEQ ID NO: 30091
  Payload ID: 5888
  Gene Symbol: FAM217B
  Gene Name: family with sequence similarity 217, member B
  Uniprot ID: Q9NTX9
  ENSP ID: ENSP00000354056

SEQ ID NO: 30093 - protein, 47 aa, Homo sapiens
  Payload ID: 5888
  Gene Symbol: FAM217B
  Gene Name: family with sequence similarity 217, member B
  ENSP ID: ENSP00000414543
MNAGPSWNKVQHSKNSSGKRQSKSQVPHASSQPRSSLTAVTQPTEEK

SEQ ID NO: 30094 - protein, 157 aa, Homo sapiens
  Payload ID: 5889
  Gene Symbol: FAM218A
  Gene Name: family with sequence similarity 218, member A
  Uniprot ID: Q96MZ4
  ENSP ID: ENSP00000427428
MEGCAVRRGSCPLLPGPSAWRASPAGWAGRAKLRSWCRASGLPNRPYTLTGGRHGSVSLLRHPGTTTFVQQRSLHQSWEKRIVFSACPVSRSWCPERNFSGSIPAVTPPKLPGHSKSEGPPGKVRKRTTIRSQPLFVTRTRGFGSAVGWLPLGSPVL

SEQ ID NO: 30095 - protein, 168 aa, Homo sapiens
  Payload ID: 5890
  Gene Symbol: FAM219A
  Gene Name: family with sequence similarity 219, member A
  Uniprot ID: Q8IW50
  ENSP ID: ENSP00000297620
MMEEIDRFQVPTAHSEMQPLDPAAASISDGDCDAREEKQRELARKGSLKNGSMGSPVNQQPKKNNVMARTRLVVPNKGYSSLDQSPDEKPLVALDTDSDDDFDMSRYSSSGYSSAEQINQDLNIQLLKDGYRLDEIPDDEDLDLIPPKSVNPTCMCCQATSSTACHIQ

SEQ ID NO: 30096 - protein, 156 aa, Homo sapiens
  Payload ID: 5890
  Gene Symbol: FAM219A
  Gene Name: family with sequence similarity 219, member A
  ENSP ID: ENSP00000368369
MEEIDRFQVPTAHSEMQPLDPAAASISDGDCDAREGESVAMNYKPSPLQVKLEKQRELARKGSLKNGSMGSPVNQQPKKNNVMARTRLVVPNKGYSSLDQSPDEKPLVALDTDRCVWGLGGSWAAQRNLYSTSGLYRPHLLYCQNWDILQPESLQG

SEQ ID NO: 30097 - protein, 172 aa, Homo sapiens
  Payload ID: 5890
  Gene Symbol: FAM219A
  Gene Name: family with sequence similarity 219, member A
  ENSP ID: ENSP00000368371
MEEIDRFQDPAAASISDGDCDAREGESVAMNYKPSPLQVKLEKQRELARKGSLKNGSMGSPVNQQPKKNNVMARTRLVVPNKGYSSLDQSPDEKPLVALDTDSDDDFDMSRYSSSGYSSAEINQDLNIQLLKDGYRLDEIPDDEDLDLIPPKSVNPTCMCCQATSSTACHIQ

SEQ ID NO: 30098 - protein, 156 aa, Homo sapiens
  Payload ID: 5890
  Gene Symbol: FAM219A
  Gene Name: family with sequence similarity 219, member A
  ENSP ID: ENSP00000368372
MEEIDRFQDPAAASISDGDCDAREEKQRELARKGSLKNGSMGSPVNQQPKKNNVMARTRLVVPNKGYSSLDQSPDEKPLVALDTDSDDDFDMSRYSSSGYSSAEQINQDLNIQLLKDGYRLDEIPDDEDLDLIPPKSVNPTCMCCQATSSTACHIQ

SEQ ID NO: 30099 - protein, 164 aa, Homo sapiens
  Payload ID: 5890
  Gene Symbol: FAM219A
  Gene Name: family with sequence similarity 219, member A
  ENSP ID: ENSP00000368377
MEEIDRFQVPTAHSEMQPLDPAAASISDGDCDAREEKQRELARKGSLKNGSMGSPVNQQPKKNNVMARTRLVVPNKGYSSLDQSPDEKPLVALDTDSDDDFDMSRYSSSGYSSAEQINQDLNIQLLKDGYRLDEIPDDEDLDLIPPNQVSPCSLIYFQEGVWKT

SEQ ID NO: 30100 - protein, 166 aa, Homo sapiens
  Payload ID: 5890
  Gene Symbol: FAM219A
  Gene Name: family with sequence similarity 219, member A
  ENSP ID: ENSP00000368380
MEEIDRFQVPTAHSEMQPLDPAAASISDGDCDAREEKQRELARKGSLKNGSMGSPVNQQPKKNNVMARTRLVVPNKGYSSLDQSPDEKPLVALDTDSDDDFDMSRYSSSGYSSAEINQDLNIQLLKDGYRLDEIPDDEDLDLIPPKSVNPTCMCCQATSSTACHIQ

SEQ ID NO: 30101 - protein, 183 aa, Homo sapiens
  Payload ID: 5890
  Gene Symbol: FAM219A
  Gene Name: family with sequence similarity 219, member A
  ENSP ID: ENSP00000368382
MEEIDRFQVPTAHSEMQPLDPAAASISDGDCDAREGESVAMNYKPSPLQVKLEKQRELARKGSLKNGSMGSPVNQQPKKNNVMARTRLVVPNKGYSSLDQSPDEKPLVALDTDSDDDFDMSRYSSSGYSSAEINQDLNIQLLKDGYRLDEIPDDEDLDLIPPKSVNPTCMCCQATSSTACHIQ

SEQ ID NO: 30102 - protein, 185 aa, Homo sapiens
  Payload ID: 5890
  Gene Symbol: FAM219A
  Gene Name: family with sequence similarity 219, member A
  Uniprot ID: Q8IW50
  ENSP ID: ENSP00000392452
MMEEIDRFQVPTAHSEMQPLDPAAASISDGDCDAREGESVAMNYKPSPLQVKLEKQRELARKGSLKNGSMGSPVNQQPKKNNVMARTRLVVPNKGYSSLDQSPDEKPLVALDTDSDDDFDMSRYSSSGYSSAEQINQDLNIQLLKDGYRLDEIPDDEDLDLIPPKSVNPTCMCCQATSSTACHIQ

SEQ ID NO: 30103 - protein, 168 aa, Homo sapiens
  Payload ID: 5890
  Gene Symbol: FAM219A
  Gene Name: family with sequence similarity 219, member A
  ENSP ID: ENSP00000409737
MEEIDRFQVPTAHSEMQPLDPAAASISDGDCDAREGESVAMNYKPSPLQVKLEKQRELARKGSLKNGSMGSPVNQQPKKNNVMARTRLVVPNKGYSSLDQSPDEKPLVALDTDSDDDFDMSRYSSSGYSSAEQINQDLNIQLLKDGYRLDEIPDDEDLDLIPPKSVNP

SEQ ID NO: 30104 - protein, 198 aa, Homo sapiens
  Payload ID: 5891
  Gene Symbol: FAM219B
  Gene Name: family with sequence similarity 219, member B
  Uniprot ID: Q5XKK7
  ENSP ID: ENSP00000350260
MATAEPSGRALRLSTPGPRPSGARDRAPGAAGPPSGQIGNRALRLGERTPAAVEKRGPYMVTRAPSIQAKLQKHRDLAKAVLRRKGMLGASPNRPDSSGKRSVKFNKGYTALSQSPDENLVSLDSDSDGELGSRYSSGYSSAEQVNQDVSRQLLQDGYHLDEIPDDEDLDLIPPKPMASSTCSCCWCCLGDSSSCTLQ

SEQ ID NO: 30105 - protein, 168 aa, Homo sapiens
  Payload ID: 5891
  Gene Symbol: FAM219B
  Gene Name: family with sequence similarity 219, member B
  ENSP ID: ENSP00000454277
MATAEPSGRALRLSTPGPRPSGARDRAPGAAGPPSGQIGNRALRLGERTPAAVEKRGPYMVTRAPSIQAKLQKHRDLAKAVLRRKGMLGASPNRPDSSGKRSVKFNKGYTALSQSPDENLVSLDSDSDGELGSRYSSGYSSAEVNQDVSRQLLQDGYHLDEIPDDEDL

SEQ ID NO: 30106 - protein, 87 aa, Homo sapiens
  Payload ID: 5891
  Gene Symbol: FAM219B
  Gene Name: family with sequence similarity 219, member B
  ENSP ID: ENSP00000454553
MATAEPSGRALRLSTPGPRPSGARDRAPGAAGPPSGQIGNRALRLGERTPAAVEKRGPYMVTRAPSIQAKLQKHRDLAKAVLRRKGQ

SEQ ID NO: 30107 - protein, 69 aa, Homo sapiens
  Payload ID: 5891
  Gene Symbol: FAM219B
  Gene Name: family with sequence similarity 219, member B
  ENSP ID: ENSP00000454600
  MOD_RES (1)..(1): Any amino acid
XVLRRKGMLGASPNRPDSSGKRSVKFNKGYTALSQSPDENLVSLDSDRPFMYIPGPFSSEQYPFPGWLG

SEQ ID NO: 30108 - protein, 198 aa, Homo sapiens; identical to SEQ ID NO: 30104
  Payload ID: 5891
  Gene Symbol: FAM219B
  Gene Name: family with sequence similarity 219, member B
  Uniprot ID: Q5XKK7
  ENSP ID: ENSP00000454719

SEQ ID NO: 30109 - protein, 73 aa, Homo sapiens
  Payload ID: 5891
  Gene Symbol: FAM219B
  Gene Name: family with sequence similarity 219, member B
  ENSP ID: ENSP00000454832
MATAEPSGRALRLSTPGPRPSGARDRAPGAAGPPSGQIGNRALRLGERTPAAVEKRGPYMVTRAPSIQAKLRQ

SEQ ID NO: 30110 - protein, 112 aa, Homo sapiens
  Payload ID: 5891
  Gene Symbol: FAM219B
  Gene Name: family with sequence similarity 219, member B
  ENSP ID: ENSP00000455248
MLGASPNRPDSSGKRSVKFNKGYTALSQSPDENLVSLDSDSDGELGSRYSSGYSSAEQVNQDVSRQLLQDGYHLDEIPDDEDLDLIPPKPMASSTCSCCWCCLGDSSSCTLQ

SEQ ID NO: 30111 - protein, 196 aa, Homo sapiens
  Payload ID: 5891
  Gene Symbol: FAM219B
  Gene Name: family with sequence similarity 219, member B
  ENSP ID: ENSP00000456404
  MOD_RES (1)..(1): Any amino acid
XAEPSGRALRLSTPGPRPSGARDRAPGAAGPPSGQIGNRALRLGERTPAAVEKRGPYMVTRAPSIQAKLQKHRDLAKAVLRRKGMLGASPNRPDSSGKRSVKFNKGYTALSQSPDENLVSLDSDSDGELGSRYSSGYSSAEQVNQDVSRQLLQDGYHLDEIPDDEDLDLIPPKPMASSTCSCCWCCLGDSSSCTLQ

SEQ ID NO: 30112 - protein, 73 aa, Homo sapiens; identical to SEQ ID NO: 30109
  Payload ID: 5891
  Gene Symbol: FAM219B
  Gene Name: family with sequence similarity 219, member B
  ENSP ID: ENSP00000456406

SEQ ID NO: 30113 - protein, 131 aa, Homo sapiens
  Payload ID: 5891
  Gene Symbol: FAM219B
  Gene Name: family with sequence similarity 219, member B
  ENSP ID: ENSP00000456744
MATAEPSGRALRLSTPGPRPSGARDRAPGAAGPPSGQIGNRALRLGERTPAAVEKRGPYMVTRAPSIQAKLQKHRDLAKAVLRRKGMLGASPNRPDSSGKRSVKFNKGYTALSQSPDENLVSLDSDRAVLF

SEQ ID NO: 30114 - protein, 73 aa, Homo sapiens; identical to SEQ ID NO: 30109
  Payload ID: 5891
  Gene Symbol: FAM219B
  Gene Name: family with sequence similarity 219, member B
  ENSP ID: ENSP00000457328

SEQ ID NO: 30115 - protein, 148 aa, Homo sapiens
  Payload ID: 5891
  Gene Symbol: FAM219B
  Gene Name: family with sequence similarity 219, member B
  Uniprot ID: Q5XKK7
  ENSP ID: ENSP00000457594
MATAEPSGRALRLSTPGPRPSGARDRAPGAAGPPSGQIGNRALRLGERTPAAVEKRGPYMVTRAPSIQAKLQKHRDLAKAVLRRKGMLGASPNRPDSSGKRSVKFNKGYTALSQSPDENLVSLDSDRPFMYIPGPFSSEQYPFPGWLG

SEQ ID NO: 30116 - protein, 10 aa, Homo sapiens
  Payload ID: 5891
  Gene Symbol: FAM219B
  Gene Name: family with sequence similarity 219, member B
  ENSP ID: ENSP00000457778
EQYPFPGWLG

SEQ ID NO: 30117 - protein, 73 aa, Homo sapiens; identical to SEQ ID NO: 30109
  Payload ID: 5891
  Gene Symbol: FAM219B
  Gene Name: family with sequence similarity 219, member B
  ENSP ID: ENSP00000457861

SEQ ID NO: 30118 - protein, 73 aa, Homo sapiens; identical to SEQ ID NO: 30109
  Payload ID: 5891
  Gene Symbol: FAM219B
  Gene Name: family with sequence similarity 219, member B
  ENSP ID: ENSP00000457998

SEQ ID NO: 30119 - protein, 259 aa, Homo sapiens
  Payload ID: 5892
  Gene Symbol: FAM220A
  Gene Name: family with sequence similarity 220, member A
  Uniprot ID: Q7Z4H9
  ENSP ID: ENSP00000317289
MRDRRGPLGTCLAQVQQAGGGDSDKLSCSLKKRMPEGPWPADAPSWMNKPVVDGNSQSEALSLEMRKDPSGAGLWLHSGGPVLPYVRESVRRNPASAATPSTAVGLFPAPTECFARVSCSGVEALGRRDWLGGGPRATDGHRGQCPKGEPRVSRLPRHQKVPEMGSFQDDPPSAFPKGLGSELEPACLHSILSATLHVYPEVLLSEETKRIFLDRLKPMFSKQTIEFKKMLKSTSDGLQITLGLLALQPFELANTLCHS

SEQ ID NO: 30120 - protein, 120 aa, Homo sapiens
  Payload ID: 5892
  Gene Symbol: FAM220A
  Gene Name: family with sequence similarity 220, member A
  ENSP ID: ENSP00000432444
MRDRRGPLGTCLAQVQQAGGGDSDKLSCSLKKRMPEGPWPADAPSWMNKPVVDGNSQSEALSLEMRKDPSGAGLWLHSGGPVLPYVRESVRRNPASAATPSTAVGLFPAPTECFARVSCS

SEQ ID NO: 30121 - protein, 109 aa, Homo sapiens
  Payload ID: 5892
  Gene Symbol: FAM220A
  Gene Name: family with sequence similarity 220, member A
  ENSP ID: ENSP00000436886
MRDRRGPLGTCLAQVQQAGGGDSDKLSCSLKKRMPEGPWPADAPSWMNKPVVDGNSQSEALSLEMRKDPSGAGLWLHSGGPVLPYVRESVRRNPASAATPSTAVGLFPA

SEQ ID NO: 30122 - protein, 68 aa, Homo sapiens
  Payload ID: 5892
  Gene Symbol: FAM220A
  Gene Name: family with sequence similarity 220, member A
  ENSP ID: ENSP00000464009
MAAALSGLAVRLSRSAAARSYGVFCKGLTRTLLIFFDLAWRLRINFPYLYIVASMMLNVRLQVHIEIH

SEQ ID NO: 30123 - protein, 259 aa, Homo sapiens; identical to SEQ ID NO: 30119
  Payload ID: 5892
  Gene Symbol: FAM220A
  Gene Name: family with sequence similarity 220, member A
  Uniprot ID: Q7Z4H9
  ENSP ID: ENSP00000483140

SEQ ID NO: 30124 - protein, 298 aa, Homo sapiens
  Payload ID: 5893
  Gene Symbol: FAM221A
  Gene Name: family with sequence similarity 221, member A
  Uniprot ID: A4D161
  ENSP ID: ENSP00000342576
MERLTLPLGGAAAVDEYLEYRRIVGEDDGGKLFTPEEYEEYKRKVLPLRLQNRLFVSWRSPTGMDCKLVGPETLCFCTHRYKQHKTDLEAIPQQCPIDLPCQVTGCQCRAYLYVPLNGSQPIRCRCKHFADQHSAAPGFTCNTCSKCSGFHSCFTCACGQPAYAHDTVVETKQERLAQEKPVGQDIPYAAMGGLTGFSSLAEGYMRLDDSGIGVPSVEFLESPITAVDSPFLKAFQASSSSSPETLTDVGTSSQVSSLRRPEEDDMAFFERRYQERMKMEKAAKWKGKAPLPSATKPS

SEQ ID NO: 30125 - protein, 204 aa, Homo sapiens
  Payload ID: 5893
  Gene Symbol: FAM221A
  Gene Name: family with sequence similarity 221, member A
  Uniprot ID: A4D161
  ENSP ID: ENSP00000386631
MERLTLPLGGAAAVDEYLEYRRYKQHKTDLEAIPQQCPIDLPCQVTGCQCRAYLYVPLNGSQPIRCRCKHFADQHSAAPGFTCNTCSKCSGFHSCFTCACGQPAYAHDTVVETKQERLAQEKPVGQDIPYAAMGGLTGFSSLAEGYMRLDDSGIVGTSSQVSSLRRPEEDDMAFFERRYQERMKMEKAAKWKGKAPLPSATKPS

SEQ ID NO: 30126 - protein, 240 aa, Homo sapiens
  Payload ID: 5893
  Gene Symbol: FAM221A
  Gene Name: family with sequence similarity 221, member A
  ENSP ID: ENSP00000386900
MERLTLPLGGAAAVDEYLEYRRYKQHKTDLEAIPQQCPIDLPCQVTGCQCRAYLYVPLNGSQPIRCRCKHFADQHSAAPGFTCNTCSKCSGFHSCFTCACGQPAYAHDTVVETKQERLAQEKPVGQDIPYAAMGGLTGFSSLAEGYMRLDDSGIGVPSVEFLESPITAVDSPFLKAFQASSSSSPETLTDVGTSSQVSSLRRPEEDDMAFFERRYQERMKMEKAAKWKGKAPLPSATKPS

SEQ ID NO: 30127 - protein, 262 aa, Homo sapiens
  Payload ID: 5893
  Gene Symbol: FAM221A
  Gene Name: family with sequence similarity 221, member A
  Uniprot ID: A4D161
  ENSP ID: ENSP00000386927
MERLTLPLGGAAAVDEYLEYRRIVGEDDGGKLFTPEEYEEYKRKVLPLRLQNRLFVSWRSPTGMDCKLVGPETLCFCTHRYKQHKTDLEAIPQQCPIDLPCQVTGCQCRAYLYVPLNGSQPIRCRCKHFADQHSAAPGFTCNTCSKCSGFHSCFTCACGQPAYAHDTVVETKQERLAQEKPVGQDIPYAAMGGLTGFSSLAEGYMRLDDSGIVGTSSQVSSLRRPEEDDMAFFERRYQERMKMEKAAKWKGKAPLPSATKPS

SEQ ID NO: 30128 - protein, 98 aa, Homo sapiens
  Payload ID: 5893
  Gene Symbol: FAM221A
  Gene Name: family with sequence similarity 221, member A
  ENSP ID: ENSP00000404551
MERLTLPLGGAAAVDEYLEYRRIVGEDDGGKLFTPEEYEEYKRKVLPLRLQNRLFVSWRSPTGMDCKLVGPETLCFCTHSRDGGFHRVSQDGLDLLTL

SEQ ID NO: 30129 - protein, 114 aa, Homo sapiens
  Payload ID: 5893
  Gene Symbol: FAM221A
  Gene Name: family with sequence similarity 221, member A
  ENSP ID: ENSP00000416525
MERLTLPLGGAAAVDEYLEYRRIVGEDDGGKLFTPEEYEEYKRKVLPLRLQNRLFVSWRSPTGMDCKLVGPETLCFCTHRVLLCHSGWSAVARSWLIAASTSWAQAILRPQPPK

SEQ ID NO: 30130 - protein, 301 aa, Homo sapiens
  Payload ID: 5894
  Gene Symbol: FAM221B
  Gene Name: family with sequence similarity 221, member B
  ENSP ID: ENSP00000367222
MEAHEIIEEPHITMDAEKHPPSKDPSAEDLQENHISESFLKPSTSETPLEPHTSESPLVPSPSQIPLEAHSPETHQEPSISETPSETPTYEASLDSPISVVPEKHLTLPPQSRDYVCLSSSDTLKEDLSSESSSNEVPWTRRSTHLSESESLPEHCLSGPSSQVQVDTTEKQEEEAGEVEKGVDASDSTAHTAQPGHQLGNTARPVFPARQTELVEVAKAMHREEFGAQVNNLFQWEKDAALNAIQTGLYIGWRCPHYLWDCFRIGDESRCFCGHLLREHRIISDISVPCKVSQCRCFMFC

SEQ ID NO: 30131 - protein, 340 aa, Homo sapiens
  Payload ID: 5894
  Gene Symbol: FAM221B
  Gene Name: family with sequence similarity 221, member B
  Uniprot ID: A6H8Z2
  ENSP ID: ENSP00000373602
MEAHEIIEEPHITMDAEKHPPSKDPSAEDLQENHISESFLKPSTSETPLEPHTSESPLVPSPSQIPLEAHSPETHQEPSISETPSETPTYEASLDSPISVVPEKHLTLPPQSRDYVCLSSSDTLKEDLSSESSSNEVPWTRRSTHLSESESLPEHCLSGPSSQVQVDTTEKQEEEAGEVEKGVDASDSTAHTAQPGHQLGNTARPVFPARQTELVEVAKAMHREEFGAQVNNLFQWEKDAALNAIQTDRIRNSSSGILAPAHLHCDCLYLALSTKPPWCKGALALQAISIKTEEAKPKATSRQALDPDRLWVSTLAGAAPITYGTVSGLGMSPDAFVDTC

SEQ ID NO: 30132 - protein, 402 aa, Homo sapiens
  Payload ID: 5894
  Gene Symbol: FAM221B
  Gene Name: family with sequence similarity 221, member B
  Uniprot ID: A6H8Z2
  ENSP ID: ENSP00000415299
MEAHEIIEEPHITMDAEKHPPSKDPSAEDLQENHISESFLKPSTSETPLEPHTSESPLVPSPSQIPLEAHSPETHQEPSISETPSETPTYEASLDSPISVVPEKHLTLPPQSRDYVCLSSSDTLKEDLSSESSSNEVPWTRRSTHLSESESLPEHCLSGPSSQVQVDTTEKQEEEAGEVEKGVDASDSTAHTAQPGHQLGNTARPVFPARQTELVEVAKAMHREEFGAQVNNLFQWEKDAALNAIQTGLYIGWRCPHYLWDCFRIGDESRCFCGHLLREHRIISDISVPCKVSQCRCFMFCFIPSRPEEVGEFWLKRRATFDPKAWRAQCRCKHSHEEHAATGPHPCRHHGCCCGCFESNFLCAACDRRWEEHETFFDTQKTRQRGGRPRGTDTVSNWHRPL

SEQ ID NO: 30133 - protein, 90 aa, Homo sapiens
  Payload ID: 5894
  Gene Symbol: FAM221B
  Gene Name: family with sequence similarity 221, member B
  ENSP ID: ENSP00000420279
MEAHEIIEEPHITMDAEKHPPSKDPSAEDLQENHISESFLKPSTSETPLEPHTSESPLVPSPSQIPLEAHSPETHQEPSISETPSETPTY

SEQ ID NO: 30134 - protein, 452 aa, Homo sapiens
  Payload ID: 5895
  Gene Symbol: FAM222A
  Gene Name: family with sequence similarity 222, member A
  Uniprot ID: Q5U5X8
  ENSP ID: ENSP00000351783
MLACLQRTQNAPGQHLACPSKSLELRKCEAVASAMHSSRYPSPAELDAYAEKVANSPLSIKIFPTNIRVPQHKHLSRTVNGYDTSGQRYSPYPQHTAGYQGLLAIVKAAVSSSSTAAPAGPAKSVLKSAEGKRTKLSPAAVQVGIAPYPVPSTLGPLAYPKPPEAPAPPPGLPAAATAASVIPLPGRGLPLPPSNLPSIHSLLYQLNQQCQAPGAAPPACQGMAIPHPSPAKHGPVPSFPSMAYSAAAGLPDCRKGTELGQGATQALTLAGAAKPAGYADSGLDYLLWPQKPPPPPPQPLRAYSGSTVASKSPEACGGRAYERASGSPLNCGVGLPTSFTVGQYFAAPWNSVLVTPTSDCYNPAAAVVVTELGPGAARELAGPPADALSGLPSKSVCNTSVLSSSLQSLEYLINDIRPPCIKEQMLGKGYETVAVPRLLDHQHAHIRLPVYR

SEQ ID NO: 30135 - protein, 452 aa, Homo sapiens; identical to SEQ ID NO: 30134
  Payload ID: 5895
  Gene Symbol: FAM222A
  Gene Name: family with sequence similarity 222, member A
  Uniprot ID: Q5U5X8
  ENSP ID: ENSP00000443292

SEQ ID NO: 30136 - protein, 434 aa, Homo sapiens
  Payload ID: 5896
  Gene Symbol: FAM222B
  Gene Name: family with sequence similarity 222, member B
  ENSP ID: ENSP00000343115
MNPPVAPYATVAPSTLAHPQAQALARQQALQHAQTLAHAPPQTLQHPQGIPPPQALSHPQSLQQPQGLGHPQPMAQTQGLVHPQALAHQGLQHPHNPLLHGGRKMPDSDAPPNVTVSTSTIPLSMAATLQHSQPPDLSSIVHQINQFCQTRAGISTTSVCEGQIANPSPISRSLLINASTRVSTHSVPTPMPSCVVNPMEHTHAATAALPAAGPVNLPTGISRVPTGYPSDLKPVTWNQHQLAHLQQMCSEASGTPAPGLTGKHAAGRELAGPGFVGKAPAYPQELCLAQSFHLKPPLEKPTPSPPVNGMAAPLAYPNGHYFQPLWNNILPTPNSDSSGSQDLAMPFHGGQPTGAPLDCAAAPGAHYRAGTGGGPVASQNSLMQTVDYLSGDFQQACFREQSLAMLSKAHRAPGNRAPDPTESRSLHIQHPGYR

SEQ ID NO: 30137 - protein, 562 aa, Homo sapiens
  Payload ID: 5896
  Gene Symbol: FAM222B
  Gene Name: family with sequence similarity 222, member B
  Uniprot ID: Q8WU58
  ENSP ID: ENSP00000413645
MLACLPGPGDLSFQLLSHTQMNTGLQKWDTTQKMRTAHYPTPAELDAYAKKVANNPLTIKIFPNSVKVPQRKHVRRTVNGLDTSAQRYSPYPTQAATKAGLLAIVKVPAKSILKDFDGTRARLLPEAIMNPPVAPYATVAPSTLAHPQAQALARQQALQHAQTLAHAPPQTLQHPQGIPPPQALSHPQSLQQPQGLGHPQPMAQTQGLVHPQALAHQGLQHPHNPLLHGGRKMPDSDAPPNVTVSTSTIPLSMAATLQHSQPPDLSSIVHQINQFCQTRAGISTTSVCEGQIANPSPISRSLLINASTRVSTHSVPTPMPSCVVNPMEHTHAATAALPAAGPVNLPTGISRVPTGYPSDLKPVTWNQHQLAHLQQMCSEASGTPAPGLTGKHAAGRELAGPGFVGKAPAYPQELCLAQSFHLKPPLEKPTPSPPVNGMAAPLAYPNGHYFQPLWNNILPTPNSDSSGSQDLAMPFHGGQPTGAPLDCAAAPGAHYRAGTGGGPVASQNSLMQTVDYLSGDFQQACFREQSLAMLSKAHRAPGNRAPDPTESRSLHIQHPGYR

SEQ ID NO: 30138 - protein, 28 aa, Homo sapiens
  Payload ID: 5896
  Gene Symbol: FAM222B
  Gene Name: family with sequence similarity 222, member B
  ENSP ID: ENSP00000462251
MLACLPGPGDLSFQLLSHTQMNTGLQKL

SEQ ID NO: 30139 - protein, 562 aa, Homo sapiens; identical to SEQ ID NO: 30137
  Payload ID: 5896
  Gene Symbol: FAM222B
  Gene Name: family with sequence similarity 222, member B
  Uniprot ID: Q8WU58
  ENSP ID: ENSP00000462419

SEQ ID NO: 30140 - protein, 28 aa, Homo sapiens
  Payload ID: 5896
  Gene Symbol: FAM222B
  Gene Name: family with sequence similarity 222, member B
  ENSP ID: ENSP00000462534
MLACLPGPGDLSFQLLSHTQMNTGLQKL

SEQ ID NO: 30141 - protein, 28 aa, Homo sapiens
  Payload ID: 5896
  Gene Symbol: FAM222B
  Gene Name: family with sequence similarity 222, member B
  ENSP ID: ENSP00000462540
MLACLPGPGDLSFQLLSHTQMNTGLQKL

SEQ ID NO: 30142 - protein, 28 aa, Homo sapiens
  Payload ID: 5896
  Gene Symbol: FAM222B
  Gene Name: family with sequence similarity 222, member B
  ENSP ID: ENSP00000463136
MLACLPGPGDLSFQLLSHTQMNTGLQKL

SEQ ID NO: 30143 - protein, 28 aa, Homo sapiens
  Payload ID: 5896
  Gene Symbol: FAM222B
  Gene Name: family with sequence similarity 222, member B
  ENSP ID: ENSP00000463278
MLACLPGPGDLSFQLLSHTQMNTGLQKL

SEQ ID NO: 30144 - protein, 239 aa, Homo sapiens
  Payload ID: 5896
  Gene Symbol: FAM222B
  Gene Name: family with sequence similarity 222, member B
  ENSP ID: ENSP00000463296
MLACLPGPGDLSFQLLSHTQMNTGLQKWDTTQKMRTAHYPTPAELDAYAKKVANNPLTIKIFPNSVKVPQRKHVRRTVNGLDTSAQRYSPYPTQAATKAGLLAIVKVPAKSILKDFDGTRARLLPEAIMNPPVAPYATVAPSTLAHPQAQALARQQALQHAQTLAHAPPQTLQHPQGIPPPQALSHPQSLQQPQGLGHPQPMAQTQGLVHPQALAHQGLQHPHNPLLHGGRKMPDSDAP

SEQ ID NO: 30145 - protein, 136 aa, Homo sapiens
  Payload ID: 5896
  Gene Symbol: FAM222B
  Gene Name: family with sequence similarity 222, member B
  ENSP ID: ENSP00000463642
MLACLPGPGDLSFQLLSHTQMNTGLQKWDTTQKMRTAHYPTPAELDAYAKKVANNPLTIKIFPNSVKVPQRKHVRRTVNGLDTSAQRYSPYPTQAATKAGLLAIVKVPAKSILKDFDGTRARLLPEAIMNPPVAPY

SEQ ID NO: 30146 - protein, 28 aa, Homo sapiens
  Payload ID: 5896
  Gene Symbol: FAM222B
  Gene Name: family with sequence similarity 222, member B
  ENSP ID: ENSP00000463753
MLACLPGPGDLSFQLLSHTQMNTGLQKL

SEQ ID NO: 30147 - protein, 43 aa, Homo sapiens
  Payload ID: 5896
  Gene Symbol: FAM222B
  Gene Name: family with sequence similarity 222, member B
  ENSP ID: ENSP00000464019
MLACLPGPGDLSFQLLSHTQMNTGLQKWDTTQKMRTAHYPTPA

SEQ ID NO: 30148 - protein, 54 aa, Homo sapiens
  Payload ID: 5896
  Gene Symbol: FAM222B
  Gene Name: family with sequence similarity 222, member B
  ENSP ID: ENSP00000464291
MLACLPGPGDLSFQLLSHTQMNTGLQKSLFTISASVEAGQRKLINVDKCPLPYS

SEQ ID NO: 30149 - protein, 136 aa, Homo sapiens; identical to SEQ ID NO: 30145
  Payload ID: 5896
  Gene Symbol: FAM222B
  Gene Name: family with sequence similarity 222, member B
  ENSP ID: ENSP00000464299

SEQ ID NO: 30150 - protein, 179 aa, Homo sapiens
  Payload ID: 5896
  Gene Symbol: FAM222B
  Gene Name: family with sequence similarity 222, member B
  ENSP ID: ENSP00000464355
MLACLPGPGDLSFQLLSHTQMNTGLQKWDTTQKMRTAHYPTPAELDAYAKKVANNPLTIKIFPNSVKVPQRKHVRRTVNGLDTSAQRYSPYPTQAATKAGLLAIVKVPAKSILKDFDGTRARLLPEAIMNPPVAPYATVAPSTLAHPQAQALARQQALQHAQTLAHAPPQTLQHPQGIP

SEQ ID NO: 30151 - protein, 646 aa, Homo sapiens
  Payload ID: 5897
  Gene Symbol: FAM227A
  Gene Name: family with sequence similarity 227, member A
  ENSP ID: ENSP00000348086
MEVINLTTLPMIPVDEHLAVSLVARNTMVKTVRKELENNPPSCLIGSMHQVNQKIADINLRTEPSANSLAIERFELEKKALREKTRSSPEDKVKRQRKSQYSCKGSELRHARSSVIKRKTADKNLLAELYQYSNFNSSKPNKLPNGVDFCDMVGNVVRAERDCLSGKHFCSGRELEKFLSSSSPRAIWLDSFWWIFHERYQPNKELQNNLFDRIAQHYALLLFRVPKSHSEEALLKRLPSLLSKAVYTSFCCCFPQSWFDTHEFKSDICNTMSLWISGGTYPSPQSYDSWDYSELDPERFRREELMLYRRRLTKGREFSLFAGKRAFSQKPAQSRKFYHPQSSSANSPSEKTSSAKQNSEKSLRMQNTAKEHHCQTLVLKKPTQEVKRISEARECENMFPKKSCAACKSPELTSNLFNIYGKSPLIVYFLQNYASLQQHGKNVLIVRREKTTSTPDCTPTYTDVISETLCSMKKRKDNLNQLYQHHWTEWNYFDKHLKELQDNFSREMKNIDPKAADTKKANHMFIPPSAVNEESPDKKTKGSLQREIEFKGCSNKNHGKGRSVNMRGKEEREREEKQKLNISFHSLPSPEELHNLEPGSAYRIRDISATRTPLRRPSSWEPSLIYQEQVLLKTHTLSMEEDKFRC

SEQ ID NO: 30152 - protein, 570 aa, Homo sapiens
  Payload ID: 5897
  Gene Symbol: FAM227A
  Gene Name: family with sequence similarity 227, member A
  Uniprot ID: F5H4B4
  ENSP ID: ENSP00000445093
MNHFRKMEVINLTTLPMIPVDEHLAVSLVARNTMVKTVRKELENNPPSCLIGSMHQVNQKIADINLRTEPSANSLAIERFELEKKALREKTRSSPEDKVKRQRKSQYSCKGSELRHARSSVIKRKTADKNLLAELYQYSNFNSSKPNKLPNGVDFCDMVGNVVRAERDCLSGKHFCSGRELEKFLSSSSPRAIWLDSFWWIFHERYQPNKELQNNLFDRIAQHYALLLFRVPKSHSEEALLKRLPSLLSKAVYTSFCCCFPQSWFDTHEFKSDICNTMSLWISGTYPSPQSYDSWDYSELDPERFRREELMLYRRRLTKGREFSLFAGKRAFSQKPAQSRKFYHPQSSSANSPSEKTSSAKQNSEKSLRMQNTAKEHHCQTLVLKKPTQEVKRISEARECENMFPKKSCAACKSPELTSNLFNIYGKSPLIVYFLQNYASLQQHGKNVLIVRREKTTSTPDCTPTYTDVISETLCSMKKRKDNLNQLYQHHWTEWNYFDKHLKELQDNFSREMKNIDPKAADTKKANHMFIPPSAVNEESPDKKTKEGKGGEGKRRETEVEHFFPLTSKP

SEQ ID NO: 30153 - protein, 508 aa, Homo sapiens
  Payload ID: 5898
  Gene Symbol: FAM227B
  Gene Name: family with sequence similarity 227, member B
  Uniprot ID: Q96M60
  ENSP ID: ENSP00000299338
MAGQRTCQRRSSRAGPGKMQEPPKSIEEFLKFQNWDYWPREIHFRDDDKWSCTLKKIKEDSSFVSIYTHLWENVPRIFEALLIMESKLKEYSLILQNHTSEIFKWKSMISETSSYRKLERYGEFLKKYHKKKKIMLSDEMETEKNIEGCSFTGFKANELTQLPRHLDAEQIYLFILKAHNFDERVFKIWKTHFLSEASIALLHDSFWWWFLHKFRPDRENQDCLFDRISESYVTLFMSIPLSRKDAFFQIYPDCLAQAIYATFHEAFPESSYLFNDEFKEDLGNNIFLWCSGLKPQKGFWIHWKLKELSTTTIHGSKKAPAKSVKERIADSQEHISTSIDFNIIKILNNPRAYTLPISKEESRLSRLATKSHYSSTGPEFNRVLFNFGGQSPLILYYLKMHELAGISKAPKKTKIKLTKIFQEPLPAPTYRDVIKEAKRQFARNQKDFRILQAKATKKPHEVKQDFEKFLHKLRSEAEIERECVASLSSSSSSSPSSTDNYNFEEEEY

SEQ ID NO: 30154 - protein, 166 aa, Homo sapiens
  Payload ID: 5898
  Gene Symbol: FAM227B
  Gene Name: family with sequence similarity 227, member B
  ENSP ID: ENSP00000452616
MAGQRTCQRRSSRAGPGKMQEPPKSIEEFLKFQNWDYWPREIHFRDDDKWSCTLKKIKEDSSFVSIYTHLWENVPRIFEALLIMESKLKEYSLILQNHTSEIFKWKSMISETSSYRKLERYGEFLKKYHKKKKIMGVWGMGPHSVAQAGVQWRNRGSLQPLPPRFK

SEQ ID NO: 30155 - protein, 304 aa, Homo sapiens
  Payload ID: 5898
  Gene Symbol: FAM227B
  Gene Name: family with sequence similarity 227, member B
  Uniprot ID: Q96M60
  ENSP ID: ENSP00000453028
MAGQRTCQRRSSRAGPGKMQEPPKSIEEFLKFQNWDYWPREIHFRDDDKWSCTLKKIKEDSSFVSIYTHLWENVPRIFEALLIMESKLKEYSLILQNHTSEIFKWKSMISETSSYRKLERYGEFLKKYHKKKKIMLSDEMETEKNIEGCSFTGFKANELTQLPRHLDAEQIYLFILKAHNFDERVFKIWKTHFLSEASIALLHDSFWWWFLHKFRIYPDCLAQAIYATFHEAFPESSYLFNDEFKEDLGNNIFLWCSGLKPQKGFWIHWKLKELSTTTIHGSKKAPAKSVKERIADSQEHISTS

SEQ ID NO: 30156 - protein, 182 aa, Homo sapiens
  Payload ID: 5898
  Gene Symbol: FAM227B
  Gene Name: family with sequence similarity 227, member B
  ENSP ID: ENSP00000453379
MAGQRTCQRRSSRAGPGKMQEPPKSIEEFLKFQNWDYWPREIHFRDDDKWSCTLKKIKEDSSFVSIYTHLWENVPRIFEALLIMESKLKEYSLILQNHTSEIFKWKSMISETSSYRKLERYGEFLKKYHKKKKIMLSDEMETEKNIEGCSFTGFKANELTQLPRHLDAEQIYLFILKAHNFD

SEQ ID NO: 30157 - protein, 47 aa, Homo sapiens
  Payload ID: 5898
  Gene Symbol: FAM227B
  Gene Name: family with sequence similarity 227, member B
  ENSP ID: ENSP00000453748
MAGQRTCQRRSSRAGPGKMQEPPKSIEEFLKFQNWVLIENWNDMGNF

SEQ ID NO: 30158 - protein, 134 aa, Homo sapiens
  Payload ID: 5898
  Gene Symbol: FAM227B
  Gene Name: family with sequence similarity 227, member B
  ENSP ID: ENSP00000453787
  MOD_RES (1)..(1): Any amino acid
XKEDSSFVSIYTHLWENVPRIFEALLIMESKLKEYSLILQNHTSEIFKWKSMISETSSYRKLERYGEFLKKYHKKKKIMLSDEMETEKNIEGCSFTGFKANELTQLPRHLDAEQIYLFILKAHNFDVCKYFILL

SEQ ID NO: 30159 - protein, 178 aa, Homo sapiens
  Payload ID: 5898
  Gene Symbol: FAM227B
  Gene Name: family with sequence similarity 227, member B
  ENSP ID: ENSP00000454081
MAGQRTCQRRSSRAGPGKMQEPPKSIEEFLKFQNWDYWPREIHFRDDDKWSCTLKKIKEDSSFVSIYTHLWENVPRIFEALLIMESKLKEYSLILQNHTSEIFKWKSMISETSSYRKLERYGEFLKKYHKKKKIMLSDEMETEKNIEGVWGMGPHSVAQAGVQWRNRGSLQPLPPRFK

SEQ ID NO: 30160 - protein, 206 aa, Homo sapiens
  Payload ID: 5899
  Gene Symbol: FAM228A
  Gene Name: family with sequence similarity 228, member A
  Uniprot ID: Q86W67
  ENSP ID: ENSP00000295150
MAATKTASYDEHFRPEKLREWPEPESVSLMEVLAREDIDEAVCAILFKENSIVKVTVPPFVDPLFQRQQEVDEERRTGLQCETGKRHSIKELEEIEKARLHASSPYFTFTSHCVIPKEWHKASARARSKTYKYSPEKLIYADKKQKRKEKKTADLSQAAFERQFLSSKLSQKNKVGERKGLVSRGLGRGWHAGLCSTHEQHILVPE

SEQ ID NO: 30161 - protein, 106 aa, Homo sapiens
  Payload ID: 5899
  Gene Symbol: FAM228A
  Gene Name: family with sequence similarity 228, member A
  ENSP ID: ENSP00000401257
MAATKTASYDEHFRPEKLREWPEPESVSLMEVLAREDIDEAVCAILFKENSIVKRLDMYFQHVDTFKERRKEMLHKKWVENVAEPLQQRIMEKVISYKELKMKREC

SEQ ID NO: 30162 - protein, 210 aa, Homo sapiens
  Payload ID: 5899
  Gene Symbol: FAM228A
  Gene Name: family with sequence similarity 228, member A
  ENSP ID: ENSP00000412833
  MOD_RES (1)..(1): Any amino acid
XATKTASYDEHFRPEKLREWPEPESVSLMEVLAREDIDEAVCAILFKENSIVKRLDMYFQHVDTFKERRKEMLHKKWVENVAEPLQQRIMEKVTVPPFVDPLFQRQQEVDEERRTGLQCETGKRHSIKELEEIEKARLHASSPYFTFTSHCVIPKEWHKASARARSKTYKYSPEKLIYADKKQKRKEKKTADLSQAAFERQFLSSKLSQK

SEQ ID NO: 30163 - protein, 136 aa, Homo sapiens
  Payload ID: 5899
  Gene Symbol: FAM228A
  Gene Name: family with sequence similarity 228, member A
  ENSP ID: ENSP00000416595
LHASSPYFTFTSHCVIPKEWHKASARARSKTYKYSPEKLIYADKKQKRKEKKTADLSQAAFERQFLSSKLSQKNKVGERKGLVLGTRQQRPRSWAAGDSQQHRGPQPVGKRVMTAEVLGQHLASLQKVARQGHPWY

SEQ ID NO: 30164 - protein, 74 aa, Homo sapiens
  Payload ID: 5900
  Gene Symbol: FAM228B
  Gene Name: family with sequence similarity 228, member B
  ENSP ID: ENSP00000478228
MKNVDSDDLVTGTLPKLKSSKEWLEPKPLCFMEVLAKEDTEAAIQSILYKENSVIKKQRVILSRKRTAVLSGGK

SEQ ID NO: 30165 - protein, 187 aa, Homo sapiens
  Payload ID: 5900
  Gene Symbol: FAM228B
  Gene Name: family with sequence similarity 228, member B
  ENSP ID: ENSP00000479742
MSKKDPNFLKVTIPPFHDPLKKAQYDKDNEKRTLLQCETGKIYSIKEFKEVEKVQLHSRFPQISNSRHFITPNEWLKLPTRYIESEFCRRRRLKVKVNFNDCSFDLKPLARAPYLLESQEEEKTVIYKNKGSSFLEREPLCYQEGNNPSAKEAISEGYFSSLSLSQEREEDQDGSPSPRLGLLKLEL

SEQ ID NO: 30166 - protein, 324 aa, Homo sapiens
  Payload ID: 5900
  Gene Symbol: FAM228B
  Gene Name: family with sequence similarity 228, member B
  ENSP ID: ENSP00000482482
MKNVDSDDLVTGTLPKLKSSKEWLEPKPLCFMEVLAKEDTEAAIQSILYKENSVIKELDKYLQHHAFLNARRKEMLYKRWVDCVADPLQKKIIEKVCSHKKIKKRRQGELDGFLKHVNKKGNAFIEHYDPKEYDPFYMSKKDPNFLKVTIPPFHDPLKKAQYDKDNEKRTLLQCETGKIYSIKEFKEVEKVQLHSRFPQISNSRHFITPNEWLKLPTRYIESEFCRRRRLKVKVNFNDCSFDLKPLARAPYLLESQEEEKTVIYKNKGSSFLEREPLCYQEGNNPSAKEAISEGYFSSLSLSQEREEDQDGSPSPRLGLLKLEL

SEQ ID NO: 30167 - protein, 108 aa, Homo sapiens
  Payload ID: 5900
  Gene Symbol: FAM228B
  Gene Name: family with sequence similarity 228, member B
  ENSP ID: ENSP00000482759
YSIKEFKEVEKVQLHSRFPQISNSRHFITPNEWLKLPTRYIESEFCRRRRNKGSSFLEREPLCYQEGNNPSAKEAISEGYFSSLSLSQEREEDQDGSSLCRCDHPSNS

SEQ ID NO: 30168 - protein, 38 aa, Homo sapiens
  Payload ID: 5900
  Gene Symbol: FAM228B
  Gene Name: family with sequence similarity 228, member B
  ENSP ID: ENSP00000482790
PSAKEAISEGYFSSLSLSQEREEDQDGFQQPRSTHPDP

SEQ ID NO: 30169 - protein, 324 aa, Homo sapiens; identical to SEQ ID NO: 30166
  Payload ID: 5900
  Gene Symbol: FAM228B
  Gene Name: family with sequence similarity 228, member B
  ENSP ID: ENSP00000483011

SEQ ID NO: 30170 - protein, 52 aa, Homo sapiens
  Payload ID: 5901
  Gene Symbol: FAM229A
  Gene Name: family with sequence similarity 229, member A
  ENSP ID: ENSP00000454338
FPIEAGDSRGLAAAPESQDSPEAVATEHNPVSGPCRASISPGRFVAALDATA

SEQ ID NO: 30171 - protein, 127 aa, Homo sapiens
  Payload ID: 5901
  Gene Symbol: FAM229A
  Gene Name: family with sequence similarity 229, member A
  Uniprot ID: H3BQW9
  ENSP ID: ENSP00000455971
MLPSSTPGPGHATETCPAPPGPERSPAARAPAAASSLGPVSTAGRAPRGLDMSAQEPPQGRRFPIEAGDSRGLAAAPESQDSPEAVATEHNPVRPLRRCPGCHCLTLLHVPIDVYLAMGGSPRARAT

SEQ ID NO: 30172 - protein, 80 aa, Homo sapiens
  Payload ID: 5902
  Gene Symbol: FAM229B
  Gene Name: family with sequence similarity 229, member B
  Uniprot ID: Q4G0N7
  ENSP ID: ENSP00000357645
MPFQFGTQPRRFPVEGGDSSIELEPGLSSSAACNGKEMSPTRQLRRCPGSHCLTITDVPVTVYATTRKPPAQSSKEMHPK

SEQ ID NO: 30173 - protein, 80 aa, Homo sapiens; identical to SEQ ID NO: 30172
  Payload ID: 5902
  Gene Symbol: FAM229B
  Gene Name: family with sequence similarity 229, member B
  Uniprot ID: Q4G0N7
  ENSP ID: ENSP00000474987

SEQ ID NO: 30174 - protein, 169 aa, Homo sapiens
  Payload ID: 5903
  Gene Symbol: FAM231A
  Gene Name: family with sequence similarity 231, member A
  Uniprot ID: P0DMU4
  ENSP ID: ENSP00000408511
MVSSKGLWKERPSAHTSECFSTTACPVAFILLVWNSQTPAGLQSLCTGRHPSLSARAQRAGPRASREEGTFWTERVGQERWLIRSGSSQNESQEDQGAGLISQAGLKADNRRESSTWANEVEDRRPQCTPALNLTPSHPHPPHSLTTFLRSVIGIQIPPGLVAAGGTVA

SEQ ID NO: 30175 - protein, 169 aa, Homo sapiens; identical to SEQ ID NO: 30174
  Payload ID: 5904
  Gene Symbol: FAM231B
  Gene Name: family with sequence similarity 231, member B
  Uniprot ID: A6NCW3
  ENSP ID: ENSP00000473163

SEQ ID NO: 30176 - protein, 169 aa, Homo sapiens
  Payload ID: 5905
  Gene Symbol: FAM231C
  Gene Name: family with sequence similarity 231, member C
  Uniprot ID: P0DMU5
  ENSP ID: ENSP00000470910
MGCSKGLWKERPSAHTSECFSTTACPVAFILLVWNSQSPAGLQSFCTGRHPSLSVRAQRAGTGASREEGTFWTECVGQERRLIHSGSSENESQEDEGADLIPYTGLKADNRRKSSTWANEVEDRRPQSTPALNLTPSHPHPPRPLITFLRSVIGIQIPPGLVAAGGTVA

SEQ ID NO: 30177 - protein, 169 aa, Homo sapiens; identical to SEQ ID NO: 30174
  Payload ID: 5906
  Gene Symbol:
  Gene Name: family with sequence similarity 231, member C [Source: EntrezGene
  Acc:729587]
  Uniprot ID: P0DMU3
  ENSP ID: ENSP00000485366

SEQ ID NO: 30178 - protein, 169 aa, Homo sapiens
  Payload ID: 5907
  Gene Symbol: FAM231D
  Gene Name: family with sequence similarity 231, member D
  Uniprot ID: Q6ZW35
  ENSP ID: ENSP00000475227
MGSSKGLWKEKPSAHTSECFSTTACPVACILLVWNSQTPAGLQSLCTGRHPSLSARAQWAGPRASREEGTFWTEPVGQERRLIRSGSSQNESQEDQGADLISHEGLKADNRRESSTWANEVEDRRPQCTSALNLTPSHLHPPHPLTTFFRNVIGIKIPPGLVAMGGTVA

SEQ ID NO: 30179 - protein, 552 aa, Homo sapiens
  Payload ID: 5908
  Gene Symbol: FAM234A
  Gene Name: family with sequence similarity 234, member A
  Uniprot ID: Q9H0X4
  ENSP ID: ENSP00000301678
MLDHKDLEAEIHPLKNEERKSQENLGNPSKNEDNVKSAPPQSRLSRCRAAAFFLSLFLCLFVVFVVSFVIPCPDRPASQRMWRIDYSAAVIYDFLAVDDINGDRIQDVLFLYKNTNSSNNFSRSCVDEGFSSPCTFAAAVSGANGSTLWERPVAQDVALVECAVPQPRGSEAPSACILVGRPSSFIAVNLFTGETLWNHSSSFSGNASILSPLLQVPDVDGDGAPDLLVLTQEREEVSGHLYSGSTGHQIGLRGSLGVDGESGFLLHVTRTGAHYILFPCASSLCGCSVKGLYEKVTGSGGPFKSDPHWESMLNATTRRMLSHSSGAVRYLMHVPGNAGADVLLVGSEAFVLLDGQELTPRWTPKAAHVLRKPIFGRYKPDTLAVAVENGTGTDRQILFLDLGTGAVLCSLALPSLPGGPLSASLPTADHRSAFFFWGLHELGSTSETETGEARHSLYMFHPTLPRVLLELANVSTHIVAFDAVLFEPSRHAAYILLTGPADSEAPGLVSVIKHKVRDLVPSSRVVRLGEGGPDSDQAIRDRFSRLRYQSEA

SEQ ID NO: 30180 - protein, 540 aa, Homo sapiens
  Payload ID: 5908
  Gene Symbol: FAM234A
  Gene Name: family with sequence similarity 234, member A
  Uniprot ID: Q9H0X4
  ENSP ID: ENSP00000301679
MLDHKDLEAEIHPLKNEERKSQENLGNPSKNEDNVKSAPPQSRLSRCRAAAFFLSLFLCLFVVFVVSFVIPCPDRPASQRMWRIDYSAAVIYDFLAVDDINGDRIQDVLFLYKNTNSSNNFSRSCVDEGFSSPCTFAAAVSGANGSTLWERPVAQDVALVECAVPQPRGSEAPSACILVGRPSSFIAVNLFTGETLWNHSSSFSGNASILSPLLQVPDVDGDGAPDLLVLTQEREEVSGHLYSGSTGHQIGLRGSLGVDGESGFLLHVTRTGAHYILFPCASSLCGCSVKGLYEKVTGSGGPFKSDPHWESMLNATTRRMLSHSSGAVRYLMHVPGNAGADVLLVGSEAFVLLDGQELTPRWTPKAAHVLRKPIFGRYKPDTLAVAVENGTGTDRQILFLDLGTGAVLCSLALPSLPGGPLSASLPTADHRSAFFFWGLHELGSTSETETGEARHSLYMFHPTLPRVLLELANVSTHIVAFDAVLFEPSRHAAYILLTGPADSEAPGLVSVIKHKAHTGRQRRGSWTGQSSRRDLHVRVL

SEQ ID NO: 30181 - protein, 552 aa, Homo sapiens; identical to SEQ ID NO: 30179
  Payload ID: 5908
  Gene Symbol: FAM234A
  Gene Name: family with sequence similarity 234, member A
  Uniprot ID: Q9H0X4
  ENSP ID: ENSP00000382814

SEQ ID NO: 30182 - protein, 102 aa, Homo sapiens
  Payload ID: 5908
  Gene Symbol: FAM234A
  Gene Name: family with sequence similarity 234, member A
  ENSP ID: ENSP00000388726
MLDHKDLEAEIHPLKNEERKSQENLGNPSKNEDNVKSAPPQSRLSRCRAAAFFLSLFLCLFVVFVVSFVIPCPDRPASQRMWRIDYSAAVIYDFLAVDDING

SEQ ID NO: 30183 - protein, 50 aa, Homo sapiens
  Payload ID: 5908
  Gene Symbol: FAM234A
  Gene Name: family with sequence similarity 234, member A
  ENSP ID: ENSP00000392612
MLDHKDLEAEIHPLKNEERKSQENLGNPSKNEDNVKSAPPQSRLSRCRAA

SEQ ID NO: 30184 - protein, 87 aa, Homo sapiens
  Payload ID: 5908
  Gene Symbol: FAM234A
  Gene Name: family with sequence similarity 234, member A
  ENSP ID: ENSP00000395334
MLDHKDLEAEIHPLKNEERKSQENLGNPSKNEDNVKSAPPQSRLSRCRAAAFFLSLFLCLFVVFVVSFVIPCPDRPASQRMWRIDYS

SEQ ID NO: 30185 - protein, 233 aa, Homo sapiens
  Payload ID: 5908
  Gene Symbol: FAM234A
  Gene Name: family with sequence similarity 234, member A
  ENSP ID: ENSP00000398433
MLDHKDLEAEIHPLKNEERKSQENLGNPSKNEDNVKSAPPQSRLSRCRAAAFFLSLFLCLFVVFVVSFVIPCPDRPASQRMWRIDYSAAVIYDFLAVDDINGDRIQDVLFLYKNTNSSNNFSRSCVDEGFSSPCTFAAAVSGANGSTLWERPVAQDVALVECAVPQPRGSEAPSACILVGRPSSFIAVNLFTGETLWNHSSSFSGNASILSPLLQVPDVDGDGAPDLLVLTQE

SEQ ID NO: 30186 - protein, 236 aa, Homo sapiens
  Payload ID: 5908
  Gene Symbol: FAM234A
  Gene Name: family with sequence similarity 234, member A
  ENSP ID: ENSP00000399150
MLDHKDLEAEIHPLKNEERKSQENLGNPSKNEDNVKSAPPQSRLSRCRAAAFFLSLFLCLFVVFVVSFVIPCPDRPASQRMWRIDYSAAVIYDFLAVDDINGDRIQDVLFLYKNTNSSNNFSRSCVDEGFSSPCTFAAAVSGANGSTLWERPVAQDVALVECAVPQPRGSEAPSACILVGRPSSFIAVNLFTGETLWNHSSSFSGNASILSPLLQVPDVDGDGAPDLLVLTQEREE

SEQ ID NO: 30187 - protein, 131 aa, Homo sapiens
  Payload ID: 5908
  Gene Symbol: FAM234A
  Gene Name: family with sequence similarity 234, member A
  ENSP ID: ENSP00000402119
MLDHKDLEAEIHPLKNEERKSQENLGNPSKNEDNVKSAPPQSRLSRCRAAAFFLSLFLCLFVVFVVSFVIPCPDRPASQRMWRIDYSAAVIYDFLAVDDINGDRIQDVLFLYKNTNSSNNFSRSCVDEAAV

SEQ ID NO: 30188 - protein, 68 aa, Homo sapiens
  Payload ID: 5908
  Gene Symbol: FAM234A
  Gene Name: family with sequence similarity 234, member A
  ENSP ID: ENSP00000405659
MLDHKDLEAEIHPLKNEERKSQENLGNPSKNEDNVKSAPPQSRLSRCRAAAFFLSLFLCLFVVFVVSF

SEQ ID NO: 30189 - protein, 242 aa, Homo sapiens
  Payload ID: 5908
  Gene Symbol: FAM234A
  Gene Name: family with sequence similarity 234, member A
  ENSP ID: ENSP00000407669
MLDHKDLEAEIHPLKNEERKSQENLGNPSKNEDNVKSAPPQSRLSRCRAAAFFLSLFLCLFVVFVVSFVIPCPDRPASQRMWRIDYSAAVIYDFLAVDDINGDRIQDVLFLYKNTNSSNNFSRSCVDEAAVSGANGSTLWERPVAQDVALVECAVPQPRGSEAPSACILVGRPSSFIAVNLFTGETLWNHSSSFSGNASILSPLLQVPDVDGDGAPDLLVLTQEREEVSGHLYSGSTGHQIG

SEQ ID NO: 30190 - protein, 192 aa, Homo sapiens
  Payload ID: 5908
  Gene Symbol: FAM234A
  Gene Name: family with sequence similarity 234, member A
  ENSP ID: ENSP00000407875
  MOD_RES (1)..(1): Any amino acid
XESMLNATTRRMLSHSSGAVRYLMHVPGNAGADVLLVGSEAFVLLDGQELTPRWTPKAAHVLRKPIFGRYKPDTLAVAVENGTGTDRQETGEARHSLYMFHPTLPRVLLELANVSTHIVAFDAVLFEPSRHAAYILLTGPADSEAPGLVSVIKHKVRDLVPSSRVVRLGEGGPDSDQAIRDRFSRLRYQSEA

SEQ ID NO: 30191 - protein, 103 aa, Homo sapiens
  Payload ID: 5908
  Gene Symbol: FAM234A
  Gene Name: family with sequence similarity 234, member A
  ENSP ID: ENSP00000409309
MLDHKDLEAEIHPLKNEERKSQENLGNPSKNEDNVKSAPPQSRLSRCRAAAFFLSLFLCLFVVFVVSFVIPCPDRPASQRMWRIDYSAAGFSSPCTFAAAVSG

SEQ ID NO: 30192 - protein, 234 aa, Homo sapiens
  Payload ID: 5908
  Gene Symbol: FAM234A
  Gene Name: family with sequence similarity 234, member A
  ENSP ID: ENSP00000412581
  MOD_RES (1)..(1): Any amino acid
XPDRPASQRMWRIDYSAAVIYDFLAVDDINGDRIQDVLFLYKNTNSSNNFSRSCVDEGFSSPCTFAAAVSGANGSTLWERPVAQDVALVECAVPQPRGSEAPSACILVGRPSSFIAVNLFTGAVRCHLPWGSREEERLGPRLLLGCQWWQCPGRAQNMNQHSARQGRSGPVSAPKPEGAGLRAPAEPASWKDEGKNAWCTGPCVCVGSLHLIAVWKISVPRFGECSYFPYKLSF

SEQ ID NO: 30193 - protein, 622 aa, Homo sapiens
  Payload ID: 5909
  Gene Symbol: FAM234B
  Gene Name: family with sequence similarity 234, member B
  Uniprot ID: A2RU67
  ENSP ID: ENSP00000197268
MATVLSRALKLPGKKSPDLGEYDPLTQADSDESEDDLVLNLQKNGGVKNGKSPLGEAPEPDSDAEVAEAAKPHLSEVTTEGYPSEPLGGLEQKAASSLVSYVRTSVFLLTLGISMILVLLCAFLIPCPPRDLHSTWSRHLGSQGGGDLSPLELADVNGDGLRDVLLSFVMSRNGSAVGVSRPAANLVCLSGMNGSTLWSSLLPEEARDITCLELMPGSLAETICLVTGTHKMLSAFNATSGKAIWTLNPNYLSNGTLAAPVVVLPDLDEDGVRDLVVLAIGELQPDLCFLLVSGRTGNPVGRPVKYNIVGVGNLIGPQVYITTNGAVYILFGFGNIQAVALRDIFVQAQNRDSSPPSLQIEEPEWEKRRSINLSELIDVYSDGVELLQMVKAPDSNCSNLLITTRQSLVLLRGQNLTPYWALRLQGLRSQPTPGYFTDDQTLDFLLQIQDGVGMKKMMVVDGDSGSIVWSYRAPCHMKETPATSAVTSDQKSVFLFWAEGLSAASPNSDIILGTEPPSLHHLYLLHPAFPSILLDLANTTGTVTASEVGINDLWKDAFYVTRTTGPSSEGHPAALVVSKLSLRWALMEGQMAQLQESTPKIGRGELRRFLSRIKFVEAPYEI

SEQ ID NO: 30194 - protein, 622 aa, Homo sapiens; identical to SEQ ID NO: 30193
  Payload ID: 5909
  Gene Symbol: FAM234B
  Gene Name: family with sequence similarity 234, member B
  Uniprot ID: A2RU67
  ENSP ID: ENSP00000394063

SEQ ID NO: 30195 - protein, 324 aa, Homo sapiens
  Payload ID: 5909
  Gene Symbol: FAM234B
  Gene Name: family with sequence similarity 234, member B
  ENSP ID: ENSP00000437974
LVTGTHKMLSAFNATSGKAIWTLNPNYLSNGTLAAPVVVLPDLDEDGVRDLVVLAIGELQPDLCFLLVSGRTGNPVGRPVKYNIVGVGNLIGPQVYITTNGAVYILFGFGNIQAVALRDIFVQAQNRDSSPPSLQIEEPEWEKRRSINLSELIDVYSDGVELLQMVKAPDSNCSNLLITTRQSLVLLRGQNLTPYWALRLQGLRSQPTPGYFTDDQTLDFLLQIQDGVGMKKMMVVDGDSGSIVWSYRAPCHMKETPATSAVTSDQKSVFLFWAEGLSAASPNSDIILGTEPPSLHHLYLLHPAFPSILLDLANTTGTVTASEG

SEQ ID NO: 30196 - protein, 105 aa, Homo sapiens
  Payload ID: 5910
  Gene Symbol: FAM24A
  Gene Name: family with sequence similarity 24, member A
  Uniprot ID: A6NFZ4
  ENSP ID: ENSP00000357889
MAKMFDLRTKIMIGIGSSLLVAAMVLLSVVFCLYFKVAKALKAAKDPDAVAVKNHNPDKVCWATNSQAKATTMESCPSLQCCEGCRMHASSDSLPPCCCDINEGL

SEQ ID NO: 30197 - protein, 94 aa, Homo sapiens
  Payload ID: 5911
  Gene Symbol: FAM24B
  Gene Name: family with sequence similarity 24, member B
  Uniprot ID: Q8N5W8
  ENSP ID: ENSP00000357892
MPVIAGGILAALLLLIVVVLCLYFKIHNALKAAKEPEAVAVKNHNPDKVWWAKNSQAKTIATESCPALQCCEGYRMCASFDSLPPCCCDINEGL

SEQ ID NO: 30198 - protein, 94 aa, Homo sapiens; identical to SEQ ID NO: 30197
  Payload ID: 5911
  Gene Symbol: FAM24B
  Gene Name: family with sequence similarity 24, member B
  Uniprot ID: Q8N5W8
  ENSP ID: ENSP00000357894

SEQ ID NO: 30199 - protein, 89 aa, Homo sapiens
  Payload ID: 5912
  Gene Symbol: FAM25A
  Gene Name: family with sequence similarity 25, member A
  Uniprot ID: B3EWG3
  ENSP ID: ENSP00000342790
MLGGLGKLAAEGLAHRTEKATEGAIHAVEEVVKEVVGHAKETGEKAIAEAIKKAQESGDKKMKEITETVTNTVTNAITHAAESLDKLGQ

SEQ ID NO: 30200 - protein, 89 aa, Homo sapiens; identical to SEQ ID NO: 30199
  Payload ID: 5913
  Gene Symbol: FAM25C
  Gene Name: family with sequence similarity 25, member C
  Uniprot ID: B3EWG5
  ENSP ID: ENSP00000485370

SEQ ID NO: 30201 - protein, 89 aa, Homo sapiens; identical to SEQ ID NO: 30199
  Payload ID: 5914
  Gene Symbol: FAM25G
  Gene Name: family with sequence similarity 25, member G
  Uniprot ID: B3EWG6
  ENSP ID: ENSP00000413896

SEQ ID NO: 30202 - protein, 314 aa, Homo sapiens
  Payload ID: 5915
  Gene Symbol: FAM26D
  Gene Name: family with sequence similarity 26, member D
  Uniprot ID: Q5JW98
  ENSP ID: ENSP00000357585
MCPTLNNIVSSLQRNGIFINSLIAALTIGGQQLFSSSTFSCPCQVGKNFYYGSAFLVIPALILLVAGFALRSQMWTITGEYCCSCAPPYRRISPLECKLACLRFFSITGRAVIAPLTWLAVTLLTGTYYECAASEFASVDHYPMFDNVSASKREEILAGFPCCRSAPSDVILVRDEIALLHRYQSQMLGWILITLATIAALVSCCVAKCCSPLTSLQHCYWTSHLQNERELFEQAAEQHSRLLMMHRIKKLFGFIPGSEDVKHIRIPSCQDWKDISVPTLLCMGDDLQGHYSFLGNRVDEDNEEDRSRGIELKP

SEQ ID NO: 30203 - protein, 128 aa, Homo sapiens
  Payload ID: 5915
  Gene Symbol: FAM26D
  Gene Name: family with sequence similarity 26, member D
  Uniprot ID: Q5JW98
  ENSP ID: ENSP00000357586
MLGWILITLATIAALVSCCVAKCCSPLTSLQHCYWTSHLQNERELFEQAAEQHSRLLMMHRIKKLFGFIPGSEDVKHIRIPSCQDWKDISVPTLLCMGDDLQGHYSFLGNRVDEDNEEDRSRGIELKP

SEQ ID NO: 30204 - protein, 171 aa, Homo sapiens
  Payload ID: 5915
  Gene Symbol: FAM26D
  Gene Name: family with sequence similarity 26, member D
  Uniprot ID: Q5JW98
  ENSP ID: ENSP00000385836
MFDNVSASKREEILAGFPCCRSAPSDVILVRDEIALLHRYQSQMLGWILITLATIAALVSCCVAKCCSPLTSLQHCYWTSHLQNERELFEQAAEQHSRLLMMHRIKKLFGFIPGSEDVKHIRIPSCQDWKDISVPTLLCMGDDLQGHYSFLGNRVDEDNEEDRSRGIELKP

SEQ ID NO: 30205 - protein, 123 aa, Homo sapiens
  Payload ID: 5915
  Gene Symbol: FAM26D
  Gene Name: family with sequence similarity 26, member D
  ENSP ID: ENSP00000409556
MLGWILITLATIAALVSCCVAKCCSPLTSLQHCYWTSHLQNERELFEQAAEQHSRLLMMHRIKKLFGFIPGSEDVKHIRIPSCQDWKDISVPTLLCMGDDLQGHYSFLGNRVDEDNEEDRSRG

SEQ ID NO: 30206 - protein, 170 aa, Homo sapiens
  Payload ID: 5915
  Gene Symbol: FAM26D
  Gene Name: family with sequence similarity 26, member D
  Uniprot ID: Q5JW98
  ENSP ID: ENSP00000487169
MAPRSAKETFRINPNVAANLSAPSDVILVRDEIALLHRYQSQMLGWILITLATIAALVSCCVAKCCSPLTSLQHCYWTSHLQNERELFEQAAEQHSRLLMMHRIKKLFGFIPGSEDVKHIRIPSCQDWKDISVPTLLCMGDDLQGHYSFLGNRVDEDNEEDRSRGIELKP

SEQ ID NO: 30207 - protein, 309 aa, Homo sapiens
  Payload ID: 5916
  Gene Symbol: FAM26E
  Gene Name: family with sequence similarity 26, member E
  Uniprot ID: Q8N5C1
  ENSP ID: ENSP00000357588
MDAFQGILKFFLNQKTVIGYSFMALLTVGSERLFSVVAFKCPCSTENMTYGLVFLFAPAWVLLILGFFLNNRSWRLFTGCCVNPRKIFPRGHSCRFFYVLGQITLSSLVAPVMWLSVALLNGTFYECAMSGTRSSGLLELICKGKPKECWEELHKVSCGKTSMLPTVNEELKLSLQAQSQILGWCLICSASFFSLLTTCYARCRSKVSYLQLSFWKTYAQKEKEQLENTFLDYANKLSERNLKCFFENKRPDPFPMPTFAAWEAASELHSFHQSQQHYSTLHRVVDNGLQLSPEDDETTMVLVGTAHNM

SEQ ID NO: 30208 - protein, 158 aa, Homo sapiens
  Payload ID: 5917
  Gene Symbol: FAM26F
  Gene Name: family with sequence similarity 26, member F
  ENSP ID: ENSP00000357593
RWGRLGGAERPSFLRAAGVLGWILIAVVIIILLIFTSVTRCLSPVSFLQLKFWKIYLEQEQQILKSKATEHATELAKENIKCFFEGSHPKEYNTPSMKEWQQISSLYTFNPKGQYYSMLHKYVNRKEKTHSIRSTEGDTVIPVLGFVDSSGINSTPEL

SEQ ID NO: 30209 - protein, 315 aa, Homo sapiens
  Payload ID: 5917
  Gene Symbol: FAM26F
  Gene Name: family with sequence similarity 26, member F
  Uniprot ID: Q5R3K3
  ENSP ID: ENSP00000357594
MEKFRAVLDLHVKHHSALGYGLVTLLTAGGERIFSAVAFQCPCSAAWNLPYGLVFLLVPALALFLLGYVLSARTWRLLTGCCSSARASCGSALRGSLVCTQISAAAALAPLTWVAVALLGGAFYECAATGSAAFAQRLCLGRNRSCAAELPLVPCNQAKASDVQDLLKDLKAQSQVLGWILIAVVIIILLIFTSVTRCLSPVSFLQLKFWKIYLEQEQQILKSKATEHATELAKENIKCFFEGSHPKEYNTPSMKEWQQISSLYTFNPKGQYYSMLHKYVNRKEKTHSIRSTEGDTVIPVLGFVDSSGINSTPEL

SEQ ID NO: 30210 - protein, 143 aa, Homo sapiens
  Payload ID: 5917
  Gene Symbol: FAM26F
  Gene Name: family with sequence similarity 26, member F
  Uniprot ID: Q5R3K3
  ENSP ID: ENSP00000357595
MFPVLGWILIAVVIIILLIFTSVTRCLSPVSFLQLKFWKIYLEQEQQILKSKATEHATELAKENIKCFFEGSHPKEYNTPSMKEWQQISSLYTFNPKGQYYSMLHKYVNRKEKTHSIRSTEGDTVIPVLGFVDSSGINSTPEL

SEQ ID NO: 30211 - protein, 244 aa, Homo sapiens
  Payload ID: 5918
  Gene Symbol: FAM3A
  Gene Name: family with sequence similarity 3, member A
  ENSP ID: ENSP00000320521
MDRGQHPPGWAWQWLSSHPATLHQLECSGAISVHCNLYLLGSSDSSAPASRVAETTGPESSVTAAPRARKYKCGLPQPCPEEHLAFRVVSGAANVIGPKICLEDKMLMSSVKDNVGRGLNIALVNGVSGELIEARAFDMWAGDVNDLLKFIRPLHEGTLVFVASYDDPATKMNEETRKLFSELGSRNAKELAFRDSWVFVGAKGVQNKSPFEQHVKNSKHSNKYEGWPEALEMEGCIPRRSTAS

SEQ ID NO: 30212 - protein, 230 aa, Homo sapiens
  Payload ID: 5918
  Gene Symbol: FAM3A
  Gene Name: family with sequence similarity 3, member A
  Uniprot ID: P98173
  ENSP ID: ENSP00000352955
MRLAGPLRIVVLVVSVGVTWIVVSILLGGPGSGFPRIQQLFTSPESSVTAAPRARKYKCGLPQPCPEEHLAFRVVSGAANVIGPKICLEDKMLMSSVKDNVGRGLNIALVNGVSGELIEARAFDMWAGDVNDLLKFIRPLHEGTLVFVASYDDPATKMNEETRKLFSELGSRNAKELAFRDSWVFVGAKGVQNKSPFEQHVKNSKHSNKYEGWPEALEMEGCIPRRSTAS

SEQ ID NO: 30213 - protein, 237 aa, Homo sapiens
  Payload ID: 5918
  Gene Symbol: FAM3A
  Gene Name: family with sequence similarity 3, member A
  ENSP ID: ENSP00000358655
MRLAGPLRIVVLVVSVGVTWIVVSILLGGPGSGFPRIQQLFTSPESSVTAAPRARKYKCGLPQPCPEEHLAFRVVSGAANVIGPKICLEDKMLMSSVKDNVGRGLNIALVNGPLPPDTGVSGELIEARAFDMWAGDVNDLLKFIRPLHEGTLVFVASYDDPATKMNEETRKLFSELGSRNAKELAFRDSWVFVGAKGVQNKSPFEQHVKNSKHSNKYEGWPEALEMEGCIPRRSTAS

SEQ ID NO: 30214 - protein, 230 aa, Homo sapiens; identical to SEQ ID NO: 30212
  Payload ID: 5918
  Gene Symbol: FAM3A
  Gene Name: family with sequence similarity 3, member A
  Uniprot ID: P98173
  ENSP ID: ENSP00000358657

SEQ ID NO: 30215 - protein, 192 aa, Homo sapiens
  Payload ID: 5918
  Gene Symbol: FAM3A
  Gene Name: family with sequence similarity 3, member A
  Uniprot ID: P98173
  ENSP ID: ENSP00000377202
MRLAGPESSVTAAPRARKYKCGLPQPCPEEHLAFRVVSGAANVIGPKICLEDKMLMSSVKDNVGRGLNIALVNGVSGELIEARAFDMWAGDVNDLLKFIRPLHEGTLVFVASYDDPATKMNEETRKLFSELGSRNAKELAFRDSWVFVGAKGVQNKSPFEQHVKNSKHSNKYEGWPEALEMEGCIPRRSTAS

SEQ ID NO: 30216 - protein, 70 aa, Homo sapiens
  Payload ID: 5918
  Gene Symbol: FAM3A
  Gene Name: family with sequence similarity 3, member A
  ENSP ID: ENSP00000392624
MRLAGPLRIVVLVVSVGVTWIVVSILLGGPGSGFPRIQQLFTMSHFVSQAGVQWCNLGSLQPLPPGFKRF

SEQ ID NO: 30217 - protein, 213 aa, Homo sapiens
  Payload ID: 5918
  Gene Symbol: FAM3A
  Gene Name: family with sequence similarity 3, member A
  Uniprot ID: P98173
  ENSP ID: ENSP00000393086
MRLAGPLRIVVLVVSVGVTWIVVSILLGGPGSGFPRIQQLFTSPESSVTAAPRARKYKCGLPQPCPEEHLAFRVVSGAANVIGPKICLEDKMLMSSVKDNVGRGLNIALVNDVNDLLKFIRPLHEGTLVFVASYDDPATKMNEETRKLFSELGSRNAKELAFRDSWVFVGAKGVQNKSPFEQHVKNSKHSNKYEGWPEALEMEGCIPRRSTAS

SEQ ID NO: 30218 - protein, 70 aa, Homo sapiens
  Payload ID: 5918
  Gene Symbol: FAM3A
  Gene Name: family with sequence similarity 3, member A
  ENSP ID: ENSP00000396243
MRLAGPLRIVVLVVSVGVTWIVVSILLGGPGSGFPRIQQLFTSWSAVVQSRFTATSTSWVQAILVPQPPE

SEQ ID NO: 30219 - protein, 163 aa, Homo sapiens
  Payload ID: 5918
  Gene Symbol: FAM3A
  Gene Name: family with sequence similarity 3, member A
  ENSP ID: ENSP00000396845
MRLAGPLRIVVLVVSVGVTWIVVSILLGGPGSGFPRIQQLFTSPESSVTAAPRARKYKCGLPQPCPEEHLAFRVVSGAANVIGPKICLEDKMLMSSVKDNVGRGLNIALVNGPLPPDTGVSGELIEARAFDMWAGDVNDLLKFIRPLHEGTLVFVASYDDPAT

SEQ ID NO: 30220 - protein, 39 aa, Homo sapiens
  Payload ID: 5918
  Gene Symbol: FAM3A
  Gene Name: family with sequence similarity 3, member A
  ENSP ID: ENSP00000397396
MRLAGPESSVTAVTENPSVLGPCGLTSRTQSMEVSPASA

SEQ ID NO: 30221 - protein, 51 aa, Homo sapiens
  Payload ID: 5918
  Gene Symbol: FAM3A
  Gene Name: family with sequence similarity 3, member A
  ENSP ID: ENSP00000401367
MRLAGPLRIVVLVVSVGVTWIVVSILLGGPGSGFPRIQQLFTSPESSVTAG

SEQ ID NO: 30222 - protein, 70 aa, Homo sapiens; identical to SEQ ID NO: 30218
  Payload ID: 5918
  Gene Symbol: FAM3A
  Gene Name: family with sequence similarity 3, member A
  ENSP ID: ENSP00000404171

SEQ ID NO: 30223 - protein, 70 aa, Homo sapiens; identical to SEQ ID NO: 30218
  Payload ID: 5918
  Gene Symbol: FAM3A
  Gene Name: family with sequence similarity 3, member A
  ENSP ID: ENSP00000406340

SEQ ID NO: 30224 - protein, 53 aa, Homo sapiens
  Payload ID: 5918
  Gene Symbol: FAM3A
  Gene Name: family with sequence similarity 3, member A
  ENSP ID: ENSP00000407870
MRLAGPLRIVVLVVSVGVTWIVVSILLGGPGSGFPRIQQLFTSPESSVTADLR

SEQ ID NO: 30225 - protein, 21 aa, Homo sapiens
  Payload ID: 5918
  Gene Symbol: FAM3A
  Gene Name: family with sequence similarity 3, member A
  ENSP ID: ENSP00000408973
MRLAGPESSVTAAPRARKYKC

SEQ ID NO: 30226 - protein, 77 aa, Homo sapiens
  Payload ID: 5918
  Gene Symbol: FAM3A
  Gene Name: family with sequence similarity 3, member A
  ENSP ID: ENSP00000415843
MRLAGPLRIVVLVVSVGVTWIVVSILLGGPGSGFPRIQQLFTSPESSVTAVTENPSVLGPCGLTSRTQSMEVSPASA

SEQ ID NO: 30227 - protein, 230 aa, Homo sapiens; identical to SEQ ID NO: 30212
  Payload ID: 5918
  Gene Symbol: FAM3A
  Gene Name: family with sequence similarity 3, member A
  Uniprot ID: P98173
  ENSP ID: ENSP00000416146

SEQ ID NO: 30228 - protein, 70 aa, Homo sapiens; identical to SEQ ID NO: 30218
  Payload ID: 5918
  Gene Symbol: FAM3A
  Gene Name: family with sequence similarity 3, member A
  ENSP ID: ENSP00000478650

SEQ ID NO: 30229 - protein, 235 aa, Homo sapiens
  Payload ID: 5919
  Gene Symbol: FAM3B
  Gene Name: family with sequence similarity 3, member B
  Uniprot ID: P58499
  ENSP ID: ENSP00000350673
MRPLAGGLLKVVFVVFASLCAWYSGYLLAELIPDAPLSSAAYSIRSIGERPVLKAPVPKRQKCDHWTPCPSDTYAYRLLSGGGRSKYAKICFEDNLLMGEQLGNVARGINIAIVNYVTGNVTATRCFDMYEGDNSGPMTKFIQSAAPKSLLFMVTYDDGSTRLNNDAKNAIEALGSKEIRNMKFRSSWVFIAAKGLELPSEIQREKINHSDAKNNRYSGWPAEIQIEGCIPKERS

SEQ ID NO: 30230 - protein, 258 aa, Homo sapiens
  Payload ID: 5919
  Gene Symbol: FAM3B
  Gene Name: family with sequence similarity 3, member B
  ENSP ID: ENSP00000381641
MKSHRGDGEGQGPGPPPSRSQQLLGVLSAGLLKVVFVVFASLCAWYSGYLLAELIPDAPLSSAAYSIRSIGERPVLKAPVPKRQKCDHWTPCPSDTYAYRLLSGGGRSKYAKICFEDNLLMGEQLGNVARGINIAIVNYVTGNVTATRCFDMYEGDNSGPMTKFIQSAAPKSLLFMVTYDDGSTRLNNDAKNAIEALGSKEIRNMKFRSSWVFIAAKGLELPSEIQREKINHSDAKNNRYSGWPAEIQIEGCIPKERS

SEQ ID NO: 30231 - protein, 187 aa, Homo sapiens
  Payload ID: 5919
  Gene Symbol: FAM3B
  Gene Name: family with sequence similarity 3, member B
  Uniprot ID: P58499
  ENSP ID: ENSP00000381642
MRPLAGAPVPKRQKCDHWTPCPSDTYAYRLLSGGGRSKYAKICFEDNLLMGEQLGNVARGINIAIVNYVTGNVTATRCFDMYEGDNSGPMTKFIQSAAPKSLLFMVTYDDGSTRLNNDAKNAIEALGSKEIRNMKFRSSWVFIAAKGLELPSEIQREKINHSDAKNNRYSGWPAEIQIEGCIPKERS

SEQ ID NO: 30232 - protein, 274 aa, Homo sapiens
  Payload ID: 5919
  Gene Symbol: FAM3B
  Gene Name: family with sequence similarity 3, member B
  Uniprot ID: P58499
  ENSP ID: ENSP00000381646
MRPLAGGSRWACWLTRCLISCFDINVQGRLLVKLRPKPTANTTCPGLLKVVFVVFASLCAWYSGYLLAELIPDAPLSSAAYSIRSIGERPVLKAPVPKRQKCDHWTPCPSDTYAYRLLSGGGRSKYAKICFEDNLLMGEQLGNVARGINIAIVNYVTGNVTATRCFDMYEGDNSGPMTKFIQSAAPKSLLFMVTYDDGSTRLNNDAKNAIEALGSKEIRNMKFRSSWVFIAAKGLELPSEIQREKINHSDAKNNRYSGWPAEIQIEGCIPKERS

SEQ ID NO: 30233 - protein, 227 aa, Homo sapiens
  Payload ID: 5920
  Gene Symbol: FAM3C
  Gene Name: family with sequence similarity 3, member C
  Uniprot ID: Q92520
  ENSP ID: ENSP00000353025
MRVAGAAKLVVAVAVFLLTFYVISQVFEIKMDASLGNLFARSALDTAARSTKPPRYKCGISKACPEKHFAFKMASGAANVVGPKICLEDNVLMSGVKNNVGRGINVALANGKTGEVLDTKYFDMWGGDVAPFIEFLKAIQDGTIVLMGTYDDGATKLNDEARRLIADLGSTSITNLGFRDNWVFCGGKGIKTKSPFEQHIKNNKDTNKYEGWPEVVEMEGCIPQKQD

SEQ ID NO: 30234 - protein, 151 aa, Homo sapiens
  Payload ID: 5920
  Gene Symbol: FAM3C
  Gene Name: family with sequence similarity 3, member C
  ENSP ID: ENSP00000408636
MRVAGAAKLVVAVAVFLLTFYVISQVFEIKMDASLGNLFARSALDTAARSTKPPRYKCGISKACPEKHFAFKMASGAANVVGPKICLEDNVLMSGVKNNVGRGINVALANGKTGEVLDTKYFDMWGGDVAPFIEFLKAIQDGTIVLMGTYD

SEQ ID NO: 30235 - protein, 109 aa, Homo sapiens
  Payload ID: 5920
  Gene Symbol: FAM3C
  Gene Name: family with sequence similarity 3, member C
  ENSP ID: ENSP00000414940
MDASLGNLFARSALDTAARSTKPPRYKCGISKACPEKHFAFKMASGAANVVGPKICLEDNVLMSGVKNNVGRGINVALANGKTGEVLDTKYFDMWGGDVAPFIEFLKAI

SEQ ID NO: 30236 - protein, 224 aa, Homo sapiens
  Payload ID: 5921
  Gene Symbol: FAM3D
  Gene Name: family with sequence similarity 3, member D
  Uniprot ID: Q96BQ1
  ENSP ID: ENSP00000351632
MRVSGVLRLLALIFAIVTTWMFIRSYMSFSMKTIRLPRWLAASPTKEIQVKKYKCGLIKPCPANYFAFKICSGAANVVGPTMCFEDRMIMSPVKNNVGRGLNIALVNGTTGAVLGQKAFDMYSGDVMHLVKFLKEIPGGALVLVASYDDPGTKMNDESRKLFSDLGSSYAKQLGFRDSWVFIGAKDLRGKSPFEQFLKNSPDTNKYEGWPELLEMEGCMPPKPF

SEQ ID NO: 30237 - protein, 151 aa, Homo sapiens
  Payload ID: 5921
  Gene Symbol: FAM3D
  Gene Name: family with sequence similarity 3, member D
  ENSP ID: ENSP00000417099
MRVSGVLRLLALIFAIVTTWMFIRSYMSFSMKTIRLPRWLASPTKEIQVKKYKCGLIKPCPANYFAFKICSGAANVVGPTMCFEDRMIMSPVKNNVGRGLNIALVNGTTGAVLGQKAFDMYSGDVMHLVKFLKEIPGGALVLVASYDDPGT

SEQ ID NO: 30238 - protein, 112 aa, Homo sapiens
  Payload ID: 5921
  Gene Symbol: FAM3D
  Gene Name: family with sequence similarity 3, member D
  ENSP ID: ENSP00000417453
MRVSASPTKEIQVKKYKCGLIKPCPANYFAFKICSGAANVVGPTMCFEDRMIMSPVKNNVGRGLNIALVNGTTGAVLGQKAFDMYSGDVMHLVKFLKEIPGGALVLVASYDD

SEQ ID NO: 30239 - protein, 39 aa, Homo sapiens
  Payload ID: 5921
  Gene Symbol: FAM3D
  Gene Name: family with sequence similarity 3, member D
  ENSP ID: ENSP00000418414
MRVSAPSPQPPSCRRVRSAFPLTRFCLLSSSLAHQGDPG

SEQ ID NO: 30240 - protein, 102 aa, Homo sapiens
  Payload ID: 5921
  Gene Symbol: FAM3D
  Gene Name: family with sequence similarity 3, member D
  ENSP ID: ENSP00000418982
MRVSGVLRLLALIFAIVTTWMFIRSYMSFSMKTIRLPRWLAASPTKEIQVKKYKCGLIKPCPANYFAFKICSGAANVVGPTMCFEDRMIMSPVKNNVGRGLN

SEQ ID NO: 30241 - protein, 112 aa, Homo sapiens
  Payload ID: 5922
  Gene Symbol: FAM32A
  Gene Name: family with sequence similarity 32, member A
  Uniprot ID: Q9Y421
  ENSP ID: ENSP00000263384
MEAYEQVQKGPLKLKGVAELGVTKRKKKKKDKDKAKLLEAMGTSKKNEEEKRRGLDKRTPAQAAFEKMQEKRQMERILKKASKTHKQRVEDFNRHLDTLTEHYDIPKVSWTK

SEQ ID NO: 30242 - protein, 94 aa, Homo sapiens
  Payload ID: 5922
  Gene Symbol: FAM32A
  Gene Name: family with sequence similarity 32, member A
  ENSP ID: ENSP00000464939
MEAYEQVQKGPLKLKGVAELGVTKRKKKKKDKDKAKLLEAMGTSKKNEEEKRRGLDKRTPAQAAFEKMQEKRDFNRHLDTLTEHYDIPKVSWTK

SEQ ID NO: 30243 - protein, 92 aa, Homo sapiens
  Payload ID: 5922
  Gene Symbol: FAM32A
  Gene Name: family with sequence similarity 32, member A
  Uniprot ID: Q9Y421
  ENSP ID: ENSP00000465969
MSFSRKKKKKDKDKAKLLEAMGTSKKNEEEKRRGLDKRTPAQAAFEKMQEKRQMERILKKASKTHKQRVEDFNRHLDTLTEHYDIPKVSWTK

SEQ ID NO: 30244 - protein, 82 aa, Homo sapiens
  Payload ID: 5922
  Gene Symbol: FAM32A
  Gene Name: family with sequence similarity 32, member A
  ENSP ID: ENSP00000466294
EQVQKGPLKLKGVAELGVTKRKKKKKDKDKAKLLEAMGTSKKNEEEKRRGLDKRTPAQAAFEKMQEKRRCGFTMLARLISNF

SEQ ID NO: 30245 - protein, 107 aa, Homo sapiens
  Payload ID: 5922
  Gene Symbol: FAM32A
  Gene Name: family with sequence similarity 32, member A
  ENSP ID: ENSP00000467027
MEAYEQVQKGPLKLKGVAELGVTKRKKKKKDKDKAKLLEAMGTSKKNEEEKRRGLDKRTPAQAAFEKMQEKRQGHQTSCTATGFQGHKANAARSYAWTQNWYCVPSS

SEQ ID NO: 30246 - protein, 835 aa, Homo sapiens
  Payload ID: 5923
  Gene Symbol: FAM35A
  Gene Name: family with sequence similarity 35, member A
  Uniprot ID: Q86V20
  ENSP ID: ENSP00000298784
MSGGSQVHIFWGAPIAPLKITVSEDTASLMSVADPWKKIQLLYSQHSLYLKDEKQHKNLENYKVPESIGSPDLSGHFLANCMNRHVHVKDDFVRSVSETQNIESQKIHSSRLSDITSSNMQICGFKSTVPHFTEEEKYQKLLSENKIRDEQPKHQPDICGKNFNTNLFQLGHKCAAVLDLVCSTEKINIGPEVVQRECVPTEYHEIQNQCLGLFSSNAVDKSRSEAAVRKVSDLKISTDTEFLSIITSSQVAFLAQKKDKRRSPVNKGNVNMETEPKASYGEIRIPEENSIQLDGFTEAYESGQNQAYSLELFSPVCPKTENSRIHINSDKGLEEHTGSQELFSSEDELPPNEIRIELCSSGILCSQLNTFHKSAIKRSCTSEDKVGQSEALSRVLQVAKKMKLISNGGDSAVEMDRRNVSEFKSIKKTSLIKNCDSKSQKYNCLVMVLSPCHVKEINIKFGPNSGSKVPLATVTVIDQSETKKKVFLWRTAAFWAFTVFLGDIILLTDVVIHEDQWIGETVLQSTFSSQLLNLGSYSSIQPEEYSSVVSEVVLQDLLAYVSSKHSYLRDLPPRQPQRVNSIDFVELEHLQPDVLVHAVLRVVDFTILTEAVYSYRGQKQKKVMLTVEQAQDQHYALVLWGPGAAWYPQLQRKKGVVLIKAQISELAFPITASQKIALNAHSSLKSIFSSLPNIVYTGCAKCGLELETDENRIYKQCFSCLPFTMKKIYYRPALMTAIDGRHDVCIRVESKLIEKILLNISADCLNRVIVPSSEITYGMVVADLFHSLLAVSAEPCVLKIQSLFVLDENSYPLQQDFSLLDFYPDIVKHGANARL

SEQ ID NO: 30247 - protein, 904 aa, Homo sapiens
  Payload ID: 5923
  Gene Symbol: FAM35A
  Gene Name: family with sequence similarity 35, member A
  Uniprot ID: Q86V20
  ENSP ID: ENSP00000298786
MSGGSQVHIFWGAPIAPLKITVSEDTASLMSVADPWKKIQLLYSQHSLYLKDEKQHKNLENYKVPESIGSPDLSGHFLANCMNRHVHVKDDFVRSVSETQNIESQKIHSSRLSDITSSNMQICGFKSTVPHFTEEEKYQKLLSENKIRDEQPKHQPDICGKNFNTNLFQLGHKCAAVLDLVCSTEKINIGPEVVQRECVPTEYHEIQNQCLGLFSSNAVDKSRSEAAVRKVSDLKISTDTEFLSIITSSQVAFLAQKKDKRRSPVNKGNVNMETEPKASYGEIRIPEENSIQLDGFTEAYESGQNQAYSLELFSPVCPKTENSRIHINSDKGLEEHTGSQELFSSEDELPPNEIRIELCSSGILCSQLNTFHKSAIKRSCTSEDKVGQSEALSRVLQVAKKMKLISNGGDSAVEMDRRNVSEFKSIKKTSLIKNCDSKSQKYNCLVMVLSPCHVKEINIKFGPNSGSKVPLATVTVIDQSETKKKVFLWRTAAFWAFTVFLGDIILLTDVVIHEDQWIGETVLQSTFSSQLLNLGSYSSIQPEEYSSVVSEVVLQDLLAYVSSKHSYLRDLPPRQPQRVNSIDFVELEHLQPDVLVHAVLRVVDFTILTEAVYSYRGQKQKKVMLTVEQAQDQHYALVLWGPGAAWYPQLQRKKGYIWEFKYLFVQCNYTLENLELHTTPWSSCECLFDDDIRAITFKAKFQKSAPSFVKISDLATHLEDKCSGVVLIKAQISELAFPITASQKIALNAHSSLKSIFSSLPNIVYTGCAKCGLELETDENRIYKQCFSCLPFTMKKIYYRPALMTAIDGRHDVCIRVESKLIEKILLNISADCLNRVIVPSSEITYGMVVADLFHSLLAVSAEPCVLKIQSLFVLDENSYPLQQDFSLLDFYPDIVKHGANARL

SEQ ID NO: 30248 - protein, 93 aa, Homo sapiens
  Payload ID: 5923
  Gene Symbol: FAM35A
  Gene Name: family with sequence similarity 35, member A
  ENSP ID: ENSP00000475647
MSGGSQVHIFWGAPIAPLKITVSEDTASLMSVADPWKKIQLLYSQHSLYLKDEKQHKNLENYKVPESIGSPDLSGHFLANCMNRHVHVKDDFV

SEQ ID NO: 30249 - protein, 423 aa, Homo sapiens
  Payload ID: 5924
  Gene Symbol: FAM43A
  Gene Name: family with sequence similarity 43, member A
  Uniprot ID: Q8N2R8
  ENSP ID: ENSP00000371397
MLPWKKHKFELLAEAPPRQASKPKGYAVSLHYSALSSLARACPEGALSRVGSMFRSKRKKLHITSEDPTYTVLYLGNATTIQARGDGCTDLAVGKIWSKSEAGRQGTKMKLTVSAQGIRMVHAEERALRRPGHLYLLHRVTYCVADARLPKVFAWVYRHELKHKAVMLRCHAVLVSKPEKAQAMALLLYQTSANALAEFKRLKRRDDARHQQQELVGAHTIPLVPLRKLLLHGPCCYKPPVERSRSAPKLGSITEDLLGEQLEQELQEEEEEEQPEGCPEEEENRAAEGDPAEEEAEAQRALVVAMHFECGDLLDTLENGRGEALGGGGGSLGPGAGPPPLLLGSASDMKAELSQLISDLGELSFGNDVRTLQADLRVTRLLSGDSTGSESSIEGGGPDATSATAGDSSRQADGASADEPHSG

SEQ ID NO: 30250 - protein, 329 aa, Homo sapiens
  Payload ID: 5925
  Gene Symbol: FAM43B
  Gene Name: family with sequence similarity 43, member B
  Uniprot ID: Q6ZT52
  ENSP ID: ENSP00000331397
MLPWRRNKFVLVEDEAKCKAKSLSPGLAYTSLLSSFLRSCPDLLPDWPLERLGRVFRSRRQKVELNKEDPTYTVWYLGNAVTLHAKGDGCTDDAVGKIWARCGPGGGTKMKLTLGPHGIRMQPCERSAAGGSGGRRPAHAYLLPRITYCTADGRHPRVFAWVYRHQARHKAVVLRCHAVLLARAHKARALARLLRQTALAAFSDFKRLQRQSDARHVRQQHLRAGGAAASVPRAPLRRLLNAKCAYRPPPSERSRGAPRLSSIQEEDEEEEEDDAEEQEGGVPQRERPEVLSLARELRTCSLRGAPAPPPPAQPRRWKAGPRERAGQAR

SEQ ID NO: 30251 - protein, 357 aa, Homo sapiens
  Payload ID: 5926
  Gene Symbol: FAM45A
  Gene Name: family with sequence similarity 45, member A
  Uniprot ID: Q8TCE6
  ENSP ID: ENSP00000354688
MAAAEVADTQLMLGVGLIEKDTNGEVLWVWCYPSTTATLRNLLLRKCCLTDENKLLHPFVFGQYRRTWFYITTIEVPDSSILKKVTHFSIVLTAKDFNPEKYAAFTRILCRMYLKHGSPVKMMESYIAVLTKGICQSEENGSFLSKDFDARKAYLAGSIKDIVSQFGMETVILHTALMLKKRIVVYHPKIEAVQEFTRTLPALVWHRQDWTILHSYVHLNADELEALQMCTGYVAGFVDLEVSNRPDLYDVFVNLAESEITIAPLAKEAMAMGKLHKEMGQLIVQSAEDPEKSESHVIQDIALKTREIFTNLAPFSEVSADGEKRVLNLEALKQKRFPPATENFLYHLAAAEQMLKI

SEQ ID NO: 30252 - protein, 221 aa, Homo sapiens
  Payload ID: 5926
  Gene Symbol: FAM45A
  Gene Name: family with sequence similarity 45, member A
  ENSP ID: ENSP00000444309
MAAAEVADTQLMLGVGLIEKDTNGEVLWVWCYPSTTATLRNLLLRKCCLTDENKLLHPFVFGQYRRTWFYITTIEVPDSSILKKVTHFSIVLTAKDFNPEKYAAFTRILCRMYLKHGSPVKMMESYIAVLTKGICQSEENGSFLSKDFDARKAYLAGSIKDIVSQFGMNCYLTHSTDAKEKNCGVSPQDRSGPGVHQDSACPGVAPTGLDHPSLLRAPQRR

SEQ ID NO: 30253 - protein, 442 aa, Homo sapiens
  Payload ID: 5927
  Gene Symbol: FAM46A
  Gene Name: family with sequence similarity 46, member A
  Uniprot ID: Q96IP4
  ENSP ID: ENSP00000318298
MAEGEGYFAMSEDELACSPYIPLGGDFGGGDFGGGDFGGGDFGGGGSFGGHCLDYCESPTAHCNVLNWEQVQRLDGILSETIPIHGRGNFPTLELQPSLIVKVVRRRLAEKRIGVRDVRLNGSAASHVLHQDSGLGYKDLDLIFCADLRGEGEFQTVKDVVLDCLLDFLPEGVNKEKITPLTLKEAYVQKMVKVCNDSDRWSLISLSNNSGKNVELKFVDSLRRQFEFSVDSFQIKLDSLLLFYECSENPMTETFHPTIIGESVYGDFQEAFDHLCNKIIATRNPEEIRGGGLLKYCNLLVRGFRPASDEIKTLQRYMCSRFFIDFSDIGEQQRKLESYLQNHFVGLEDRKYEYLMTLHGVVNESTVCLMGHERRQTLNLITMLAIRVLADQNVIPNVANVTCYYQPAPYVADANFSNYYIAQVQPVFTCQQQTYSTWLPCN

SEQ ID NO: 30254 - protein, 461 aa, Homo sapiens
  Payload ID: 5927
  Gene Symbol: FAM46A
  Gene Name: family with sequence similarity 46, member A
  Uniprot ID: Q96IP4
  ENSP ID: ENSP00000358769
MHQRYFWTDQGQVALGGHYMAEGEGYFAMSEDELACSPYIPLGGDFGGGDFGGGDFGGGDFGGGGSFGGHCLDYCESPTAHCNVLNWEQVQRLDGILSETIPIHGRGNFPTLELQPSLIVKVVRRRLAEKRIGVRDVRLNGSAASHVLHQDSGLGYKDLDLIFCADLRGEGEFQTVKDVVLDCLLDFLPEGVNKEKITPLTLKEAYVQKMVKVCNDSDRWSLISLSNNSGKNVELKFVDSLRRQFEFSVDSFQIKLDSLLLFYECSENPMTETFHPTIIGESVYGDFQEAFDHLCNKIIATRNPEEIRGGGLLKYCNLLVRGFRPASDEIKTLQRYMCSRFFIDFSDIGEQQRKLESYLQNHFVGLEDRKYEYLMTLHGVVNESTVCLMGHERRQTLNLITMLAIRVLADQNVIPNVANVTCYYQPAPYVADANFSNYYIAQVQPVFTCQQQTYSTWLPCN

SEQ ID NO: 30255 - protein, 523 aa, Homo sapiens
  Payload ID: 5927
  Gene Symbol: FAM46A
  Gene Name: family with sequence similarity 46, member A
  ENSP ID: ENSP00000358771
MQMRRVWRTCRSGPRKRREARYKKSTEDIFPAQLLKLQRHERVWQQEPPVRDHRSWGGSGAGGVAGREWTDQGQVALGGHYMAEGEGYFAMSEDELACSPYIPLGGDFGGGDFGGGDFGGGDFGGGGSFGGHCLDYCESPTAHCNVLNWEQVQRLDGILSETIPIHGRGNFPTLELQPSLIVKVVRRRLAEKRIGVRDVRLNGSAASHVLHQDSGLGYKDLDLIFCADLRGEGEFQTVKDVVLDCLLDFLPEGVNKEKITPLTLKEAYVQKMVKVCNDSDRWSLISLSNNSGKNVELKFVDSLRRQFEFSVDSFQIKLDSLLLFYECSENPMTETFHPTIIGESVYGDFQEAFDHLCNKIIATRNPEEIRGGGLLKYCNLLVRGFRPASDEIKTLQRYMCSRFFIDFSDIGEQQRKLESYLQNHFVGLEDRKYEYLMTLHGVVNESTVCLMGHERRQTLNLITMLAIRVLADQNVIPNVANVTCYYQPAPYVADANFSNYYIAQVQPVFTCQQQTYSTWLPCN

SEQ ID NO: 30256 - protein, 88 aa, Homo sapiens
  Payload ID: 5927
  Gene Symbol: FAM46A
  Gene Name: family with sequence similarity 46, member A
  ENSP ID: ENSP00000401884
  MOD_RES (1)..(1): Any amino acid
XKRIGVRDVRLNGSAASHVLHQDSGLGYKDLDLIFCADLRGEGEFQTVKDVVLDCLLDFLPEGVNKEKITPLTLKEESHTTTYFLNIS

SEQ ID NO: 30257 - protein, 86 aa, Homo sapiens
  Payload ID: 5927
  Gene Symbol: FAM46A
  Gene Name: family with sequence similarity 46, member A
  ENSP ID: ENSP00000404872
  MOD_RES (1)..(1): Any amino acid
XQDSGLGYKDLDLIFCADLRGEGEFQTVKDVVLDCLLDFLPEGVNKEKITPLTLKVFHRLLRHWRAAEKTGVLFAEPLCGIGRPQV

SEQ ID NO: 30258 - protein, 425 aa, Homo sapiens
  Payload ID: 5928
  Gene Symbol: FAM46B
  Gene Name: family with sequence similarity 46, member B
  Uniprot ID: Q96A09
  ENSP ID: ENSP00000289166
MMPSESGAERRDRAAAQVGTAAATAVATAAPAGGGPDPEALSAFPGRHLSGLSWPQVKRLDALLSEPIPIHGRGNFPTLSVQPRQIVQVVRSTLEEQGLHVHSVRLHGSAASHVLHPESGLGYKDLDLVFRVDLRSEASFQLTKAVVLACLLDFLPAGVSRAKITPLTLKEAYVQKLVKVCTDSDRWSLISLSNKSGKNVELKFVDSVRRQFEFSIDSFQIILDSLLLFGQCSSTPMSEAFHPTVTGESLYGDFTEALEHLRHRVIATRSPEEIRGGGLLKYCHLLVRGFRPRPSTDVRALQRYMCSRFFIDFPDLVEQRRTLERYLEAHFGGADAARRYACLVTLHRVVNESTVCLMNHERRQTLDLIAALALQALAEQGPAATAALAWRPPGTDGVVPATVNYYVTPVQPLLAHAYPTWLPCN

SEQ ID NO: 30259 - protein, 391 aa, Homo sapiens
  Payload ID: 5929
  Gene Symbol: FAM46C
  Gene Name: family with sequence similarity 46, member C
  Uniprot ID: Q5VWP2
  ENSP ID: ENSP00000358458
MAEESSCTRDCMSFSVLNWDQVSRLHEVLTEVVPIHGRGNFPTLEITLKDIVQTVRSRLEEAGIKVHDVRLNGSAAGHVLVKDNGLGCKDLDLIFHVALPTEAEFQLVRDVVLCSLLNFLPEGVNKLKISPVTLKEAYVQKLVKVCTDTDRWSLISLSNKNGKNVELKFVDSIRRQFEFSVDSFQIILDSLLFFYDCSNNPISEHFHPTVIGESMYGDFEEAFDHLQNRLIATKNPEEIRGGGLLKYSNLLVRDFRPTDQEEIKTLERYMCSRFFIDFPDILEQQRKLETYLQNHFAEEERSKYDYLMILRRVVNESTVCLMGHERRQTLNLISLLALRVLAEQNIIPSATNVTCYYQPAPYVSDGNFSNYYVAHPPVTYSQPYPTWLPCN

SEQ ID NO: 30260 - protein, 389 aa, Homo sapiens
  Payload ID: 5930
  Gene Symbol: FAM46D
  Gene Name: family with sequence similarity 46, member D
  Uniprot ID: Q8NEK8
  ENSP ID: ENSP00000308575
MSEIRFTNLTWDQVITLDQVLDEVIPIHGKGNFPTMEVKPKDIIHVVKDQLIGQGIIVKDARLNGSVASYILASHNGISYKDLDVIFGVELPGNEEFQVVKDAVLDCLLDFLPKDVKKEKLSPDIMKDAYVQKLVKVCNGHDCWSLISLSNNTGKNLELKFVSSLRRQFEFSVDSFQIVLDPMLDFYSDKNAKLTKESYPVVVAESMYGDFQEAMTHLQHKLICTRKPEEIRGGGLLKYCSLLVHGFKPACMSEIKNLERYMCSRFFIDFPHIEEQQKKIESYLHNHFIGEGMTKYDYLMTLHGVVNESTVCLMSYERRQILHLITMMALKVLGELNILPNTQKVTCFYQPAPYFAAEARYPIYVIPEPPPVSFQPYHPLHFRGSNGMS

SEQ ID NO: 30261 - protein, 389 aa, Homo sapiens; identical to SEQ ID NO: 30260
  Payload ID: 5930
  Gene Symbol: FAM46D
  Gene Name: family with sequence similarity 46, member D
  Uniprot ID: Q8NEK8
  ENSP ID: ENSP00000443410

SEQ ID NO: 30262 - protein, 791 aa, Homo sapiens
  Payload ID: 5931
  Gene Symbol: FAM47A
  Gene Name: family with sequence similarity 47, member A
  Uniprot ID: Q5JRC9
  ENSP ID: ENSP00000345029
MGDQRLQDWLRSPGMDSKPWYCNKRPSKCFAKCKHRRLRFPPMDTQNWVFVKEGMDDFRYGCPSPEDTLVCRRDEFLLPKISLRGPQADPKSGQKKLLKKAALFSKLSPAQLARKAFVEQVEAQLMAKHPLAMYPNLGEDMPPDLLLQVLKHLDPERELEDAWACCETQEKTTEVPTEPGKHPCGEFCLKPPETPVSHLLPEPPETGVSHLSPEPPKTPVSSLRPEPPETGVSHLRPEPPETGVSHIRPGPPITRRRSSLLRQLLKLDSERKLEDARAPCEGREKTTDEPTEPGKYPCGKFCPRPFETPLSHLRQEPPKTPVSSLRPEPPETGESHLRLEHSKTRRGSSLRSEPSETGVSRLRLAPPKTRRGSSLHAEPSKTGVSHLSPEPPKTEVSHLHPVPPKTGVCHLRLEPPDTSQVSNLLLYILKVLDSGRTLKDVWDRCEARVKKTKEPTEPHKSPCGEPCLQPPETQVSHPHPEHPKTRRRSSLHSQPPKTRRTSSLRSEPPKTRRTSSLRSEPPKTRRTSSLGPEPPKTRRVSSLRPELPKSRRVSSLHPEPPKAPESHQFSEPPKIRASYIKELLQEDTPSTKECVSDSLQYRYTSEKLREFFKWAGDLGADEESIRNLFDFTPKYRATHEDQKFKKVKECSSELKYSMELDEKDEDKFFSQEKYWGRKFHTPSNSYTAQRVKMKYGAWYLKPKLWKKLRSDEPLIDPKLLLKKPDEPDVLDDLYGPIAFKDFILSKGYEMPGIIQRLFARRGWTYDSVKTPIQRAMIFYKYKEIVEASEED

SEQ ID NO: 30263 - protein, 778 aa, Homo sapiens [sequence omitted]

SEQ ID NO: 30264 - protein, 645 aa, Homo sapiens
  Payload ID: 5932
  Gene Symbol: FAM47B
  Gene Name: family with sequence similarity 47, member B
  Uniprot ID: Q8NA70
  ENSP ID: ENSP00000328307
MGDRRPQDRPRSQGMDSKPWYCDKPPSKYFAKRKHRRLRFPPVDTQNWVFVTEGMDDFRYACQSPEDTLVCRRDEFLLPKISLRGPQADRKSRKKKLLKKAALFSELSPVQPARKAFVEEVEAQLMTKHPLAMYPNLGKDMPPDLLLQVLKQLDPERKLEDAWARCEAREKTTEVPTESGKYPCGESCPRPPETPVSRLRPQLPKTPVSSRRPEPPKTRVSSLRPEPPKTRVSSLHPEPPETRASHLRVDPPETGVSHLCPEPPKTLVSSVHPEPPDTGASHLCPEPPETRVSHLHPEPPETGVSHLRPEPSKTQVSSLCPEPPEAGVSHLCLEPPNTHRVSSFLLQVLKLDSEKKLEDARARCEGQEMTTEELTKPGKYHFWESCPRPFESRMPHLRLVLPITRRMASLCLKPPKTRRVSSLCPEPTKTGASHLKELFQEDTPSTMECVSDSLQRRHTSRKLRDFKWAGDLGVNEESISSLFDFTPECRTTDQDQKIKKANECASRLMYGMELDDMDEVEFLRIKYWDRRRRAAPHSYSAQRGRIRYGPWYFEPKLGKKLRSDEPLIDPKPVLEKPDEPDILDGLYGPIAFKDFILSKGYRMPGVIEKLFAKKGWTYDSVKTPIQRAVQVYKYKEDVTDASKED

SEQ ID NO: 30265 - protein, 1035 aa, Homo sapiens
  Payload ID: 5933
  Gene Symbol: FAM47C
  Gene Name: family with sequence similarity 47, member C
  Uniprot ID: Q5HY64
  ENSP ID: ENSP00000367913
MGDQRPQDRPSSPGMDSTPWYCDKPPSKYFAKRKHRRLRFPPVDTQNWVFVTEGMDDFRYGCQSPEDTLVCRRDEFLLPKISLRGPQADPKSRKKKLLKKAALFSKLSPAQPARKAFVEEVEAQLMTKHPLAMYPNLGEDMPPDLLLQVLKPLDPERKLEDAGSCEGQEKTTDEPTEPGKYPCGEFSPRPPETRVSCLPPEPPKTPVSSLRPEPPETGVSHLRPQPPKTQVSSLHLEPPETGVSHLRPEPPKTQVSSLHLEPPETGVSHLYLEPPGTGVSHLCPEPPKTRVSHLHREPPETGVPDLCLEPPKSRVSHLRPEPSETGVSHLHPEPPKTLVSSLHPEPPETGVSHLCPEPPETRVSPLRQLPPEAGVSHLCPEPPKTRVPPLRPETPKNGVSPLFPEPPKTRISNLRSEPPKIGVSHLCLEPPKTRGSHLRPEPPETGVSHLRPEPPKTRVSSLHLEPPETGVSHLCPEPPEKDVSHLRPEPPDTGVSHLCPEPPKTRVSHLRPEPSETGVSHLRPEPPKILVSSLHQAPPESSVSHLRPEPPETGVSHLRPEPPKTRMYSLRPEPPDTGVSHLCPEPPKTRVSSLPPEPPETGVSHLCPEPPETRVSHLRPEPPETGVSHLRPEPPKTRMYSLRPEPPNTGVSHLCPEPPKTRVSSLPPEPPETGVSHLCPEPPETRVSHLRPEPPETGVSRLHPEPPKTRVSSLHAEPPESRVSHLCPEPPETGVSHLRPEPPKPRVSSLRPEPLETRVSHLRPEPPETGVSHLHPELPKPRVSSLHLEPPKTRRVSSLRLEPPKTGRVSSLCPEPTKTGASHLKELFQEGTSSTMECVSDSLQRRHTSRKLRDFKWAGDLGVNEESISSLFDFTPECRATYQDQKNKKANECSSGLKYSMELDEMDEVKFFSQEKDLDGKIQNAPNSHSAQHVKMGYGAWYLKPKLGKKLRSDEPLIDPKLVLEKPDEPDILDGLYGPIAFKDFILSKGYEMPGIIQRLFARRGWTYDSVKTPIQRAMQVYKYKEDVTDASEED

SEQ ID NO: 30266 - protein, 393 aa, Homo sapiens
  Payload ID: 5934
  Gene Symbol: FAM47E
  Gene Name: family with sequence similarity 47, member E
  Uniprot ID: Q6ZV65
  ENSP ID: ENSP00000409423
MADRRRRLRPGTLAPVREGVNCRSRCFTKHKNGLKFPTSLHSRQLVFPRKGLDDFRKGCPPCTGLVTQVPVEGFLPQIYHRAPQLAPKKRQIKLLKEADVLSKLSPAQQARKAFLEDVEAHLTPHPLALYLNLEEAMPIELLSKVLEVLDPDRKLEDTWAYCQDTRKGMKEPTKLLKKHSTQVYLGPSKKTSVSNAGQWLYEEKPHKMDLLHENGPRPGLHENGISDIDEEFILKQFDIDYETKPSHDALHTMKLNQVPLELKRSVGLSKLQETEFFQKLGYERKLQKPQNPYKPKWVKMRYGAWYLNPKLWKKQRVDEPLVDPEVSHKAQEENFKKELQEQEELLADLHGTVAFKDFILSRGYRTPRFLENMYIGKECKRACNKTPIKRTQA

SEQ ID NO: 30267 - protein, 295 aa, Homo sapiens
  Payload ID: 5934
  Gene Symbol: FAM47E
  Gene Name: family with sequence similarity 47, member E
  Uniprot ID: Q6ZV65
  ENSP ID: ENSP00000422262
MQMSVPCVLSSLQNHEPNKPLFTTQSQLLSKVLEVLDPDRKLEDTWAYCQDTRKGMKEPTKLLKKHSTQVYLGPSKKTSVSNAGQWLYEEKPHKMDLLHENGPRPGLHENVCKAVSDFCKWVTTFGISDIDEEFILKQFDIDYETKPSHDALHTMKLNQVPLELKRSVGLSKLQETEFFQKLGYERKLQKPQNPYKPKWVKMRYGAWYLNPKLWKKQRVDEPLVDPEVSHKAQEENFKKELQEQEELLADLHGTVAFKDFILSRGYRTPRFLENMYIGKECKRACNKTPIKRTQA

SEQ ID NO: 30268 - protein, 133 aa, Homo sapiens
  Payload ID: 5934
  Gene Symbol: FAM47E
  Gene Name: family with sequence similarity 47, member E
  ENSP ID: ENSP00000422559
MPASMFCLDDLGPHIELGPGGCISLSRKGHVQEWKMCKKGRRRHFTEKETLLSKVLEVLDPDRKLEDTWAYCQDTRKGMKEPTKLLKKHSTQVYLGPSKKTSVSNAGQWLYEEKPHKMDLLHENGPRPGLHEN

SEQ ID NO: 30269 - protein, 124 aa, Homo sapiens
  Payload ID: 5934
  Gene Symbol: FAM47E
  Gene Name: family with sequence similarity 47, member E
  ENSP ID: ENSP00000476166
  MOD_RES (1)..(1): Any amino acid
XVEAHLTPHPLALYLNLEEAMPIELLSKVLEVLDPDRKLEDTWAYCQDTRKGMKEPTKLLKKHSTQVYLGPSKKTSVSNAGQWLYEEKPHKMDLLHENGPRPGLHENVCKAVSDFCKWVTTFVS

SEQ ID NO: 30270 - protein, 323 aa, Homo sapiens
  Payload ID: 5935
  Gene Symbol: FAM49A
  Gene Name: family with sequence similarity 49, member A
  Uniprot ID: Q9H0Q0
  ENSP ID: ENSP00000370724
MGNLLKVLTREIENYPHFFLDFENAQPTEGEREIWNQISAVLQDSESILADLQAYKGAGPEIRDAIQNPNDIQLQEKAWNAVCPLVVRLKRFYEFSIRLEKALQSLLESLTCPPYTPTQHLEREQALAKEFAEILHFTLRFDELKMRNPAIQNDFSYYRRTISRNRINNMHLDIENEVNNEMANRMSLFYAEATPMLKTLSNATMHFVSENKTLPIENTTDCLSTMTSVCKVMLETPEYRSRFTSEETLMFCMRVMVGVIILYDHVHPVGAFCKTSKIDMKGCIKVLKEQAPDSVEGLLNALRFTTKHLNDESTSKQIRAMLQ

SEQ ID NO: 30271 - protein, 323 aa, Homo sapiens; identical to SEQ ID NO: 30270
  Payload ID: 5935
  Gene Symbol: FAM49A
  Gene Name: family with sequence similarity 49, member A
  Uniprot ID: Q9H0Q0
  ENSP ID: ENSP00000384771

SEQ ID NO: 30272 - protein, 87 aa, Homo sapiens
  Payload ID: 5935
  Gene Symbol: FAM49A
  Gene Name: family with sequence similarity 49, member A
  ENSP ID: ENSP00000388979
MGNLLKVLTREIENYPHFFLDFENAQPTEGEREIWNQISAVLQDSESILADLQAYKGAGPEIRDAIQNPNDIQLQEKAWNAVCPLVV

SEQ ID NO: 30273 - protein, 94 aa, Homo sapiens
  Payload ID: 5935
  Gene Symbol: FAM49A
  Gene Name: family with sequence similarity 49, member A
  ENSP ID: ENSP00000392154
MGNLLKVLTREIENYPHFFLDFENAQPTEGEREIWNQISAVLQDSESILADLQAYKGAGPEIRDAIQNPNDIQLQEKAWNAVCPLVVRLKRFYE

SEQ ID NO: 30274 - protein, 324 aa, Homo sapiens
  Payload ID: 5936
  Gene Symbol: FAM49B
  Gene Name: family with sequence similarity 49, member B
  Uniprot ID: Q9NUQ9
  ENSP ID: ENSP00000384880
MGNLLKVLTCTDLEQGPNFFLDFENAQPTESEKEIYNQVNVVLKDAEGILEDLQSYRGAGHEIREAIQHPADEKLQEKAWGAVVPLVGKLKKFYEFSQRLEAALRGLLGALTSTPYSPTQHLEREQALAKQFAEILHFTLRFDELKMTNPAIQNDFSYYRRTLSRMRINNVPAEGENEVNNELANRMSLFYAEATPMLKTLSDATTKFVSENKNLPIENTTDCLSTMASVCRVMLETPEYRSRFTNEETVSFCLRVMVGVIILYDHVHPVGAFAKTSKIDMKGCIKVLKDQPPNSVEGLLNALRYTTKHLNDETTSKQIKSMLQ

SEQ ID NO: 30275 - protein, 65 aa, Homo sapiens
  Payload ID: 5936
  Gene Symbol: FAM49B
  Gene Name: family with sequence similarity 49, member B
  ENSP ID: ENSP00000427994
MGNLLKVLTCTDLEQGPNFFLDFENAQPTESEKEIYNQVNVVLKDAEGILEDLQSYRGAGHEIRE

SEQ ID NO: 30276 - protein, 324 aa, Homo sapiens; identical to SEQ ID NO: 30274
  Payload ID: 5936
  Gene Symbol: FAM49B
  Gene Name: family with sequence similarity 49, member B
  Uniprot ID: Q9NUQ9
  ENSP ID: ENSP00000428117

SEQ ID NO: 30277 - protein, 100 aa, Homo sapiens
  Payload ID: 5936
  Gene Symbol: FAM49B
  Gene Name: family with sequence similarity 49, member B
  ENSP ID: ENSP00000429051
MGNLLKVLTCTDLEQGPNFFLDFENAQPTESEKEIYNQVNVVLKDAEGILEDLQSYRGAGHEIREAIQHPADEKLQEKAWGAVVPLVGKLKKFYEFSQRL

SEQ ID NO: 30278 - protein, 93 aa, Homo sapiens
  Payload ID: 5936
  Gene Symbol: FAM49B
  Gene Name: family with sequence similarity 49, member B
  ENSP ID: ENSP00000429074
MGNLLKVLTCTDLEQGPNFFLDFENAQPTESEKEIYNQVNVVLKDAEGILEDLQSYRGAGHEIREAIQHPADEKLQEKAWGAVVPLVGKLKKF

SEQ ID NO: 30279 - protein, 324 aa, Homo sapiens; identical to SEQ ID NO: 30274
  Payload ID: 5936
  Gene Symbol: FAM49B
  Gene Name: family with sequence similarity 49, member B
  Uniprot ID: Q9NUQ9
  ENSP ID: ENSP00000429078

SEQ ID NO: 30280 - protein, 324 aa, Homo sapiens; identical to SEQ ID NO: 30274
  Payload ID: 5936
  Gene Symbol: FAM49B
  Gene Name: family with sequence similarity 49, member B
  Uniprot ID: Q9NUQ9
  ENSP ID: ENSP00000429150

SEQ ID NO: 30281 - protein, 324 aa, Homo sapiens; identical to SEQ ID NO: 30274
  Payload ID: 5936
  Gene Symbol: FAM49B
  Gene Name: family with sequence similarity 49, member B
  Uniprot ID: Q9NUQ9
  ENSP ID: ENSP00000429499

SEQ ID NO: 30282 - protein, 68 aa, Homo sapiens
  Payload ID: 5936
  Gene Symbol: FAM49B
  Gene Name: family with sequence similarity 49, member B
  ENSP ID: ENSP00000429659
MGNLLKVLTCTDLEQGPNFFLDFENAQPTESEKEIYNQVNVVLKDAEGILEDLQSYRGAGHEIREAIQ

SEQ ID NO: 30283 - protein, 324 aa, Homo sapiens; identical to SEQ ID NO: 30274
  Payload ID: 5936
  Gene Symbol: FAM49B
  Gene Name: family with sequence similarity 49, member B
  Uniprot ID: Q9NUQ9
  ENSP ID: ENSP00000429802

SEQ ID NO: 30284 - protein, 47 aa, Homo sapiens
  Payload ID: 5936
  Gene Symbol: FAM49B
  Gene Name: family with sequence similarity 49, member B
  ENSP ID: ENSP00000429860
MGNLLKVLTCTDLEQGPNFFLDFENAQPTESEKEIYNQVNVVLKDAE

SEQ ID NO: 30285 - protein, 178 aa, Homo sapiens
  Payload ID: 5936
  Gene Symbol: FAM49B
  Gene Name: family with sequence similarity 49, member B
  Uniprot ID: Q9NUQ9
  ENSP ID: ENSP00000429978
MTNPAIQNDFSYYRRTLSRMRINNVPAEGENEVNNELANRMSLFYAEATPMLKTLSDATTKFVSENKNLPIENTTDCLSTMASVCRVMLETPEYRSRFTNEETVSFCLRVMVGVIILYDHVHPVGAFAKTSKIDMKGCIKVLKDQPPNSVEGLLNALRYTTKHLNDETTSKQIKSMLQ

SEQ ID NO: 30286 - protein, 78 aa, Homo sapiens
  Payload ID: 5936
  Gene Symbol: FAM49B
  Gene Name: family with sequence similarity 49, member B
  ENSP ID: ENSP00000430127
MGNLLKVLTCTDLEQGPNFFLDFENAQPTESEKEIYNQVNVVLKDAEGILEDLQSYRGAGHEIREAIQHPADEKLQEK

SEQ ID NO: 30287 - protein, 45 aa, Homo sapiens
  Payload ID: 5936
  Gene Symbol: FAM49B
  Gene Name: family with sequence similarity 49, member B
  ENSP ID: ENSP00000430412
MGNLLKVLTCTDLEQGPNFFLDFENAQPTESEKEIYNQVNVVLKD

SEQ ID NO: 30288 - protein, 178 aa, Homo sapiens; identical to SEQ ID NO: 30285
  Payload ID: 5936
  Gene Symbol: FAM49B
  Gene Name: family with sequence similarity 49, member B
  Uniprot ID: Q9NUQ9
  ENSP ID: ENSP00000430433

SEQ ID NO: 30289 - protein, 63 aa, Homo sapiens
  Payload ID: 5936
  Gene Symbol: FAM49B
  Gene Name: family with sequence similarity 49, member B
  ENSP ID: ENSP00000430434
MGNLLKVLTCTDLEQGPNFFLDFENAQPTESEKEIYNQVNVVLKDAEGILEDLQSYRGAGHEI

SEQ ID NO: 30290 - protein, 324 aa, Homo sapiens; identical to SEQ ID NO: 30274
  Payload ID: 5936
  Gene Symbol: FAM49B
  Gene Name: family with sequence similarity 49, member B
  Uniprot ID: Q9NUQ9
  ENSP ID: ENSP00000430674

SEQ ID NO: 30291 - protein, 98 aa, Homo sapiens
  Payload ID: 5936
  Gene Symbol: FAM49B
  Gene Name: family with sequence similarity 49, member B
  ENSP ID: ENSP00000430694
MGNLLKVLTCTDLEQGPNFFLDFENAQPTESEKEIYNQVNVVLKDAEGILEDLQSYRGAGHEIREAIQHPADEKLQEKAWGAVVPLVGKLKKFYEFSQ

SEQ ID NO: 30292 - protein, 155 aa, Homo sapiens
  Payload ID: 5936
  Gene Symbol: FAM49B
  Gene Name: family with sequence similarity 49, member B
  ENSP ID: ENSP00000430806
MGNLLKVLTCTDLEQGPNFFLDFENAQPTESEKEIYNQVNVVLKDAEGILEDLQSYRGAGHEIREAIQHPADEKLQEKAWGAVVPLVGKLKKFYEFSQRLEAALRGLLGALTSTPYSPTQHLEREQALAKQFAEILHFTLRFDELKVELSIGPDC

SEQ ID NO: 30293 - protein, 217 aa, Homo sapiens [sequence omitted]

SEQ ID NO: 30294 - protein, 260 aa, Homo sapiens
  Payload ID: 5937
  Gene Symbol: FAM50A
  Gene Name: family with sequence similarity 50, member A
  ENSP ID: ENSP00000158526
MKSNIDKKFSAHYDAVEAELKSSTVGLVTLNDMKAKQEALVKEREKQLAKKEQSKELQMKLEKLREKERKKEAKRKISSLSFTLEEEEEGGEEEEEAAMYEEEMEREEITTKKRKLGKNPDVDTSFLPDRDREEEENRLREELRQEWEAKQEKIKSEEIEITFSYWDGSGHRRTVKMRKGNTMQQFLQKALEILRKDFSELRSAGVEQLMYIKEDLIIPHHHSFYDFIVTKARGKSGPLFNFDVHDDVRLLSDATVEKDE

SEQ ID NO: 30295 - protein, 339 aa, Homo sapiens
  Payload ID: 5937
  Gene Symbol: FAM50A
  Gene Name: family with sequence similarity 50, member A
  Uniprot ID: Q14320
  ENSP ID: ENSP00000377225
MAQYKGAASEAGRAMHLMKKREKQREQMEQMKQRIAEENIMKSNIDKKFSAHYDAVEAELKSSTVGLVTLNDMKAKQEALVKEREKQLAKKEQSKELQMKLEKLREKERKKEAKRKISSLSFTLEEEEEGGEEEEEAAMYEEEMEREEITTKKRKLGKNPDVDTSFLPDRDREEEENRLREELRQEWEAKQEKIKSEEIEITFSYWDGSGHRRTVKMRKGNTMQQFLQKALEILRKDFSELRSAGVEQLMYIKEDLIIPHHHSFYDFIVTKARGKSGPLFNFDVHDDVRLLSDATVEKDESHAGKVVLRSWYEKNKHIFPASRWEPYDPEKKWDKYTIR

SEQ ID NO: 30296 - protein, 325 aa, Homo sapiens
  Payload ID: 5938
  Gene Symbol: FAM50B
  Gene Name: family with sequence similarity 50, member B
  Uniprot ID: Q9Y247
  ENSP ID: ENSP00000369625
MAQYKGTMREAGRAMHLLKKRERQREQMEVLKQRIAEETILKSQVDKRFSAHYDAVEAELKSSTVGLVTLNDMKARQEALVRERERQLAKRQHLEEQRLQQERQREQEQRRERKRKISCLSFALDDLDDQADAAEARRAGNLGKNPDVDTSFLPDRDREEEENRLREELRQEWEAQREKVKDEEMEVTFSYWDGSGHRRTVRVRKGNTVQQFLKKALQGLRKDFLELRSAGVEQLMFIKEDLILPHYHTFYDFIIARARGKSGPLFSFDVHDDVRLLSDATMEKDESHAGKVVLRSWYEKNKHIFPASRWEAYDPEKKWDKYTIR

SEQ ID NO: 30297 - protein, 325 aa, Homo sapiens; identical to SEQ ID NO: 30296
  Payload ID: 5938
  Gene Symbol: FAM50B
  Gene Name: family with sequence similarity 50, member B
  Uniprot ID: Q9Y247
  ENSP ID: ENSP00000369627

SEQ ID NO: 30298 - protein, 398 aa, Homo sapiens
  Payload ID: 5939
  Gene Symbol: FAM53A
  Gene Name: family with sequence similarity 53, member A
  Uniprot ID: Q6NSI3
  ENSP ID: ENSP00000310057
MVTLITEKLQSQSLDDLTCKAEAGPLQYSAETLNKSGRLFPLELNDQSPWKVFSGGPPVRSQAATGPDFSFLPGLSAAAHTMGLQWQPQSPRPGAGLGAASTVDPSESTGSSTAPPTKRHCRSLSEPEELVRCRSPWRPGSSKVWTPVSKRRCDSGGSATRQGSPGAVLPRSAVWSTGPTSPATPRPSSASGGFVDSSEGSAGSGPLWCSAESCLPSTRRRPSLSQERLAGAGTPLPWASSSPTSTPALGGRRGLLRCRSQPCVLSGKRSRRKRRREEDARWTRPSLDFLKMTQTLKNSKSLCSLNYEDDDEDDTPVKTVLSSPCDSRGLPGITMPGCSQRGLRTSPVHPNLWASRESVTSDGSRRSSGDPRDGDSVGEEGVFPRARWELDLEQIENN

SEQ ID NO: 30299 - protein, 108 aa, Homo sapiens
  Payload ID: 5939
  Gene Symbol: FAM53A
  Gene Name: family with sequence similarity 53, member A
  ENSP ID: ENSP00000417615
MVTLITEKLQSQSLDDLTCKAEAGPLQYSAETLNKSGRLFPLELNDQSPWKVFSGGPPVRSQAATGPDFSFLPGLSAAAHTMGLQWQPQSPRPGAGLGAASTVDPSES

SEQ ID NO: 30300 - protein, 398 aa, Homo sapiens; identical to SEQ ID NO: 30298
  Payload ID: 5939
  Gene Symbol: FAM53A
  Gene Name: family with sequence similarity 53, member A
  Uniprot ID: Q6NSI3
  ENSP ID: ENSP00000418243

SEQ ID NO: 30301 - protein, 360 aa, Homo sapiens
  Payload ID: 5939
  Gene Symbol: FAM53A
  Gene Name: family with sequence similarity 53, member A
  ENSP ID: ENSP00000419044
MVTLITEKLQSQSLDDLTCKAEAGPLQYSAETLNKSGRLFPLELNDQSPWKVFSGGPPVRSQAATGPDFSFLPGLSAAAHTMGLQWQPQSPRPGAGLGAASTVDPSESTGSSTAPPTKRHCRSLSEPEELVRCRSPWRPGSSKVWTPVSKRRCDSGGSATRQGSPGAVLPRSAVWSTGPTSPATPRPSSASGGFVDSSEGSAGSGPLWCSAESCLPSTRRRPSLSQERLAGAGTPLPWASSSPTSTPALGGRRGLLRCRSQPCVLSGKRSRRKRRREEDARWTRPSLDFLKMTQPHSCARECESRVRGLGVSLQHLSGPSSQSRGSTLNENKTPWFEMEGNLAPEDFKKFKKPLLPQLRR

SEQ ID NO: 30302 - protein, 156 aa, Homo sapiens
  Payload ID: 5939
  Gene Symbol: FAM53A
  Gene Name: family with sequence similarity 53, member A
  ENSP ID: ENSP00000423987
  MOD_RES (1)..(1): Any amino acid
XRCDSGGSATRQGSPGAVLPRSAVWSTGPTSPATPRPSSASGGFVDSSEGSAGSGPLWCSAESCLPSTRRRPSLSQERLAGAGTPLPWASSSPTSTPALGGRRGLLRCRSQPCVLSGKRSRRKRRREEDARWTRPSLDFLKMTQVASRTVSPSMLP

SEQ ID NO: 30303 - protein, 398 aa, Homo sapiens; identical to SEQ ID NO: 30298
  Payload ID: 5939
  Gene Symbol: FAM53A
  Gene Name: family with sequence similarity 53, member A
  Uniprot ID: Q6NSI3
  ENSP ID: ENSP00000426260

SEQ ID NO: 30304 - protein, 305 aa, Homo sapiens
  Payload ID: 5940
  Gene Symbol: FAM53B
  Gene Name: family with sequence similarity 53, member B
  Uniprot ID: Q14153
  ENSP ID: ENSP00000280780
MVMVLSESLSTRGADSIACGTFSRELHTPKKMSQGPTLFSCGIMENDRWRDLDRKCPLQIDQPSTSIWECLPEKDSSLWHREAVTACAVTSLIKDLSISDHNGNPSAPPSKRQCRSLSFSDEMSSCRTSWRPLGSKVWTPVEKRRCYSGGSVQRYSNGFSTMQRSSSFSLPSRANVLSSPCDQAGLHHRFGGQPCQGVPGSAPCGQAGDTWSPDLHPVGGGRLDLQRSLSCSHEQFSFVEYCPPSANSTPASTPELARRSSGLSRSRSQPCVLNDKKVGVKRRRPEEVQEQRPSLDLAKMAQIAP

SEQ ID NO: 30305 - protein, 422 aa, Homo sapiens
  Payload ID: 5940
  Gene Symbol: FAM53B
  Gene Name: family with sequence similarity 53, member B
  Uniprot ID: Q14153
  ENSP ID: ENSP00000338532
MVMVLSESLSTRGADSIACGTFSRELHTPKKMSQGPTLFSCGIMENDRWRDLDRKCPLQIDQPSTSIWECLPEKDSSLWHREAVTACAVTSLIKDLSISDHNGNPSAPPSKRQCRSLSFSDEMSSCRTSWRPLGSKVWTPVEKRRCYSGGSVQRYSNGFSTMQRSSSFSLPSRANVLSSPCDQAGLHHRFGGQPCQGVPGSAPCGQAGDTWSPDLHPVGGGRLDLQRSLSCSHEQFSFVEYCPPSANSTPASTPELARRSSGLSRSRSQPCVLNDKKVGVKRRRPEEVQEQRPSLDLAKMAQNCQTFSSLSCLSAGTEDCGPQSPFARHVSNTRAWTALLSASGPGGRTPAGTPVPEPLPPSFDDHLACQEDLSCEESDSCALDEDCGRRAEPAAAWRDRGAPGNSLCSLDGELDIEQIEKN

SEQ ID NO: 30306 - protein, 422 aa, Homo sapiens; identical to SEQ ID NO: 30305
  Payload ID: 5940
  Gene Symbol: FAM53B
  Gene Name: family with sequence similarity 53, member B
  Uniprot ID: Q14153
  ENSP ID: ENSP00000376509

SEQ ID NO: 30307 - protein, 392 aa, Homo sapiens
  Payload ID: 5941
  Gene Symbol: FAM53C
  Gene Name: family with sequence similarity 53, member C
  Uniprot ID: Q9NYF3
  ENSP ID: ENSP00000239906
MITLITEQLQKQTLDELKCTRFSISLPLPDHADISNCGNSFQLVSEGASWRGLPHCSCAEFQDSLNFSYHPSGLSLHLRPPSRGNSPKEQPFSQVLRPEPPDPEKLPVPPAPPSKRHCRSLSVPVDLSRWQPVWRPAPSKLWTPIKHRGSGGGGGPQVPHQSPPKRVSSLRFLQAPSASSQCAPAHRPYSPPFFSLALAQDSSRPCAASPQSGSWESDAESLSPCPPQRRFSLSPSLGPQASRFLPSARSSPASSPELPWRPRGLRNLPRSRSQPCDLDARKTGVKRRHEEDPRRLRPSLDFDKMNQKPYSGGLCLQETAREGSSISPPWFMACSPPPLSASCSPTGGSSQVLSESEEEEEGAVRWGRQALSKRTLCQRDFGDLDLNLIEEN

SEQ ID NO: 30308 - protein, 392 aa, Homo sapiens; identical to SEQ ID NO: 30307
  Payload ID: 5941
  Gene Symbol: FAM53C
  Gene Name: family with sequence similarity 53, member C
  Uniprot ID: Q9NYF3
  ENSP ID: ENSP00000403705

SEQ ID NO: 30309 - protein, 114 aa, Homo sapiens
  Payload ID: 5941
  Gene Symbol: FAM53C
  Gene Name: family with sequence similarity 53, member C
  ENSP ID: ENSP00000425154
MITLITEQLQKQTLDELKCTRFSISLPLPDHADISNCGNSFQLVSVWARRQAASCPLPGALPHPPQSCPGDLEVSATFPEAAHSLVIWMPAKLGSSGATRKTPGVCGLRWTLTR

SEQ ID NO: 30310 - protein, 165 aa, Homo sapiens
  Payload ID: 5941
  Gene Symbol: FAM53C
  Gene Name: family with sequence similarity 53, member C
  ENSP ID: ENSP00000427610
MVLEWCCSGRRRLTSEPLPDHADISNCGNSFQLVSEGASWRGLPHCSCAEFQDSLNFSYHPSGLSLHLRPPSRGNSPKEQPFSQVLRPEPPDPEKLPVPPAPPSKRHCRSLSVPVDLSRWQPVWRPAPSKLWTPIKHRGSGGGGGPQVPHQSPPKRVSSLRFLQA

SEQ ID NO: 30311 - protein, 225 aa, Homo sapiens
  Payload ID: 5942
  Gene Symbol: FAM57A
  Gene Name: family with sequence similarity 57, member A
  Uniprot ID: Q8TBR7
  ENSP ID: ENSP00000301324
MLLTLAGGALFFPGLFALCTWALRRSQPGWSRTDCVMISTRLVSSVHAVLATGSGIVIIRSCDDVITGRHWLAREYVWFLIPYMIYDSYAMYLCEWCRTRDQNRAPSLTLRNFLSRNRLMITHHAVILFVLVPVAQLKQQHTLLYKVNGILTLATFLSCRILLFPFMYWSYGRQQGLSLLQVPFSIPFYCNVANAFLVAPQIYWFCLLCRKAVRLFDTPQAKKDG

SEQ ID NO: 30312 - protein, 257 aa, Homo sapiens
  Payload ID: 5942
  Gene Symbol: FAM57A
  Gene Name: family with sequence similarity 57, member A
  Uniprot ID: Q8TBR7
  ENSP ID: ENSP00000312017
MLLTLAGGALFFPGLFALCTWALRRSQPGWSRTDCVMISTRLVSSVHAVLATGSGIVIIRSCDDVITGRHWLAREYVWFLIPYMIYDSYAMYLCEWCRTRDQNRAPSLTLRNFLSRNRLMITHHAVILFVLVPVAQRLRGDLGDFFVGCIFTAELSTPFVSLGRVLIQLKQQHTLLYKVNGILTLATFLSCRILLFPFMYWSYGRQQGLSLLQVPFSIPFYCNVANAFLVAPQIYWFCLLCRKAVRLFDTPQAKKDG

SEQ ID NO: 30313 - protein, 149 aa, Homo sapiens
  Payload ID: 5942
  Gene Symbol: FAM57A
  Gene Name: family with sequence similarity 57, member A
  ENSP ID: ENSP00000458224
MLLTLAGGALFFPGLFALCTWALRRSQPGWSRTDCVMISTRYRRRRDAPRGPGRCPPHPTRPRGPGRKRGAAGSPGAAPSASRRPEFPKPLRVLPWRERGRGGREWPMSLRSPLPTSACGWGESGRRAGPGSLRSSDRTERARCSLRPR

SEQ ID NO: 30314 - protein, 113 aa, Homo sapiens
  Payload ID: 5942
  Gene Symbol: FAM57A
  Gene Name: family with sequence similarity 57, member A
  ENSP ID: ENSP00000458649
MISTRYRRRRDAPRGPGRCPPHPTRPRGPGRKRGAAGSPGAAPSASRRPEFPKPLRVLPWRERGRGGREWPMSLRSPLPTSACGWGESGRRAGPGSLRSSDRTERARCSLRPR

SEQ ID NO: 30315 - protein, 69 aa, Homo sapiens
  Payload ID: 5942
  Gene Symbol: FAM57A
  Gene Name: family with sequence similarity 57, member A
  ENSP ID: ENSP00000460150
MLLTLAGGALFFPGLFALCTWALRRSQPGWSRTDCVMISTRLVSSVHAVLATGSGIVIIRSCDDVITGS

SEQ ID NO: 30316 - protein, 38 aa, Homo sapiens
  Payload ID: 5942
  Gene Symbol: FAM57A
  Gene Name: family with sequence similarity 57, member A
  ENSP ID: ENSP00000460233
  MOD_RES (1)..(1): Any amino acid
XATGSGIVIIRSCDDVITGRGSGETLGTSLSAASSRQN

SEQ ID NO: 30317 - protein, 224 aa, Homo sapiens
  Payload ID: 5943
  Gene Symbol: FAM57B
  Gene Name: family with sequence similarity 57, member B
  Uniprot ID: Q71RH2
  ENSP ID: ENSP00000279389
MASTAGYIVSTSCKHIIDDQHWLSSAYTQFAVPYFIYDIYAMFLCHWHKHQVKGHGGDDGAARAPGSTWAIARGYLHKEFLMVLHHAAMVLVCFPLSVVWRQGKGDFFLGCMLMAEVSTPFVCLGKILIQYKQQHTLLHKVNGALMLLSFLCCRVLLFPYLYWAYGRHAGLPLLAVPLAIPAHVNLGAALLLAPQLYWFFLICRGACRLFWPRSRPPPACQAQD

SEQ ID NO: 30318 - protein, 274 aa, Homo sapiens
  Payload ID: 5943
  Gene Symbol: FAM57B
  Gene Name: family with sequence similarity 57, member B
  Uniprot ID: Q71RH2
  ENSP ID: ENSP00000369863
MLTPMVAGGVVFPGLFLLSKNTLQRLPQLRWEEADAVIVSARLVSSVQAIMASTAGYIVSTSCKHIIDDQHWLSSAYTQFAVPYFIYDIYAMFLCHWHKHQVKGHGGDDGAARAPGSTWAIARGYLHKEFLMVLHHAAMVLVCFPLSVVWRQGKGDFFLGCMLMAEVSTPFVCLGKILIQYKQQHTLLHKVNGALMLLSFLCCRVLLFPYLYWAYGRHAGLPLLAVPLAIPAHVNLGAALLLAPQLYWFFLICRGACRLFWPRSRPPPACQAQD

SEQ ID NO: 30319 - protein, 146 aa, Homo sapiens
  Payload ID: 5943
  Gene Symbol: FAM57B
  Gene Name: family with sequence similarity 57, member B
  ENSP ID: ENSP00000456854
MTLLFAVGCVFFPLCFTALRWGLQNHTNLQMERQEAVLVASKLVSSVQAIMASTAGYIVSTSCKHIIDDQHWLSSAYTQFAVPYFIYDIYAMFLCHWHKHQVKGHGGDDGAARAPGSTWAIARGYLHKEFLMVLHHAAMVLVCFPL

SEQ ID NO: 30320 - protein, 42 aa, Homo sapiens
  Payload ID: 5943
  Gene Symbol: FAM57B
  Gene Name: family with sequence similarity 57, member B
  ENSP ID: ENSP00000457712
MTLLFAVGCVFFPLCFTALRWGLQNHTNLQMERQEAVLVASK

SEQ ID NO: 30321 - protein, 170 aa, Homo sapiens
  Payload ID: 5943
  Gene Symbol: FAM57B
  Gene Name: family with sequence similarity 57, member B
  ENSP ID: ENSP00000457769
MASTAGYIVSTSCKHIIDDQHWLSSAYTQFAVPYFIYDIYAMFLCHWHKHQVKGHGGDDGAARAPGSTWAIARGYLHKEFLMVLHHAAMVLVCFPLSVVWRQGKGDFFLGCMLMAEVSTPFVCLGKILIQVSEHGRVQEPNGEVTGRGGTFKVAAKGSSPFVIPPSPRAF

SEQ ID NO: 30322 - protein, 17 aa, Homo sapiens
  Payload ID: 5943
  Gene Symbol: FAM57B
  Gene Name: family with sequence similarity 57, member B
  ENSP ID: ENSP00000458640
MTLLFAVGCVFFPLCFT

SEQ ID NO: 30323 - protein, 228 aa, Homo sapiens
  Payload ID: 5944
  Gene Symbol: FAM58A
  Gene Name: family with sequence similarity 58, member A
  Uniprot ID: Q8N1B3
  ENSP ID: ENSP00000402949
MEAPEGGGGGPAARGPEGQPAPEARVHFRVARFIMEAGVKLGMRSIPIATACTIYHKFFCETNLDAYDPYLIAMSSIYLAGKVEEQHLRTRDIINVSNRYFNPSGEPLELDSRFWELRDSIVQCELLMLRVLRFQVSFQHPHKYLLHYLVSLQNWLNRHSWQRTPVAVTAWALLRDSYHGALCLRFQAQHIAVAVLYLALQVYGVEVPAEVEAEKPWWQIYTMDTEIP

SEQ ID NO: 30324 - protein, 94 aa, Homo sapiens
  Payload ID: 5944
  Gene Symbol: FAM58A
  Gene Name: family with sequence similarity 58, member A
  ENSP ID: ENSP00000412865
  MOD_RES (1)..(1): Any amino acid
XAGKVEEQHLRTRDIINVSNRYFNPSGEPLELDSRFWELRDSIVQCELLMLRVLRFQVSFQHPHKVFNDDLTKPIIDNIVSDLIQIYTMDTEIP

SEQ ID NO: 30325 - protein, 248 aa, Homo sapiens
  Payload ID: 5944
  Gene Symbol: FAM58A
  Gene Name: family with sequence similarity 58, member A
  Uniprot ID: Q8N1B3
  ENSP ID: ENSP00000461135
MEAPEGGGGGPAARGPEGQPAPEARVHFRVARFIMEAGVKLGMRSIPIATACTIYHKFFCETNLDAYDPYLIAMSSIYLAGKVEEQHLRTRDIINVSNRYFNPSGEPLELDSRFWELRDSIVQCELLMLRVLRFQVSFQHPHKYLLHYLVSLQNWLNRHSWQRTPVAVTAWALLRDSYHGALCLRFQAQHIAVAVLYLALQVYGVEVPAEVEAEKPWWQVFNDDLTKPIIDNIVSDLIQIYTMDTEIP

SEQ ID NO: 30326 - protein, 141 aa, Homo sapiens
  Payload ID: 5944
  Gene Symbol: FAM58A
  Gene Name: family with sequence similarity 58, member A
  ENSP ID: ENSP00000466345
MRSIPIATACTIYHKFFCETNLDAYDPYLIAMSSIYLAGKVEEQHLRTRDIINVSNRYFNPSGEPLELDSRFWELRDSIVQCELLMLRVLRFQVSFQHPHKYLLHYLVSLQNWLNRHSWQRTPVAVTAWALLRDSYHGALC

SEQ ID NO: 30327 - protein, 39 aa, Homo sapiens
  Payload ID: 5944
  Gene Symbol: FAM58A
  Gene Name: family with sequence similarity 58, member A
  ENSP ID: ENSP00000478747
MEAPEGGGGGPAARGPEGQPAPEARVHFRVARFIMEVSS

SEQ ID NO: 30328 - protein, 39 aa, Homo sapiens
  Payload ID: 5944
  Gene Symbol: FAM58A
  Gene Name: family with sequence similarity 58, member A
  ENSP ID: ENSP00000481634
MEAPEGGGGGPAARGPEGQPAPEARVHFRVARFIMEAGG

SEQ ID NO: 30329 - protein, 96 aa, Homo sapiens
  Payload ID: 5944
  Gene Symbol: FAM58A
  Gene Name: family with sequence similarity 58, member A
  ENSP ID: ENSP00000483391
  MOD_RES (1)..(1): Any amino acid
XPGGAAGARSQGALPSGEVHHGGVKLGMRSIPIATACTIYHKFFCETNLDAYDPYLIAMSSIYLAGKVEEQHLRTRDIINVSNSTCSTTWFPSRTG

SEQ ID NO: 30330 - protein, 39 aa, Homo sapiens; identical to SEQ ID NO: 30327
  Payload ID: 5944
  Gene Symbol: FAM58A
  Gene Name: family with sequence similarity 58, member A
  ENSP ID: ENSP00000484108

SEQ ID NO: 30331 - protein, 170 aa, Homo sapiens
  Payload ID: 5944
  Gene Symbol: FAM58A
  Gene Name: family with sequence similarity 58, member A
  ENSP ID: ENSP00000484506
  MOD_RES (1)..(1): Any amino acid
XGGGPAARGPEGQPAPEARVHFRVARFIMEAGVKLGMRSIPIATACTIYHKFFCETNLDAYDPYLIAMSSIYLAGKVEEQHLRTRDIINVSNRFIPWTQRSPKVLAQACPKRSPGWSAAWGHCHHVAMTAGPHRTSWEDWLCCWRRAGEGNGMLPLCQSLEVAVQVMVGA

SEQ ID NO: 30332 - protein, 221 aa, Homo sapiens
  Payload ID: 5945
  Gene Symbol: FAM60A
  Gene Name: family with sequence similarity 60, member A
  Uniprot ID: Q9NP50
  ENSP ID: ENSP00000337477
MFGFHKPKMYRSIEGCCICRAKSSSSRFTDSKRYEKDFQSCFGLHETRSGDICNACVLLVKRWKKLPAGSKKNWNHVVDARAGPSLKTTLKPKKVKTLSGNRIKSNQISKLQKEFKRHNSDAHSTTSSASPAQSPCYSNQSDDGSDTEMASGSNRTPVFSFLDLTYWKRQKICCGIIYKGRFGEVLIDTHLFKPCCSNKKAAAEKPEEQGPEPLPISTQEW

SEQ ID NO: 30333 - protein, 221 aa, Homo sapiens; identical to SEQ ID NO: 30332
  Payload ID: 5945
  Gene Symbol: FAM60A
  Gene Name: family with sequence similarity 60, member A
  Uniprot ID: Q9NP50
  ENSP ID: ENSP00000393279

SEQ ID NO: 30334 - protein, 126 aa, Homo sapiens
  Payload ID: 5945
  Gene Symbol: FAM60A
  Gene Name: family with sequence similarity 60, member A
  ENSP ID: ENSP00000437363
MFGFHKPKMYRSIEGCCICRAKSSSSRFTDSKRYEKDFQSCFGLHETRSGDICNACVLLVKRWKKLPAGSKKNWNHVVDARAGPSLKTTLKPKKVKTLSGNRIKSNQISKLQKEFKRHNSDAHSTT

SEQ ID NO: 30335 - protein, 73 aa, Homo sapiens
  Payload ID: 5945
  Gene Symbol: FAM60A
  Gene Name: family with sequence similarity 60, member A
  Uniprot ID: Q9NP50
  ENSP ID: ENSP00000439952
MASGSNRTPVFSFLDLTYWKRQKICCGIIYKGRFGEVLIDTHLFKPCCSNKKAAAEKPEEQGPEPLPISTQEW

SEQ ID NO: 30336 - protein, 59 aa, Homo sapiens
  Payload ID: 5945
  Gene Symbol: FAM60A
  Gene Name: family with sequence similarity 60, member A
  ENSP ID: ENSP00000443087
  MOD_RES (1)..(1): Any amino acid
XRSIEGCCICRAKSSSSRFTDSKRYEKDFQSCFGDNVFLCCLGWSAVAIHRCDHCAPQP

SEQ ID NO: 30337 - protein, 73 aa, Homo sapiens; identical to SEQ ID NO: 30335
  Payload ID: 5945
  Gene Symbol: FAM60A
  Gene Name: family with sequence similarity 60, member A
  Uniprot ID: Q9NP50
  ENSP ID: ENSP00000443697

SEQ ID NO: 30338 - protein, 134 aa, Homo sapiens
  Payload ID: 5945
  Gene Symbol: FAM60A
  Gene Name: family with sequence similarity 60, member A
  ENSP ID: ENSP00000443881
MFGFHKPKMYRSIEGCCICRAKSSSSRFTDSKRYEKDFQSCFGLHETRSGDICNACVLLVKRWKKLPAGSKKNWNHVVDARAGPSLKTTLKPKKVKTLSGNRIKSNQISKLQKEFKRHNSDAHSTTSSASPAQS

SEQ ID NO: 30339 - protein, 221 aa, Homo sapiens; identical to SEQ ID NO: 30332
  Payload ID: 5945
  Gene Symbol: FAM60A
  Gene Name: family with sequence similarity 60, member A
  Uniprot ID: Q9NP50
  ENSP ID: ENSP00000479093

SEQ ID NO: 30340 - protein, 126 aa, Homo sapiens; identical to SEQ ID NO: 30334
  Payload ID: 5945
  Gene Symbol: FAM60A
  Gene Name: family with sequence similarity 60, member A
  ENSP ID: ENSP00000487725

SEQ ID NO: 30341 - protein, 134 aa, Homo sapiens; identical to SEQ ID NO: 30338
  Payload ID: 5945
  Gene Symbol: FAM60A
  Gene Name: family with sequence similarity 60, member A
  ENSP ID: ENSP00000487860

SEQ ID NO: 30342 - protein, 59 aa, Homo sapiens; identical to SEQ ID NO: 30336
  Payload ID: 5945
  Gene Symbol: FAM60A
  Gene Name: family with sequence similarity 60, member A
  ENSP ID: ENSP00000488054
  MOD_RES (1)..(1): Any amino acid

SEQ ID NO: 30343 - protein, 73 aa, Homo sapiens; identical to SEQ ID NO: 30335
  Payload ID: 5945
  Gene Symbol: FAM60A
  Gene Name: family with sequence similarity 60, member A
  Uniprot ID: Q9NP50
  ENSP ID: ENSP00000488406

SEQ ID NO: 30344 - protein, 221 aa, Homo sapiens; identical to SEQ ID NO: 30332
  Payload ID: 5945
  Gene Symbol: FAM60A
  Gene Name: family with sequence similarity 60, member A
  Uniprot ID: Q9NP50
  ENSP ID: ENSP00000488570

SEQ ID NO: 30345 - protein, 73 aa, Homo sapiens; identical to SEQ ID NO: 30335
  Payload ID: 5945
  Gene Symbol: FAM60A
  Gene Name: family with sequence similarity 60, member A
  Uniprot ID: Q9NP50
  ENSP ID: ENSP00000488852

SEQ ID NO: 30346 - protein, 327 aa, Homo sapiens
  Payload ID: 5946
  Gene Symbol: FAM63A
  Gene Name: family with sequence similarity 63, member A
  Uniprot ID: Q8N5J2
  ENSP ID: ENSP00000310923
MNILFLQWKVKLPPQKEVITSDELMAHLGNCLLSIKPQEKSEGLQLNFQQNVDDAMTVLPKLATGLDVNVRFTGVSDFEYTPECSVFDLLGIPLYHGWLVDPQSPEAVRAVGKLSYNQLVERIITCKHSSDTNLVTEGLIAEQFLETTAAQLTYHGLCELTAAAKEGELSVFFRNNHFSTMTKHKSHLYLLVTDQGFLQEEQVVWESLHNVDGDSCFCDSDFHLSHSLGKGPGAEGGSGSPETQLQVDQDYLIALSLQQQQPRGPLGLTDLELAQQLQQEEYQQQQAAQPVRMRTRVLSLQGRGATSGRPAGERRQRPKHESDCILL

SEQ ID NO: 30347 - protein, 517 aa, Homo sapiens
  Payload ID: 5946
  Gene Symbol: FAM63A
  Gene Name: family with sequence similarity 63, member A
  Uniprot ID: Q8N5J2
  ENSP ID: ENSP00000354669
MLLGPPPFNESTKPSPSPCHSFASQAWLRQVPEVSKHLQCPSAKSLLTMEYHQPEDPAPGKAGTAEAVIPENHEVLAGPDEHPQDTDARDADGEAREREPADQALLPSQCGDNLESPLPEASSAPPGPTLGTLPEVETIRACSMPQELPQSPRTRQPEPDFYCVKWIPWKGEQTPIITQSTNGPCPLLAIMNILFLQWKVKLPPQKEVITSDELMAHLGNCLLSIKPQEKSEGLQLNFQQNVDDAMTVLPKLATGLDVNVRFTGVSDFEYTPECSVFDLLGIPLYHGWLVDPQSPEAVRAVGKLSYNQLVERIITCKHSSDTNLVTEGLIAEQFLETTAAQLTYHGLCELTAAAKEGELSVFFRNNHFSTMTKHKSHLYLLVTDQGFLQEEQVVWESLHNVDGDSCFCDSDFHLSHSLGKGPGAEGGSGSPETQLQVDQDYLIALSLQQQQPRGPLGLTDLELAQQLQQEEYQQQQAAQPVRMRTRVLSLQGRGATSGRPAGERRQRPKHESDCILL

SEQ ID NO: 30348 - protein, 469 aa, Homo sapiens
  Payload ID: 5946
  Gene Symbol: FAM63A
  Gene Name: family with sequence similarity 63, member A
  Uniprot ID: Q8N5J2
  ENSP ID: ENSP00000354814
MEYHQPEDPAPGKAGTAEAVIPENHEVLAGPDEHPQDTDARDADGEAREREPADQALLPSQCGDNLESPLPEASSAPPGPTLGTLPEVETIRACSMPQELPQSPRTRQPEPDFYCVKWIPWKGEQTPIITQSTNGPCPLLAIMNILFLQWKVKLPPQKEVITSDELMAHLGNCLLSIKPQEKSEGLQLNFQQNVDDAMTVLPKLATGLDVNVRFTGVSDFEYTPECSVFDLLGIPLYHGWLVDPQSPEAVRAVGKLSYNQLVERIITCKHSSDTNLVTEGLIAEQFLETTAAQLTYHGLCELTAAAKEGELSVFFRNNHFSTMTKHKSHLYLLVTDQGFLQEEQVVWESLHNVDGDSCFCDSDFHLSHSLGKGPGAEGGSGSPETQLQVDQDYLIALSLQQQQPRGPLGLTDLELAQQLQQEEYQQQQAAQPVRMRTRVLSLQGRGATSGRPAGERRQRPKHESDCILL

SEQ ID NO: 30349 - protein, 374 aa, Homo sapiens
  Payload ID: 5946
  Gene Symbol: FAM63A
  Gene Name: family with sequence similarity 63, member A
  Uniprot ID: Q8N5J2
  ENSP ID: ENSP00000437174
MPQELPQSPRTRQPEPDFYCVKWIPWKGEQTPIITQSTNGPCPLLAIMNILFLQWKVKLPPQKEVITSDELMAHLGNCLLSIKPQEKSEGLQLNFQQNVDDAMTVLPKLATGLDVNVRFTGVSDFEYTPECSVFDLLGIPLYHGWLVDPQSPEAVRAVGKLSYNQLVERIITCKHSSDTNLVTEGLIAEQFLETTAAQLTYHGLCELTAAAKEGELSVFFRNNHFSTMTKHKSHLYLLVTDQGFLQEEQVVWESLHNVDGDSCFCDSDFHLSHSLGKGPGAEGGSGSPETQLQVDQDYLIALSLQQQQPRGPLGLTDLELAQQLQQEEYQQQQAAQPVRMRTRVLSLQGRGATSGRPAGERRQRPKHESDCILL

SEQ ID NO: 30350 - protein, 142 aa, Homo sapiens
  Payload ID: 5946
  Gene Symbol: FAM63A
  Gene Name: family with sequence similarity 63, member A
  ENSP ID: ENSP00000451524
  MOD_RES (1)..(1): Any amino acid
XDFHLSHSLGKGPGAEGGSGSPETQLQVDQDYLIALSLQQQQPRGPLGLTDLELAQQLQQEEYQQQQAAQPVRMRTRVLSLQVGCCLGAHTPGFHLMLCRVQNTCYSCTGLFKVSSLRVLPLPVPLPWSPFLSSSPYSLSQS

SEQ ID NO: 30351 - protein, 469 aa, Homo sapiens; identical to SEQ ID NO: 30348
  Payload ID: 5946
  Gene Symbol: FAM63A
  Gene Name: family with sequence similarity 63, member A
  Uniprot ID: Q8N5J2
  ENSP ID: ENSP00000481304

SEQ ID NO: 30352 - protein, 422 aa, Homo sapiens
  Payload ID: 5947
  Gene Symbol: FAM63B
  Gene Name: family with sequence similarity 63, member B
  ENSP ID: ENSP00000326194
MESSPESLQPLEHGVAAGPASGTGSSQEGLQETRLAAGDGPGVWAAETSGGNGLGAAAARRSLPDSASPAGSPEVPGPCSSSAGLDLKDSGLESPAAAEAPLRGQYKVTASPETAVAGVGHELGTAGDAGARPDLAGTCQAELTAAGSEEPSSAGGLSSSCSDPSPPGESPSLDSLESFSNLHSFPSSCEFNSEEGAENRVPEEEEGAAVLPGAVPLCKEEEGEETAQVLAASKERFPGQSVYHIKWIQWKEENTPIITQNENGPCPLLAILNVLLLAWKVKLPPMMEIITAEQLMEYLGDYMLDAKPKEISEIQRLNYEQNMSDAMAILHKLQTGLDVNVRFTGVRVFEYTPECIVFDLLDIPLYHGWLVDPQIDDIVKAVGNCSYNQLVEKIISCKQSDNSELVSEGSTVFVGNGPGVSY

SEQ ID NO: 30353 - protein, 620 aa, Homo sapiens
  Payload ID: 5947
  Gene Symbol: FAM63B
  Gene Name: family with sequence similarity 63, member B
  Uniprot ID: Q8NBR6
  ENSP ID: ENSP00000393231
MESSPESLQPLEHGVAAGPASGTGSSQEGLQETRLAAGDGPGVWAAETSGGNGLGAAAARRSLPDSASPAGSPEVPGPCSSSAGLDLKDSGLESPAAAEAPLRGQYKVTASPETAVAGVGHELGTAGDAGARPDLAGTCQAELTAAGSEEPSSAGGLSSSCSDPSPPGESPSLDSLESFSNLHSFPSSCEFNSEEGAENRVPEEEEGAAVLPGAVPLCKEEEGEETAQVLAASKERFPGQSVYHIKWIQWKEENTPIITQNENGPCPLLAILNVLLLAWKVKLPPMMEIITAEQLMEYLGDYMLDAKPKEISEIQRLNYEQNMSDAMAILHKLQTGLDVNVRFTGVRVFEYTPECIVFDLLDIPLYHGWLVDPQIDDIVKAVGNCSYNQLVEKIISCKQSDNSELVSEGFVAEQFLNNTATQLTYHGLCELTSTVQEGELCVFFRNNHFSTMTKYKGQLYLLVTDQGFLTEEKVVWESLHNVDGDGNFCDSEFHLRPPSDPETVYKGQQDQIDQDYLMALSLQQEQQSQEINWEQIPEGISDLELAKKLQEEEDRRASQYYQEQEQAAAAAAAASTQAQGQPAQASPSSGRQSGNSERKRKEPREKDKEKEKEKNSCVIL

SEQ ID NO: 30354 - protein, 621 aa, Homo sapiens
  Payload ID: 5947
  Gene Symbol: FAM63B
  Gene Name: family with sequence similarity 63, member B
  Uniprot ID: Q8NBR6
  ENSP ID: ENSP00000452885
MESSPESLQPLEHGVAAGPASGTGSSQEGLQETRLAAGDGPGVWAAETSGGNGLGAAAARRSLPDSASPAGSPEVPGPCSSSAGLDLKDSGLESPAAAEAPLRGQYKVTASPETAVAGVGHELGTAGDAGARPDLAGTCQAELTAAGSEEPSSAGGLSSSCSDPSPPGESPSLDSLESFSNLHSFPSSCEFNSEEGAENRVPEEEEGAAVLPGAVPLCKEEEGEETAQVLAASKERFPGQSVYHIKWIQWKEENTPIITQNENGPCPLLAILNVLLLAWKVKLPPMMEIITAEQLMEYLGDYMLDAKPKEISEIQRLNYEQNMSDAMAILHKLQTGLDVNVRFTGVRVFEYTPECIVFDLLDIPLYHGWLVDPQIDDIVKAVGNCSYNQLVEKIISCKQSDNSELVSEGFVAEQFLNNTATQLTYHGLCELTSTVQEGELCVFFRNNHFSTMTKYKGQLYLLVTDQGFLTEEKVVWESLHNVDGDGNFCDSEFHLRPPSDPETVYKGQQDQIDQDYLMALSLQQEQQSQEINWEQIPEGISDLELAKKLQEEEDRRASQYYQEQEQAAAAAAAASTQAQQGQPAQASPSSGRQSGNSERKRKEPREKDKEKEKEKNSCVIL

SEQ ID NO: 30355 - protein, 379 aa, Homo sapiens
  Payload ID: 5947
  Gene Symbol: FAM63B
  Gene Name: family with sequence similarity 63, member B
  ENSP ID: ENSP00000453425
MESSPESLQPLEHGVAAGPASGTGSSQEGLQETRLAAGDGPGVWAAETSGGNGLGAAAARRSLPDSASPAGSPEVPGPCSSSAGLDLKDSGLESPAAAEAPLRGQYKVTASPETAVAGVGHELGTAGDAGARPDLAGTCQAELTAAGSEEPSSAGGLSSSCSDPSPPGESPSLDSLESFSNLHSFPSSCEFNSEEGAENRVPEEEEGAAVLPGAVPLCKEEEGEETAQVLAASKERFPGQSVYHIKWIQWKEENTPIITQNENGPCPLLAILNVLLLAWKVKLPPMMEIITAEQLMEYLGDYMLDAKPKEISEIQRLNYEQNMSDAMAILHKLQTGLDVNIDDIVKAVGNCSYNQLVEKIISCKQSDNSELVSEGGLCS

SEQ ID NO: 30356 - protein, 248 aa, Homo sapiens
  Payload ID: 5948
  Gene Symbol: FAM64A
  Gene Name: family with sequence similarity 64, member A
  Uniprot ID: Q9BSJ6
  ENSP ID: ENSP00000250056
MASRWQNMGTSVRRRSLQHQEQLEDSKELQPVVSHQETSVGALGSLCRQFQRRLPLRAVNLNLRAGPSWKRLETPEPGQQGLQAAARSAKSALGAVSQRIQESCQSGTKWLVETQVKARRRKRGAQKGSGSPTHSLSQKSTRLSGAAPAHSAADPWEKEHHRLSVRMGSHAHPLRRSRREAAFRSPYSSTEPLCSPSESDSDLEPVGAGIQHLQKLSQELDEAIMAEERKQALSDRQGFILKDVYASP

SEQ ID NO: 30357 - protein, 238 aa, Homo sapiens
  Payload ID: 5948
  Gene Symbol: FAM64A
  Gene Name: family with sequence similarity 64, member A
  Uniprot ID: Q9BSJ6
  ENSP ID: ENSP00000458534
MASRWQNMGTSVRRRSLQHQEQLEDSKELQPVVSHQETSVGALGSLCRQFQRRLPLRAVNLNLRAGPSWKRLETPEPGQQGLQAAARSAKSALGAVSQRIQESCQSGTKWLVETQVKARRRKRGAQKGSGSPTHSLSQKSTRLSGAAPAHSAADPWEKEHHRLSVRMGSHAHPLRRSRREAAFRSPYSSTEPLCSPSESDSDLEPVGAGIQHLQKLSQELDEAIMAEESGDIVSLIHD

SEQ ID NO: 30358 - protein, 279 aa, Homo sapiens
  Payload ID: 5948
  Gene Symbol: FAM64A
  Gene Name: family with sequence similarity 64, member A
  ENSP ID: ENSP00000458584
MASRWQNMGTSVRRRSLQHQEQLEDSKELQPVVSHQETSVGALGSLCRQFQRRLPLRAVNLNLRAGPSWKRLETPEPGQQGLQAAARSAKSALGAVSQGINFRSCREGPVRGDLLSNESCCQEDVLILDRIQESCQSGTKWLVETQVKARRRKRGAQKGSGSPTHSLSQKSTRLSGAAPAHSAADPWEKEHHRLSVRMGSHAHPLRRSRREAAFRSPYSSTEPLCSPSESDSDLEPVGAGIQHLQKLSQELDEAIMAEERKQALSDRQGFILKDVYASP

SEQ ID NO: 30359 - protein, 238 aa, Homo sapiens; identical to SEQ ID NO: 30357
  Payload ID: 5948
  Gene Symbol: FAM64A
  Gene Name: family with sequence similarity 64, member A
  Uniprot ID: Q9BSJ6
  ENSP ID: ENSP00000459235

SEQ ID NO: 30360 - protein, 247 aa, Homo sapiens
  Payload ID: 5948
  Gene Symbol: FAM64A
  Gene Name: family with sequence similarity 64, member A
  ENSP ID: ENSP00000459597
MASRWQNMGTSVRRRSLQHQEQLEDSKELQPVVSHQETSVGALGSLCRQFQRRLPLRAVNLNLRAGPSWKRLETPEPGQQGLQAAARSAKSALGAVSQRIQESCQSGTKWLVETQVKARRRKRGAQKGSGSPTHSLSQKSTRLSGAAPAHSAADPWEKEHHRLSVRMGSHAHPLRRSRREAAFRSPYSSTEPLCSPSESDSDLEPVGAGIQHLQKLSQELDEAIMAEERTLRGSSVPCLPMELGKAT

SEQ ID NO: 30361 - protein, 130 aa, Homo sapiens
  Payload ID: 5948
  Gene Symbol: FAM64A
  Gene Name: family with sequence similarity 64, member A
  ENSP ID: ENSP00000459860
  MOD_RES (1)..(1): Any amino acid
XWLVETQVKARRRKRGAQKGSGSPTHSLSQKSTRLSGAAPAHSAADPWEKEHHRLSVRMGSHAHPLRRSRREAAFRSPYSSTEPLCSPSESDSDLEPVGAGIQHLQKLSQELDEAIMAEESGDIVSLIHD

SEQ ID NO: 30362 - protein, 247 aa, Homo sapiens; identical to SEQ ID NO: 30360
  Payload ID: 5948
  Gene Symbol: FAM64A
  Gene Name: family with sequence similarity 64, member A
  ENSP ID: ENSP00000460894

SEQ ID NO: 30363 - protein, 178 aa, Homo sapiens
  Payload ID: 5948
  Gene Symbol: FAM64A
  Gene Name: family with sequence similarity 64, member A
  ENSP ID: ENSP00000460912
MASRWQNMGTSVRRRSLQHQEQLEDSKELQPVVSHQETSVGALGSLCRQFQRRLPLRAVNLNLRAGPSWKRLETPEPENPGVLPKWHQVAGGDPGEGQEAEERSTEGQWIPNSQPEPEEHPAVWSRPCPLSRRPLGEGASPPLCPDGLTCPPITAIKAGGCLPEPLLLNRAPLLSQRV

SEQ ID NO: 30364 - protein, 1219 aa, Homo sapiens
  Payload ID: 5949
  Gene Symbol: FAM65A
  Gene Name: family with sequence similarity 65, member A
  Uniprot ID: Q6ZS17
  ENSP ID: ENSP00000042381
MMSLSVRPQRRLLSARVNRSQSFAGVLGSHERGPRSFPVFSPPGPPRKPPALSRVSRMFSVAHPAAKVPQPERLDLVYTALKRGLTAYLEVHQQEQEKLQGQIRESKRNSRLGFLYDLDKQVKSIERFLRRLEFHASKIDELYEAYCVQRRLRDGAYNMVRAYTTGSPGSREARDSLAEATRGHREYTESMCLLESELEAQLGEFHLRMKGLAGFARLCVGDQYEICMKYGRQRWKLRGRIEGSGKQVWDSEETIFLPLLTEFLSIKVTELKGLANHVVVGSVSCETKDLFAALPQVVAVDINDLGTIKLSLEVTWSPFDKDDQPSAASSVNKASTVTKRFSTYSQSPPDTPSLREQAFYNMLRRQEELENGTAWSLSSESSDDSSSPQLSGTARHSPAPRPLVQQPEPLPIQVAFRRPETPSSGPLDEEGAVAPVLANGHAPYSRTLSHISEASVDAALAEASVEAVGPESLAWGPSPPTHPAPTHGEHPSPVPPALDPGHSATSSTLGTTGSVPTSTDPAPSAHLDSVHKSTDSGPSELPGPTHTTTGSTYSAITTTHSAPSPLTHTTTGSTHKPIISTLTTTGPTLNIIGPVQTTTSPTHTMPSPTHTTASPTHTSTSPTHTPTSPTHKTSMSPPTTTSPTPSGMGLVQTATSPTHPTTSPTHPTTSPILINVSPSTSLELATLSSPSKHSDPTLPGTDSLPCSPPVSNSYTQADPMAPRTPHPSPAHSSRKPLTSPAPDPSESTVQSLSPTPSPPTPAPQHSDLCLAMAVQTPVPTAAGGSGDRSLEEALGALMAALDDYRGQFPELQGLEQEVTRLESLLMQRQGLTRSRASSLSITVEHALESFSFLNEDEDEDNDVPGDRPPSSPEAGAEDSIDSPSARPLSTGCPALDAALVRHLYHCSRLLLKLGTFGPLRCQEAWALERLLREARVLEAVCEFSRRWEIPASSAQEVVQFSASRPGFLTFWDQCTERLSCFLCPVERVLLTFCNQYGARLSLRQPGLAEAVCVKFLEDALGQKLPRRPQPGPGEQLTVFQFWSFVETLDSPTMEAYVTETAEEVLLVRNLNSDDQAVVLKALRLAPEGRLRRDGLRALSSLLVHGNNKVMAAVSTQLRSLSLGPTFRERALLCFLDQLEDEDVQTRVAGCLALGCIKAPEGIEPLVYLCQTDTEAVREAARQSLQQCGEEGQSAHRRLEESLDALPRIFGPGSMASTAF

SEQ ID NO: 30365 - protein, 1223 aa, Homo sapiens
  Payload ID: 5949
  Gene Symbol: FAM65A
  Gene Name: family with sequence similarity 65, member A
  Uniprot ID: Q6ZS17
  ENSP ID: ENSP00000368614
MMSLSVRPQRRLLSARVNRSQSFAGVLGSHERGPSLSFRSFPVFSPPGPPRKPPALSRVSRMFSVAHPAAKVPQPERLDLVYTALKRGLTAYLEVHQQEQEKLQGQIRESKRNSRLGFLYDLDKQVKSIERFLRRLEFHASKIDELYEAYCVQRRLRDGAYNMVRAYTTGSPGSREARDSLAEATRGHREYTESMCLLESELEAQLGEFHLRMKGLAGFARLCVGDQYEICMKYGRQRWKLRGRIEGSGKQVWDSEETIFLPLLTEFLSIKVTELKGLANHVVVGSVSCETKDLFAALPQVVAVDINDLGTIKLSLEVTWSPFDKDDQPSAASSVNKASTVTKRFSTYSQSPPDTPSLREQAFYNMLRRQEELENGTAWSLSSESSDDSSSPQLSGTARHSPAPRPLVQQPEPLPIQVAFRRPETPSSGPLDEEGAVAPVLANGHAPYSRTLSHISEASVDAALAEASVEAVGPESLAWGPSPPTHPAPTHGEHPSPVPPALDPGHSATSSTLGTTGSVPTSTDPAPSAHLDSVHKSTDSGPSELPGPTHTTTGSTYSAITTTHSAPSPLTHTTTGSTHKPIISTLTTTGPTLNIIGPVQTTTSPTHTMPSPTHTTASPTHTSTSPTHTPTSPTHKTSMSPPTTTSPTPSGMGLVQTATSPTHPTTSPTHPTTSPILINVSPSTSLELATLSSPSKHSDPTLPGTDSLPCSPPVSNSYTQADPMAPRTPHPSPAHSSRKPLTSPAPDPSESTVQSLSPTPSPPTPAPQHSDLCLAMAVQTPVPTAAGGSGDRSLEEALGALMAALDDYRGQFPELQGLEQEVTRLESLLMQRQGLTRSRASSLSITVEHALESFSFLNEDEDEDNDVPGDRPPSSPEAGAEDSIDSPSARPLSTGCPALDAALVRHLYHCSRLLLKLGTFGPLRCQEAWALERLLREARVLEAVCEFSRRWEIPASSAQEVVQFSASRPGFLTFWDQCTERLSCFLCPVERVLLTFCNQYGARLSLRQPGLAEAVCVKFLEDALGQKLPRRPQPGPGEQLTVFQFWSFVETLDSPTMEAYVTETAEEVLLVRNLNSDDQAVVLKALRLAPEGRLRRDGLRALSSLLVHGNNKVMAAVSTQLRSLSLGPTFRERALLCFLDQLEDEDVQTRVAGCLALGCIKAPEGIEPLVYLCQTDTEAVREAARQSLQQCGEEGQSAHRRLEESLDALPRIFGPGSMASTAF

SEQ ID NO: 30366 - protein, 1233 aa, Homo sapiens
  Payload ID: 5949
  Gene Symbol: FAM65A
  Gene Name: family with sequence similarity 65, member A
  Uniprot ID: Q6ZS17
  ENSP ID: ENSP00000389456
MNTKKRGSPARTHSMMSLSVRPQRRLLSARVNRSQSFAGVLGSHERGPRSFPVFSPPGPPRKPPALSRVSRMFSVAHPAAKVPQPERLDLVYTALKRGLTAYLEVHQQEQEKLQGQIRESKRNSRLGFLYDLDKQVKSIERFLRRLEFHASKIDELYEAYCVQRRLRDGAYNMVRAYTTGSPGSREARDSLAEATRGHREYTESMCLLESELEAQLGEFHLRMKGLAGFARLCVGDQYEICMKYGRQRWKLRGRIEGSGKQVWDSEETIFLPLLTEFLSIKVTELKGLANHVVVGSVSCETKDLFAALPQVVAVDINDLGTIKLSLEVTWSPFDKDDQPSAASSVNKASTVTKRFSTYSQSPPDTPSLREQAFYNMLRRQEELENGTAWSLSSESSDDSSSPQLSGTARHSPAPRPLVQQPEPLPIQVAFRRPETPSSGPLDEEGAVAPVLANGHAPYSRTLSHISEASVDAALAEASVEAVGPESLAWGPSPPTHPAPTHGEHPSPVPPALDPGHSATSSTLGTTGSVPTSTDPAPSAHLDSVHKSTDSGPSELPGPTHTTTGSTYSAITTTHSAPSPLTHTTTGSTHKPIISTLTTTGPTLNIIGPVQTTTSPTHTMPSPTHTTASPTHTSTSPTHTPTSPTHKTSMSPPTTTSPTPSGMGLVQTATSPTHPTTSPTHPTTSPILINVSPSTSLELATLSSPSKHSDPTLPGTDSLPCSPPVSNSYTQADPMAPRTPHPSPAHSSRKPLTSPAPDPSESTVQSLSPTPSPPTPAPQHSDLCLAMAVQTPVPTAAGGSGDRSLEEALGALMAALDDYRGQFPELQGLEQEVTRLESLLMQRQGLTRSRASSLSITVEHALESFSFLNEDEDEDNDVPGDRPPSSPEAGAEDSIDSPSARPLSTGCPALDAALVRHLYHCSRLLLKLGTFGPLRCQEAWALERLLREARVLEAVCEFSRRWEIPASSAQEVVQFSASRPGFLTFWDQCTERLSCFLCPVERVLLTFCNQYGARLSLRQPGLAEAVCVKFLEDALGQKLPRRPQPGPGEQLTVFQFWSFVETLDSPTMEAYVTETAEEVLLVRNLNSDDQAVVLKALRLAPEGRLRRDGLRALSSLLVHGNNKVMAAVSTQLRSLSLGPTFRERALLCFLDQLEDEDVQTRVAGCLALGCIKAPEGIEPLVYLCQTDTEAVREAARQSLQQCGEEGQSAHRRLEESLDALPRIFGPGSMASTAF

SEQ ID NO: 30367 - protein, 1239 aa, Homo sapiens
  Payload ID: 5949
  Gene Symbol: FAM65A
  Gene Name: family with sequence similarity 65, member A
  Uniprot ID: Q6ZS17
  ENSP ID: ENSP00000400099
MTIWQMQKQAQRGSPARTHSMMSLSVRPQRRLLSARVNRSQSFAGVLGSHERGPRSFPVFSPPGPPRKPPALSRVSRMFSVAHPAAKVPQPERLDLVYTALKRGLTAYLEVHQQEQEKLQGQIRESKRNSRLGFLYDLDKQVKSIERFLRRLEFHASKIDELYEAYCVQRRLRDGAYNMVRAYTTGSPGSREARDSLAEATRGHREYTESMCLLESELEAQLGEFHLRMKGLAGFARLCVGDQYEICMKYGRQRWKLRGRIEGSGKQVWDSEETIFLPLLTEFLSIKVTELKGLANHVVVGSVSCETKDLFAALPQVVAVDINDLGTIKLSLEVTWSPFDKDDQPSAASSVNKASTVTKRFSTYSQSPPDTPSLREQAFYNMLRRQEELENGTAWSLSSESSDDSSSPQLSGTARHSPAPRPLVQQPEPLPIQVAFRRPETPSSGPLDEEGAVAPVLANGHAPYSRTLSHISEASVDAALAEASVEAVGPESLAWGPSPPTHPAPTHGEHPSPVPPALDPGHSATSSTLGTTGSVPTSTDPAPSAHLDSVHKSTDSGPSELPGPTHTTTGSTYSAITTTHSAPSPLTHTTTGSTHKPIISTLTTTGPTLNIIGPVQTTTSPTHTMPSPTHTTASPTHTSTSPTHTPTSPTHKTSMSPPTTTSPTPSGMGLVQTATSPTHPTTSPTHPTTSPILINVSPSTSLELATLSSPSKHSDPTLPGTDSLPCSPPVSNSYTQADPMAPRTPHPSPAHSSRKPLTSPAPDPSESTVQSLSPTPSPPTPAPQHSDLCLAMAVQTPVPTAAGGSGDRSLEEALGALMAALDDYRGQFPELQGLEQEVTRLESLLMQRQGLTRSRASSLSITVEHALESFSFLNEDEDEDNDVPGDRPPSSPEAGAEDSIDSPSARPLSTGCPALDAALVRHLYHCSRLLLKLGTFGPLRCQEAWALERLLREARVLEAVCEFSRRWEIPASSAQEVVQFSASRPGFLTFWDQCTERLSCFLCPVERVLLTFCNQYGARLSLRQPGLAEAVCVKFLEDALGQKLPRRPQPGPGEQLTVFQFWSFVETLDSPTMEAYVTETAEEVLLVRNLNSDDQAVVLKALRLAPEGRLRRDGLRALSSLLVHGNNKVMAAVSTQLRSLSLGPTFRERALLCFLDQLEDEDVQTRVAGCLALGCIKAPEGIEPLVYLCQTDTEAVREAARQSLQQCGEEGQSAHRRLEESLDALPRIFGPGSMASTAF

SEQ ID NO: 30368 - protein, 1238 aa, Homo sapiens
  Payload ID: 5949
  Gene Symbol: FAM65A
  Gene Name: family with sequence similarity 65, member A
  ENSP ID: ENSP00000443568
MTIWQMQKQAQRGSPARTHSMMSLSVRPQRRLLSARVNRSQSFAGVLGSHERGPRSFPVFSPPGPPRKPPALSRVSRMFSVAHPAAKVPQPERLDLVYTALKRGLTAYLEVHQQEQEKLQGQIRESKRNSRLGFLYDLDKQVKSIERFLRRLEFHASKIDELYEAYCVQRRLRDGAYNMVRAYTTGSPGSREARDSLAEATRGHREYTESMCLLESELEAQLGEFHLRMKGLAGFARLCVGDQYEICMKYGRQRWKLRGRIEGSGKQVWDSEETIFLPLLTEFLSIKVTELKGLANHVVVGSVSCETKDLFAALPQVVAVDINDLGTIKLSLEVTWSPFDKDDQPSAASSVNKASTVTKRFSTYSQSPPDTPSLREQAFYNMLRRQEELENGTAWSLSSESSDDSSSPQLSGTARHSPAPRPLVQQPEPLPIQVAFRRPETPSSGPLDEEGAVAPVLANGHAPYSRTLSHISEASVDAALAEASVEAVGPESLAWGPSPPTHPAPTHGEHPSPVPPALDPGHSATSSTLGTTGSVPTSTDPAPSAHLDSVHKSTDSGPSELPGPTHTTTGSTYSAITTTHSAPSPLTHTTTGSTHKPIISTLTTTGPTLNIIGPVQTTTSPTHTMPSPTHTTASPTHTSTSPTHTPTSPTHKTSMSPPTTTSPTPSGMGLVQTATSPTHPTTSPTHPTTSPILINVSPSTSLELATLSSPSKHSDPTLPGTDSLPCSPPVSNSYTQADPMAPRTPHPSPAHSSRKPLTSPAPDPSESTVQSLSPTPSPPTPAPQHSDLCLAMAVQTPVPTAAGGSGDRSLEEALGALMAALDDYRGQFPELQGLEQEVTRLESLLMRQGLTRSRASSLSITVEHALESFSFLNEDEDEDNDVPGDRPPSSPEAGAEDSIDSPSARPLSTGCPALDAALVRHLYHCSRLLLKLGTFGPLRCQEAWALERLLREARVLEAVCEFSRRWEIPASSAQEVVQFSASRPGFLTFWDQCTERLSCFLCPVERVLLTFCNQYGARLSLRQPGLAEAVCVKFLEDALGQKLPRRPQPGPGEQLTVFQFWSFVETLDSPTMEAYVTETAEEVLLVRNLNSDDQAVVLKALRLAPEGRLRRDGLRALSSLLVHGNNKVMAAVSTQLRSLSLGPTFRERALLCFLDQLEDEDVQTRVAGCLALGCIKAPEGIEPLVYLCQTDTEAVREAARQSLQQCGEEGQSAHRRLEESLDALPRIFGPGSMASTAF

SEQ ID NO: 30369 - protein, 589 aa, Homo sapiens
  Payload ID: 5949
  Gene Symbol: FAM65A
  Gene Name: family with sequence similarity 65, member A
  ENSP ID: ENSP00000454376
MNTKKRGSPARTHSMMSLSVRPQRRLLSARVNRSQSFAGVLGSHERGPRAYLEVHQQEQEKLQGQIRESKRNSRLGFLYDLDKQVKSIERFLRRLEFHASKIDELYEAYCVQRRLRDGAYNMVRAYTTGSPGSREARDSLAEATRGHREYTESMCLLESELEAQLGEFHLRMKGLAGFARLCVGDQYEICMKYGRQRWKLRGRIEGSGKQVWDSEETIFLPLLTEFLSIKVTELKGLANHVVVGSVSCETKDLFAALPQVVAVDINDLGTIKLSLEVTWSPFDKDDQPSAASSVNKASTVTKRFSTYSQSPPDTPSLREQAFYNMLRRQEELENGTAWSLSSESSDDSSSPQLSGTARHSPAPRPLVQQPEPLPIQVAFRRPETPSSGPLDEEGAVAPVLANGHAPYSRTLSHISEASVDAALAEASVEAVGPESLAWGPSPPTHPAPTHGEHPSPVPPALDPGHSATSSTLGTTGSVPTSTDPAPSAHLDSVHKSTDSGPSELPGPTHTTTGSTYSAITTTHSAPSPLTHTTTGSTHKPIISTLTTTGPTLNIIGPVQTTTSPTHTMPSPTHTTASPTHTSTSPTHTP

SEQ ID NO: 30370 - protein, 140 aa, Homo sapiens
  Payload ID: 5949
  Gene Symbol: FAM65A
  Gene Name: family with sequence similarity 65, member A
  ENSP ID: ENSP00000455200
  MOD_RES (1)..(1): Any amino acid
XRMKGLAGFARLCVGDQYEAASSYLFPQICMKYGRQRWKLRGRIEGSGKQVWDSEETIFLPLLTEFLSIKVTELKGLANHVVVGSVSCETKDLFAALPQVVAVDINDLGTIKLSLEVTWSPFDKDDQPSAASSVNKASTV

SEQ ID NO: 30371 - protein, 8 aa, Homo sapiens
  Payload ID: 5949
  Gene Symbol: FAM65A
  Gene Name: family with sequence similarity 65, member A
  ENSP ID: ENSP00000455239
MMSLSVRP

SEQ ID NO: 30372 - protein, 152 aa, Homo sapiens
  Payload ID: 5949
  Gene Symbol: FAM65A
  Gene Name: family with sequence similarity 65, member A
  ENSP ID: ENSP00000455795
MMSLSVRPQRRLLSARVNRSQSFAGVLGSHERGPRSFPVFSPPGPPRKPPALSRVSRMFSVAHPAAKVPQPERLDLVYTALKRGLTAYLEVHQQEQEKLQGQIRESKRNSRLGFLYDLDKQVKSIERFLRRLEFHASKIDELYEAYCVQRRL

SEQ ID NO: 30373 - protein, 88 aa, Homo sapiens
  Payload ID: 5949
  Gene Symbol: FAM65A
  Gene Name: family with sequence similarity 65, member A
  ENSP ID: ENSP00000456525
MMSLSVRPQRRLLSARVNRSQSFAGVLGSHERGPRSFPVFSPPGPPRKPPALSRVSRMFSVAHPAAKVPQPERLDLVYTALKRGLTAY

SEQ ID NO: 30374 - protein, 627 aa, Homo sapiens
  Payload ID: 5949
  Gene Symbol: FAM65A
  Gene Name: family with sequence similarity 65, member A
  ENSP ID: ENSP00000456893
MMSLSVRPQRRLLSARVNRSQSFAGVLGSHERGPRSFPVFSPPGPPRKPPALSRVSRMFSVAHPAAKVPQPERLDLVYTALKRGLTAYLEVHQQEQEKLQGQIRESKRNSRLGFLYDLDKQVKSIERFLRRLEFHASKIDELYEAYCVQRRLRDGAYNMVRAYTTGSPGSREARDSLAEATRGHREYTESMCLLESELEAQLGEFHLRMKGLAGFARLCVGDQYEICMKYGRQRWKLRGRIEGSGKQVWDSEETIFLPLLTEFLSIKVTELKGLANHVVVGSVSCETKDLFAALPQVVAVDINDLGTIKLSLEVTWSPFDKDDQPSAASSVNKASTVTKRFSTYSQSPPDTPSLREQAFYNMLRRQEELENGTAWSLSSESSDDSSSPQLSGTARHSPAPRPLVQQPEPLPIQVAFRRPETPSSGPLDEEGAVAPVLANGHAPYSRTLSHISEASVDAALAEASVEAVGPESLAWGPSPPTHPAPTHGEHPSPVPPALDPGHSATSSTLGTTGSVPTSTDPAPSAHLDSVHKSTDSGPSELPGPTHTTTGSTYSAITTTHSAPSPLTHTTTGSTHKPIISTLTTTGPTLNIIGPVQTTTSPTHTMPSPTHTTASPTHTSTSPTHTPT

SEQ ID NO: 30375 - protein, 156 aa, Homo sapiens
  Payload ID: 5949
  Gene Symbol: FAM65A
  Gene Name: family with sequence similarity 65, member A
  ENSP ID: ENSP00000456924
  MOD_RES (1)..(1): Any amino acid
XVRHLYHCSRLLLKLGTFGPLRCQEAWALERLLREARVLEAVCEFSRRWEIPASSAQEVCVKFLEDALGQKLPRRPQPGPGEQLTVFQFWSFVETLDSPTMEAYVTETAEEVLLVRNLNSDDQAVVLKALRLAPEGRLRRDGLRALSSLLVHGNNK

SEQ ID NO: 30376 - protein, 202 aa, Homo sapiens
  Payload ID: 5949
  Gene Symbol: FAM65A
  Gene Name: family with sequence similarity 65, member A
  ENSP ID: ENSP00000457419
  MOD_RES (1)..(1): Any amino acid
XRPQRRLLSARVNRSQSFAGVLGSHERGPRSFPVFSPPGPPRKPPALSRVSRMFSVAHPAAKVPQPERLDLVYTALKRGLTAYLEVHQQEQEKLQGQIRESKRNSRLGFLYDLDKSSPLNASCDDWSSMPARSMSCMRHTVSSGVSGMVPTTWSVPTPLGPREAERPGTAWQRPLGGIASTRRACVCWRASWRHSWASFISE

SEQ ID NO: 30377 - protein, 96 aa, Homo sapiens
  Payload ID: 5949
  Gene Symbol: FAM65A
  Gene Name: family with sequence similarity 65, member A
  ENSP ID: ENSP00000457739
MMSLSVRPQRRLLSARVNRSQSFAGVLGSHERGPRSFPVFSPPGPPRKPPALSRVSRMFSVAHPAAKVPQPERLDLVYTALKRGLTAYLEVHQQEQ

SEQ ID NO: 30378 - protein, 52 aa, Homo sapiens
  Payload ID: 5949
  Gene Symbol: FAM65A
  Gene Name: family with sequence similarity 65, member A
  ENSP ID: ENSP00000457888
MTIWQMQKQAQRGSPARTHSMMSLSVRPQRRLLSARVNRSQSFAGVLGSHER

SEQ ID NO: 30379 - protein, 1068 aa, Homo sapiens
  Payload ID: 5950
  Gene Symbol: FAM65B
  Gene Name: family with sequence similarity 65, member B
  Uniprot ID: Q9Y4F9
  ENSP ID: ENSP00000259698
MLVGSQSFSPGGPNGIIRSQSFAGFSGLQERRSRCNSFIENSSALKKPQAKLKKMHNLGHKNNNPPKEPQPKRVEEVYRALKNGLDEYLEVHQTELDKLTAQLKDMKRNSRLGVLYDLDKQIKTIERYMRRLEFHISKVDELYEAYCIQRRLQDGASKMKQAFATSPASKAARESLTEINRSFKEYTENMCTIEVELENLLGEFSIKMKGLAGFARLCPGDQYEIFMKYGRQRWKLKGKIEVNGKQSWDGEETVFLPLIVGFISIKVTELKGLATHILVGSVTCETKELFAARPQVVAVDINDLGTIKLNLEITWYPFDVEDMTASSGAGNKAAALQRRMSMYSQGTPETPTFKDHSFFRWLHPSPDKPRRLSVLSALQDTFFAKLHRSRSFSDLPSLRPSPKAVLELYSNLPDDIFENGKAAEEKMPLSLSFSDLPNGDCALTSHSTGSPSNSTNPEITITPAEFNLSSLASQNEGMDDTSSASSRNSLGEGQEPKSHLKEEDPEEPRKPASAPSEACRRQSSGAGAEHLFLENDVAEALLQESEEASELKPVELDTSEGNITKQLVKRLTSAEVPMATDRLLSEGSVGGESEGCRSFLDGSLEDAFNGLLLALEPHKEQYKEFQDLNQEVMNLDDILKCKPAVSRSRSSSLSLTVESALESFDFLNTSDFDEEEDGDEVCNVGGGADSVFSDTETEKHSYRSVHPEARGHLSEALTEDTGVGTSVAGSPLPLTTGNESLDITIVRHLQYCTQLVQQIVFSSKTPFVARSLLEKLSRQIQVMEKLAAVSDENIGNISSVVEAIPEFHKKLSLLSFWTKCCSPVGVYHSPADRVMKQLEASFARTVNKEYPGLADPVFRTLVSQILDRAEPLLSSSLSSEVVTVFQYYSYFTSHGVSDLESYLSQLARQVSMVQTLQSLRDEKLLQTMSDLAPSNLLAQQEVLRTLALLLTREDNEVSEAVTLYLAAASKNQHFREKALLYYCEALTKTNLQLQKAACLALKILEATESIKMLVTLCQSDTEEIRNVASETLLSLGEDGRLAYEQLDKFPRDCVKVGGRHGTEVATAF

SEQ ID NO: 30380 - protein, 591 aa, Homo sapiens
  Payload ID: 5950
  Gene Symbol: FAM65B
  Gene Name: family with sequence similarity 65, member B
  Uniprot ID: Q9Y4F9
  ENSP ID: ENSP00000367262
MLVGSQSFSPGGPNGIIRSQSFAGFSGLQERRSRCNSFIENSSALKKPQAKLKKMHNLGHKNNNPPKEPQPKRVEEVYRALKNGLDEYLEVHQTELDKLTAQLKDMKRNSRLGVLYDLDKQIKTIERYMRRLEFHISKVDELYEAYCIQRRLQDGASKMKQAFATSPASKAARESLTEINRSFKEYTENMCTIEVELENLLGEFSIKMKGLAGFARLCPGDQYEIFMKYGRQRWKLKGKIEVNGKQSWDGEETVFLPLIVGFISIKVTELKGLATHILVGSVTCETKELFAARPQVVAVDINDLGTIKLNLEITWYPFDVEDMTASSGAGNKAAALQRRMSMYSQGTPETPTFKDHSFFSNLPDDIFENGKAAEEKMPLSLSFSDLPNGDCALTSHSTGSPSNSTNPEITITPAEFNLSSLASQNEGMDDTSSASSRNSLGEGQEPKSHLKEEDPEEPRKPASAPSEACRRQSSGAGAEHLFLENDVAEALLQESEEASELKPVELDTSEGNITKQLVKRLTSAEVPMATDRLLSEGSVGGESEGCRSFLDGSLEDAFNGLLLALEPHKEQYKEFQDLNQEVMNLDDILKK

SEQ ID NO: 30381 - protein, 613 aa, Homo sapiens
  Payload ID: 5950
  Gene Symbol: FAM65B
  Gene Name: family with sequence similarity 65, member B
  ENSP ID: ENSP00000438425
MLVGSQSFSPGGPNGIIRSQSFAGFSGLQERRSRCNSFIENSSALKKPQAKLKKMHNLGHKNNNPPKEPQPKRVEEVYRALKNGLDEYLEVHQTELDKLTAQLKDMKRNSRLGVLYDLDKQIKTIERYMRRLEFHISKVDELYEAYCIQRRLQDGASKMKQAFATSPASKAARESLTEINRSFKEYTENMCTIEVELENLLGEFSIKMKGLAGFARLCPGDQYEIFMKYGRQRWKLKGKIEVNGKQSWDGEETVFLPLIVGFISIKVTELKGLATHILVGSVTCETKELFAARPQVVAVDINDLGTIKLNLEITWYPFDVEDMTASSGAGNKAAALQRRMSMYSQGTPETPTFKDHSFFSNLPDDIFENGKAAEEKMPLSLSFSDLPNGDCALTSHSTGSPSNSTNPEITITPAEFNLSSLASQNEGMDDTSSASSRNSLGEGQEPKSHLKEEDPEEPRKPASAPSEACRRQSSGAGAEHLFLENDVAEALLQESEEASELKPVELDTSEGNITKQLVKRLTSAEVPMATDRLLSEGSVGGESEGCRSFLDGSLEDAFNGLLLALEPHKEQYKEFQDLNQEVMNLDDILKDAKHLDDQKLNGAASWTEITEGE

SEQ ID NO: 30382 - protein, 1047 aa, Homo sapiens
  Payload ID: 5950
  Gene Symbol: FAM65B
  Gene Name: family with sequence similarity 65, member B
  ENSP ID: ENSP00000441138
MQFFDAEELLVDEEDDVFGEGLPTRLPEIMLVGSQSFSPGGPNGIIRSQSFAGFSGLQERRSRCNSFIENSSALKKPQAKLKKMHNLGHKNNNPPKEPQPKRVEEVYRALKNGLDEYLEVHQTELDKLTAQLKDMKRNSRLGVLYDLDKQIKTIERYMRRLEFHISKVDELYEAYCIQRRLQDGASKMKQAFATSPASKAARESLTEINRSFKEYTENMCTIEVELENLLGEFSIKMKGLAGFARLCPGDQYEIFMKYGRQRWKLKGKIEVNGKQSWDGEETVFLPLIVGFISIKVTELKGLATHILVGSVTCETKELFAARPQVVAVDINDLGTIKLNLEITWYPFDVEDMTASSGAGNKAAALQRRMSMYSQGTPETPTFKDHSFFSNLPDDIFENGKAAEEKMPLSLSFSDLPNGDCALTSHSTGSPSNSTNPEITITPAEFNLSSLASQNEGMDDTSSASSRNSLGEGQEPKSHLKEEDPEEPRKPASAPSEACRRQSSGAGAEHLFLENDVAEALLQESEEASELKPVELDTSEGNITKQLVKRLTSAEVPMATDRLLSEGSVGGESEGCRSFLDGSLEDAFNGLLLALEPHKEQYKEFQDLNQEVMNLDDILKCKPAVSRSRSSSLSLTVESALESFDFLNTSDFDEEEDGDEVCNVGGGADSVFSDTETEKHSYRSVHPEARGHLSEALTEDTGVGTSVAGSPLPLTTGNESLDITIVRHLQYCTQLVQQIVFSSKTPFVARSLLEKLSRQIQVMEKLAAVSDENIGNISSVVEAIPEFHKKLSLLSFWTKCCSPVGVYHSPADRVMKQLEASFARTVNKEYPGLADPVFRTLVSQILDRAEPLLSSSLSSEVVTVFQYYSYFTSHGVSDLESYLSQLARQVSMVQTLQSLRDEKLLQTMSDLAPSNLLAQQEVLRTLALLLTREDNEVSEAVTLYLAAASKNQHFREKALLYYCEALTKTNLQLQKAACLALKILEATESIKMLVTLCQSDTEEIRNVASETLLSLGEDGRLAYEQLDKFPRDCVKVGGRHGTEVATAF

SEQ ID NO: 30383 - protein, 647 aa, Homo sapiens
  Payload ID: 5950
  Gene Symbol: FAM65B
  Gene Name: family with sequence similarity 65, member B
  ENSP ID: ENSP00000441305
MVLPSRLHWIRNRPWRDRIRRRQLNRLPTRLPEIMLVGSQSFSPGGPNGIIRSQSFAGFSGLQERRSRCNSFIENSSALKKPQAKLKKMHNLGHKNNNPPKEPQPKRVEEVYRALKNGLDEYLEVHQTELDKLTAQLKDMKRNSRLGVLYDLDKQIKTIERYMRRLEFHISKVDELYEAYCIQRRLQDGASKMKQAFATSPASKAARESLTEINRSFKEYTENMCTIEVELENLLGEFSIKMKGLAGFARLCPGDQYEIFMKYGRQRWKLKGKIEVNGKQSWDGEETVFLPLIVGFISIKVTELKGLATHILVGSVTCETKELFAARPQVVAVDINDLGTIKLNLEITWYPFDVEDMTASSGAGNKAAALQRRMSMYSQGTPETPTFKDHSFFSNLPDDIFENGKAAEEKMPLSLSFSDLPNGDCALTSHSTGSPSNSTNPEITITPAEFNLSSLASQNEGMDDTSSASSRNSLGEGQEPKSHLKEEDPEEPRKPASAPSEACRRQSSGAGAEHLFLENDVAEALLQESEEASELKPVELDTSEGNITKQLVKRLTSAEVPMATDRLLSEGSVGGESEGCRSFLDGSLEDAFNGLLLALEPHKEQYKEFQDLNQEVMNLDDILKDAKHLDDQKLNGAASWTEITEGE

SEQ ID NO: 30384 - protein, 536 aa, Homo sapiens [sequence omitted]

SEQ ID NO: 30385 - protein, 1068 aa, Homo sapiens; identical to SEQ ID NO: 30379
  Payload ID: 5950
  Gene Symbol: FAM65B
  Gene Name: family with sequence similarity 65, member B
  Uniprot ID: Q9Y4F9
  ENSP ID: ENSP00000482957

SEQ ID NO: 30386 - protein, 946 aa, Homo sapiens
  Payload ID: 5951
  Gene Symbol: FAM65C
  Gene Name: family with sequence similarity 65, member C
  Uniprot ID: Q96MK2
  ENSP ID: ENSP00000045083
MSVRLRFLSPGDTGAVGVVGRSASFAGFSSAQSRRIAKSINRNSVRSRMPAKSSKMYGTLRKGSVCADPKPQQVKKIFEALKRGLKEYLCVQQAELDHLSGRHKDTRRNSRLAFYYDLDKQTRCVERHIRKMEFHISKVDELYEDYCIQCRLRDGASSMQRAFARCPPSRAARESLQELGRSLHECAEDMWLIEGALEVHLGEFHIRMKGLVGYARLCPGDHYEVLMRLGRQRWKLKGRIESDDSQTWDEEEKAFIPTLHENLDIKVTELRGLGSLAVGAVTCDIADFFTTRPQVIVVDITELGTIKLQLEVQWNPFDTESFLVSPSPTGKFSMGSRKGSLYNWTPPSTPSFRERYYLSVLQQPTQQALLLGGPRATSILSYLSDSDLRGPSLRSQSQELPEMDSFSSEDPRDTETSTSASTSDVGFLPLTFGPHASIEEEAREDPLPPGLLPEMAHLSGGPFAEQPGWRNLGGESPSLPQGSLFHSGTASSSQNGHEEGATGDREDGPGVALEGPLQEVLELLRPTDSTQPQLRELEYQVLGFRDRLKPCRARQEHTSAESLMECILESFAFLNADFALDELSLFGGSQGLRKDRPLPPPSSLKASSRELTAGAPELDVLLMVHLQVCKALLQKLASPNLSRLVQECLLEEVAQQKHVLETLSVLDFEKVGKATSIEEIIPQASRTKGCLKLWRGCTGPGRVLSCPATTLLNQLKKTFQHRVRGKYPGQLEIACRRLLEQVVSCGGLLPGAGLPEEQIITWFQFHSYLQRQSVSDLEKHFTQLTKEVTLIEELHCAGQAKVVRKLQGKRLGQLQPLPQTLRAWALLQLDGTPRVCRAASARLAGAVRNRSFREKALLFYTNALAENDARLQQAACLALKHLKGIESIDQTASLCQSDLEAVRAAARETTLSFGEKGRLAFEKMDKLCSEQREVFCQEADVEITIF

SEQ ID NO: 30387 - protein, 946 aa, Homo sapiens; identical to SEQ ID NO: 30386
  Payload ID: 5951
  Gene Symbol: FAM65C
  Gene Name: family with sequence similarity 65, member C
  Uniprot ID: Q96MK2
  ENSP ID: ENSP00000332663

SEQ ID NO: 30388 - protein, 428 aa, Homo sapiens
  Payload ID: 5952
  Gene Symbol: FAM69A
  Gene Name: family with sequence similarity 69, member A
  Uniprot ID: Q5T7M9
  ENSP ID: ENSP00000359333
MARSLCPGAWLRKPYYLQARFSYVRMKYLFFSWLVVFVGSWIIYVQYSTYTELCRGKDCKKIICDKYKTGVIDGPACNSLCVTETLYFGKCLSTKPNNQMYLGIWDNLPGVVKCQMEQALHLDFGTELEPRKEIVLFDKPTRGTTVQKFKEMVYSLFKAKLGDQGNLSELVNLILTVADGDKDGQVSLGEAKSAWALLQLNEFLLMVILQDKEHTPKLMGFCGDLYVMESVEYTSLYGISLPWVIELFIPSGFRRSMDQLFTPSWPRKAKIAIGLLEFVEDVFHGPYGNFLMCDTSAKNLGYNDKYDLKMVDMRKIVPETNLKELIKDRHCESDLDCVYGTDCRTSCDQSTMKCTSEVIQPNLAKACQLLKDYLLRGAPSEIREELEKQLYSCIALKVTANQMEMEHSLILNNLKTLLWKKISYTNDS

SEQ ID NO: 30389 - protein, 403 aa, Homo sapiens
  Payload ID: 5952
  Gene Symbol: FAM69A
  Gene Name: family with sequence similarity 69, member A
  ENSP ID: ENSP00000482478
MKYLFFSWLVVFVGSWIIYVQYSTYTELCRGKDCKKIICDKYKTGVIDGPACNSLCVTETLYFGKCLSTKPNNQMYLGIWDNLPGVVKCQMEQALHLDFGTELEPRKEIVLFDKPTRGTTVQKFKEMVYSLFKAKLGDQGNLSELVNLILTVADGDKDGQVSLGEAKSAWALLQLNEFLLMVILQDKEHTPKLMGFCGDLYVMESVEYTSLYGISLPWVIELFIPSGFRRSMDQLFTPSWPRKAKIAIGLLEFVEDVFHGPYGNFLMCDTSAKNLGYNDKYDLKMVDMRKIVPETNLKELIKDRHCESDLDCVYGTDCRTSCDQSTMKCTSEVIQPNLAKACQLLKDYLLRGAPSEIREELEKQLYSCIALKVTANQMEMEHSLILNNLKTLLWKKISYTNDS

SEQ ID NO: 30390 - protein, 369 aa, Homo sapiens
  Payload ID: 5952
  Gene Symbol: FAM69A
  Gene Name: family with sequence similarity 69, member A
  ENSP ID: ENSP00000482718
MARSLCPGAWLRKPYYLQARFSYVRMKYLFFSWLVVFVGSWIIYVQYSTYTELCRGKDCKKIICDKYKTGVIDGPACNSLCVTETLYFGKCLSTKPNNQAKLGDQGNLSELVNLILTVADGDKDGQVSLGEAKSAWALLQLNEFLLMVILQDKEHTPKLMGFCGDLYVMESVEYTSLYGISLPWVIELFIPSGFRRSMDQLFTPSWPRKAKIAIGLLEFVEDVFHGPYGNFLMCDTSAKNLGYNDKYDLKMVDMRKIVPETNLKELIKDRHCESDLDCVYGTDCRTSCDQSTMKCTSEVIQPNLAKACQLLKDYLLRGAPSEIREELEKQLYSCIALKVTANQMEMEHSLILNNLKTLLWKKISYTNDS

SEQ ID NO: 30391 - protein, 162 aa, Homo sapiens
  Payload ID: 5952
  Gene Symbol: FAM69A
  Gene Name: family with sequence similarity 69, member A
  Uniprot ID: Q5T7M9
  ENSP ID: ENSP00000483279
MARSLCPGAWLRKPYYLQARFSYVRMKYLFFSWLVVFVGSWIIYVQYSTYTELCRGKDCKKIICDKYKTGVIDGPACNSLCVTETLYFGKCLSTKPNNQMYLGIWDNLPGVVKCQMEQALHLDFGTELEPRKEIVLFDKPTRGTTVQKFKEMVYSLFKDQHR

SEQ ID NO: 30392 - protein, 383 aa, Homo sapiens
  Payload ID: 5952
  Gene Symbol: FAM69A
  Gene Name: family with sequence similarity 69, member A
  ENSP ID: ENSP00000484866
MARSLCPGAWLRKPYYLQCDKYKTGVIDGPACNSLCVTETLYFGKCLSTKPNNQMYLGIWDNLPGVVKCQMEQALHLDFGTELEPRKEIVLFDKPTRGTTVQKFKEMVYSLFKAKLGDQGNLSELVNLILTVADGDKDGQVSLGEAKSAWALLQLNEFLLMVILQDKEHTPKLMGFCGDLYVMESVEYTSLYGISLPWVIELFIPSGFRRSMDQLFTPSWPRKAKIAIGLLEFVEDVFHGPYGNFLMCDTSAKNLGYNDKYDLKMVDMRKIVPETNLKELIKDRHCESDLDCVYGTDCRTSCDQSTMKCTSEVIQPNLAKACQLLKDYLLRGAPSEIREELEKQLYSCIALKVTANQMEMEHSLILNNLKTLLWKKISYTNDS

SEQ ID NO: 30393 - protein, 344 aa, Homo sapiens
  Payload ID: 5953
  Gene Symbol: FAM69B
  Gene Name: family with sequence similarity 69, member B
  Uniprot ID: Q5VUD6
  ENSP ID: ENSP00000360756
MVEWRTCLSVAPGQQVYSGLWRDKDVTIKCGIEETLDSKARSDAAPRRELVLFDKPTRGTSIKEFREMTLSFLKANLGDLPSLPALVGQVLLMADFNKDNRVSLAEAKSVWALLQRNEFLLLLSLQEKEHASRLLGYCGDLYLTEGVPHGAWHAAALPPLLRPLLPPALQGALQQWLGPAWPWRAKIAIGLLEFVEELFHGSYGTFYMCETTLANVGYTATYDFKMADLQQVAPEATVRRFLQGRRCEHSTDCTYGRDCRAPCDRLMRQCKGDLIQPNLAKVCALLRGYLLPGAPADLREELGTQLRTCTTLSGLASQVEAHHSLVLSHLKTLLWKKISNTKYS

SEQ ID NO: 30394 - protein, 431 aa, Homo sapiens
  Payload ID: 5953
  Gene Symbol: FAM69B
  Gene Name: family with sequence similarity 69, member B
  Uniprot ID: Q5VUD6
  ENSP ID: ENSP00000360757
MRRLRRLAHLVLFCPFSKRLQGRLPGLRVRCIFLAWLGVFAGSWLVYVHYSSYSERCRGHVCQVVICDQYRKGIISGSVCQDLCELHMVEWRTCLSVAPGQQVYSGLWRDKDVTIKCGIEETLDSKARSDAAPRRELVLFDKPTRGTSIKEFREMTLSFLKANLGDLPSLPALVGQVLLMADFNKDNRVSLAEAKSVWALLQRNEFLLLLSLQEKEHASRLLGYCGDLYLTEGVPHGAWHAAALPPLLRPLLPPALQGALQQWLGPAWPWRAKIAIGLLEFVEELFHGSYGTFYMCETTLANVGYTATYDFKMADLQQVAPEATVRRFLQGRRCEHSTDCTYGRDCRAPCDRLMRQCKGDLIQPNLAKVCALLRGYLLPGAPADLREELGTQLRTCTTLSGLASQVEAHHSLVLSHLKTLLWKKISNTKYS

SEQ ID NO: 30395 - protein, 266 aa, Homo sapiens
  Payload ID: 5953
  Gene Symbol: FAM69B
  Gene Name: family with sequence similarity 69, member B
  ENSP ID: ENSP00000479422
MVEWRTCLSVAPGQQVYSGLWRDKDVTIKCGIEETLDSKARSDAAPRRELVLFDKPTRGTSIKEFREMTLSFLKANLGDLPSLPALVGQVLLMADFNKDNRVSLAEAKSVWALLQRNEFLLLLSLQEKEHASRLLGYCGDLYLTEGVPHGAWHAAALPPLLRPLLPPALQGALQQWLGPAWPWRAKIAIGLLEFVEELFHGSYGTFYMCETTLANVGYTATYDFKMADLQQVAPEATVRRFLQGRRCEHSTDCTTGATAGPRVTGS

SEQ ID NO: 30396 - protein, 419 aa, Homo sapiens
  Payload ID: 5954
  Gene Symbol: FAM69C
  Gene Name: family with sequence similarity 69, member C
  Uniprot ID: Q0P6D2
  ENSP ID: ENSP00000344331
MARAAGARGPAGWCRRRGRCGRGTLLAFAAWTAGWVLAAALLLRAHPGVLSERCTDEKSRRILAALCQDYQGGTLAGDLCEDLCVAGELLFQRCLHYNRGKKVLQADWRGRPVVLKSKEEAFSSFPPLSLLEEEAGEGGQDMPEAELLLMVAGEVKSALGLELSNSSLGPWWPGRRGPRWRGQLASLWALLQQEEYVYFSLLQDLSPHVLPVLGSCGHFYAVEFLAAGSPHHRALFPLDRAPGAPGGGQAKAISDIALSFLDMVNHFDSDFSHRLHLCDIKPENFAIRSDFTVVAIDVDMAFFEPKMREILEQNCTGDEDCNFFDCFSRCDLRVNKCGAQRVNNNLQVICDKIFRHWFSAPLKSSAVSFQLQLQLQEAVQECADPGVPSGNTRRAASSVFWKLRQLLQATLRELQEAEK

SEQ ID NO: 30397 - protein, 120 aa, Homo sapiens
  Payload ID: 5954
  Gene Symbol: FAM69C
  Gene Name: family with sequence similarity 69, member C
  Uniprot ID: Q0P6D2
  ENSP ID: ENSP00000383148
MAFFEPKMREILEQNCTGDEDCNFFDCFSRCDLRVNKCGAQRVNNNLQVICDKIFRHWFSAPLKSSAVSFQLQLQLQEAVQECADPGVPSGNTRRAASSVFWKLRQLLQATLRELQEAEK

SEQ ID NO: 30398 - protein, 594 aa, Homo sapiens
  Payload ID: 5955
  Gene Symbol: FAM71A
  Gene Name: family with sequence similarity 71, member A
  Uniprot ID: Q8IYT1
  ENSP ID: ENSP00000294829
MNADFLLPYYTAQSGSSMSMFNTTMGKLQRQLYKGEYDIFKYAPIFESDFIQITKRGEVIDVHNRVRMVTMGIARTSPILPLPDVMLLARPATGCEEYAGHGQATKRKKRKAAKNLELTRLLPLRFVRISVQDHEKQQLRLKFATGRSCYLQLCPALDTRDDLFAYWEKLIYLLRPPMESNSSTCGIPAEDMMWMPVFQEDRRSLGAVNLQGKGDQDQVSIQSLHMVSEVCGATSAAYAGGEGLQNDFNKPTNVLNASIPKTSTELAEEPATGGIKEAAAAGAAAGAATGTVAGALSVAAANSAPGQVSAAIAGAATIGAGGNKGNMALAGTASMAPNSTKVAVAGAAGKSSEHVSSASMSLSREGSVSLAIAGVVLTSRTAAEADMDAAAGPPVSTRQSKSSLSGQHGRERTQASAEGCKEGRERREKDRALGRSSHRRRTGESRHKTRGDKIAQKSSSRSSFSHRANRDDKKEKGCGNPGSSRHRDSHKGVSHTPISKESRTSHKSGRSLWTTSSGSSKGLGRVSSFLRNVRANLTTKVVGTPHGRDVNVMAKMAERSTNVAIAETAEGGQGLETVGSMTPDIMETVTFEAH

SEQ ID NO: 30399 - protein, 605 aa, Homo sapiens
  Payload ID: 5956
  Gene Symbol: FAM71B
  Gene Name: family with sequence similarity 71, member B
  Uniprot ID: Q8TC56
  ENSP ID: ENSP00000305596
MSNESCLPYYTAHSYSSMSAFKTSMGDLQRQLYNRGEYNIFKYAPMFESNFIQINKKGEVIDVHNRVRMVTVGIVCTSPILPLPDVMVLAQPTKICEQHVRWGRFAKGRGRRPVKTLELTRLLPLKFVKISIHDHEKQQLRLKLATGRTFYLQLCPSSDTREDLFCYWEKLVYLLRPPVESYCSTPTLLSGDAPPEDNKSLVAAELHREGDQSETGLYKPCDVSAATSSAYAGGEGIQHASHGTASAASPSTSTPGAAEGGAARTAGGMAVAGTATGPRTDVAIAGAAMSPATGAMSIATTKSAGPGQVTTALAGAAIKNPGENESSKSMAGAANISSEGISLALVGAASTSLEGTSTSMAGAASLSQDSSLSAAFAGSITTSKCAAERTEGPAVGPLISTLQSEGYMSERDGSQKVSQPSAEVWNENKERREKKDRHPSRKSSHHRKAGESHRRRAGDKNQKASSHRSASGHKNTRDDKKEKGYSNVRGKRHGSSRKSSTHSSTKKESRTTQELGKNQSASSTGALQKKASKISSFLRSLRATPGSKTRVTSHDREVDIVAKMVEKQNIEAKVEKAQGGQELEMISGTMTSEKTEMIVFETKSI

SEQ ID NO: 30400 - protein, 241 aa, Homo sapiens
  Payload ID: 5957
  Gene Symbol: FAM71C
  Gene Name: family with sequence similarity 71, member C
  Uniprot ID: Q8NEG0
  ENSP ID: ENSP00000315247
MEDCCMLPYYTAQSSPAMGMFNTSMGKLQRQLYKGEYTIFRYAPMFESDFIQISKRGEVIDVHNRARMVTMGIVRTSPCLTLPDVMLLARPAAVCDNARCGPATQKRESPPAEILELTRLLPLMFVKITIHNSVKKQLHLKLATGRSFYLQLCPPSDASEDLFVHWENLVYILRPPVEAYSDTRAILAGNTLDSSVLEEVQRSPVGYAMKFCEEKEQFRISRLHMNAEMFGSTYCDYTIEI

SEQ ID NO: 30401 - protein, 422 aa, Homo sapiens
  Payload ID: 5958
  Gene Symbol: FAM71D
  Gene Name: family with sequence similarity 71, member D
  Uniprot ID: Q8N9W8
  ENSP ID: ENSP00000431905
MKKNTSKTTMRINKQDALCTPHSHDPRDLQNMLDGGEYAPFVSPPMLESNFIQVNRRGESIYLHNRANWVTVGICFSSSTHKIPNVMLLAHLTPGAQKDTETLFKSLLTSPPAEKLVLTRFLPLQFVTLSVHDAENMSLKVKLVSGRAYYLQLCTSAYKQDTLFSQWVALISLLNQEKAKVSKVSEVSSLSGITNSTDITGSMDVTDVTTFTAILTPYMYAGTGPEHVRDSIDFPEFTDITDITDVTDLPENEVPEVPDVRIVTEVIEVREATEVTDSSDITNCSGVTVVFENNDLIRAKQEEKEKLKNILKPGCLQDTKSKSELKESSKHVTISNITLTFEGKRYFQTTLTPVESEANTSKEMKDKTSEEKMPDFQSTALKAEESRSLRTESNTSVLSPHIKSPSNFLKLVPHLSAPFSRE

SEQ ID NO: 30402 - protein, 400 aa, Homo sapiens
  Payload ID: 5958
  Gene Symbol: FAM71D
  Gene Name: family with sequence similarity 71, member D
  Uniprot ID: Q8N9W8
  ENSP ID: ENSP00000432195
MKKNTSKTTMRINKQDALCTPHSHDPRDLQNMLDGGEYAPFVSPPMLESNFIQVNRRGESIYLHNRANWVTVGICFSSSTHKIPNVMLLAHLTPGAQKDTETLFKSLLTSPPAEKLVLTRFLPLQFVTLSVHDAENMSLKVKLVSGRAYYLQLCTSAYKQDTLFSQWVALISLLNQEKAKVSKVSEVSSLSGITNSTDITGSMDVTDVTTFTAILTPYMYAGTGPEHVRDSIDFPEFTDITDITDVTDLPENEVPEVPDVRIVTEVIEVREATEVTDSSDITNCSGVTVVFENNDLIRAKQEEKEKLKNILKPGCLQDTKSKRYFQTTLTPVESEANTSKEMKDKTSEEKMPDFQSTALKAEESRSLRTESNTSVLSPHIKSPSNFLKLVPHLSAPFSRE

SEQ ID NO: 30403 - protein, 77 aa, Homo sapiens
  Payload ID: 5958
  Gene Symbol: FAM71D
  Gene Name: family with sequence similarity 71, member D
  ENSP ID: ENSP00000433183
MKKNTSKTTMRINKQDALCTPHSHDPRDLQNMLDGGEYAPFVSPPMLESNFIQVNRRGESIYLHNRANWVTVGICFS

SEQ ID NO: 30404 - protein, 65 aa, Homo sapiens
  Payload ID: 5958
  Gene Symbol: FAM71D
  Gene Name: family with sequence similarity 71, member D
  ENSP ID: ENSP00000436280
MKKNTSKTTMRINKQDALCTPHSHDPRDLQNMLDGGEYAPFVSPPMLESNFIQVNRRGESIYLHN

SEQ ID NO: 30405 - protein, 71 aa, Homo sapiens
  Payload ID: 5958
  Gene Symbol: FAM71D
  Gene Name: family with sequence similarity 71, member D
  ENSP ID: ENSP00000450695
  MOD_RES (1)..(1): Any amino acid
XKRYFQTTLTPVESEANTSKEMKDKTSEEKMPDFQSTALKAEESRSLRTESNTSVSPNYGLISDSLIFFPR

SEQ ID NO: 30406 - protein, 86 aa, Homo sapiens
  Payload ID: 5958
  Gene Symbol: FAM71D
  Gene Name: family with sequence similarity 71, member D
  ENSP ID: ENSP00000451865
MKKNTSKTTMRINKQDALCTPHSHDPRDLQNMLDGGEYAPFVSPPMLESNFIQPAPLRASHLNRTMIAASSRRYSSHPGGSVSWWL

SEQ ID NO: 30407 - protein, 52 aa, Homo sapiens
  Payload ID: 5958
  Gene Symbol: FAM71D
  Gene Name: family with sequence similarity 71, member D
  ENSP ID: ENSP00000451960
  MOD_RES (1)..(1): Any amino acid
XPDVRIVTEVIEVREATEVTDSSDITNCSGVTVVFENNDLIRAKQEEKELEN

SEQ ID NO: 30408 - protein, 56 aa, Homo sapiens
  Payload ID: 5958
  Gene Symbol: FAM71D
  Gene Name: family with sequence similarity 71, member D
  ENSP ID: ENSP00000454526
MKKNTSKTTMRINKQDALCTPHSHDPRDLQNMLDGGEYAPFVSPPMLESNFIQLLS

SEQ ID NO: 30409 - protein, 422 aa, Homo sapiens; identical to SEQ ID NO: 30401
  Payload ID: 5958
  Gene Symbol: FAM71D
  Gene Name: family with sequence similarity 71, member D
  Uniprot ID: Q8N9W8
  ENSP ID: ENSP00000483154

SEQ ID NO: 30410 - protein, 193 aa, Homo sapiens
  Payload ID: 5959
  Gene Symbol: FAM71E1
  Gene Name: family with sequence similarity 71, member E1
  ENSP ID: ENSP00000469375
MRRDRGPKPALGGAGEVEPGGMAASPTGRPRRLQRYLQSGEFDQFRDFPIFESNFVQVTRLGEVANEVTMGVAASSPALELPDLLLLAGPAKENGHLQLFGCGPHSRPETESSASGCGCSTACASSLLLLCPSRRSKSPKAWKPDLTPRPLNSGDSESSSILQGHRMTRDQSTLPQGRADEILKLIKVSPLRT

SEQ ID NO: 30411 - protein, 231 aa, Homo sapiens
  Payload ID: 5959
  Gene Symbol: FAM71E1
  Gene Name: family with sequence similarity 71, member E1
  Uniprot ID: Q6IPT2
  ENSP ID: ENSP00000471272
MGPPLWPDLQEPPPPGTSSQIRSPLLCDVIKPAPHHDVTVRVVPPPRFLPLLLRPLPSDGDIAMRRDRGPKPALGGAGEVEPGGMAASPTGRPRRLQRYLQSGEFDQFRDFPIFESNFVQVTRLGEVANEVTMGVAASSPALELPDLLLLAGPAKENGHLQLFGLFPLKFVQLFVHDKSRCQLEVKLNTSRTFYLQLRAPLKTRDREFGQWVRLLYRLRFLSASAVPFTQE

SEQ ID NO: 30412 - protein, 147 aa, Homo sapiens
  Payload ID: 5959
  Gene Symbol: FAM71E1
  Gene Name: family with sequence similarity 71, member E1
  ENSP ID: ENSP00000471374
PAPTSDLWPQVTRLGEVANEVTMGVAASSPALELPDLLLLAGPAKENGHLQLFGCGPHSRPETESSASGCGCSTACASSLLLLCPSRRSKSPKAWKPDLTPRPLNSGDSESSSILQGHRMTRDQSTLPQGRADEILKLIKVSPLRTN

SEQ ID NO: 30413 - protein, 247 aa, Homo sapiens
  Payload ID: 5959
  Gene Symbol: FAM71E1
  Gene Name: family with sequence similarity 71, member E1
  Uniprot ID: Q6IPT2
  ENSP ID: ENSP00000472421
MGPPLWPDLQEPPPPGTSSQIRSPLLCDVIKPAPHHDVTVRVVPPPRFLPLLLRPLPSDGDIAMRRDRGPKPALGGAGEVEPGGMAASPTGRPRRLQRYLQSGEFDQFRDFPIFESNFVQFCPDIYPAPTSDLWPQVTRLGEVANEVTMGVAASSPALELPDLLLLAGPAKENGHLQLFGLFPLKFVQLFVHDKSRCQLEVKLNTSRTFYLQLRAPLKTRDREFGQWVRLLYRLRFLSASAVPFTQE

SEQ ID NO: 30414 - protein, 168 aa, Homo sapiens
  Payload ID: 5959
  Gene Symbol: FAM71E1
  Gene Name: family with sequence similarity 71, member E1
  ENSP ID: ENSP00000472434
MRRDRGPKPALGGAGEVEPGGMAASPTGRPRRLQRYLQSGEFDQFRDFPIFESNFVQVTRLGEVANEVTMGVAASSPALELPDLLLLAGPAKENGHLQLFGLFPLKFVQLFVHDKSRCQLEVKLNTSRTFYLQLRAPLKTRDREFGQWVRLLYRLRFLSASAVPFTQE

SEQ ID NO: 30415 - protein, 922 aa, Homo sapiens
  Payload ID: 5960
  Gene Symbol: FAM71E2
  Gene Name: family with sequence similarity 71, member E2
  Uniprot ID: Q8N5Q1
  ENSP ID: ENSP00000398617
MIWLRNRRCLEPLQGTPKWVPVLGELQKTLQKGEYLPLRPLPMFESNFVQVTHQGGPVFVNHRTNRLAMGVAASLPGLVLPDILLIGQPAEDRDCSGLVLTRMIPLDLVHLCVHDLSAWRLKLRLVSGRQYYLALDAPDNEVGFLFHCWVRLINLLQEPAPTWTPRTTRTAPLDMPLAEAPASTWHLQDQPISRHAVRVAERNFPHKTVAAQRQRKAKALKRSFKSQAVGDSVPLIWSQLEHADVRKKPAEKKSHSDPRPDRTHTQIRLPEKTSITTWTIFSIISSTANQTQSSPKACTSASDEATGQGHVVESPSHCVSADSPDGFFLGSCSSLDPCLWHQDTEDLMDSGGSTLSSAASGLAPYPPAACLSTPYSSIPRGREKAGPMGSHQGPGPPPCQKAPSGLVTSCKAPFLVDQSQKLPAVPASSWKPPPGLAPPQKAPAASAPPRKAPAVPAPSQKAPAVPAPSQKAPAIPAPSRKASAASASPRKASAVPAPPQKTPPPSQKAPSVPTIPQKAVSPTAPKKKSLLLPAPSQKALPTSPTEYQMALSPPASRGKLPGDFDVLPTGIPGRAVLERSQSGGKPEPVVTVRTQETDVVEMTTQAKSPESPFTVTKKESKDILISQTKEVTLEAFRGQGKLEDWAHWAKLEERSPDLPGVRSKELEQRKRWVKAKELAVEGPSQEHSRPFSVEALTLTKLMITANSKEQPSKSALVSLPSWLLATPQASATSMMASVPSRPGQLSLLEGKPVVVREQPESHTWVKEGKRPWGEMKEQPWGEMKEPPWDPKGPPKVPFRSKPTSASLKREGISQAPIPLTASPWEDLRPSPLSETLISKMEATARASQQPKRVSQEPMRMPAQHPLATVGSSSEILLPMLLELETVRNTATKAEEIQEESGVLNLLPSLQHSQHSEWPDAGA

SEQ ID NO: 30416 - protein, 63 aa, Homo sapiens
  Payload ID: 5960
  Gene Symbol: FAM71E2
  Gene Name: family with sequence similarity 71, member E2
  ENSP ID: ENSP00000466418
MIWLRNRRCLEPLQGTPKWVPVLGELQKTLQKGDPSRGPSVRESQNQPAGHGRGRLPARPGVA

SEQ ID NO: 30417 - protein, 344 aa, Homo sapiens
  Payload ID: 5961
  Gene Symbol: FAM71F1
  Gene Name: family with sequence similarity 71, member F1
  Uniprot ID: Q96KD3
  ENSP ID: ENSP00000326652
MLSSFPHRKTWRKSKKTVKVTRSYPTFPSLNAWEEFRGLLPVDGEPNPGAGLGVEEGLLCRVVHSPEFNLFLDSVVFESNFIQVKRGRNWRDVYKASNTMALGVTSSVPCLPLPNILLMASVKWHQGQNQTWNRPSIAPNIFLKRILPLRFVELQVCDHYQRILQLRTVTEKIYYLKLHPDHPETVFHFWIRLVQILQKGLSITTKDPRILVTHCLVPKNCSSPSGDSKLVQKKLQASQPSESLIQLMTKGESEALSQIFADLHQQNQLSFRSSRKVETNKNSSGKDSSREDSIPCTCDLRWRASFTYGEWERENPSGLQPLSLLSTLAASTGPQLAPPIGNSI

SEQ ID NO: 30418 - protein, 134 aa, Homo sapiens
  Payload ID: 5961
  Gene Symbol: FAM71F1
  Gene Name: family with sequence similarity 71, member F1
  ENSP ID: ENSP00000417930
RILPLRFVELQVCDHYQRILQLRTVTEKIYYLKLHPDHPETVFHFWIRLVQILQKGLSITTKDPRILVTHCLVPKNCSSPSGDSKLVQKKLQASQPSESLIQLMTKGESEALSQIFADLHQQNQLSFRSSRKVE

SEQ ID NO: 30419 - protein, 243 aa, Homo sapiens
  Payload ID: 5961
  Gene Symbol: FAM71F1
  Gene Name: family with sequence similarity 71, member F1
  Uniprot ID: Q96KD3
  ENSP ID: ENSP00000418192
MELDGQKGQELERRLQSFQHHGPGGDLLGTLPAPPQHPTHGQCQMAPGAEPDMEQTIHSPQHLPEELRTVTEKIYYLKLHPDHPETVFHFWIRLVQILQKGLSITTKDPRILVTHCLVPKNCSSPSGDSKLVQKKLQASQPSESLIQLMTKGESEALSQIFADLHQQNQLRSSRKVETNKNSSGKDSSREDSIPCTCDLRWRASFTYGEWERENPSGLQPLSLLSTLAASTGPQLAPPIGNSI

SEQ ID NO: 30420 - protein, 143 aa, Homo sapiens
  Payload ID: 5961
  Gene Symbol: FAM71F1
  Gene Name: family with sequence similarity 71, member F1
  ENSP ID: ENSP00000418591
MAPGAEPDMEQTIHSPQHLPEELRTVTEKIYYLKLHPDHPETVFHFWIRLVQILQKGLSITTKDPRILVTHCLVPKNCSSPSGDSKLVQKKLQASQPSESLIQLMTKGESEALSQIFADLHQQNQLRNQLDQQFRGRTNSLSF

SEQ ID NO: 30421 - protein, 286 aa, Homo sapiens
  Payload ID: 5961
  Gene Symbol: FAM71F1
  Gene Name: family with sequence similarity 71, member F1
  ENSP ID: ENSP00000418672
MLSSFPHRKTWRKSKKTVKVTRSYPTFPSLNAWEEFRGLLPVDGEPNPGAGLGVEEGLLCRVVHSPEFNLFLDSVVFESNFIQVKRGRNWRDVYKASNTMALGVTSSVPCLPLPNILLMASVKWHQGQNQTWNRPSIAPNIFLKRILPLRFVELQVCDHYQRILQLRTVTEKIYYLKLHPDHPETVFHFWIRLVQILQKGLSITTKDPRILVTHCLVPKNCSSPSGDSKLVQKKLQASQPSESLIQLMTKGESEALSQIFADLHQQNQLRNQLDQQFRGRTNSLSF

SEQ ID NO: 30422 - protein, 243 aa, Homo sapiens; identical to SEQ ID NO: 30419
  Payload ID: 5961
  Gene Symbol: FAM71F1
  Gene Name: family with sequence similarity 71, member F1
  Uniprot ID: Q96KD3
  ENSP ID: ENSP00000477573

SEQ ID NO: 30423 - protein, 300 aa, Homo sapiens
  Payload ID: 5962
  Gene Symbol: FAM71F2
  Gene Name: family with sequence similarity 71, member F2
  Uniprot ID: Q6NXP2
  ENSP ID: ENSP00000401654
MSKIRGLPPEVREPGPGVELGVENGLLCQLIHSPEFNLFSNSVVFESNFIQVTKPGNWRDVCEGSATVILGVTSSVPSLPLPNVLLMANVTWPQGPFTTWSTPGDAPVINLSRLLPLKYVELRIYDRLQRILRVRTVTEKIYYLKLHEKHPEIVFQFWVRLVKILQKGLSITTKDPRIKFTHCLVPKMPTNSTETTPENSLLSSPQPSEPLVLLAAEQTSGSFSQLSGKPQLTADRNNDTAIEIDNCSSYKIPSPVASPINLNIPMRAALSHSLWEQEDWNEHLLQVHIASYLGEHFLGA

SEQ ID NO: 30424 - protein, 300 aa, Homo sapiens; identical to SEQ ID NO: 30423
  Payload ID: 5962
  Gene Symbol: FAM71F2
  Gene Name: family with sequence similarity 71, member F2
  Uniprot ID: Q6NXP2
  ENSP ID: ENSP00000418907

SEQ ID NO: 30425 - protein, 169 aa, Homo sapiens
  Payload ID: 5962
  Gene Symbol: FAM71F2
  Gene Name: family with sequence similarity 71, member F2
  ENSP ID: ENSP00000419649
MSKIRGLPPEVREPGPGVELGVENGLLCQLIHSPEFNLFSNSVVFESNFIQTHVPEADFQVTKPGNWRDVCEGSATVILGVTSSVPSLPLPNVLLMANVTWPQGPFTTWSTPGDAPVINLSSLKTASCHPPSPASPSCCWRLSRPVAVSHSSQESPSSQQTGTMTLPLK

SEQ ID NO: 30426 - protein, 309 aa, Homo sapiens
  Payload ID: 5962
  Gene Symbol: FAM71F2
  Gene Name: family with sequence similarity 71, member F2
  Uniprot ID: Q6NXP2
  ENSP ID: ENSP00000420140
MSKIRGLPPEVREPGPGVELGVENGLLCQLIHSPEFNLFSNSVVFESNFIQTHVPEADFQVTKPGNWRDVCEGSATVILGVTSSVPSLPLPNVLLMANVTWPQGPFTTWSTPGDAPVINLSRLLPLKYVELRIYDRLQRILRVRTVTEKIYYLKLHEKHPEIVFQFWVRLVKILQKGLSITTKDPRIKFTHCLVPKMPTNSTETTPENSLLSSPQPSEPLVLLAAEQTSGSFSQLSGKPQLTADRNNDTAIEIDNCSSYKIPSPVASPINLNIPMRAALSHSLWEQEDWNEHLLQVHIASYLGEHFLGA

SEQ ID NO: 30427 - protein, 109 aa, Homo sapiens
  Payload ID: 5963
  Gene Symbol: FAM72A
  Gene Name: family with sequence similarity 72, member A
  Uniprot ID: Q5TYM5
  ENSP ID: ENSP00000340661
MSTNICSFKDSAVDFTGRCYFTKICKCKLKDIACLKCGNIVGYHVIVPCSSCLLSCNNGHFWMFHSQAVYDINRLDSTGVNVLLWGNLPEIEESTDEDVLNISAEECIR

SEQ ID NO: 30428 - protein, 149 aa, Homo sapiens
  Payload ID: 5963
  Gene Symbol: FAM72A
  Gene Name: family with sequence similarity 72, member A
  Uniprot ID: Q5TYM5
  ENSP ID: ENSP00000356096
MSTNICSFKDRCVSILCCKFCKQVLSSRGMKAVLLADTEIDLFSTDIPPTNAVDFTGRCYFTKICKCKLKDIACLKCGNIVGYHVIVPCSSCLLSCNNGHFWMFHSQAVYDINRLDSTGVNVLLWGNLPEIEESTDEDVLNISAEECIR

SEQ ID NO: 30429 - protein, 149 aa, Homo sapiens
  Payload ID: 5963
  Gene Symbol: FAM72A
  Gene Name: family with sequence similarity 72, member A
  ENSP ID: ENSP00000356097
MPTTTALRWTAAARVRRKGRGGWVPAALRSVSQDGVPGCTVMGGETRSPENAVDFTGRCYFTKICKCKLKDIACLKCGNIVGYHVIVPCSSCLLSCNNGHFWMFHSQAVYDINRLDSTGVNVLLWGNLPEIEESTDEDVLNISAEECIR

SEQ ID NO: 30430 - protein, 120 aa, Homo sapiens
  Payload ID: 5963
  Gene Symbol: FAM72A
  Gene Name: family with sequence similarity 72, member A
  ENSP ID: ENSP00000475292
MKAVLLADTEIDLFSTDIPPTNAVDFTGRCYFTKICKCKLKDIACLKCGNIVGYHVIVPCSSCLLSCNNGHFWMFHSQAVYDINRLDSTGVNVLLWGNLPEIEESTDEDVLNISAEECIR

SEQ ID NO: 30431 - protein, 51 aa, Homo sapiens
  Payload ID: 5963
  Gene Symbol: FAM72A
  Gene Name: family with sequence similarity 72, member A
  ENSP ID: ENSP00000475410
MSTNICSFKDRCVSILCCKFCKQVLSSRGMKAVLLADTEIDLFSTDIPPTK

SEQ ID NO: 30432 - protein, 70 aa, Homo sapiens
  Payload ID: 5963
  Gene Symbol: FAM72A
  Gene Name: family with sequence similarity 72, member A
  ENSP ID: ENSP00000476019
MPTTTALRWTAAARVRRKGRGGWVPAALRSVSQDGVPGCTVMGGETRSPEKSVPQSLEEPPPTPQDPAGK

SEQ ID NO: 30433 - protein, 109 aa, Homo sapiens
  Payload ID: 5964
  Gene Symbol: FAM72B
  Gene Name: family with sequence similarity 72, member B
  Uniprot ID: Q86X60
  ENSP ID: ENSP00000347368
MSTNICSFKDSAVDFTGRCYFTKICKCKLKDIACLKCGNIVGYHVIVPCSSCLPSCNNGHFWMFHSQAVYDINRLDSTGVNILLWGNLPEIEESTDEDVLNISAEECIR

SEQ ID NO: 30434 - protein, 149 aa, Homo sapiens
  Payload ID: 5964
  Gene Symbol: FAM72B
  Gene Name: family with sequence similarity 72, member B
  Uniprot ID: Q86X60
  ENSP ID: ENSP00000358397
MSTNICSFKDRCVSILCCKFCKQVLSSRGMKAVLLADTEIDLFSTDIPPTNAVDFTGRCYFTKICKCKLKDIACLKCGNIVGYHVIVPCSSCLPSCNNGHFWMFHSQAVYDINRLDSTGVNILLWGNLPEIEESTDEDVLNISAEECIR

SEQ ID NO: 30435 - protein, 120 aa, Homo sapiens
  Payload ID: 5964
  Gene Symbol: FAM72B
  Gene Name: family with sequence similarity 72, member B
  ENSP ID: ENSP00000392882
MKAVLLADTEIDLFSTDIPPTNAVDFTGRCYFTKICKCKLKDIACLKCGNIVGYHVIVPCSSCLPSCNNGHFWMFHSQAVYDINRLDSTGVNILLWGNLPEIEESTDEDVLNISAEECIR

SEQ ID NO: 30436 - protein, 94 aa, Homo sapiens
  Payload ID: 5964
  Gene Symbol: FAM72B
  Gene Name: family with sequence similarity 72, member B
  ENSP ID: ENSP00000482799
MSTNICSFKDRCVSILCCKFCKQVLSSRGMKAVLLADTEIDLFSTDIPPTNAVDFTGRCYFTKICKCKLKDIACLKWCKHPTLGQLARDRREYR

SEQ ID NO: 30437 - protein, 149 aa, Homo sapiens
  Payload ID: 5964
  Gene Symbol: FAM72B
  Gene Name: family with sequence similarity 72, member B
  ENSP ID: ENSP00000484557
MPTTTALRWTAAARVRRKGRGGWVLAALRSVSQDGVPGCTVMGGETRSPENAVDFTGRCYFTKICKCKLKDIACLKCGNIVGYHVIVPCSSCLPSCNNGHFWMFHSQAVYDINRLDSTGVNILLWGNLPEIEESTDEDVLNISAEECIR

SEQ ID NO: 30438 - protein, 94 aa, Homo sapiens
  Payload ID: 5965
  Gene Symbol: FAM72C
  Gene Name: family with sequence similarity 72, member C
  ENSP ID: ENSP00000358174
MSTNICSFKDRCVSILCCKFCKQVLSSRGMKAVLLADTEIDLFSTDIPPTNAVDFTGRCYFTKICKCKLKDIACLKWCKRPTSGQLARDRREYR

SEQ ID NO: 30439 - protein, 149 aa, Homo sapiens
  Payload ID: 5965
  Gene Symbol: FAM72C
  Gene Name: family with sequence similarity 72, member C
  Uniprot ID: H0Y354
  ENSP ID: ENSP00000463032
MSTNICSFKDRCVSILCCKFCKQVLSSRGMKAVLLADTEIDLFSTDIPPTNAVDFTGRCYFTKICKCKLKDIACLKCGNIVVYHVIVPCSSCLLSCNNRHFWMFHSQAVYDINRLDSTGVNVLLRGNLPEIEESTDEDVLNISAEECIR

SEQ ID NO: 30440 - protein, 149 aa, Homo sapiens
  Payload ID: 5966
  Gene Symbol: FAM72D
  Gene Name: family with sequence similarity 72, member D
  Uniprot ID: Q6L9T8
  ENSP ID: ENSP00000383682
MSTNICSFKDRCVSILCCKFCKQVLSSRGMKAVLLADTEIDLFSTDIPPTNAVDFTGRCYFTKICKCKLKDIACLKCGNIVGYHVIVPCSSCLLSCNNRHFWMFHSQAVYDINRLDSTGVNVLLRGNLPEIEESTDEDVLNISAEECIR

SEQ ID NO: 30441 - protein, 632 aa, Homo sapiens
  Payload ID: 5967
  Gene Symbol: FAM73A
  Gene Name: family with sequence similarity 73, member A
  Uniprot ID: Q8NAN2
  ENSP ID: ENSP00000359827
MSDCCSAPGISWEAGVGRPAVPGLELQIRRGAMSEETVSESQFSLKTAALRVFDLPLTWYYSLSQIKFSPVAKKLFVVTAVSAISVIFLAHHFKRKRGKKKGKILPWEPEHLILEYTKRAASDKGSSCSSSRQNLTLSLSSTKDKGSQVCNYANGGLFSKYSGSAQSLASVQSVNSCHSCACGNSNSWDKADEDDIKLVNIPVTTPENLYLMGMELFEEALRRWEQALTFRNRQAEDEACGSIKLGAGDAIAEENVDDIISTEFIHKLEALLQRAYRLQEEFEATLGASDPNSLADDIDKDTDITMKGNVEDFGLRDTLSIASTDSFASAAELAEHREVRHTYSLESLCHCPFYEEAMHLVEEGKIYSRVLRTEMLECLGDSDFLAKLHCIRQAFQVILSESANRIFLAESGRKILSALIVKARKNPKKFEDVFDEMIYFLEQTDHWGSTEMELAARGVKNLNFYDVVLDFILMDSFEDLENPPTSIQNVVNNRWLNSSFKETAVASSCWSVLKQKRQQMKIPDGFFAHFYAICEHISPVLAWGFLGPRNSLYDLCCFFKNQVLLFLKDIFDFEKVRYSSTETLAEDLMQLLIRRTELLMAYLEADALRHTSSCLSSHGHVMSTGLLEAKVQ

SEQ ID NO: 30442 - protein, 633 aa, Homo sapiens
  Payload ID: 5967
  Gene Symbol: FAM73A
  Gene Name: family with sequence similarity 73, member A
  ENSP ID: ENSP00000393675
MSDCCSAPGISWEAGVGRPAVPGLELQIRRGAMSEETVSESQFSLKTAALRVFDLPLTWYYSLSQIKFSPVAKKLFVVTAVSAISVIFLAHHFKRKRGKKKGKILPWEPEHLILEYTKRAASDKGSSCSSSRQNLTLSLSSTKDKGSQVCNYANGGLFSKYSGSAQSLASVQSVNSCHSCACGNSNSWDKADEDDIKLVNIPVTTPENLYLMGMELFEEALRRWEQALTFRNRQAEDEACGSIKLGAGDAIAEENVDDIISTEFIHKLEALLQRAYRLQEEFEATLGASDPNSLADDIDKDTDITMKGNVEDFGLRDTLSIASTDSFASAAELAEHREVRHTYSLESLCHCPFYEEAMHLVEEGKIYSRVLRTEMLECLGDSDFLAKLHCIRQAFQVILSESANRIFLAESGRKILSALIVKARKNPKKFEDVFDEMIYFLEQTDHWGSTEMELAARGVKNLNFYDVVLDFILMDSFEDLENPPTSIQNVVNNRWLNSSFKETAVASSCWSVLKQKRQQMKQIPDGFFAHFYAICEHISPVLAWGFLGPRNSLYDLCCFFKNQVLLFLKDIFDFEKVRYSSTETLAEDLMQLLIRRTELLMAYLEADALRHTSSCLSSHGHVMSTGLLEAKVQ

SEQ ID NO: 30443 - protein, 66 aa, Homo sapiens
  Payload ID: 5967
  Gene Symbol: FAM73A
  Gene Name: family with sequence similarity 73, member A
  ENSP ID: ENSP00000473285
MSEETVSESQFSLKTAALRVFDLPLTWYYSLSQIKFSPVAKKLFVVTAVSAISVIFLAHHFKRKRG

SEQ ID NO: 30444 - protein, 593 aa, Homo sapiens
  Payload ID: 5968
  Gene Symbol: FAM73B
  Gene Name: family with sequence similarity 73, member B
  Uniprot ID: Q7L4E1
  ENSP ID: ENSP00000351138
MAFRRAEGTSMIQALAMTVAEIPVFLYTTFGQSAFSQLRLTPGLRKVLFATALGTVALALAAHQLKRRRRRKKQVGPEMGGEQLGTVPLPILLARKVPSVKKGYSSRRVQSPSSKSNDTLSGISSIEPSKHSGSSHSVASMMAVNSSSPTAACSGLWDARGMEESLTTSDGNAESLYMQGMELFEEALQKWEQALSVGQRGDSGSTPMPRDGLRNPETASEPLSEPESQRKEFAEKLESLLHRAYHLQEEFGSTFPADSMLLDLERTLMLPLTEGSLRLRADDEDSLTSEDSFFSATELFESLQTGDYPIPLSRPAAAYEEALQLVKEGRVPCRTLRTELLGCYSDQDFLAKLHCVRQAFEGLLEDKSNQLFFGKVGRQMVTGLMTKAEKSPKGFLESYEEMLSYALRPETWATTRLELEGRGVVCMSFFDIVLDFILMDAFEDLENPPASVLAVLRNRWLSDSFKETALATACWSVLKAKRRLLMVPDGFISHFYSVSEHVSPVLAFGFLGPKPQLAEVCAFFKHQIVQYLRDMFDLDNVRYTSLPALADDILQLSRRRSEILLGYLGVPAASSAGVNGALPRENGPLGELQ

SEQ ID NO: 30445 - protein, 323 aa, Homo sapiens
  Payload ID: 5968
  Gene Symbol: FAM73B
  Gene Name: family with sequence similarity 73, member B
  Uniprot ID: Q7L4E1
  ENSP ID: ENSP00000391603
MAFRRAEGTSMIQALAMTVAEIPVFLYTTFGQSAFSQLRLTPGLRKVLFATALGTVALALAAHQLKRRRRRKKQVGPEMGGEQLGTVPLPILLARKVPSVKKGYSSRRVQSPSSKSNDTLSGISSIEPSKHSGSSHSVASMMAVNSSSPTAACSGLWDARGMEESLTTSDGNAESLYMQGMELFEEALQKWEQALSVGQRGDSGSTPMPRDGLRNPETASEPLSETESHSVARLECSGAISAQCNLRFLGSRDSPASASQVAGITARVTAEGVCREAGVPAAPCLPPAGGVRLHLPRRQHAARPREDPHAAPDRGLAAAAGGR

SEQ ID NO: 30446 - protein, 349 aa, Homo sapiens
  Payload ID: 5968
  Gene Symbol: FAM73B
  Gene Name: family with sequence similarity 73, member B
  Uniprot ID: Q7L4E1
  ENSP ID: ENSP00000396618
MAFRRAEGTSMIQALAMTVAEIPVFLYTTFGQSAFSQLRLTPGLRKVLFATALGTVALALAAHQLKRRRRRKKQVGPEMGGEQLGTVPLPILLARKVPSVKKGYSSRRVQSPSSKSNDTLSGISSIEPSKHSGSSHSVASMMAVNSSSPTAACSGLWDARGMEESLTTSDGNAESLYMQGMELFEEALQKWEQALSVGQRGDSGSTPMPRDGLRNPETASEPLSEPESQRKEFAEKLESLLHRAYHLQEEFGSTFPADSMLLDLERTLMLPLTEGSLRLRADDEDSLTSEDSFFSATELFESLQTGDYPIPLSRPAAAYEEALQLVKEGRVPCRTLRAPKASWRATRRC

SEQ ID NO: 30447 - protein, 99 aa, Homo sapiens
  Payload ID: 5968
  Gene Symbol: FAM73B
  Gene Name: family with sequence similarity 73, member B
  ENSP ID: ENSP00000409348
MAFRRAEGTSMIQALAMTVAEIPVFLYTTFGQSAFSQLRLTPGLRKVLFATALGTVALALAAHQLKRRRRRKKQVGPEMGGEQLGTVPLPILLARKVPS

SEQ ID NO: 30448 - protein, 143 aa, Homo sapiens
  Payload ID: 5968
  Gene Symbol: FAM73B
  Gene Name: family with sequence similarity 73, member B
  ENSP ID: ENSP00000415906
KLHCVRQAFEGLLEDKSNQLFFGKVGRQMVTGLMTKAEKSPKGFLESYEEMLSYALRPETWATTRLELEGRGSPVPALPQAKAEGGMASATPVAQQSGKDVSPPRVLMPWTPASVSPSGKWPRGSGSAPMHEPPGGTLCRWYA

SEQ ID NO: 30449 - protein, 341 aa, Homo sapiens
  Payload ID: 5969
  Gene Symbol: FAM76A
  Gene Name: family with sequence similarity 76, member A
  Uniprot ID: Q8TAV0
  ENSP ID: ENSP00000010299
MAALYACTKCHQRFPFEALSQGQQLCKECRIAHPVVKCTYCRTEYQQERLECNGTISAHCNLHLPGSSDSPASSSRVAGITGIKTNTICKKCAQNVQLYGTPKPCQYCNIIAAFIGNKCQRCTNSEKKYGPPYSCEQCKQQCAFDRKDDRKKVDGKLLCWLCTLSYKRVLQKTKEQRKHLSSSSRAGHQEKEQYSRLSGGGHYNSQKTLSTSSIQNEIPKKKSKFESITTNGDSFSPDLALDSPGTDHFVIIAQLKEEVATLKKMLHQKDQMILEKEKKITELKADFQYQESQMRAKMNQMEKTHKEVTEQLQAKNRELLKQAAALSKSKKSEKSGAITSP

SEQ ID NO: 30450 - protein, 312 aa, Homo sapiens
  Payload ID: 5969
  Gene Symbol: FAM76A
  Gene Name: family with sequence similarity 76, member A
  Uniprot ID: Q8TAV0
  ENSP ID: ENSP00000234549
MAALYACTKCHQRFPFEALSQGQQLCKECRIAHPVVKCTYCRTEYQQERLECNGTISAHCNLHLPGSSDSPASSSRVAGITGIKTNTICKKCAQNVQLYGTPKPCQYCNIIAAFIGNKCQRCTNSEKKYGPPYSCEQCKQQCAFDRKDDRKKVDGKLLCWLCTLSYKRVLQKTKEQRKHLSSSSRAGHQEKEQYSRLSGGGHYNSFSPDLALDSPGTDHFVIIAQLKEEVATLKKMLHQKDQMILEKEKKITELKADFQYQESQMRAKMNQMEKTHKEVTEQLQAKNRELLKQAAALSKSKKSEKSGAITSP

SEQ ID NO: 30451 - protein, 278 aa, Homo sapiens
  Payload ID: 5969
  Gene Symbol: FAM76A
  Gene Name: family with sequence similarity 76, member A
  Uniprot ID: Q8TAV0
  ENSP ID: ENSP00000363060
MAALYACTKCHQRFPFEALSQGQQLCKECRIAHPVVKCTYCRTEYQQESKTNTICKKCAQNVQLYGTPKPCQYCNIIAAFIGNKCQRCTNSEKKYGPPYSCEQCKQQCAFDRKDDRKKVDGKLLCWLCTLSYKRVLQKTKEQRKHLSSSSRAGHQEKEQYSRLSGGGHYNSFSPDLALDSPGTDHFVIIAQLKEEVATLKKMLHQKDQMILEKEKKITELKADFQYQESQMRAKMNQMEKTHKEVTEQLQAKNRELLKQAAALSKSKKSEKSGAITSP

SEQ ID NO: 30452 - protein, 307 aa, Homo sapiens
  Payload ID: 5969
  Gene Symbol: FAM76A
  Gene Name: family with sequence similarity 76, member A
  Uniprot ID: Q8TAV0
  ENSP ID: ENSP00000363065
MAALYACTKCHQRFPFEALSQGQQLCKECRIAHPVVKCTYCRTEYQQESKTNTICKKCAQNVQLYGTPKPCQYCNIIAAFIGNKCQRCTNSEKKYGPPYSCEQCKQQCAFDRKDDRKKVDGKLLCWLCTLSYKRVLQKTKEQRKHLSSSSRAGHQEKEQYSRLSGGGHYNSQKTLSTSSIQNEIPKKKSKFESITTNGDSFSPDLALDSPGTDHFVIIAQLKEEVATLKKMLHQKDQMILEKEKKITELKADFQYQESQMRAKMNQMEKTHKEVTEQLQAKNRELLKQAAALSKSKKSEKSGAITSP

SEQ ID NO: 30453 - protein, 124 aa, Homo sapiens
  Payload ID: 5969
  Gene Symbol: FAM76A
  Gene Name: family with sequence similarity 76, member A
  ENSP ID: ENSP00000393171
QYSRLSGGGHYNSFSPDLALDSPGTDHFVIIAQLKEEVATLKKMLHQKDQMILEKEKKITELKADFQYQESQMRAKMNQMEKTHKEVTEQLQRWALAILPGLVLNSWLQAILPPQPHKVLGLQA

SEQ ID NO: 30454 - protein, 227 aa, Homo sapiens
  Payload ID: 5969
  Gene Symbol: FAM76A
  Gene Name: family with sequence similarity 76, member A
  Uniprot ID: Q8TAV0
  ENSP ID: ENSP00000395150
MAALYACTKCHQRFPFEALSQGQQLCKECRIAHPVVKCTYCRTEYQQESKTNTICKKCAQNVQLYGTVDGKLLCWLCTLSYKRVLQKTKEQRKHLSSSSRAGHQEKEQYSRLSGGGHYNSFSPDLALDSPGTDHFVIIAQLKEEVATLKKMLHQKDQMILEKEKKITELKADFQYQESQMRAKMNQMEKTHKEVTEQLQAKNRELLKQAAALSKSKKSEKSGAITSP

SEQ ID NO: 30455 - protein, 288 aa, Homo sapiens
  Payload ID: 5969
  Gene Symbol: FAM76A
  Gene Name: family with sequence similarity 76, member A
  ENSP ID: ENSP00000436176
MAALYACTKCHQRFPFEALSQGQQLCKECRIAHPVVKCTYCRTEYQQESKTNTICKKCAQNVQLYGTPKPCQYCNIIAAFIGNKCQRCTNSEKKYGPPYSCEQCKQQCAFDRKDDRKKVDGKLLCWLCTLSYKRVLQKTKEQRKHLSSSSRAGHQEKEQYSRLSGGGHYNSQKTLSTSSIQNEIPKKKSKFESITTNGDSFSPDLALDSPGTDHFVIIAQLKEEVATLKKMLHQKDQMILEKEKKITELKADFQYQESQMRAKMNQMEKTHKEVTEQLQVTDSAYFMC

SEQ ID NO: 30456 - protein, 339 aa, Homo sapiens
  Payload ID: 5970
  Gene Symbol: FAM76B
  Gene Name: family with sequence similarity 76, member B
  Uniprot ID: Q5HYJ3
  ENSP ID: ENSP00000351631
MAASALYACTKCTQRYPFEELSQGQQLCKECRIAHPIVKCTYCRSEFQQESKTNTICKKCAQNVKQFGTPKPCQYCNIIAAFIGTKCQRCTNSEKKYGPPQTCEQCKQQCAFDRKEEGRRKVDGKLLCWLCTLSYKRVLQKTKEQRKSLGSSHSNSSSSSLTEKDQHHPKHHHHHHHHHHRHSSSHHKISNLSPEEEQGLWKQSHKSSATIQNETPKKKPKLESKPSNGDSSSINQSADSGGTDNFVLISQLKEEVMSLKRLLQQRDQTILEKDKKLTELKADFQYQESNLRTKMNSMEKAHKETVEQLQAKNRELLKQVAALSKGKKFDKSGSILTSP

SEQ ID NO: 30457 - protein, 233 aa, Homo sapiens
  Payload ID: 5970
  Gene Symbol: FAM76B
  Gene Name: family with sequence similarity 76, member B
  Uniprot ID: Q5HYJ3
  ENSP ID: ENSP00000381248
MAASALYACTKCTQRYPFEELSQGQQLCKECRIAHPIVKCTYCRSEFQQESKTNTICKKCAQNVKQFGTPKPCQYCNIIAAFIGTKCQRCTNSEKKYGPPQTCEQCKQQCAFDRKEEGRRKVDGKLLCWLCTLSYKRVLQKTKEQRKSLGSSHSNSSSSSLTEKDQHHPKHHHHHHHHHHRHSSSHHKISNLSPEEEQGLWKQSHKSSATIQNETPKKKPKLESKPSNGDRCM

SEQ ID NO: 30458 - protein, 47 aa, Homo sapiens
  Payload ID: 5970
  Gene Symbol: FAM76B
  Gene Name: family with sequence similarity 76, member B
  ENSP ID: ENSP00000437366
MDHLRPVNSANSNVLLIGRRKEEERLMESYYAGSVLYRTKEFYRRRK

SEQ ID NO: 30459 - protein, 338 aa, Homo sapiens
  Payload ID: 5970
  Gene Symbol: FAM76B
  Gene Name: family with sequence similarity 76, member B
  ENSP ID: ENSP00000441168
MAASALYACTKCTQRYPFEELSQGQQLCKECRIAHPIVKCTYCRSEFQQESKTNTICKKCAQNVKQFGTPKPCQYCNIIAAFIGTKCQRCTNSEKKYGPPQTCEQCKQQCAFDRKEEGRRKVDGKLLCWLCTLSYKRVLQKTKEQRKSLGSSHSNSSSSSLTEKDQHHPKHHHHHHHHHHRHSSSHHKISNLSPEEEQGLWKQSHKSSATIQNETPKKKPKLESKPSNGDSSINQSADSGGTDNFVLISQLKEEVMSLKRLLQQRDQTILEKDKKLTELKADFQYQESNLRTKMNSMEKAHKETVEQLQAKNRELLKQVAALSKGKKFDKSGSILTSP

SEQ ID NO: 30460 - protein, 91 aa, Homo sapiens
  Payload ID: 5970
  Gene Symbol: FAM76B
  Gene Name: family with sequence similarity 76, member B
  ENSP ID: ENSP00000442652
MDHLRPVNSANSNVLLIGRRKEEERLMESYYAGSVLYRTKEFYRRRKNKGRAWDLHIQIHLLHLLLRKTSIIQNIITTIITITIVTAVAIT

SEQ ID NO: 30461 - protein, 49 aa, Homo sapiens
  Payload ID: 5970
  Gene Symbol: FAM76B
  Gene Name: family with sequence similarity 76, member B
  ENSP ID: ENSP00000443440
MAASALYACTKCTQRYPFEELSQGQQLCKESEATGLGTECSDLELLPSH

SEQ ID NO: 30462 - protein, 233 aa, Homo sapiens; identical to SEQ ID NO: 30457
  Payload ID: 5970
  Gene Symbol: FAM76B
  Gene Name: family with sequence similarity 76, member B
  Uniprot ID: Q5HYJ3
  ENSP ID: ENSP00000444087

SEQ ID NO: 30463 - protein, 91 aa, Homo sapiens; identical to SEQ ID NO: 30460
  Payload ID: 5970
  Gene Symbol: FAM76B
  Gene Name: family with sequence similarity 76, member B
  ENSP ID: ENSP00000445612

SEQ ID NO: 30464 - protein, 280 aa, Homo sapiens
  Payload ID: 5971
  Gene Symbol: FAM78A
  Gene Name: family with sequence similarity 78, member A
  ENSP ID: ENSP00000361343
MTSYILISFVLLIGVGCIEKDQSCPVFGGRKRLHLLFVGGQLRQVRMLRGSPEASTDCCWLHQATGSGSVTQAGVQWYDLGSLQPLPPRFKRFSCLSLPSSWDYRSSWELPDLQEGKIQAISDSDGVNYPWYGNTTETCTIVGPTKRDSKFIISMNDNFYPSVTWAVPVSESNVAKLTNIYRDQSFTTWLVATNTSTNDMIILQTLHWRMQLSIEVNPNRPLGQRARLREPIAQDQPKILSKNEPIPPSALVKPNANDAQVLMWRPKYGQPLVVIPPKHR

SEQ ID NO: 30465 - protein, 283 aa, Homo sapiens
  Payload ID: 5971
  Gene Symbol: FAM78A
  Gene Name: family with sequence similarity 78, member A
  Uniprot ID: Q5JUQ0
  ENSP ID: ENSP00000361345
MPGFFCDCWPSLEIRALLYAMGCIQSIGGKARVFREGITVIDVKASIDPVPTSIDESSSVVLRYRTPHFRASAQVVMPPIPKKETWVVGWIQACSHMEFYNQYGEQGMSSWELPDLQEGKIQAISDSDGVNYPWYGNTTETCTIVGPTKRDSKFIISMNDNFYPSVTWAVPVSESNVAKLTNIYRDQSFTTWLVATNTSTNDMIILQTLHWRMQLSIEVNPNRPLGQRARLREPIAQDQPKILSKNEPIPPSALVKPNANDAQVLMWRPKYGQPLVVIPPKHR

SEQ ID NO: 30466 - protein, 252 aa, Homo sapiens
  Payload ID: 5971
  Gene Symbol: FAM78A
  Gene Name: family with sequence similarity 78, member A
  ENSP ID: ENSP00000419959
GQGIAAALIHLPSTGNKHWRPRSPEASTDCCWLHQATGSGSVTQAGVQWYDLGSLQPLPPRFKRFSCLSLPSSWDYRSSWELPDLQEGKIQAISDSDGVNYPWYGNTTETCTIVGPTKRDSKFIISMNDNFYPSVTWAVPVSESNVAKLTNIYRDQSFTTWLVATNTSTNDMIILQTLHWRMQLSIEVNPNRPLGQRARLREPIAQDQPKILSKNEPIPPSALVKPNANDAQVLMWRPKYGQPLVVIPPKHR

SEQ ID NO: 30467 - protein, 261 aa, Homo sapiens
  Payload ID: 5972
  Gene Symbol: FAM78B
  Gene Name: family with sequence similarity 78, member B
  Uniprot ID: Q5VT40
  ENSP ID: ENSP00000339681
MGCIQSITCKARIRRENIVVYDVCATIDQCPTRIEETSPIVLRYKTPYFKASARVVMPPIPRHETWVVGWIQACNQMEFFNTYSDLGMSSWELPDLREGRVKAISDSDGVSYPWYGNTTETVTLVGPTNKISRFSVSMNDNFYPSVTWAVPVSDSNVPLLTRIKRDQSFTTWLVAMNTTTKEKIILQTIKWRMRVDIEVDPLQLLGQRARLVGRTQQEQPRILSRMEPIPPNALVKPNANDAQVLMWRPKRGPPLVVIPPK

SEQ ID NO: 30468 - protein, 261 aa, Homo sapiens; identical to SEQ ID NO: 30467
  Payload ID: 5972
  Gene Symbol: FAM78B
  Gene Name: family with sequence similarity 78, member B
  Uniprot ID: Q5VT40
  ENSP ID: ENSP00000346404

SEQ ID NO: 30469 - protein, 261 aa, Homo sapiens; identical to SEQ ID NO: 30467
  Payload ID: 5972
  Gene Symbol: FAM78B
  Gene Name: family with sequence similarity 78, member B
  Uniprot ID: Q5VT40
  ENSP ID: ENSP00000389945

SEQ ID NO: 30470 - protein, 257 aa, Homo sapiens
  Payload ID: 5972
  Gene Symbol: FAM78B
  Gene Name: family with sequence similarity 78, member B
  ENSP ID: ENSP00000393329
  MOD_RES (1)..(1): Any amino acid
XSITCKARIRRENIVVYDVCATIDQCPTRIEETSPIVLRYKTPYFKASARVVMPPIPRHETWVVGWIQACNQMEFFNTYSDLGMSSWELPDLREGRVKAISDSDGVSYPWYGNTTETVTLVGPTNKISRFSVSMNDNFYPSVTWAVPVSDSNVPLLTRIKRDQSFTTWLVAMNTTTKEKIILQTIKWRMRVDIEVDPLQLLGQRARLVGRTQQEQPRILSRMEPIPPNALVKPNANDAQVLMWRPKRGPPLVVIPPK

SEQ ID NO: 30471 - protein, 254 aa, Homo sapiens
  Payload ID: 5972
  Gene Symbol: FAM78B
  Gene Name: family with sequence similarity 78, member B
  ENSP ID: ENSP00000412766
  MOD_RES (1)..(1): Any amino acid
XCKARIRRENIVVYDVCATIDQCPTRIEETSPIVLRYKTPYFKASARVVMPPIPRHETWVVGWIQACNQMEFFNTYSDLGMSSWELPDLREGRVKAISDSDGVSYPWYGNTTETVTLVGPTNKISRFSVSMNDNFYPSVTWAVPVSDSNVPLLTRIKRDQSFTTWLVAMNTTTKEKIILQTIKWRMRVDIEVDPLQLLGQRARLVGRTQQEQPRILSRMEPIPPNALVKPNANDAQVLMWRPKRGPPLVVIPPK

SEQ ID NO: 30472 - protein, 413 aa, Homo sapiens
  Payload ID: 5973
  Gene Symbol: FAM8A1
  Gene Name: family with sequence similarity 8, member A1
  Uniprot ID: Q9UBU6
  ENSP ID: ENSP00000259963
MAEGPEEARGHPPGQDDGGGDHEPVPSLRGPPTTAVPCPRDDPQAEPQAPGRPTAPGLAAAAAADKLEPPRELRKRGEAASGSGAELQEQAGCEAPEAAAPRERPARLSAREYSRQVHEWLWQSYCGYLTWHSGLAAFPAYCSPQPSPQSFPSGGAAVPQAAAPPPPQLGYYNPFYFLSPGAAGPDPRTAAGISTPAPVAGLGPRAPHVQASVRATPVTRVGSAAPSRSPSETGRQAGREYVIPSLAHRFMAEMVDFFILFFIKATIVLSIMHLSGIKDISKFAMHYIIEEIDEDTSMEDLQKMMVVALIYRLLVCFYEIICIWGAGGATPGKFLLGLRVVTCDTSVLIAPSRVLVIPSSNVSITTSTIRALIKNFSIASFFPAFITLLFFQHNRTAYDIVAGTIVVKRNGVR

SEQ ID NO: 30473 - protein, 368 aa, Homo sapiens
  Payload ID: 5974
  Gene Symbol: FAM81A
  Gene Name: family with sequence similarity 81, member A
  Uniprot ID: Q8TBF8
  ENSP ID: ENSP00000288228
MENMHLRRVRTMPRHSQSLTMAPYSSVSLVEQLEDRILCHEKTTAALVEHAFRIKDDIVNSLQKMQNKGGGDRLARLFLEEHIRNITAIVKQLNRDIEVLQEQIRARDNISYGTNSALKTLEMRQLSGLGDLRGRVARCDASIARLSAEHKTTYEGLQHLNKEQQAAKLILETKIKDAEGQISQLLNRVDLSISEQSTKLKMSHRDSNHQLQLLDTKFKGTVEELSNQILSARSWLQQEQERIEKELLQKIDQLSLIVKENSGASERDMEKKLSQMSARLDKIEEGQKKTFDGQRTRQEEEKMHGRITKLELQMNQNIKEMKAEVNAGFTAVYESIGSLRQVLEAKMKLDRDQLQKQIQLMQKPETPM

SEQ ID NO: 30474 - protein, 146 aa, Homo sapiens
  Payload ID: 5974
  Gene Symbol: FAM81A
  Gene Name: family with sequence similarity 81, member A
  ENSP ID: ENSP00000452853
MAQRSTVFPSRVTKERRVRTMPRHSQSLTMAPYSSVSLVEQLEDRILCHEKTTAALVEHAFRIKDDIVNSLQKMQNKGGGDRLARLFLEEHIRNITAIVKQLNRDIEVLQEQIRARDNISYGTNSALKTLEMRQLSGLGDLRGRVA

SEQ ID NO: 30475 - protein, 68 aa, Homo sapiens
  Payload ID: 5974
  Gene Symbol: FAM81A
  Gene Name: family with sequence similarity 81, member A
  ENSP ID: ENSP00000452902
MENMHLRRVRTMPRHSQSLTMAPYSSVSLVEQLEDRILCHEKTTAALVEHAFRIKDDIVNSLQKMQNK

SEQ ID NO: 30476 - protein, 133 aa, Homo sapiens
  Payload ID: 5974
  Gene Symbol: FAM81A
  Gene Name: family with sequence similarity 81, member A
  ENSP ID: ENSP00000452962
MENMHLRRVRTMPRHSQSLTMAPYSSVSLVEQLEDRILCHEKTTAALVEHAFRIKDDIVNSLQKMQNKGGGDRLARLFLEEHIRNITAIVKQLNRDIEVLQEQIRARDNISYGTNSALKTLEMRQLSGLGDLR

SEQ ID NO: 30477 - protein, 126 aa, Homo sapiens
  Payload ID: 5974
  Gene Symbol: FAM81A
  Gene Name: family with sequence similarity 81, member A
  ENSP ID: ENSP00000453296
MAQRSTVFPSRVTKERRVRTMPRHSQSLTMAPYSSVSLVEQLEDRILCHEKTTAALVEHAFRIKDDIVNSLQKMQNKGGGDRLARLFLEEHIRNITAIVKQLNRDIEVLQEQIRARDNISYGTNSA

SEQ ID NO: 30478 - protein, 67 aa, Homo sapiens
  Payload ID: 5974
  Gene Symbol: FAM81A
  Gene Name: family with sequence similarity 81, member A
  ENSP ID: ENSP00000453582
MENMHLRRVRTMPRHSQSLTMAPYSSVSLVEQLEDRILCHEKTTAALVEHAFRIKDDIVNSLQKMQN

SEQ ID NO: 30479 - protein, 115 aa, Homo sapiens
  Payload ID: 5974
  Gene Symbol: FAM81A
  Gene Name: family with sequence similarity 81, member A
  ENSP ID: ENSP00000453769
MENMHLRRVRTMPRHSQSLTMAPYSSVSLVEQLEDRILCHEKTTAALVEHAFRIKDDIVNSLQKMQNKGGGDRLARLFLEEHIRNITAIVKQLNRDIEVLQEQIRARDNISYGTN

SEQ ID NO: 30480 - protein, 58 aa, Homo sapiens
  Payload ID: 5974
  Gene Symbol: FAM81A
  Gene Name: family with sequence similarity 81, member A
  ENSP ID: ENSP00000453784
MENMHLRRVRTMPRHSQSLTMAPYSSVSLVEQLEDRILCHEKTTAALVEHAFRIKDDI

SEQ ID NO: 30481 - protein, 115 aa, Homo sapiens; identical to SEQ ID NO: 30479
  Payload ID: 5974
  Gene Symbol: FAM81A
  Gene Name: family with sequence similarity 81, member A
  ENSP ID: ENSP00000453864

SEQ ID NO: 30482 - protein, 108 aa, Homo sapiens
  Payload ID: 5974
  Gene Symbol: FAM81A
  Gene Name: family with sequence similarity 81, member A
  ENSP ID: ENSP00000453918
MENMHLRRVRTMPRHSQSLTMAPYSSVSLVEQLEDRILCHEKTTAALVEHAFRIKDDIVNSLQKMQNKGGGDRLARLFLEEHIRNITAIVKQLNRDIEVLQEQIRARD

SEQ ID NO: 30483 - protein, 452 aa, Homo sapiens
  Payload ID: 5975
  Gene Symbol: FAM81B
  Gene Name: family with sequence similarity 81, member B
  Uniprot ID: Q96LP2
  ENSP ID: ENSP00000283357
MQLQFLGTLASSEKRKKSQRLFFKNIKSTKNKAGKASIMSSDTNVNKSASPTATAEEQPVEPDGPLPGSDNNQEKKVRLSPAKMSTKNSTDLVEYVDKSHAFLPIIPNTQRGQLEDRLNNQARTIAFLLEQAFRIKEDISACLQGTHGFRKEESLARKLLESHIQTITSIVKKLSQNIEILEDQIRARDQAATGTNFAVHEINIKHLQGVGDLRGRVARCDSSIVKLSGDIHLFRQEHRQIEKAIQEFVPALETLSKNLDMKVMQLLGKIETASSEQTSNLKMVQGDYRHEMNLLEFKFHSLSSNLYEEVENNKKWTENQFLKYRKDHLGHINECLKVLQEKLEKSENKMEEKLLQLSSKVENFINTQKQETQLSKVKHMENKLSKKMEQMEKQIWGELETMQNEYQSGFKSIHDSLSSLQQIQKTKMDLEKYKVQKDLKKLQRKIVELQEV

SEQ ID NO: 30484 - protein, 127 aa, Homo sapiens
  Payload ID: 5975
  Gene Symbol: FAM81B
  Gene Name: family with sequence similarity 81, member B
  ENSP ID: ENSP00000421181
IQEFVPALETLSKNLDMKEKSENKMEEKLLQLSSKVENFINTQKQETQLSKVKHMENKLSKKMEQMEKQIWGELETMQNEYQSGFKSIHDSLSSLQQIQKTKMDLEKYKVQKDLKKLQRKIVELQEV

SEQ ID NO: 30485 - protein, 53 aa, Homo sapiens
  Payload ID: 5975
  Gene Symbol: FAM81B
  Gene Name: family with sequence similarity 81, member B
  ENSP ID: ENSP00000422946
VMQLLGKIETASSEQTSNLKMVQGDYRHEMNLLEFKKSLKIKWKKNCCSFQAK

SEQ ID NO: 30486 - protein, 182 aa, Homo sapiens
  Payload ID: 5975
  Gene Symbol: FAM81B
  Gene Name: family with sequence similarity 81, member B
  ENSP ID: ENSP00000423016
  MOD_RES (1)..(1): Any amino acid
XTATAEEQPVEPDGPLPGSDNNQEKKVRLSPAKMSTKNSTDLVEYVDKSHAFLPIIPNTQRGQLEDRLNNQARTIAFLLEQAFRIKEDISACLQGTHGFRKEESLARKLLESHIQTITSIVKKLSQNIEILEDQIRARDQAATGTNFAVHEINIKHLQGVGDLRGRVARTSLLARLYLRETG

SEQ ID NO: 30487 - protein, 41 aa, Homo sapiens
  Payload ID: 5975
  Gene Symbol: FAM81B
  Gene Name: family with sequence similarity 81, member B
  ENSP ID: ENSP00000423296
  MOD_RES (1)..(1): Any amino acid
XPDGPLPGSDNNQEKKVRLSPAKMSTKNSTDLVEYVDKEVS

SEQ ID NO: 30488 - protein, 87 aa, Homo sapiens
  Payload ID: 5975
  Gene Symbol: FAM81B
  Gene Name: family with sequence similarity 81, member B
  ENSP ID: ENSP00000423648
  MOD_RES (1)..(1): Any amino acid
XASPTATAEEQPVEPDGPLPGSDNNQEKKVRLSPAKMSTKNSTDLVEYVDKGPMAFEKRNRSPGSYWKATSRPSPASSKNSAKILRF

SEQ ID NO: 30489 - protein, 126 aa, Homo sapiens
  Payload ID: 5975
  Gene Symbol: FAM81B
  Gene Name: family with sequence similarity 81, member B
  ENSP ID: ENSP00000424883
AEEQPVEPDGPLPGSDNNQEKKVRLSPAKMSTKNSTDLVEYVDKSHAFLPIIPNTQRGQLEDRLNNQARTIAFLLEQAFRIKEDISACLQGTHGFRKEESLARKLLESHIQTITSIVKKLSQNIEM

SEQ ID NO: 30490 - protein, 367 aa, Homo sapiens
  Payload ID: 5976
  Gene Symbol: FAM83A
  Gene Name: family with sequence similarity 83, member A
  Uniprot ID: Q86UY5
  ENSP ID: ENSP00000276699
MSRSRHLGKIRKRLEDVKSQWVRPARADFSDNESARLATDALLDGGSEAYWRVLSQEGEVDFLSSVEAQYIQAQAREPPCPPDTLGGAEAGPKGLDSSSLQSGTYFPVASEGSEPALLHSWASAEKPYLKEKSSATVYFQTVKHNNIRDLVRRCITRTSQVLVILMDVFTDVEIFCDILEAANKRGVFVCVLLDQGGVKLFQEMCDKVQISDSHLKNISIRSVEGEIYCAKSGRKFAGQIREKFIISDWRFVLSGSYSFTWLCGHVHRNILSKFTGQAVELFDEEFRHLYASSKPVMGLKSPRLVAPVPPGAAPANGRLSSSSGSASDRTSSNPFSGRSAGSHPVPESKQNKTKTKKQTTLWFLMAF

SEQ ID NO: 30491 - protein, 294 aa, Homo sapiens
  Payload ID: 5976
  Gene Symbol: FAM83A
  Gene Name: family with sequence similarity 83, member A
  Uniprot ID: Q86UY5
  ENSP ID: ENSP00000427979
MSRSRHLGKIRKRLEDVKSQWVRPARADFSDNESARLATDALLDGGSEAYWRVLSQEGEVDFLSSVEAQYIQAQAREPPCPPDTLGGAEAGPKGLDSSSLQSGTYFPVASEGSEPALLHSWASAEKPYLKEKSSATVYFQTVKHNNIRDLVRRCITRTSQNISIRSVEGEIYCAKSGRKFAGQIREKFIISDWRFVLSGSYSFTWLCGHVHRNILSKFTGQAVELFDEEFRHLYASSKPVMGLKSPRLVAPVPPGAAPANGRLSSSSGSASDRTSSNPFSGRSAGSHPGTRTDG

SEQ ID NO: 30492 - protein, 434 aa, Homo sapiens
  Payload ID: 5976
  Gene Symbol: FAM83A
  Gene Name: family with sequence similarity 83, member A
  Uniprot ID: Q86UY5
  ENSP ID: ENSP00000428876
MSRSRHLGKIRKRLEDVKSQWVRPARADFSDNESARLATDALLDGGSEAYWRVLSQEGEVDFLSSVEAQYIQAQAREPPCPPDTLGGAEAGPKGLDSSSLQSGTYFPVASEGSEPALLHSWASAEKPYLKEKSSATVYFQTVKHNNIRDLVRRCITRTSQVLVILMDVFTDVEIFCDILEAANKRGVFVCVLLDQGGVKLFQEMCDKVQISDSHLKNISIRSVEGEIYCAKSGRKFAGQIREKFIISDWRFVLSGSYSFTWLCGHVHRNILSKFTGQAVELFDEEFRHLYASSKPVMGLKSPRLVAPVPPGAAPANGRLSSSSGSASDRTSSNPFSGRSAGSHPGTRSVSASSGPCSPAAPHPPPPPRFQPHQGPWGAPSPQAHLSPRPHDGPPAAVYSNLGAYRPTRLQLEQLGLVPRLTPTWRPFLQASPHF

SEQ ID NO: 30493 - protein, 367 aa, Homo sapiens; identical to SEQ ID NO: 30490
  Payload ID: 5976
  Gene Symbol: FAM83A
  Gene Name: family with sequence similarity 83, member A
  Uniprot ID: Q86UY5
  ENSP ID: ENSP00000445218

SEQ ID NO: 30494 - protein, 1011 aa, Homo sapiens
  Payload ID: 5977
  Gene Symbol: FAM83B
  Gene Name: family with sequence similarity 83, member B
  Uniprot ID: Q5T0W9
  ENSP ID: ENSP00000304078
METSSMLSSLNDECKSDNYIEPHYKEWYRVAIDILIEHGLEAYQEFLVQERVSDFLAEEEINYILKNVQKVAQSTAHGTDDSCDDTLSSGTYWPVESDVEAPNLDLGWPYVMPGLLGGTHIDLLFHPPRAHLLTIKETIRKMIKEARKVIALVMDIFTDVDIFKEIVEASTRGVSVYILLDESNFNHFLNMTEKQGCSVQRLRNIRVRTVKGQDYLSKTGAKFHGKMEQKFLLVDCQKVMYGSYSYMWSFEKAHLSMVQIITGQLVESFDEEFRTLYARSCVPSSFAQEESARVKHGKALWENGTYQHSVSSLASVSSQRNLFGRQDKIHKLDSSYFKNRGIYTLNEHDKYNIRSHGYKPHFVPNFNGPNAIRQFQPNQINENWKRHSYAGEQPETVPYLLLNRALNRTNNPPGNWKKPSDSLSVASSSREGYVSHHNTPAQSFANRLAQRKTTNLADRNSNVRRSFNGTDNHIRFLQQRMPTLEHTTKSFLRNWRIESYLNDHSEATPDSNGSALGDRFEGYDNPENLKANALYTHSRLRSSLVFKPTLPEQKEVNSCTTGSSNSTIIGSQGSETPKEVPDTPTNVQHLTDKPLPESIPKLPLQSEAPKMHTLQVPENHSVALNQTTNGHTESNNYIYKTLGVNKQTENLKNQQTENLLKRRSFPLFDNSKANLDPGNSKHYVYSTLTRNRVRQPEKPKEDLLKSSKSMHNVTHNLEEDEEEVTKRNSPSGTTTKSVSIAALLDVNKEESNKELASKKEVKGSPSFLKKGSQKLRSLLSLTPDKKENLSKNKAPAFYRLCSSSDTLVSEGEENQKPKKSDTKVDSSPRRKHSSSSNSQGSIHKSKEDVTVSPSQEINAPPDENKRTPSPGPVESKFLERAGDASAPRFNTEQIQYRDSREINAVVTPERRPTSSPRPTSSELLRSHSTDRRVYSRFEPFCKIESSIQPTSNMPNTSINRPEIKSATMGNSYGRSSPLLNYNTGVYRSYQPNENKFRGFMQKFGNFIHKNK

SEQ ID NO: 30495 - protein, 747 aa, Homo sapiens
  Payload ID: 5978
  Gene Symbol: FAM83C
  Gene Name: family with sequence similarity 83, member C
  Uniprot ID: Q9BQN1
  ENSP ID: ENSP00000363529
MFGGPGPGVLGAQGMAGPLRGRVEELKLPWWRESSPLVLRHSEAARLAADALLERGEAAYLRVISEERELPFLSALDVDYMTSHVRGGPELSEAQGQEASGPDRLSLLSEVTSGTYFPMASDIDPPDLDLGWPEVPQATGFSPTQAVVHFQRDKAKNIKDLLRFLFSQAHTVVAVVMDIFTDMELLCDLMEASSRRGVPVYLLLAQEHLRHFLEMCYKMDLNGEHLPNMRVRSTCGDTYCSKAGRRFTGQALEKFVLIDCEQVVAGSYSFTWLCSQAHTSMVLQLRGRIVEDFDREFRCLYAESQPVEGFCGGEDPLSPRALRPPPVALAFRPDVPSPTSSLPSSTSLSSIKQSPLMGRSSYLALPGGGDCSDTGVVSSSLGPARREASGQPSLHRQLSDPNHGSPPGLYRANLGKLGAYPWSQSSPALNHNSTSPLTLAVGSPLLPRSRPLLQFHRGAPALSRFPENGLPGSQEPSPLRGRWVPGTTLETVEEKEKKASPSQSRGQLDLLVPFPRAREVGDPDSGVTPNSGPLRPGEQAPEDRRLSPSQADSQLDLLSRALGTGGAPELGSLRPGDRALEDRRLSLNQSRGQSDLLMQYPKAQGSRVPLETNSSARPARRAPDERRQTLGHSQLDLITKFGPFRGEGPGPNGLPISSPARTAGAGSGDEKRLTLGHSKLDLITKYHQLHGARQGTEPGGPKGGHLNGGNSDLVRDEKRLTLGHSKLDLITKYNKSKFKQLRSRFES

SEQ ID NO: 30496 - protein, 615 aa, Homo sapiens
  Payload ID: 5979
  Gene Symbol: FAM83D
  Gene Name: family with sequence similarity 83, member D
  ENSP ID: ENSP00000217429
MARACLIQRLPIKRDCTPVFVRGLSSPSAAMALLSEGLDEVPAACLSPCGPPNPTELFSESRRLALEELVAGGPEAFAAFLRRERLARFLNPDEVHAILRAAERPGEEGAAAAAAAEDSFGSSHDCSSGTYFPEQSDLEPPLLELGWPAFYQGAYRGATRVETHFQPRGAGEGGPYGCKDALRQQLRSAREVIAVVMDVFTDIDIFRDLQEICRKQGVAVYILLDQALLSQFLDMCMDLKVHPEQEKLMTVRTITGNIYYARSGTKIIGKVHEKFTLIDGIRVATGSYSFTWTDGKLNSSNLVILSGQVVEHFDLEFRILYAQSKPISPKLLSHFQSSNKFDHLTNRKPQSKELTLGNLLRMRLARLSSTPRKADLDPEMPAEGKAERKPHDCESSTVSEEDYFSSHRDELQSRKAIDAATQTEPGEEMPGLSVSEVGTQTSITTACAGTQTAVITRIASSQTTIWSRSTTTQTDMDENILFPRGTQSTEGSPVSKMSVSRSSSLKSSSSVSSQGSVASSTGSPASIRTTDFHNPGYPKYLGTPHLELYLSDSLRNLNKERQFHFAGIRSRLNHMLAMLSRRTLFTENHLGLHSGNFSRVNLLAVRDVALYPSYQ

SEQ ID NO: 30497 - protein, 615 aa, Homo sapiens; identical to SEQ ID NO: 30496
  Payload ID: 5979
  Gene Symbol: FAM83D
  Gene Name: family with sequence similarity 83, member D
  ENSP ID: ENSP00000481110

SEQ ID NO: 30498 - protein, 585 aa, Homo sapiens
  Payload ID: 5979
  Gene Symbol: FAM83D
  Gene Name: family with sequence similarity 83, member D
  Uniprot ID: Q9H4H8
  ENSP ID: ENSP00000481465
MALLSEGLDEVPAACLSPCGPPNPTELFSESRRLALEELVAGGPEAFAAFLRRERLARFLNPDEVHAILRAAERPGEEGAAAAAAAEDSFGSSHDCSSGTYFPEQSDLEPPLLELGWPAFYQGAYRGATRVETHFQPRGAGEGGPYGCKDALRQQLRSAREVIAVVMDVFTDIDIFRDLQEICRKQGVAVYILLDQALLSQFLDMCMDLKVHPEQEKLMTVRTITGNIYYARSGTKIIGKVHEKFTLIDGIRVATGSYSFTWTDGKLNSSNLVILSGQVVEHFDLEFRILYAQSKPISPKLLSHFQSSNKFDHLTNRKPQSKELTLGNLLRMRLARLSSTPRKADLDPEMPAEGKAERKPHDCESSTVSEEDYFSSHRDELQSRKAIDAATQTEPGEEMPGLSVSEVGTQTSITTACAGTQTAVITRIASSQTTIWSRSTTTQTDMDENILFPRGTQSTEGSPVSKMSVSRSSSLKSSSSVSSQGSVASSTGSPASIRTTDFHNPGYPKYLGTPHLELYLSDSLRNLNKERQFHFAGIRSRLNHMLAMLSRRTLFTENHLGLHSGNFSRVNLLAVRDVALYPSYQ

SEQ ID NO: 30499 - protein, 478 aa, Homo sapiens
  Payload ID: 5980
  Gene Symbol: FAM83E
  Gene Name: family with sequence similarity 83, member E
  Uniprot ID: Q2M2I3
  ENSP ID: ENSP00000263266
MAASQLAALEGVDSGPRVPGASPGFLYSEGQRLALEALLSKGAEAFQTCVQREELWPFLSADEVQGLAAAAEDWTVAKQEPSGMAEGATTTDVDAGSLSYWPGQSEQPAPVLRLGWPVDSAWKGITRAQLYTQPPGEGQPPLKELVRLEIQAAHKLVAVVMDVFTDPDLLLDLVDAATRRWVPVYLLLDRQQLPAFLELAQQLGVNPWNTENVDVRVVRGCSFQSRWRRQVSGTVREKFVLLDGERVISGSYSFTWSDARLHRGLVTLLTGEIVDAFSLEFRTLYAASCPLPPAPPQKPSVIGGLQRGRSPHRVSRRRSVAPASPPPPDGPLAHRLAACRVSPATPGPALSDILRSVQRARTPSGPPARPSRSMWDLSRLSQLSGSSDGDNELKKSWGSKDTPAKALMRQRGTGGGPWGEVDSRPPWGGALPLPPAHRLRYLSPARRRFGGDATFKLQEPRGVRPSDWAPRAGLGGQP

SEQ ID NO: 30500 - protein, 91 aa, Homo sapiens
  Payload ID: 5980
  Gene Symbol: FAM83E
  Gene Name: family with sequence similarity 83, member E
  ENSP ID: ENSP00000470271
MAEGATTTDVDAGSLSYWPGQSEQPAPVLRLGWPVDSAWKGITRAQLYTQPPGEGQPPLKELVRLEIQAAHKLVAVVMDVFTDPDLLLDLV

SEQ ID NO: 30501 - protein, 500 aa, Homo sapiens
  Payload ID: 5981
  Gene Symbol: FAM83F
  Gene Name: family with sequence similarity 83, member F
  Uniprot ID: Q8NEG4
  ENSP ID: ENSP00000330432
MAESQLNCLDEAHVNEKVTEAQAAFYYCERRRAALEALLGGGEQAYRERLKEEQLRDFLSSPERQALRAAWSPYEDAVPAANARGKSKAKAKAPAPAPAESGESLAYWPDRSDTEVPPLDLGWTDTGFYRGVSRVTLFTHPPKDEKAPHLKQVVRQMIQQAQKVIAVVMDLFTDGDIFQDIVDAACKRRVPVYIILDEAGVKYFLEMCQDLQLTDFRIRNIRVRSVTGVGFYMPMGRIKGTLSSRFLMVDGDKVATGSYRFTWSSSHVDRNLLLLLTGQNVEPFDTEFRELYAISEEVDLYRQLSLAGRVGLHYSSTVARKLINPKYALVSGCRHPPGEMMRWAARQQREAGGNPEGQEEGASGGESAWRLESFLKDLVTVEQVLPPVEPIPLGELSQKDGRMVSHMHRDLKPKSREAPSRNGMGEAARGEAAPARRFSSRLFSRRAKRPAAPNGMASSVSTETSEVEFLTGKRPNENSSADISGKTSPSSAKPSNCVIS

SEQ ID NO: 30502 - protein, 332 aa, Homo sapiens
  Payload ID: 5981
  Gene Symbol: FAM83F
  Gene Name: family with sequence similarity 83, member F
  Uniprot ID: Q8NEG4
  ENSP ID: ENSP00000476600
MDLFTDGDIFQDIVDAACKRRVPVYIILDEAGVKYFLEMCQDLQLTDFRIRNIRVRSVTGVGFYMPMGRIKGTLSSRFLMVDGDKVATGSYRFTWSSSHVDRNLLLLLTGQNVEPFDTEFRELYAISEEVDLYRQLSLAGRVGLHYSSTVARKLINPKYALVSGCRHPPGEMMRWAARQQREAGGNPEGQEEGASGGESAWRLESFLKDLVTVEQVLPPVEPIPLGELSQKDGRMVSHMHRDLKPKSREAPSRNGMGEAARGEAAPARRFSSRLFSRRAKRPAAPNGMASSVSTETSEVEFLTGKRPNENSSADISGKTSPSSAKPSNCVIS

SEQ ID NO: 30503 - protein, 823 aa, Homo sapiens
  Payload ID: 5982
  Gene Symbol: FAM83G
  Gene Name: family with sequence similarity 83, member G
  Uniprot ID: A6ND36
  ENSP ID: ENSP00000343279
MAFSQVQCLDDNHVNWRSSESKPEFFYSEEQRLALEALVARGRDAFYEVLKRENIRDFLSELELKRILETIEVYDPGSEDPRGTGPSQGPEDNGVGDGEEASGADGVPIEAEPLPSLEYWPQKSDRSIPQLDLGWPDTIAYRGVTRASVYMQPPIDGQAHIKEVVRKMISQAQKVIAVVMDMFTDVDIFKDLLDAGFKRKVAVYIIVDESNVKYFLHMCERACMHLGHLKNLRVRSSGGTEFFTRSATKFKGALAQKFMFVDGDRAVCGSYSFTWSAARTDRNVISVLSGQVVEMFDRQFQELYLMSHSVSLKGIPMEKEPEPEPIVLPSVVPLVPAGTVAKKLVNPKYALVKAKSVDEIAKISSEKQEAKKPLGLKGPALAEHPGELPELLPPIHPGLLHLERANMFEYLPTWVEPDPEPGSDILGYINIIDPNIWNPQPSQMNRIKIRDTSQASAQHQLWKQSQDSRPRPEPCPPPEPSAPQDGVPAENGLPQGDPEPLPPVPKPRTVPVADVLARDSSDIGWVLELPKEEAPQNGTDHRLPRMAGPGHAPLQRQLSVTQDDPESLGVGLPNGLDGVEEEDDDDYVTLSDQDSHSGSSGRGPGPRRPSVASSVSEEYFEVREHSVPLRRRHSEQVANGPTPPPRRQLSAPHITRGTFVGPQGGSPWAQSRGREEADALKRMQAQRSTDKEAQGQQFHHHRVPASGTRDKDGFPGPPRYRSAADSVQSSTRNAGPAMAGPHHWQAKGGQVPRLLPDPGSPRLAQNARPMTDGRATEEHPSPFGIPYSKLSQSKHLKARTGGSQWASSDSKRRAQAPRDRKDP

SEQ ID NO: 30504 - protein, 823 aa, Homo sapiens; identical to SEQ ID NO: 30503
  Payload ID: 5982
  Gene Symbol: FAM83G
  Gene Name: family with sequence similarity 83, member G
  Uniprot ID: A6ND36
  ENSP ID: ENSP00000373647

SEQ ID NO: 30505 - protein, 142 aa, Homo sapiens
  Payload ID: 5982
  Gene Symbol: FAM83G
  Gene Name: family with sequence similarity 83, member G
  ENSP ID: ENSP00000465602
  MOD_RES (1)..(1): Any amino acid
XDSHSGSSGRGPGPRRPSVASSVSEEYFEVREHSVPLRRRHSEQVANGPTPPPRRQLSAPHITRGTFVGPQGGSPWAQSRGREEADALKRMQAQRSTDKEAQDKVPEPWVPCSLGSVPGARPTWEQCAADHARHDDQAHGEH

SEQ ID NO: 30506 - protein, 1179 aa, Homo sapiens
  Payload ID: 5983
  Gene Symbol: FAM83H
  Gene Name: family with sequence similarity 83, member H
  Uniprot ID: Q6ZRV2
  ENSP ID: ENSP00000373565
MARRSQSSSQGDNPLAPGYLPPHYKEYYRLAVDALAEGGSEAYSRFLATEGAPDFLCPEELEHVSRHLRPPQYVTREPPEGSLLDVDMDGSSGTYWPVNSDQAVPELDLGWPLTFGFQGTEVTTLVQPPPPDSPSIKDEARRMIRSAQQVVAVVMDMFTDVDLLSEVLEAAARRVPVYILLDEMNAQHFLDMADKCRVNLQHVDFLRVRTVAGPTYYCRTGKSFKGHVKEKFLLVDCAVVMSGSYSFMWSFEKIHRSLAHVFQGELVSSFDEEFRILFAQSEPLVPSAAALARMDAYALAPYAGAGPLVGVPGVGAPTPFSFPKRAHLLFPPPREEGLGFPSFLDPDRHFLSAFRREEPPRMPGGALEPHAGLRPLSRRLEAEAGPAGELAGARGFFQARHLEMDAFKRHSFATEGAGAVENFAAARQVSRQTFLSHGDDFRFQTSHFHRDQLYQQQYQWDPQLTPARPQGLFEKLRGGRAGFADPDDFTLGAGPRFPELGPDGHQRLDYVPSSASREVRHGSDPAFAPGPRGLEPSGAPRPNLTQRFPCQAAARPGPDPAPEAEPERRGGPEGRAGLRRWRLASYLSGCHGEDGGDDGLPAPMEAEAYEDDVLAPGGRAPAGDLLPSAFRVPAAFPTKVPVPGPGSGGNGPEREGPEEPGLAKQDSFRSRLNPLVQRSSRLRSSLIFSTSQAEGAAGAAAATEKVQLLHKEQTVSETLGPGGEAVRSAASTKVAELLEKYKGPARDPGGGAGAITVASHSKAVVSQAWREEVAAPGAVGGERRSLESCLLDLRDSFAQQLHQEAERQPGAASLTAAQLLDTLGRSGSDRLPSRFLSAQSHSTSPQGLDSPLPLEGSGAHQVLHNESKGSPTSAYPERKGSPTPGFSTRRGSPTTGFIEQKGSPTSAYPERRGSPVPPVPERRSSPVPPVPERRGSLTLTISGESPKAGPAEEGPSGPMEVLRKGSLRLRQLLSPKGERRMEDEGGFPVPQENGQPESPRRLSLGQGDSTEAATEERGPRARLSSATANALYSSNLRDDTKAILEQISAHGQKHRAVPAPSPGPTHNSPELGRPPAAGVLAPDMSDKDKCSAIFRSDSLGTQGRLSRTLPASAEERDRLLRRMESMRKEKRVYSRFEVFCKKEEASSPGAGEGPAEEGTRDSKVGKFVPKILGTFKSKK

SEQ ID NO: 30507 - protein, 906 aa, Homo sapiens
  Payload ID: 5983
  Gene Symbol: FAM83H
  Gene Name: family with sequence similarity 83, member H
  ENSP ID: ENSP00000378535
  MOD_RES (1)..(1): Any amino acid
XRILFAQSEPLVPSAAALARMDAYALAPYAGAGPLVGVPGVGAPTPFSFPKRAHLLFPPPREEGLGFPSFLDPDRHFLSAFRREEPPRMPGGALEPHAGLRPLSRRLEAEAGPAGELAGARGFFQARHLEMDAFKRHSFATEGAGAVENFAAARQVSRQTFLSHGDDFRFQTSHFHRDQLYQQQYQWDPQLTPARPQGLFEKLRGGRAGFADPDDFTLGAGPRFPELGPDGHQRLDYVPSSASREVRHGSDPAFAPGPRGLEPSGAPRPNLTQRFPCQAAARPGPDPAPEAEPERRGGPEGRAGLRRWRLASYLSGCHGEDGGDDGLPAPMEAEAYEDDVLAPGGRAPAGDLLPSAFRVPAAFPTKVPVPGPGSGGNGPEREGPEEPGLAKQDSFRSRLNPLVQRSSRLRSSLIFSTSQAEGAAGAAAATEKVQLLHKEQTVSETLGPGGEAVRSAASTKVAELLEKYKGPARDPGGGAGAITVASHSKAVVSQAWREEVAAPGAVGGERRSLESCLLDLRDSFAQQLHQEAERQPGAASLTAAQLLDTLGRSGSDRLPSRFLSAQSHSTSPQGLDSPLPLEGSGAHQVLHNESKGSPTSAYPERKGSPTPGFSTRRGSPTTGFIEQKGSPTSAYPERRGSPVPPVPERRSSPVPPVPERRGSLTLTISGESPKAGPAEEGPSGPMEVLRKGSLRLRQLLSPKGERRMEDEGGFPVPQENGQPESPRRLSLGQGDSTEAATEERGPRARLSSATANALYSSNLRDDTKAILEQISAHGQKHRAVPAPSPGPTHNSPELGRPPAAGVLAPDMSDKDKCSAIFRSDSLGTQGRLSRTLPASAEERDRLLRRMESMRKEKRVYSRFEVFCKKEEASSPGAGEGPAEEGTRDSKVGKFVPKILGTFKSKK

SEQ ID NO: 30508 - protein, 1179 aa, Homo sapiens; identical to SEQ ID NO: 30506
  Payload ID: 5983
  Gene Symbol: FAM83H
  Gene Name: family with sequence similarity 83, member H
  Uniprot ID: Q6ZRV2
  ENSP ID: ENSP00000478790

SEQ ID NO: 30509 - protein, 906 aa, Homo sapiens; identical to SEQ ID NO: 30507
  Payload ID: 5983
  Gene Symbol: FAM83H
  Gene Name: family with sequence similarity 83, member H
  ENSP ID: ENSP00000488269
  MOD_RES (1)..(1): Any amino acid

SEQ ID NO: 30510 - protein, 292 aa, Homo sapiens
  Payload ID: 5984
  Gene Symbol: FAM84A
  Gene Name: family with sequence similarity 84, member A
  Uniprot ID: Q96KN4
  ENSP ID: ENSP00000295092
MGNQLDRITHLNYSELPTGDPSGIEKDELRVGVAYFFSDDEEDLDERGQPDKFGVKAPPGCTPCPESPSRHHHHLLHQLVLNETQFSAFRGQECIFSKVSGGPQGADLSVYAVTALPALCEPGDLLELLWLQPAPEPPAPAPHWAVYVGGGQIIHLHQGEIRQDSLYEAGAANVGRVVNSWYRYRPLVAELVVQNACGHLGLKSEEICWTNSESFAAWCRFGKREFKAGGEVPAGTQPPQQQYYLKVHLGENKVHTARFHSLEDLIREKRRIDASGRLRVLQELADLVDDKE

SEQ ID NO: 30511 - protein, 292 aa, Homo sapiens; identical to SEQ ID NO: 30510
  Payload ID: 5984
  Gene Symbol: FAM84A
  Gene Name: family with sequence similarity 84, member A
  Uniprot ID: Q96KN4
  ENSP ID: ENSP00000330681

SEQ ID NO: 30512 - protein, 310 aa, Homo sapiens
  Payload ID: 5985
  Gene Symbol: FAM84B
  Gene Name: family with sequence similarity 84, member B
  Uniprot ID: Q96KN1
  ENSP ID: ENSP00000302578
MGNQVEKLTHLSYKEVPTADPTGVDRDDGPRIGVSYIFSNDDEDVEPQPPPQGPDGGGLPDGGDGPPPPQPQPYDPRLHEVECSVFYRDECIYQKSFAPGSAALSTYTPENLLNKCKPGDLVEFVSQAQYPHWAVYVGNFQVVHLHRLEVINSFLTDASQGRRGRVVNDLYRYKPLSSSAVVRNALAHVGAKERELSWRNSESFAAWCRYGKREFKIGGELRIGKQPYRLQIQLSAQRSHTLEFQSLEDLIMEKRRNDQIGRAAVLQELATHLHPAEPEEGDSNVARTTPPPGRPPAPSSEEEDGEAVAH

SEQ ID NO: 30513 - protein, 153 aa, Homo sapiens
  Payload ID: 5986
  Gene Symbol: FAM86B1
  Gene Name: family with sequence similarity 86, member B1
  Uniprot ID: Q8N7N1
  ENSP ID: ENSP00000342610
MAPEENAGTELLLQGFERRFLAVRTLRSFPWQSLEAKLRDSSDSELLRDILQKTVRHPVCVKHPPSVKYAWCFLSELIKKSSGGSVTLSKSTAIISHGTTGLVTWDAALYLAEWAIENPAAFINRRAVLPRSHRVAGRGPAEAGCLPGAQAGS

SEQ ID NO: 30514 - protein, 296 aa, Homo sapiens
  Payload ID: 5986
  Gene Symbol: FAM86B1
  Gene Name: family with sequence similarity 86, member B1
  Uniprot ID: Q8N7N1
  ENSP ID: ENSP00000407067
MAPEENAGTELLLQGFERRFLAVRTLRSFPWQSLEAKLRDSSDSELLRDILQKTVRHPVCVKHPPSVKYAWCFLSELIKKSSGGSVTLSKSTAIISHGTTGLVTWDAALYLAEWAIENPAAFINRTVLELGSGAGLTGLAICKMCRPRAYIFSDPHSRVLEQLRGNVLLNGLSLEADITGNLDSPRVTVAQLDWDVAMVHQLSAFQPDVVIAADVLYCPEAIVSLVGVLQRLAACREHKRAPEVYVAFTVRNPETCQLFTTELGRDGIRWEAEAHHDQKLFPYGEHLEMAMLNLTL

SEQ ID NO: 30515 - protein, 153 aa, Homo sapiens; identical to SEQ ID NO: 30513
  Payload ID: 5986
  Gene Symbol: FAM86B1
  Gene Name: family with sequence similarity 86, member B1
  Uniprot ID: Q8N7N1
  ENSP ID: ENSP00000431362

SEQ ID NO: 30516 - protein, 58 aa, Homo sapiens
  Payload ID: 5986
  Gene Symbol: FAM86B1
  Gene Name: family with sequence similarity 86, member B1
  ENSP ID: ENSP00000432250
MAPEENAGTELLLQGFERRFLAVRTLRSFPWQAVIVLVTGTQLHSPILKSQRPQARGA

SEQ ID NO: 30517 - protein, 97 aa, Homo sapiens
  Payload ID: 5986
  Gene Symbol: FAM86B1
  Gene Name: family with sequence similarity 86, member B1
  ENSP ID: ENSP00000432790
APEENAGTELLLQGFERRFLAVRTLRSFPWQSLEAKLRDSSDSELLRDILQKSSGGSVTLSKSTAIISHGTTGLVTWDAALYLAEWAIENPAAFINR

SEQ ID NO: 30518 - protein, 330 aa, Homo sapiens
  Payload ID: 5986
  Gene Symbol: FAM86B1
  Gene Name: family with sequence similarity 86, member B1
  ENSP ID: ENSP00000432931
MAPEENAGTELLLQGFERRFLAVRTLRSFPWQSLEAKLRDSSDSELLRDILQKTVRHPVCVKHPPSVKYAWCFLSELIKKHEAVHTEPLDKLYEVLTETLMAKESTQGHRSYLLSSGGSVTLSKSTAIISHGTTGLVTWDAALYLAEWAIENPAAFINRTVLELGSGAGLTGLAICKMCRPRAYIFSDPHSRVLEQLRGNVLLNGLSLEADITGNLDSPRVTVAQLDWDVAMVHQLSAFQPDVVIAADVLYCPEAIVSLVGVLQRLAACREHKRAPEVYVAFTVRNPETCQLFTTELGRDGIRWEAEAHHDQKLFPYGEHLEMAMLNLTL

SEQ ID NO: 30519 - protein, 105 aa, Homo sapiens
  Payload ID: 5986
  Gene Symbol: FAM86B1
  Gene Name: family with sequence similarity 86, member B1
  ENSP ID: ENSP00000433147
MAPEENAGTELLLQGFERRFLAVRTLRSFPWQSSGGSVTLSKSTAIISHGTTGLVTWDAALYLAEWAIENPAAFINRRAVLPRSHRVAGRGPAEAGCLPGAQAGS

SEQ ID NO: 30520 - protein, 102 aa, Homo sapiens
  Payload ID: 5986
  Gene Symbol: FAM86B1
  Gene Name: family with sequence similarity 86, member B1
  ENSP ID: ENSP00000433972
  MOD_RES (1)..(1): Any amino acid
XPEENAGTELLLQGFERRFLAVRTLRSFPWQSLEAKLRDSSDSELLRDILQKTVRHPVCVKHPPSVKYAWCFLSELIKKRQDLCCPGCPRTPGLKQSSHVSL

SEQ ID NO: 30521 - protein, 102 aa, Homo sapiens
  Payload ID: 5986
  Gene Symbol: FAM86B1
  Gene Name: family with sequence similarity 86, member B1
  ENSP ID: ENSP00000434799
MAPEENAGTELLLQGFERRFLAVRTLRSFPWQSLEAKLRDSSDSELLRDILQKTCCIAQKPSCRWSGSCRGWLPAGSTSGLLRSTWPLPSATQRRASCSPPS

SEQ ID NO: 30522 - protein, 159 aa, Homo sapiens
  Payload ID: 5986
  Gene Symbol: FAM86B1
  Gene Name: family with sequence similarity 86, member B1
  ENSP ID: ENSP00000435201
MAPEENAGTELLLQGFERRFLAVRTLRSFPWQSLEAKLRDSSDSELLRDILQKTVRHPVCVKHPPSVKYAWCFLSELIKKHEAVHTEPLDKLYEVLTETLMAKESTQGHRSYLLSSGGSVTLSKSTAIISHGTTGLVTWDAALYLAEWAIENPAAFINR

SEQ ID NO: 30523 - protein, 66 aa, Homo sapiens
  Payload ID: 5986
  Gene Symbol: FAM86B1
  Gene Name: family with sequence similarity 86, member B1
  ENSP ID: ENSP00000436024
MAPEENAGTELLLQGFERRFLAVRTLRSFPWQVGGGASGEARGGRGSPGADGMGLRAETPGAPATA

SEQ ID NO: 30524 - protein, 59 aa, Homo sapiens
  Payload ID: 5986
  Gene Symbol: FAM86B1
  Gene Name: family with sequence similarity 86, member B1
  ENSP ID: ENSP00000444227
MPGAFSQNSSKSPQEAQSHSPRAQPSSPTVPQAWSHGMPPSTLQNGPSRTRQPSLTGLS

SEQ ID NO: 30525 - protein, 66 aa, Homo sapiens; identical to SEQ ID NO: 30523
  Payload ID: 5986
  Gene Symbol: FAM86B1
  Gene Name: family with sequence similarity 86, member B1
  ENSP ID: ENSP00000473414

SEQ ID NO: 30526 - protein, 108 aa, Homo sapiens
  Payload ID: 5986
  Gene Symbol: FAM86B1
  Gene Name: family with sequence similarity 86, member B1
  ENSP ID: ENSP00000473457
MAPEENAGTELLLQGFERRFLAVRTLRSFPWQVGGGASGEARGGRGSPGADGMGLRAETPGAPATCTLRHLKVRLSAAVASTSNWLHVPREGSHRALPTHSIACLMFL

SEQ ID NO: 30527 - protein, 69 aa, Homo sapiens
  Payload ID: 5986
  Gene Symbol: FAM86B1
  Gene Name: family with sequence similarity 86, member B1
  ENSP ID: ENSP00000473629
MPGAFSQNSSKRDKISVAQAVLELLGSSSPPTSAFRVAGTIRHTPPRPTNTRLSTRSLWTNCTRCSRRL

SEQ ID NO: 30528 - protein, 330 aa, Homo sapiens
  Payload ID: 5987
  Gene Symbol: FAM86B2
  Gene Name: family with sequence similarity 86, member B2
  Uniprot ID: P0C5J1
  ENSP ID: ENSP00000262365
MAPEENAGTELLLQGFERRFLAVRTLRSFPWQSLEAKLRDSSDSELLRDILQKTVRHPVCVKHPPSVKYAWCFLSELIKKHEAVHTEPLDKLYEVLAETLMAKESTQGHRSYLLSSGGSVTLSKSTAIISHGTTGLVTWDAALYLAEWAIENPAAFINRTVLELGSGAGLTGLAICKMCRPRAYIFSDPHSRILEQLRGNVLLNGLSLEADITGNLDSPRVTVAQLDWDVAMVHQLSAFQPDVVIAADVLYCPEAIVSLVGVLQRLAACREHKRAPEVYVAFTVRNPETCQLFTTELGRDGIRWEAEAHHDQKLFPYGEHLEMAMLNLTL

SEQ ID NO: 30529 - protein, 139 aa, Homo sapiens
  Payload ID: 5987
  Gene Symbol: FAM86B2
  Gene Name: family with sequence similarity 86, member B2
  ENSP ID: ENSP00000311330
MPGAFSQNSSKSPQEAQSHSPRAQPSSPTVPQAWSHGMPPSTLQNGPSRTRQPSLTDVLYCPEAIVSLVGVLQRLAACREHKRAPEVYVAFTVRNPETCQLFTTELGRDGIRWEAEAHHDQKLFPYGEHLEMAMLNLTL

SEQ ID NO: 30530 - protein, 295 aa, Homo sapiens
  Payload ID: 5987
  Gene Symbol: FAM86B2
  Gene Name: family with sequence similarity 86, member B2
  ENSP ID: ENSP00000432491
MAPEENAGTELLLQGFERRFLAVRTLRSFPWQSLEAKLRDSSDSELLRDILQKTVRHPVCVKHPPSVKYAWCFLSELIKKSSGGSVTLSKSTAIISHGTTGLVTWDAALYLAEWAIENPAAFINRTVLELGSGAGLTGLAICKMCRPRAYIFSDPHSRILEQLRGNVLLNGLSLEADITGNLDSPRVTVAQLDWDVAMVHQLSAFQPDVVIAADVLYCPEAIVSLVGVLQRLAACREHKRAPEVYVAFTVRNPETCQLFTTELGRDGIRWEAEAHHDQKLFPYGEHLEMAMLNLT

SEQ ID NO: 30531 - protein, 149 aa, Homo sapiens
  Payload ID: 5987
  Gene Symbol: FAM86B2
  Gene Name: family with sequence similarity 86, member B2
  ENSP ID: ENSP00000436338
MAPEENAGTELLLQGFERRFLAVRTLRSFPWQSLEAKLRDSSDSELLRDILQKTVRHPVCVKHPPSVKYAWCFLSELIKKSSGGSVTLSKSTAIISHGTTGLVTWDAALYLAEWAIENPAAFINRRAVLPRSHRVAGRGPAEAGCLPGA

SEQ ID NO: 30532 - protein, 131 aa, Homo sapiens
  Payload ID: 5988
  Gene Symbol: FAM86C1
  Gene Name: family with sequence similarity 86, member C1
  Uniprot ID: Q9NVL1
  ENSP ID: ENSP00000325662
MAPEENAGSELLLQSFKRRFLAARALRSFRWQSLEAKLRDSSDSELLRDILQKTCCIAQKPSCRWSGSCGGWLPAGSTSGLLNSTWPLPSATQRCASCSPPSYAGLGSDGKRKLIMTRNCFPTESTWRWQS

SEQ ID NO: 30533 - protein, 165 aa, Homo sapiens
  Payload ID: 5988
  Gene Symbol: FAM86C1
  Gene Name: family with sequence similarity 86, member C1
  Uniprot ID: Q9NVL1
  ENSP ID: ENSP00000352182
MAPEENAGSELLLQSFKRRFLAARALRSFRWQSLEAKLRDSSDSELLRDILQKHEAVHTEPLDELYEVLVETLMAKESTQGHRSYLLTCCIAQKPSCRWSGSCGGWLPAGSTSGLLNSTWPLPSATQRCASCSPPSYAGLGSDGKRKLIMTRNCFPTESTWRWQS

SEQ ID NO: 30534 - protein, 158 aa, Homo sapiens
  Payload ID: 5988
  Gene Symbol: FAM86C1
  Gene Name: family with sequence similarity 86, member C1
  Uniprot ID: Q9NVL1
  ENSP ID: ENSP00000391329
MAPEENAGSELLLQSFKRRFLAARALRSFRWQSLEAKLRDSSDSELLRDILQKTVKHPVCVKHPPSVKYARCFLSELIKKTCCIAQKPSCRWSGSCGGWLPAGSTSGLLNSTWPLPSATQRCASCSPPSYAGLGSDGKRKLIMTRNCFPTESTWRWQS

SEQ ID NO: 30535 - protein, 53 aa, Homo sapiens
  Payload ID: 5988
  Gene Symbol: FAM86C1
  Gene Name: family with sequence similarity 86, member C1
  ENSP ID: ENSP00000423511
MAPEENAGSELLLQSFKRRFLAARALRSFRWQSLEAKLRDSSDSELLRDILQK

SEQ ID NO: 30536 - protein, 53 aa, Homo sapiens; identical to SEQ ID NO: 30535
  Payload ID: 5988
  Gene Symbol: FAM86C1
  Gene Name: family with sequence similarity 86, member C1
  ENSP ID: ENSP00000432416

SEQ ID NO: 30537 - protein, 125 aa, Homo sapiens
  Payload ID: 5988
  Gene Symbol: FAM86C1
  Gene Name: family with sequence similarity 86, member C1
  ENSP ID: ENSP00000436598
MAPEENAGSELLLQSFKRRFLAARALRSFRWQSLEAKLRDSSDSELLRDILQKTCCIAQKPSCRWSGSCGGWLPAGSTSGLLNSTWPLPSATQRCASCSPPSYVSPHAHPGLHGPQAVPTGLQWK

SEQ ID NO: 30538 - protein, 184 aa, Homo sapiens
  Payload ID: 5989
  Gene Symbol: FAM89A
  Gene Name: family with sequence similarity 89, member A
  Uniprot ID: Q96GI7
  ENSP ID: ENSP00000355614
MSGARAAPGAAGNGAVRGLRVDGLPPLPKSLSGLLHSASGGGASGGWRHLERLYAQKSRIQDELSRGGPGGGGARAAALPAKPPNLDAALALLRKEMVGLRQLDMSLLCQLYSLYESIQEYKGACQAASSPDCTYALENGFFDEEEEYFQEQNSLHDRRDRGPPRDLSLPVSSLSSSDWILESI

SEQ ID NO: 30539 - protein, 176 aa, Homo sapiens
  Payload ID: 5990
  Gene Symbol: FAM89B
  Gene Name: family with sequence similarity 89, member B
  Uniprot ID: Q8N5H3
  ENSP ID: ENSP00000314829
MNGLPSAEAPGGAGCALAGLPPLPRGLSGLLNASGGSWRELERVYSQRSRIHDELSRAARAPDGPRHAAGAANAGPAAGPRRPVNLDSALAALRKEMLWGLYESIQDYKHLCQDLSFCQDLSSSLHSDSSYPPDAGLSDDEEPPDASLPPDPPPLTVPQTHNARDQWLQDAFHISL

SEQ ID NO: 30540 - protein, 154 aa, Homo sapiens
  Payload ID: 5990
  Gene Symbol: FAM89B
  Gene Name: family with sequence similarity 89, member B
  Uniprot ID: Q8N5H3
  ENSP ID: ENSP00000402439
MNGLPSAEAPGGAGCALAGLPPLPRGLSGLLNASGGSWRELERVYSQRSRIHDELSRAARAPDGPRHAAGAANAGPAAGPRRPVNLDSALAALRKEMLSAGGAAAVGHVLVVPAVGPVRVNPGLQTPVPRPELLPGPVILPPFGQLLPTGCGPV

SEQ ID NO: 30541 - protein, 189 aa, Homo sapiens
  Payload ID: 5990
  Gene Symbol: FAM89B
  Gene Name: family with sequence similarity 89, member B
  Uniprot ID: Q8N5H3
  ENSP ID: ENSP00000431459
MNGLPSAEAPGGAGCALAGLPPLPRGLSGLLNASGGSWRELERVYSQRSRIHDELSRAARAPDGPRHAAGAANAGPAAGPRRPVNLDSALAALRKEMVGLRQLDMSLLCQLWGLYESIQDYKHLCQDLSFCQDLSSSLHSDSSYPPDAGLSDDEEPPDASLPPDPPPLTVPQTHNARDQWLQDAFHISL

SEQ ID NO: 30542 - protein, 332 aa, Homo sapiens
  Payload ID: 5991
  Gene Symbol: FAM9A
  Gene Name: family with sequence similarity 9, member A
  Uniprot ID: Q8IZU1
  ENSP ID: ENSP00000370391
MEPVGRKRSRKAAKAQLEAQVTAAQGATKEGSGIASNFPGQPTMEPVGRKRSRKAAKAQLEAQVRAAPAKKHTGKDPVRDECEERNPFTETREEDVTDEHGEREPFAEKDEHTGIHTMKLEHIAADIKKGLAAKREMIKIDKAAYRKTKNTIERALKKKQLKRQKRDYRHTRKLLNVLKEYIAEKQKDDEAEEAEAAAAAAEAAAAAEAAAAAAEVIVVEDEEEEEKEEEEEKEEEEEEGEEEGGGEEGEEGGGGGEGEETEEEEEEEEEEEEEEQIKAFQEKQKRWQQPTGVRSWRLREMKPLLEQLLKAAKDTKDNYCIISSSEESELDN

SEQ ID NO: 30543 - protein, 332 aa, Homo sapiens; identical to SEQ ID NO: 30542
  Payload ID: 5991
  Gene Symbol: FAM9A
  Gene Name: family with sequence similarity 9, member A
  Uniprot ID: Q8IZU1
  ENSP ID: ENSP00000440163

SEQ ID NO: 30544 - protein, 186 aa, Homo sapiens
  Payload ID: 5992
  Gene Symbol: FAM9B
  Gene Name: family with sequence similarity 9, member B
  Uniprot ID: Q8IZU0
  ENSP ID: ENSP00000318716
MAAWGKKHAGKDPVRDECEERNRFTETREEDVTDEHGEREPFAETDEHTGANTKKPEDTAEDLTAKRKRMKMDKTCSKTKNKSKHALRKKQLKRQKRDYIHSLKLLNVLEEYITDEQKEEEEEEGEEEELIRIFQEQQKKWQQYRSVRRERLKEMKLLRDQFVKALEDFEDLCDRVFSDEDSELDN

SEQ ID NO: 30545 - protein, 226 aa, Homo sapiens
  Payload ID: 5992
  Gene Symbol: FAM9B
  Gene Name: family with sequence similarity 9, member B
  Uniprot ID: Q8IZU0
  ENSP ID: ENSP00000354770
MPGFLSFLSVSLRSPGSGIASSFPGQPATDPVGRRAAKAQLEAQFMAAWGKKHAGKDPVRDECEERNRFTETREEDVTDEHGEREPFAETDEHTGANTKKPEDTAVGANNFKNYPVHIGVSSEQHILLDCSLSRQKRDYIHSLKLLNVLEEYITDEQKEEEEEEGEEEELIRIFQEQQKKWQQYRSVRRERLKEMKLLRDQFVKALEDFEDLCDRVFSDEDSELDN

SEQ ID NO: 30546 - protein, 186 aa, Homo sapiens; identical to SEQ ID NO: 30544
  Payload ID: 5992
  Gene Symbol: FAM9B
  Gene Name: family with sequence similarity 9, member B
  Uniprot ID: Q8IZU0
  ENSP ID: ENSP00000412606

SEQ ID NO: 30547 - protein, 90 aa, Homo sapiens
  Payload ID: 5992
  Gene Symbol: FAM9B
  Gene Name: family with sequence similarity 9, member B
  ENSP ID: ENSP00000431456
MKAKKAHPRVEYNKTSGNAFEEQFSLPTKVRGSPLASQDNQPRILWAGGLPRPSWRLNLWRPGGRSMQERIQSVMNVRKETVLQKQGRKM

SEQ ID NO: 30548 - protein, 166 aa, Homo sapiens
  Payload ID: 5993
  Gene Symbol: FAM9C
  Gene Name: family with sequence similarity 9, member C
  Uniprot ID: Q8IZT9
  ENSP ID: ENSP00000334430
MAAKDQLEVQVMAAQEMELAGKDPVSHEHEERKPVTETKEGDVTDEHGERGSFAETDEHTGVDTKELEDIAADIKEHLAAKRKRIEKIAKACSEIKNRIKNVLRTTQLKRQKRDYRISLKLPNVLEEFITDEQKDEEGDGEKEEQIKIFQEQQKRWQQDGKGTERD

SEQ ID NO: 30549 - protein, 166 aa, Homo sapiens; identical to SEQ ID NO: 30548
  Payload ID: 5993
  Gene Symbol: FAM9C
  Gene Name: family with sequence similarity 9, member C
  Uniprot ID: Q8IZT9
  ENSP ID: ENSP00000369999

SEQ ID NO: 30550 - protein, 126 aa, Homo sapiens
  Payload ID: 5993
  Gene Symbol: FAM9C
  Gene Name: family with sequence similarity 9, member C
  ENSP ID: ENSP00000409506
  MOD_RES (1)..(1): Any amino acid
XDVTDEHGERGSFAETDEHTGVDTKELEDIAADIKEHLAAKRKRIEKIAKACSEIKNRIKNVLRTTQLKRQKRDYRISLKLPNVLEEFITDEQKDEEGDGEKEEQIKIFQEQQKRWQQDGKGTERD

SEQ ID NO: 30551 - protein, 128 aa, Homo sapiens
  Payload ID: 5993
  Gene Symbol: FAM9C
  Gene Name: family with sequence similarity 9, member C
  ENSP ID: ENSP00000439185
MAAKDQLEVQVMAAQEMELAGKDPVSHEHEERKPVTETKEGDVTDEHGERGSFAETDEHTGVDTKELEDIAGMFYELFVVYENCFQPYNPYSRLYELVDDKTVLNAFFSYIAFNVICLIIFLTYFFNC

SEQ ID NO: 30552 - protein, 464 aa, Homo sapiens
  Payload ID: 5994
  Gene Symbol: FAM90A1
  Gene Name: family with sequence similarity 90, member A1
  Uniprot ID: Q86YD7
  ENSP ID: ENSP00000307798
MMARRDPKPGAKRLVRAQTLQKQRRAPVGPRAPPPDEEDPRLKCKNCEAFGHTARSTRCPMKCWKAALVPPNFGEKEGKENLKPWKPQVEANPGPLNKDKGEKEERPRPQDPQRKALLHIFSRKPPEKPLPNQKGSTESSDYLRVASGPMPVHTTSKRPRVDPVLSDRSATEMSDRGSVLASLSPLRKASLSSSSSLGPKERQTGAAADIPQTAVRHQGPEPLLVVKPTHSSPAGGCREVPQAASKTHGLLQAVSPQAQDKRPAVTSQPCPPAATHSLGLGSNLSFGPGAKRSAPAPIQACLNFPKKPRLGPFQIPESAIQGGELGAPENLQPPPAATELGPRTSPQTGTRTPAQVLSGDRQPPHSRPCLPTAQACTMSHHPAASHDGAQPLRVLFRRLENGRWSSSLLTAPSFHSPEKPGAFLAQSPHVSEKSEGPCVRVPPSVLYEDLQVPSSSEDSDSDLE

SEQ ID NO: 30553 - protein, 14 aa, Homo sapiens
  Payload ID: 5994
  Gene Symbol: FAM90A1
  Gene Name: family with sequence similarity 90, member A1
  ENSP ID: ENSP00000442315
MMARRDPKPGAKRL

SEQ ID NO: 30554 - protein, 464 aa, Homo sapiens; identical to SEQ ID NO: 30552
  Payload ID: 5994
  Gene Symbol: FAM90A1
  Gene Name: family with sequence similarity 90, member A1
  Uniprot ID: Q86YD7
  ENSP ID: ENSP00000445418

SEQ ID NO: 30555 - protein, 464 aa, Homo sapiens
  Payload ID: 5995
  Gene Symbol: FAM90A26
  Gene Name: family with sequence similarity 90, member A26
  ENSP ID: ENSP00000421131
MMACRDPKPGAKRLVRAQTLQKQRRAPVGPRAPPPDEEDPRLKCKNCGAFGHMARSTRCPMKCWKAALVPPTLGKKEGKENLKPWKPQVEANPGPLNKDKGEKEERPRQQDPQRKALLHIFSGKPPEKPLPNRKGSTESSVYLRVASGPMPVHTTSKRPRVDPVLADRSATEMSDRGSALASLSPLRKASLSSSSSLGPKERQTGAAADIPQPAVRHQGPEPLLVVKPTHSSPEGGCREVPQAASKTHGLLQAISPQAQDKRPAVTSQPCPPAATHSLGLGSNLSFGPGAKRPAQAPIQACLNFPKKPRLGPFQIPESAIQGGELGAPEYLQPPPATTELGPSTSPQMGRRTPAQVSSVDRQPPHSRPCLPTAQACTMSHHPATSHDGAQPLRVLFRRLENGRWSSSLLAAPSFHSPEKPGAFLAQSPHVSEKSEVPRVRVPPNVLYEDLQVSSSSEDSDSDLE

SEQ ID NO: 30556 - protein, 838 aa, Homo sapiens
  Payload ID: 5996
  Gene Symbol: FAM91A1
  Gene Name: family with sequence similarity 91, member A1
  Uniprot ID: Q658Y4
  ENSP ID: ENSP00000335082
MNIDVEFHIRHNYPWNKLPANVRQSLGNSQREYEKQVVLYSIRNQLRYRNNLVKHVKKDERRYYEELLKYSRDHLMLYPYHLSDIMVKGLRITPFSYYTGIMEDIMNSEKSYDSLPNFTAADCLRLLGIGRNQYIDLMNQCRSSKKFFRRKTARDLLPIKPVEIAIEAWWVVQAGYITEDDIKICTLPEKCAVDKIIDSGPQLSGSLDYNVVHSLYNKGFIYLDVPISDDSCIAVPPLEGFVMNRVQGDYFETLLYKIFVSIDEHTNVAELANVLEIDLSLVKNAVSMYCRLGFAHKKGQVINLDQLHSSWKNVPSVNRLKSTLDPQKMLLSWDGGESRSPVQEASSATDTDTNSQEDPADTASVSSLSLSTGHTKRIAFLFDSTLTAFLMMGNLSPNLKSHAVTMFEVGKLSDESLDSFLIELEKVQSTGEGEAQRYFDHALTLRNTILFLRHNKDLVAQTAQPDQPNYGFPLDLLRCESLLGLDPATCSRVLNKNYTLLVSMAPLTNEIRPVSSCTPQHIGPAIPEVSSVWFKLYIYHVTGQGPPSLLLSKGTRLRKLPDIFQSYDRLLITSWGHDPGVVPTSNVLTMLNDALTHSAVLIQGHGLHGIGETVHVPFPFDETELQGEFTRVNMGVHKALQILRNRVDLQHLCGYVTMLNASSQLADRKLSDASDERGEPDLASGSDVNGSTESFEMVIEEATIDSATKQTSGATTEADWVPLELCFGIPLFSSELNRKVCRKIAAHGLCRKESLQNLLHSSRKLSLQVLNFVHSFQEGASILDIHTEPSFSSLLSQSSCADMGVPLPAKNLIFKDGVLSEWSGRSPSSLLIANLHLQ

SEQ ID NO: 30557 - protein, 789 aa, Homo sapiens
  Payload ID: 5996
  Gene Symbol: FAM91A1
  Gene Name: family with sequence similarity 91, member A1
  ENSP ID: ENSP00000429491
MNIDVEFHIRHNYPWNKLPANVRQSLGNSQREYEKQVVLYSIRNQLRYRNNLVKHVKKDERRYYEELLKYSRDHLMLYPYHLSDIMVKGLRITPFSYYTGIMEDIMNSEKSYDSLPNFTAADCLRLLGIGRNQYIDLMNQCRSSKKFFRRKTARDLLPIKPVEIAIEAWWVVQAGYITEDDIKICTLPEKCAVDKIIDSGPQLSGSLDYNVVHSLYNKGFIYLDVPISDDSCIAVPPLEGFVMNRVQGDYFETLLYKIFVSIDEHTNVAELANVLEIDLSLVKNAVSMYCRLGFAHKKGQVINLDQLHSSWKNVPSVNRLKSTLDPQKMLLSWDGGESRSPVQEASSATDTDTNSQEDPADTASVSSLSLSTGHTKRIAFLFDSTLTAFLMMGNLSPNLKSHAVTMFEVGKLSDESLDSFLIELEKVQSTGEGEAQRYFDHALTLRNTILFLRHNKDLVAQTAQPDQPNYGFPLDLLRCESLLGLDPATCSRVLNKNYTLLVSMAPLTNEIRPVSSCTPQHIGPAIPEVSSVWFKLYIYHVTGQGPPSLLLSKGTRLRKLPDIFQSYDRLLITSWGHDPGVVPTSNVLTMLNDALTHSAVLIQGHGLHGIGETVHVPFPFDETELQGEFTRVNMGVHKALQILRNRVDLQHLCGYVTMLNASSQLADRKLSDASDERGEPDLASGSDVNGSTESFEMVIEEATIDSATKQTSGATTEADWVPLELCFGIPLFSSELNRKVCRKIAAHGLCRKESLQNLLHSSRKLSLQVLNFVHSFQVTKTKKSKWYLY

SEQ ID NO: 30558 - protein, 218 aa, Homo sapiens
  Payload ID: 5996
  Gene Symbol: FAM91A1
  Gene Name: family with sequence similarity 91, member A1
  ENSP ID: ENSP00000429784
MNIDVEFHIRHNYPWNKLPANVRQSLGNSQREYEKQVVLYSIRNQLRYRNNLVKHVKKDERRYYEELLKYSRDHLMLYPYHLSDIMVKGLRITPFSYYTGIMEDIMNSEKSYDSLPNFTAADCLRLLGIGRNQYIDLMNQCRSSKKFFRRKTARDLLPIKPVEIAIEAWWVVQAGYITEDDIKICTLPEKCAVDKIIDSGPQLSGSLDYNVVHSKWFV

SEQ ID NO: 30559 - protein, 114 aa, Homo sapiens
  Payload ID: 5996
  Gene Symbol: FAM91A1
  Gene Name: family with sequence similarity 91, member A1
  ENSP ID: ENSP00000430158
  MOD_RES (1)..(1): Any amino acid
XLYNKGFIYLDVPISDDSCIAVPPLEGFVMNRVQGDYFETLLYKIFVSIDEHTNVAELANVLEIDLSLVKNAVSMYCRLGFAHKKGQVINLDQLHSSWKNVPSVNRLKGGVSPC

SEQ ID NO: 30560 - protein, 60 aa, Homo sapiens
  Payload ID: 5996
  Gene Symbol: FAM91A1
  Gene Name: family with sequence similarity 91, member A1
  ENSP ID: ENSP00000431097
ADWVPLELCFGIPLFSSELNRKVCRKIAAHGLCRKESLQNLLHSSRKLSLQVLNFVHSFQ

SEQ ID NO: 30561 - protein, 163 aa, Homo sapiens
  Payload ID: 5997
  Gene Symbol: FAM92A1
  Gene Name: family with sequence similarity 92, member A1
  ENSP ID: ENSP00000352391
MMRRTLENRNAQTKQLQTAVSNVEKHFGELCQIFAAYVRKTARLRDKADLLVNEINAYAATETPHLKLGLMNFADEFAKLQDYRQAEVERLEAKVVEPLKTYGTIVKMKRDDLKATLTARNREAKQLTQLERTRQRNPSDRHVINFEEFSVKRRNIRNLYSLC

SEQ ID NO: 30562 - protein, 271 aa, Homo sapiens
  Payload ID: 5997
  Gene Symbol: FAM92A1
  Gene Name: family with sequence similarity 92, member A1
  Uniprot ID: A1XBS5
  ENSP ID: ENSP00000391671
MMRRTLENRNAQTKQLQTAVSNVEKHFGELCQIFAAYVRKTARLRDKADLLVNEINAYAATETPHLKLGLMNFADEFAKLQDYRQAEVERLEAKVVEPLKTYGTIVKMKRDDLKATLTARNREAKQLTQLERTRQRNPSDRHVISQAETELQRAAMDASRTSRHLEETINNFERQKMKDIKTIFSEFITIEMLFHGKALEVYTAAYQNIQNIDEDEDLEVFRNSLYAPDYSSRLDIVRANSKSPLQRSLSAKCVSGTGQEAGWAATCQTLI

SEQ ID NO: 30563 - protein, 251 aa, Homo sapiens
  Payload ID: 5997
  Gene Symbol: FAM92A1
  Gene Name: family with sequence similarity 92, member A1
  Uniprot ID: A1XBS5
  ENSP ID: ENSP00000401774
MMRRTLENRNAQTKQLQTAVSNVEKHFGELCQIFAAYVRKTARLRDKADLLVNEINAYAATETPHLKLGLMNFADEFAKLQDYRQAEVERLEAKVVEPLKTYGTIVKMKRDDLKATLTARNREAKQLTQLERTRQRNPSDRHVISQAETELQRAAMDASRTSRHLEETINNFERQKMKDIKVFRNSLYAPDYSSRLDIVRANSKSPLQRSLSAKCVSGTGQVSTCRLRKDQQAEDDEDDELDVTEEENFLK

SEQ ID NO: 30564 - protein, 65 aa, Homo sapiens
  Payload ID: 5997
  Gene Symbol: FAM92A1
  Gene Name: family with sequence similarity 92, member A1
  ENSP ID: ENSP00000427991
MNFADEFAKLQDYRQAEVERLEAKVVEPLKTYGTIVKMKRDDLKATLTARNREAKQLTQLERTRQ

SEQ ID NO: 30565 - protein, 262 aa, Homo sapiens
  Payload ID: 5997
  Gene Symbol: FAM92A1
  Gene Name: family with sequence similarity 92, member A1
  Uniprot ID: A1XBS5
  ENSP ID: ENSP00000428065
MMRRTLENRNAQTKQLQTAVSNVEKHFGELCQIFAAYVRKTARLRDKADLLVNEINAYAATETPHLKLGLMNFADEFAKLQDYRQAEVERLEAKVVEPLKTYGTIVKMKRDDLKATLTARNREAKQLTQLERTRQRNPSDRHVISQAETELQRAAMDASRTSRHLEETINNFERQKMKDIKTIFSEFITIEMLFHGKALEVYTAAYQNIQNIDEDEDLERWSFAMLPRLVLNSWGSSDPPALASQSVRFSEILCMHQIIHLV

SEQ ID NO: 30566 - protein, 110 aa, Homo sapiens
  Payload ID: 5997
  Gene Symbol: FAM92A1
  Gene Name: family with sequence similarity 92, member A1
  ENSP ID: ENSP00000428446
MNFADEFAKLQDYRQAEVERLEAKVVEPLKTYGTIVKMKRDDLKATLTARNREAKQLTQLERTRQRNPSDRHVISQAETELQRAAMDASRTSRHLEETINNFERQKMKDI

SEQ ID NO: 30567 - protein, 37 aa, Homo sapiens
  Payload ID: 5997
  Gene Symbol: FAM92A1
  Gene Name: family with sequence similarity 92, member A1
  ENSP ID: ENSP00000428633
MKRDDLKATLTARNREAKQLTQLERTRQRNPSDRHVI

SEQ ID NO: 30568 - protein, 168 aa, Homo sapiens
  Payload ID: 5997
  Gene Symbol: FAM92A1
  Gene Name: family with sequence similarity 92, member A1
  ENSP ID: ENSP00000428739
MMRRTLENRNAQTKQLQTAVSNVEKHFGELCQIFAAYVRKTARLRDKADLLVNEINAYAATETPHLKLGLMNFADEFAKLQDYRQAEVLMNNDKKVERLEAKVVEPLKTYGTIVKMKRDDLKATLTARNREAKQLTQLERTRQRNPSDRHVISQAETELQRAAMDASR

SEQ ID NO: 30569 - protein, 134 aa, Homo sapiens
  Payload ID: 5997
  Gene Symbol: FAM92A1
  Gene Name: family with sequence similarity 92, member A1
  ENSP ID: ENSP00000428751
MDASRTSRHLEETINNFERQKMKDIKTIFSEFITIEMLFHGKALEVYTAAYQNIQNIDEDEDLEVFRNSLYAPDYSSRLDIVRANSKSPLQRSLSAKCVSGTGQVSTCRLRKDQQAEDDEDDELDVTEEENFLK

SEQ ID NO: 30570 - protein, 134 aa, Homo sapiens; identical to SEQ ID NO: 30569
  Payload ID: 5997
  Gene Symbol: FAM92A1
  Gene Name: family with sequence similarity 92, member A1
  ENSP ID: ENSP00000428874

SEQ ID NO: 30571 - protein, 289 aa, Homo sapiens
  Payload ID: 5997
  Gene Symbol: FAM92A1
  Gene Name: family with sequence similarity 92, member A1
  Uniprot ID: A1XBS5
  ENSP ID: ENSP00000429367
MMRRTLENRNAQTKQLQTAVSNVEKHFGELCQIFAAYVRKTARLRDKADLLVNEINAYAATETPHLKLGLMNFADEFAKLQDYRQAEVERLEAKVVEPLKTYGTIVKMKRDDLKATLTARNREAKQLTQLERTRQRNPSDRHVISQAETELQRAAMDASRTSRHLEETINNFERQKMKDIKTIFSEFITIEMLFHGKALEVYTAAYQNIQNIDEDEDLEVFRNSLYAPDYSSRLDIVRANSKSPLQRSLSAKCVSGTGQVSTCRLRKDQQAEDDEDDELDVTEEENFLK

SEQ ID NO: 30572 - protein, 132 aa, Homo sapiens
  Payload ID: 5997
  Gene Symbol: FAM92A1
  Gene Name: family with sequence similarity 92, member A1
  ENSP ID: ENSP00000429722
MMRRTLENRNAQTKQLQTAVSNVEKHFGELCQIFAAYVRKTARLRDKADLLVNEINAYAATETPHLKLGLMNFADEFAKLQDYRQAENLKREFQFSKNRMSIKKIELIIAIHTNLKSNHIWRYFWKNVEFLS

SEQ ID NO: 30573 - protein, 114 aa, Homo sapiens
  Payload ID: 5997
  Gene Symbol: FAM92A1
  Gene Name: family with sequence similarity 92, member A1
  ENSP ID: ENSP00000429955
MDASRTSRHLEETINNFERQKMKDIKTIFSEFITIEMLFHGKALEVYTAAYQNIQNIDEDEDLEVFRNSLYAPDYSSRLDIVRANSKSPLQRSLSAKCVSGTGQVSKKPYSKGI

SEQ ID NO: 30574 - protein, 162 aa, Homo sapiens
  Payload ID: 5997
  Gene Symbol: FAM92A1
  Gene Name: family with sequence similarity 92, member A1
  ENSP ID: ENSP00000430069
MMRRTLENRNAQTKQLQTAVSNVEKHFGELCQIFAAYVRKTARLRDKADLLVNEINAYAATETPHLKLGLMNFADEFAKLQDYRQAEVERLEAKVVEPLKTYGTIVKMKRDDLKATLTARNREAKQLTQLERTRQRNPSDRHVIVSFEFGSLKKCLRYGVQK

SEQ ID NO: 30575 - protein, 79 aa, Homo sapiens
  Payload ID: 5997
  Gene Symbol: FAM92A1
  Gene Name: family with sequence similarity 92, member A1
  ENSP ID: ENSP00000430217
MNFADEFAKLQDYRQAEVERLEAKVVEPLKTYGTIVKMKRDDLKATLTARNREAKQLTQLERTRQRNPSDRHVISQAET

SEQ ID NO: 30576 - protein, 188 aa, Homo sapiens
  Payload ID: 5997
  Gene Symbol: FAM92A1
  Gene Name: family with sequence similarity 92, member A1
  ENSP ID: ENSP00000430812
  MOD_RES (1)..(1): Any amino acid
XKPVTARAQLPRAAHTGGLGNAQTKQLQTAVSNVEKHFGELCQIFAAYVRKTARLRDKADLLVNEINAYAATETPHLKLGLMNFADEFAKLQDYRQAEVERLEAKVVEPLKTYGTIVKMKRDDLKATLTARNREAKQLTQLERTRQRNPSDRHVISQAETELQRAAMDASRTSRHLEETINNFERQKM

SEQ ID NO: 30577 - protein, 288 aa, Homo sapiens
  Payload ID: 5997
  Gene Symbol: FAM92A1
  Gene Name: family with sequence similarity 92, member A1
  ENSP ID: ENSP00000478089
MMRRTLENRNAQTKQLQTAVSNVEKHFGELCQIFAAYVRKTARLRDKADLLVNEINAYAATETPHLKLGLMNFADEFAKLQDYRQAEVERLEAKVVEPLKTYGTIVKMKRDDLKATLTARNREAKQLTQLERTRQRNPSDRHVLLAETELQRAAMDASRTSRHLEETINNFERQKMKDIKTIFSEFITIEMLFHGKALEVYTAAYQNIQNIDEDEDLEVFRNSLYAPDYSSRLDIVRANSKSPLQRSLSAKCVSGTGQVSTCRLRKDQQAEDDEDDELDVTEEENFLK

SEQ ID NO: 30578 - protein, 304 aa, Homo sapiens
  Payload ID: 5998
  Gene Symbol: FAM92B
  Gene Name: family with sequence similarity 92, member B
  Uniprot ID: Q6ZTR7
  ENSP ID: ENSP00000443411
MNIVFSRDSQVRVMENTVANTEKYFGQFCSLLAAYTRKTARLRDKADQLVKQLIDFANSENPELRATMRGFAEDLAKVQDYRQAQVERLETKVVNPLKLYGAQIKQTRAEIKKFKHVQNHEIKQLEKLEKLRQKSPSDQQMISQAETRVQRAAVDSSRTTLQLEETVDGFQRQKLKDLQKFFCDFVTIEMVFHAKAVEVYSSAFQTLEKYDLERDLLDFRAKMQGVYGHYDTRLLANTSPPPSVLQSLASQGTLQVQLSRANEDPEHPHANHGRFSLCEWVVKGQPAHCVCGQGGHLMLPGHSL

SEQ ID NO: 30579 - protein, 205 aa, Homo sapiens
  Payload ID: 5998
  Gene Symbol: FAM92B
  Gene Name: family with sequence similarity 92, member B
  ENSP ID: ENSP00000478373
  MOD_RES (1)..(1): Any amino acid
XPLKLYGAQIKQTRAEIKKFKHVQNHEIKQLEKLEKLRQKSPSDQQMISQAETRVQRAAVDSSRTTLQLEETVDGFQRQKLKDLQKFFCDFVTIEMVFHAKAVEVYSSAFQTLEKYDLERDLLDFRAKMQGVYGHYDTRLLANTSPPPSVLQSLASQSAQSTIWSPGKEGEESEDNSMEEAPVEDLRALGQGPHKRELPTTVRRT

SEQ ID NO: 30580 - protein, 304 aa, Homo sapiens
  Payload ID: 5998
  Gene Symbol: FAM92B
  Gene Name: family with sequence similarity 92, member B
  ENSP ID: ENSP00000487117
MNIVFSRDSQVRVMENTVANTEKYFGQFCSLLAAYTRKTARLRDKADQLVKQLIDFANSENPELRATMRGFAEDLAKVQDYRQAQVERLETKVVNPLKLYGAQIKQTRAEIKKFKHVQNHEIKQLEKLEKLRQKSPSDQQMIGQAETRVQRAAVDSSRTTLQLEETVDGFQRQKLKDLQKFFCDFVTIEMVFHAKAVEVYSSAFQTLEKYDLERDLLDFRAKMQGVYGHYDTRLLANTSPPPSVLQSLASQGTLQVQLSRANEDPEHPHANHGRFSLCEWVVKGQPAHCVCGQGGHLMLPGHSL

SEQ ID NO: 30581 - protein, 160 aa, Homo sapiens
  Payload ID: 5999
  Gene Symbol: FAM96A
  Gene Name: family with sequence similarity 96, member A
  Uniprot ID: Q9H5X1
  ENSP ID: ENSP00000300030
MQRVSGLLSWTLSRVLWLSGLSEPGAARQPRIMEEKALEVYDLIRTIRDPEKPNTLEELEVVSESCVEVQEINEEEYLVIIRFTPTVPHCSLATLIGLCLRVKLQRCLPFKHKLEIYISEGTHSTEEDINKQINDKERVAAAMENPNLREIVEQCVLEPD

SEQ ID NO: 30582 - protein, 102 aa, Homo sapiens
  Payload ID: 5999
  Gene Symbol: FAM96A
  Gene Name: family with sequence similarity 96, member A
  Uniprot ID: Q9H5X1
  ENSP ID: ENSP00000369644
MQRVSGLLSWTLSRVLWLSGLSEPGAARQPRIMEEKALEVYDLIRTIRDPEKPNTLEELEVVSESCVEVQEINEEEYLVIIRFTPTVPHCSLATLIVGNLHF

SEQ ID NO: 30583 - protein, 130 aa, Homo sapiens
  Payload ID: 5999
  Gene Symbol: FAM96A
  Gene Name: family with sequence similarity 96, member A
  ENSP ID: ENSP00000452953
MQRVSGLLSWTLSRVLWLSGLSEPGAARQPRIMEEKALEVYDLIRTIRDPEKPNTLEELEVVSESCVEVQEINEEEYLVIIRFTPTVPHCSLATLIGLCLRVKLQRCLPFKHKLEIYISEGTHSTEEDSK

SEQ ID NO: 30584 - protein, 69 aa, Homo sapiens
  Payload ID: 5999
  Gene Symbol: FAM96A
  Gene Name: family with sequence similarity 96, member A
  ENSP ID: ENSP00000453210
MQRVSGLLSWTLSRVLWLSGLSEPGAARQPRIMEEKALEVYGWNAMAGSRLTATSAFWFQVILLPQSPK

SEQ ID NO: 30585 - protein, 102 aa, Homo sapiens; identical to SEQ ID NO: 30582
  Payload ID: 5999
  Gene Symbol: FAM96A
  Gene Name: family with sequence similarity 96, member A
  Uniprot ID: Q9H5X1
  ENSP ID: ENSP00000454079

SEQ ID NO: 30586 - protein, 163 aa, Homo sapiens
  Payload ID: 6000
  Gene Symbol: FAM96B
  Gene Name: family with sequence similarity 96, member B
  Uniprot ID: Q9Y3D0
  ENSP ID: ENSP00000387471
MVGGGGVGGGLLENANPLIYQRSGERPVTAGEEDEQVPDSIDAREIFDLIRSINDPEHPLTLEELNVVEQVRVQVSDPESTVAVAFTPTIPHCSMATLIGLSIKVKLLRSLPQRFKMDVHITPGTHASEHAVNKQLADKERVAAALENTHLLEVVNQCLSARS

SEQ ID NO: 30587 - protein, 161 aa, Homo sapiens
  Payload ID: 6000
  Gene Symbol: FAM96B
  Gene Name: family with sequence similarity 96, member B
  ENSP ID: ENSP00000455028
  MOD_RES (1)..(1): Any amino acid
XVGGGGVGGGLLENANPLIYQRSGERPVTAGEEDEQVPDSIDAREIFDLIRSINDPEHPLTLEELNVVEQVRVQVSDPESTVAVAFTPTIPHCSMATLIGLSIKVKLLRSLPQRFKMDVHITPGTHASEHAGPECVRLQQRRRQPGGGILRRQISEQATCR

SEQ ID NO: 30588 - protein, 106 aa, Homo sapiens
  Payload ID: 6000
  Gene Symbol: FAM96B
  Gene Name: family with sequence similarity 96, member B
  ENSP ID: ENSP00000462376
DSIDAREIFDLIRSINDPEHPLTLEELNVVEQVRVQVSDPESTVAVAFTPTIPHCSMATLIGLSIKVKLLRSLPQRFKMDVHITPGTHASEHAVNKQLADKERPGL

SEQ ID NO: 30589 - protein, 36 aa, Homo sapiens
  Payload ID: 6000
  Gene Symbol: FAM96B
  Gene Name: family with sequence similarity 96, member B
  ENSP ID: ENSP00000463700
MVGGGGVGGGLLENANPLIYQRSGERPVTAGEEDEQ

SEQ ID NO: 30590 - protein, 518 aa, Homo sapiens
  Payload ID: 6001
  Gene Symbol: FAM98A
  Gene Name: family with sequence similarity 98, member A
  Uniprot ID: Q8NCA5
  ENSP ID: ENSP00000238823
MECDLMETDILESLEDLGYKGPLLEDGALSQAVSAGASSPEFTKLCAWLVSELRVLCKLEENVQATNSPSEAEEFQLEVSGLLGEMNCPYLSLTSGDVTKRLLIQKNCLLLLTYLISELEAARMLCVNAPPKKAQEGGGSEVFQELKGICIALGMSKPPANITMFQFFSGIEKKLKETLAKVPPNHVGKPLLKKPMGPAHWEKIEAINQAIANEYEVRRKLLIKRLDVTVQSFGWSDRAKSQTEKLAKVYQPKRSVLSPKTTISVAHLLAARQDLSKILRTSSGSIREKTACAINKVLMGRVPDRGGRPNEIEPPPPEMPPWQKRQDGPQQQTGGRGGGRGGYEHSSYGGRGGHEQGGGRGGRGGYDHGGRGGGRGNKHQGGWTDGGSGGGGGYQDGGYRDSGFQPGGYHGGHSSGGYQGGGYGGFQTSSSYTGSGYQGGGYQQDNRYQDGGHHGDRGGGRGGRGGRGGRGGRAGQGGGWGGRGSQNYHQGGQFEQHFQHGGYQYNHSGFGQGRHYTS

SEQ ID NO: 30591 - protein, 312 aa, Homo sapiens
  Payload ID: 6001
  Gene Symbol: FAM98A
  Gene Name: family with sequence similarity 98, member A
  ENSP ID: ENSP00000384711
MECDLMETDILESLEDLGYKGPLLEDGALSQAVSAGASSPEFTKLCAWLVSELRVLCKLEENVQATNSPSEAEEFQLEVSGLLGEMNCPYLSLTSGDVTKRLLIQKNCLLLLTYLISELEAARMLCVNAPPKKAQEGGGSEVFQELKGICIALGMSKPPANITMFQFFSGIEKKLKETLAKVPPNHVGKPLLKKPMGPAHWEKIEAINQAIANEYEVRRKLLIKRLDVTVQSFGWSDRAKSQTEKLAKVYQPKRSVLSPKTTISVAHLLAARQDLSKILRTSSGSIREKTACAINKVIRVPLIFSKCIYFCS

SEQ ID NO: 30592 - protein, 68 aa, Homo sapiens
  Payload ID: 6001
  Gene Symbol: FAM98A
  Gene Name: family with sequence similarity 98, member A
  ENSP ID: ENSP00000398490
MECDLMETDILESLEDLGYKGPLLEDGALSQAVSAGASSPEFTKLCAWLVSELRVLCKLEENVQATNS

SEQ ID NO: 30593 - protein, 433 aa, Homo sapiens
  Payload ID: 6002
  Gene Symbol: FAM98B
  Gene Name: family with sequence similarity 98, member B
  Uniprot ID: Q52LJ0
  ENSP ID: ENSP00000380734
MRGPEPGPQPTMEGDVLDTLEALGYKGPLLEEQALTKAAEGGLSSPEFSELCIWLGSQIKSLCNLEESITSAGRDDLESFQLEISGFLKEMACPYSVLISGDIKDRLKKKEDCLKLLLFLSTELQASQILQNKKHKNSQLDKNSEVYQEVQAMFDTLGIPKSTTSDIPHMLNQVESKVKDILSKVQKNHVGKPLLKMDLNSEQAEQLERINDALSCEYECRRRMLMKRLDVTVQSFGWSDRAKVKTDDIARIYQPKRYALSPKTTITMAHLLAAREDLSKIIRTSSGTSREKTACAINKVLMGRVPDRGGRPNEIEPPPPEMPPWQKRQEGGGGRGGWGGGGGGGGRGGGGGGGGRGGWGGGGGGWGGGGGGGGGWGGGGGGGRGGFQGRGDYGGRGGYGGRGGYGGRGYGDPYGGGGGGGGGGGGGGGYRRY

SEQ ID NO: 30594 - protein, 330 aa, Homo sapiens
  Payload ID: 6002
  Gene Symbol: FAM98B
  Gene Name: family with sequence similarity 98, member B
  Uniprot ID: Q52LJ0
  ENSP ID: ENSP00000453166
MRGPEPGPQPTMEGDVLDTLEALGYKGPLLEEQALTKAAEGGLSSPEFSELCIWLGSQIKSLCNLEESITSAGRDDLESFQLEISGFLKEMACPYSVLISGDIKDRLKKKEDCLKLLLFLSTELQASQILQNKKHKNSQLDKNSEVYQEVQAMFDTLGIPKSTTSDIPHMLNQVESKVKDILSKVQKNHVGKPLLKMDLNSEQAEQLERINDALSCEYECRRRMLMKRLDVTVQSFGWSDRAKVKTDDIARIYQPKRYALSPKTTITMAHLLAAREDLSKIIRTSSGTSREKTACAINKVGVSFSTVENELMISYLMFLQILVYFSFMSW

SEQ ID NO: 30595 - protein, 101 aa, Homo sapiens
  Payload ID: 6002
  Gene Symbol: FAM98B
  Gene Name: family with sequence similarity 98, member B
  ENSP ID: ENSP00000453926
ISGDIKDRLKKKEDCLKLLLFLSTELQASQILQNKKHKNSQLDKNSEVYQEVQAMFDTLGIPKSTTSDIPHMLNQVESKVKDILSKIHMEEVVVVVVVVVE

SEQ ID NO: 30596 - protein, 349 aa, Homo sapiens
  Payload ID: 6003
  Gene Symbol: FAM98C
  Gene Name: family with sequence similarity 98, member C
  Uniprot ID: Q17RN3
  ENSP ID: ENSP00000252530
MEAVKAEAWEGAAVAQDLLALGYGGVPGAASRGASCPDFRGLCVRLAAELATLGALEQQREAGAEVLSAGDGPGAEEDFLRQLGSLLRELHCPDRALCGGDGAAALREPGAGLRLLRFLCSELQATRLLCLRSLLDPSPRPPLGEGVVEGAGMVQELDLTLQALGLPRPAPGTPASQLLQELHAKISELQPSLPPGSLQPLLSCSLDAPRWEALESLSQSLRDQYRCRRCLLLKRLDLTTSAFHWSDRAEAQGEAMRAVLIPIREVLTPESDISIAHVLAARADLSCLVPATSVAVRRGTCCAINKVLMGNVPDRGGRPNELEPPMPTWRSRREDGGPQCWGRKKKKKK

SEQ ID NO: 30597 - protein, 267 aa, Homo sapiens
  Payload ID: 6003
  Gene Symbol: FAM98C
  Gene Name: family with sequence similarity 98, member C
  Uniprot ID: Q17RN3
  ENSP ID: ENSP00000340348
MEAVKAEAWEGAAVAQDLLALGYGGVPGAASRGASCPDFRGLCVRLAAELATLGALEQQREAGAEVLSAGDGPGAEEDFLRQLGSLLRELHCPDRALCGGDGAAALREPGAGLRLLRFLCSELQATRLLCLRSLLDPSPRPPLGEGVVEGAGMVQELDLTLQALGLPRPAPGTPASQLLQELHAKEALESLSQSLRDQYRCRRCLLLKRLDLTTSAFHWSDRAEVLMGNVPDRGGRPNELEPPMPTWRSRREDGGPQCWGRKKKKKK

SEQ ID NO: 30598 - protein, 181 aa, Homo sapiens
  Payload ID: 6003
  Gene Symbol: FAM98C
  Gene Name: family with sequence similarity 98, member C
  ENSP ID: ENSP00000467878
  MOD_RES (1)..(1): Any amino acid
XGSVGGGRGGPGPAGSGVKGCAVRLVGAGRPGLPPGRGRKGIPSDIPAPSRCLGPHRYGGVPGAASRGASCPDFRGLCVRLAAELATLGALEQQREAGAEVLSAGDGPGAEEDFLRQLGSLLRELHCPDRALCGGDGAAALREPGAGLRLLRFLCSELQATRLLCLRSLLDPSPRPPLGEG

SEQ ID NO: 30599 - protein, 186 aa, Homo sapiens
  Payload ID: 6003
  Gene Symbol: FAM98C
  Gene Name: family with sequence similarity 98, member C
  ENSP ID: ENSP00000467974
MEAVKAEAWEGAAVAQDLLALGYGGVPGAASRGASCPDFRGLCVRLAAELATLGALEQQREAGAEVLSAGDGPGAEEDFLRQLGSLLRELHCPDRALCGGDGAAALREPGAGLRLLRPRRGHEGSADPNSRGSDPRIGHLHCTRSGCPSRPVLSRPSHQRGCPQRDLLCHQQGAYGQRSRPGGPPK

SEQ ID NO: 30600 - protein, 56 aa, Homo sapiens
  Payload ID: 6003
  Gene Symbol: FAM98C
  Gene Name: family with sequence similarity 98, member C
  ENSP ID: ENSP00000468553
  MOD_RES (1)..(1): Any amino acid
XPRWPRTCWLWGMEVSRGRRRGAPHAQTSGGCACGWRRSWRRWAPSSSSERRARRC

SEQ ID NO: 30601 - protein, 97 aa, Homo sapiens
  Payload ID: 6004
  Gene Symbol: FANCD2OS
  Gene Name: FANCD2 opposite strand
  ENSP ID: ENSP00000429589
GYQLWSPWTPLDESFQWLRHTTPTPSSKHPFKASPCFPHTPSDLEVQLCFQEVTLVLDSPFLESGRWSFTTLPKLVLNSWTQAMPWPRPPKVLGLQR

SEQ ID NO: 30602 - protein, 177 aa, Homo sapiens
  Payload ID: 6004
  Gene Symbol: FANCD2OS
  Gene Name: FANCD2 opposite strand
  Uniprot ID: Q96PS1
  ENSP ID: ENSP00000429608
MAGYQLWSPWTPLDESFQWLRHTTPTPSSKHPFKASPCFPHTPSDLEVQLCFQEVTLVLDSPFLESGVSPKLPCHTSELRTMNNKGLVRKPQPIRLSGVDSVFGRVITAQPPKWTGTFRVSDKSAFCKIISREHQWPIGLKEPQIQMTVTMCKQMLRSILLLYATYKKCTFALQHSK

SEQ ID NO: 30603 - protein, 177 aa, Homo sapiens; identical to SEQ ID NO: 30602
  Payload ID: 6004
  Gene Symbol: FANCD2OS
  Gene Name: FANCD2 opposite strand
  Uniprot ID: Q96PS1
  ENSP ID: ENSP00000429663

SEQ ID NO: 30604 - protein, 1017 aa, Homo sapiens
  Payload ID: 6005
  Gene Symbol: FAN1
  Gene Name: FANCD2/FANCI-associated nuclease 1
  Uniprot ID: Q9Y2M0
  ENSP ID: ENSP00000354497
MMSEGKPPDKKRPRRSLSISKNKKKASNSIISCFNNAPPAKLACPVCSKMVPRYDLNRHLDEMCANNDFVQVDPGQVGLINSNVSMVDLTSVTLEDVTPKKSPPPKTNLTPGQSDSAKREVKQKISPYFKSNDVVCKNQDELRNRSVKVICLGSLASKLSRKYVKAKKSIDKDEEFAGSSPQSSKSTVVKSLIDNSSEIEDEDQILENSSQKENVFKCDSLKEECIPEHMVRGSKIMEAESQKATRECEKSALTPGFSDNAIMLFSPDFTLRNTLKSTSEDSLVKQECIKEVVEKREACHCEEVKMTVASEAKIQLSDSEAKSHSSADDASAWSNIQEAPLQDDSCLNNDIPHSIPLEQGSSCNGPGQTTGHPYYLRSFLVVLKTVLENEDDMLLFDEQEKGIVTKFYQLSATGQKLYVRLFQRKLSWIKMTKLEYEEIALDLTPVIEELTNAGFLQTESELQELSEVLELLSAPELKSLAKTFHLVNPNGQKQQLVDAFLKLAKQRSVCTWGKNKPGIGAVILKRAKALAGQSVRICKGPRAVFSRILLLFSLTDSMEDEDAACGGQGQLSTVLLVNLGRMEFPSYTINRKTHIFQDRDDLIRYAAATHMLSDISSAMANGNWEEAKELAQCAKRDWNRLKNHPSLRCHEDLPLFLRCFTVGWIYTRILSRFVEILQRLHMYEEAVRELESLLSQRIYCPDSRGRWWDRLALNLHQHLKRLEPTIKCITEGLADPEVRTGHRLSLYQRAVRLRESPSCKKFKHLFQQLPEMAVQDVKHVTITGRLCPQRGMCKSVFVMEAGEAADPTTVLCSVEELALAHYRRSGFDQGIHGEGSTFSTLYGLLLWDIIFMDGIPDVFRNACQAFPLDLCTDSFFTSRRPALEARLQLIHDAPEESLRAWVAATWHEQEGRVASLVSWDRFTSLQQAQDLVSCLGGPVLSGVCRHLAADFRHCRGGLPDLVVWNSQSRHFKLVEVKGPNDRLSHKQMIWLAELQKLGAEVEVCHVVAVGAKSQSLS

SEQ ID NO: 30605 - protein, 533 aa, Homo sapiens
  Payload ID: 6005
  Gene Symbol: FAN1
  Gene Name: FANCD2/FANCI-associated nuclease 1
  Uniprot ID: Q9Y2M0
  ENSP ID: ENSP00000454223
MMSEGKPPDKKRPRRSLSISKNKKKASNSIISCFNNAPPAKLACPVCSKMVPRYDLNRHLDEMCANNDFVQVDPGQVGLINSNVSMVDLTSVTLEDVTPKKSPPPKTNLTPGQSDSAKREVKQKISPYFKSNDVVCKNQDELRNRSVKVICLGSLASKLSRKYVKAKKSIDKDEEFAGSSPQSSKSTVVKSLIDNSSEIEDEDQILENSSQKENVFKCDSLKEECIPEHMVRGSKIMEAESQKATRECEKSALTPGFSDNAIMLFSPDFTLRNTLKSTSEDSLVKQECIKEVVEKREACHCEEVKMTVASEAKIQLSDSEAKSHSSADDASAWSNIQEAPLQDDSCLNNDIPHSIPLEQGSSCNGPGQTTGHPYYLRSFLVVLKTVLENEDDMLLFDEQEKGIVTKFYQLSATGQKLYVRLFQRKLSWIKMTKLEYEEIALDLTPVIEELTNAGFLQTESELQELSEVLELLSAPELKSLAKTFHLVNPNGQKQQLVDAFLKLAKQRSVCTWGKNKPGIGAVILKRFCWLLLQ

SEQ ID NO: 30606 - protein, 533 aa, Homo sapiens; identical to SEQ ID NO: 30605
  Payload ID: 6005
  Gene Symbol: FAN1
  Gene Name: FANCD2/FANCI-associated nuclease 1
  Uniprot ID: Q9Y2M0
  ENSP ID: ENSP00000454544

SEQ ID NO: 30607 - protein, 430 aa, Homo sapiens
  Payload ID: 6005
  Gene Symbol: FAN1
  Gene Name: FANCD2/FANCI-associated nuclease 1
  ENSP ID: ENSP00000455573
MMSEGKPPDKKRPRRSLSISKNKKKASNSIISCFNNAPPAKLACPVCSKMVPRYDLNRHLDEMCANNDFVQVDPGQVGLINSNVSMVDLTSVTLEDVTPKKSPPPKTNLTPGQSDSAKREVKQKISPYFKSNDVVCKNQDELRNRSVKVICLGSLASKLSRKYVKAKKSIDKDEEFAGSSPQSSKSTVVKSLIDNSSEIEDEDQILENSSQKENVFKCDSLKEECIPEHMVRGSKIMEAESQKATRECEKSALTPGFSDNAIMLFSPDFTLRNTLKSTSEDSLVKQECIKEVVEKREACHCEEVKMTVASEAKIQLSDSEAKSHSSADDASAWSNIQEAPLQDDSCLNNDIPHSIPLEQGSSCNGPGQTTGHPYYLRSFLVVLKTVLENEDDMLLFDEQEKGIVTKFYQLSDLWTVPFKDRVWRKWKLSS

SEQ ID NO: 30608 - protein, 533 aa, Homo sapiens; identical to SEQ ID NO: 30605
  Payload ID: 6005
  Gene Symbol: FAN1
  Gene Name: FANCD2/FANCI-associated nuclease 1
  Uniprot ID: Q9Y2M0
  ENSP ID: ENSP00000455983

SEQ ID NO: 30609 - protein, 105 aa, Homo sapiens
  Payload ID: 6005
  Gene Symbol: FAN1
  Gene Name: FANCD2/FANCI-associated nuclease 1
  ENSP ID: ENSP00000457680
MRSYRIPLLVISSQESKTTGQKLYVRLFQRKLSWIKMTKLEYEEIALDLTPVIEELTNAGFLQTESELQELSEVLELLSAPELKSLAKTFHLVNPNGQKQQLVDA

SEQ ID NO: 30610 - protein, 1017 aa, Homo sapiens; identical to SEQ ID NO: 30604
  Payload ID: 6005
  Gene Symbol: FAN1
  Gene Name: FANCD2/FANCI-associated nuclease 1
  Uniprot ID: Q9Y2M0
  ENSP ID: ENSP00000484956

SEQ ID NO: 30611 - protein, 881 aa, Homo sapiens
  Payload ID: 6006
  Gene Symbol: FAAP100
  Gene Name: Fanconi anemia core complex associated protein 100
  Uniprot ID: Q0VG06
  ENSP ID: ENSP00000333283
MAGAAPRVRYLAGFCCPLGGLAAGKPRVLCHEAEVFLSTGSELVYVYDQEGGLLTAAFRFPDQVWHLELLAPRRLLYALCARRGLYCLSLDHPGRSRSTSQDDRDSEDGDQPSPVIPVDPDACILPDAALCAFTLLDSVLVTLVQGPARWKMQLFEQPCPGEDPRPGGQIGEVELSSYTPPAGVPGKPAAPHFLPVLCSVSPSGSRVPHDLLGGSGGFTLEDALFGLLFGADATLLQSPVVLCGLPDGQLCCVILKALVTSRSAPGDPNALVKILHHLEEPVIFIGALKTEPQAAEAAENFLPDEDVHCDCLVAFGHHGRMLAIKASWDESGKLVPELREYCLPGPVLCAACGGGGRVYHSTPSDLCVVDLSRGSTPLGPEQPEEGPGGLPPMLCPASLNICSVVSLSASPRTHEGGTKLLALSAKGRLMTCSLDLDSEMPGPARMTTESAGQKIKELLSGIGNISERVSFLKKAVDQRNKALTSLNEAMNVSCALLSSGTGPRPISCTTSTTWSRLQTQDVLMATCVLENSSSFSLDQGWTLCIQVLTSSCALDLDSACSAITYTIPVDQLGPGARREVTLPLGPGENGGLDLPVTVSCTLFYSLREVVGGALAPSDSEDPFLDECPSDVLPEQEGVCLPLSRHTVDMLQCLRFPGLAPPHTRAPSPLGPTRDPVATFLETCREPGSQPAGPASLRAEYLPPSVASIKVSAELLRAALKDGHSGVPLCCATLQWLLAENAAVDVVRARALSSIQGVAPDGANVHLIVREVAMTDLCPAGPIQAVEIQVESSSLADICRAHHAVVGRMQTMVTEQATQGSSAPDLRVQYLRQIHANHETLLREVQTLRDRLCTEDEASSCATAQRLLQVYRQLRHPSLILL

SEQ ID NO: 30612 - protein, 97 aa, Homo sapiens
  Payload ID: 6006
  Gene Symbol: FAAP100
  Gene Name: Fanconi anemia core complex associated protein 100
  ENSP ID: ENSP00000395348
MAGAAPRVRYLAGFCCPLGGLAAGKPRVLCHEAEVFLSTGSELVYVYDQEGGLLTAAFRFPDQVWHLELLAPRRLLYALCARRGLYCLSLDHPGRSR

SEQ ID NO: 30613 - protein, 530 aa, Homo sapiens
  Payload ID: 6006
  Gene Symbol: FAAP100
  Gene Name: Fanconi anemia core complex associated protein 100
  ENSP ID: ENSP00000399674
MHHPAPAWPRCGWCASHTWQISLGPRSTSFILCPLSSCGPRGEVRSDGWRQLPERLGVGGAGRNMPLGRGLTLWRGSTPTVCLSWSQARCLPGLSQDVAPGAVGVPPLPGVMSVLRRVSFLKKAVDQRNKALTSLNEAMNVSCALLSSGTGPRPISCTTSTTWSRLQTQDVLMATCVLENSSSFSLDQGWTLCIQVLTSSCALDLDSACSAITYTIPVDQLGPGARREVTLPLGPGENGGLDLPVTVSCTLFYSLREVVGGALAPSDSEDPFLDECPSDVLPEQEGVCLPLSRHTVDMLQCLRFPGLAPPHTRAPSPLGPTRDPVATFLETCREPGSQPAGPASLRAEYLPPSVASIKVSAELLRAALKDGHSGVPLCCATLQWLLAENAAVDVVRARALSSIQGVAPDGANVHLIVREVAMTDLCPAGPIQAVEIQVESSSLADICRAHHAVVGRMQTMVTEQATQGSSAPDLRVQYLRQIHANHETLLREVQTLRDRLCTEDEASSCATAQRLLQVYRQLRHPSLILL

SEQ ID NO: 30614 - protein, 300 aa, Homo sapiens
  Payload ID: 6006
  Gene Symbol: FAAP100
  Gene Name: Fanconi anemia core complex associated protein 100
  ENSP ID: ENSP00000438149
MQLFEQPCPGEDPRPGGQIGEVELSSYTPPAGVPGKPAAPHFLPVLCSVSPSGSRVPHDLLGGSGGFTLEDALFGLLFGADATLLQSPVVLCGLPDGQLCCVILKALVTSRSAPGDPNALVKILHHLEEPVIFIGALKTEPQAAEAAENFLPDEDVHCDCLVAFGHHGRMLAIKASWDESGKLVPELREYCLPGPVLCAACGGGGRVYHSTPSDLCVVDLSRGSTPLGPEQPEEGPGGLPPMLCPASLNICSVVSLSASPRTHEGGTKLLALSAKGRLMTCSLDLDSEMPGPARMTTESA

SEQ ID NO: 30615 - protein, 172 aa, Homo sapiens
  Payload ID: 6006
  Gene Symbol: FAAP100
  Gene Name: Fanconi anemia core complex associated protein 100
  ENSP ID: ENSP00000443415
MHLALLSPLPSIKDSISSPNTFRAALARREEQGTDSRSTSQDDRDSEDGDQPSPVIPVDPDACILPDAALCAFTLLDSVLVTLVQGPARWKMQLFEQPCPGEDPRPGGQIGEVELSSYTPPAGVPGKPAAPHFLPVLCSVSPSGSRVPHDLLGGSGGFTLEDALFGLLFGAD

SEQ ID NO: 30616 - protein, 249 aa, Homo sapiens
  Payload ID: 6006
  Gene Symbol: FAAP100
  Gene Name: Fanconi anemia core complex associated protein 100
  ENSP ID: ENSP00000444241
MQLFEQPCPGEDPRPGGQIGEVELSSYTPPAGVPGKPAAPHFLPVLCSVSPSGSRVPHDLLGGSGGFTLEDALFGLLFGADATLLQSPVVLCGLPDGQLCCVILKALVTSRSAPGDPNALVKILHHLEEPVIFIGALKTEPQAAEAAENFLPDEDVHCDCLVAFGHHGRMLAIKASWDESGKLVPELREYCLPGPVLCAACGGGGRVYHSTPSDLCVVDLSRGSTPLGPEQPEEGPGGLPPMLCPASLN

SEQ ID NO: 30617 - protein, 110 aa, Homo sapiens
  Payload ID: 6006
  Gene Symbol: FAAP100
  Gene Name: Fanconi anemia core complex associated protein 100
  ENSP ID: ENSP00000459776
CPSDVLPEQEGVCLPLSRHTVDMLQCLRFPGLAPPHTRAPSPLGPTRDPVATFLETCREPGSQPAGPASLRAEYLPPSVASIKVSAELLRAALKDGHSVMFFKPIYGSVT

SEQ ID NO: 30618 - protein, 112 aa, Homo sapiens
  Payload ID: 6007
  Gene Symbol: FAAP20
  Gene Name: Fanconi anemia core complex associated protein 20
  Uniprot ID: Q6NZ36
  ENSP ID: ENSP00000367804
MEAARRPRLGLSRRRPRPAGGSPGAARSPLKSSLSDPRPFPGHPFRRTCGARAVPTGCFTGQEGTWNPPPGPCPSARHLIPAGPPGWSSSRLWRVPRPCAAAPCARRSSPPG

SEQ ID NO: 30619 - protein, 180 aa, Homo sapiens
  Payload ID: 6007
  Gene Symbol: FAAP20
  Gene Name: Fanconi anemia core complex associated protein 20
  Uniprot ID: Q6NZ36
  ENSP ID: ENSP00000367808
MEAARRPRLGLSRRRPRPAGGPSGGRPWFLLGGDERERLWAELLRTVSPELILDHEVPSLPAFPGQEPRCGPEPTEVFTVGPKTFSWTPFPPDLWGPGRSYRLLHGAGGHLESPARSLPQRPAPDPCRAPRVEQQPSVEGAAALRSCPMCQKEFAPRLTQLDVDSHLAQCLAESTEDVTW

SEQ ID NO: 30620 - protein, 170 aa, Homo sapiens
  Payload ID: 6007
  Gene Symbol: FAAP20
  Gene Name: Fanconi anemia core complex associated protein 20
  Uniprot ID: Q6NZ36
  ENSP ID: ENSP00000383709
MEAARRPRLGLSRRRPRPAGGPSGGRPWFLLGGDERERLWAELLRTVSPELILDHEVPSLPAFPGQEPRCGPEPTEVFTVGPKTFSWTPFPPDLWGPGRSYRLLHGAGGHLESPARSLPQRPAPDPCRAPRVEQQPSVEGAAALRSCPMCQKEFAPRYFNSRPHLCPAGS

SEQ ID NO: 30621 - protein, 189 aa, Homo sapiens
  Payload ID: 6007
  Gene Symbol: FAAP20
  Gene Name: Fanconi anemia core complex associated protein 20
  ENSP ID: ENSP00000383710
MEAARRPRLGLSRRRPRPAGGSPGAARSPLKSSLSDPRPFPGHPFRRTCGARAVPTGCFTGQEGTWNPPPGPCPSARHLIPAGPPGWSSSRLWRVPRPCAAAPCARRSSPPGTSTPAPTCVPLAPKLPPYVWVASEMWGRRHSRKKGIRGASTSSEHFIPQDATRSLSWRSRSVHRVLFPWKMCTLETA

SEQ ID NO: 30622 - protein, 193 aa, Homo sapiens
  Payload ID: 6007
  Gene Symbol: FAAP20
  Gene Name: Fanconi anemia core complex associated protein 20
  ENSP ID: ENSP00000405430
  MOD_RES (1)..(1): Any amino acid
XARRPRLGLSRRRPRPAGGPSGGRPWFLLGGDERERLWAELLRTVSPELILDHEVPSLPAFPGQEPRCGPEPTEVFTVGPKTFSWTPFPPDLWGPGRSYRLLHGAGGHLESPARSLPQRPAPDPCRAPRVEQQPSVEGAAALRSCPMCQKEFAPRSKNSSGMRRHRSPKLAANNNNNKRKGRARWLTPVIPAL

SEQ ID NO: 30623 - protein, 195 aa, Homo sapiens
  Payload ID: 6007
  Gene Symbol: FAAP20
  Gene Name: Fanconi anemia core complex associated protein 20
  ENSP ID: ENSP00000409721
  MOD_RES (1)..(1): Any amino acid
XEAARRPRLGLSRRRPRPAGGPSGGRPWFLLGGDERERLWAELLRTVSPELILDHEVPSLPAFPGQEPRCGPEPTEVFTVGPKTFSWTPFPPDLWGPGRSYRLLHGAGGHLESPARSLPQRPAPDPCRAPRVEQQPSVEGAAALRSCPMCQKEFAPRSKNSSGMRRHRSPKLAANNNNNKRKGRARWLTPVIPAL

SEQ ID NO: 30624 - protein, 195 aa, Homo sapiens
  Payload ID: 6007
  Gene Symbol: FAAP20
  Gene Name: Fanconi anemia core complex associated protein 20
  Uniprot ID: Q6NZ36
  ENSP ID: ENSP00000410450
MEAARRPRLGLSRRRPRPAGGPSGGRPWFLLGGDERERLWAELLRTVSPELILDHEVPSLPAFPGQEPRCGPEPTEVFTVGPKTFSWTPFPPDLWGPGRSYRLLHGAGGHLESPARSLPQRPAPDPCRAPRVEQQPSVEGAAALRSCPMCQKEFAPRLTQLDVDSHLAQCLAESTEDVTCLSWMCKTLNDPGSQG

SEQ ID NO: 30625 - protein, 147 aa, Homo sapiens
  Payload ID: 6007
  Gene Symbol: FAAP20
  Gene Name: Fanconi anemia core complex associated protein 20
  ENSP ID: ENSP00000410740
  MOD_RES (1)..(1): Any amino acid
XAEAAAGVEPPEAAPGGREPRCGPEPTEVFTVGPKTFSWTPFPPDLWGPGRSYRLLHGAGGHLESPARSLPQRPAPDPCRAPRVEQQPSVEGAAALRSCPMCQKEFAPRSKNSSGMRRHRSPKLAANNNNNKRKGRARWLTPVIPAL

SEQ ID NO: 30626 - protein, 69 aa, Homo sapiens
  Payload ID: 6008
  Gene Symbol: FAAP24
  Gene Name: Fanconi anemia core complex associated protein 24
  ENSP ID: ENSP00000254262
MEKNPPDDTGPVHVPLGHIVANEKWRGSQLAQEMQDAAFFMSPKLIWWQEMATERGLFGLEIPIILKEL

SEQ ID NO: 30627 - protein, 120 aa, Homo sapiens
  Payload ID: 6008
  Gene Symbol: FAAP24
  Gene Name: Fanconi anemia core complex associated protein 24
  ENSP ID: ENSP00000465569
MSEQYFPALQKFTVLDLGMVLLPVASQMEASCLVIQLVQEQTKEPSKNPLLGKKRALLLSEPSLLRTVQQIPGVGKVKAPLLLQKFPSIQQLSNASIGELEQVVGQAVAQQIHAFFTQPR

SEQ ID NO: 30628 - protein, 120 aa, Homo sapiens; identical to SEQ ID NO: 30627
  Payload ID: 6008
  Gene Symbol: FAAP24
  Gene Name: Fanconi anemia core complex associated protein 24
  ENSP ID: ENSP00000465728

SEQ ID NO: 30629 - protein, 215 aa, Homo sapiens
  Payload ID: 6008
  Gene Symbol: FAAP24
  Gene Name: Fanconi anemia core complex associated protein 24
  Uniprot ID: Q9BTP7
  ENSP ID: ENSP00000466121
MEKNPPDDTGPVHVPLGHIVANEKWRGSQLAQEMQGKIKLIFEDGLTPDFYLSNRCCILYVTEADLVAGNGYRKRLVRVRNSNNLKGIVVVEKTRMSEQYFPALQKFTVLDLGMVLLPVASQMEASCLVIQLVQEQTKEPSKNPLLGKKRALLLSEPSLLRTVQQIPGVGKVKAPLLLQKFPSIQQLSNASIGELEQVVGQAVAQQIHAFFTQPR

SEQ ID NO: 30630 - protein, 215 aa, Homo sapiens; identical to SEQ ID NO: 30629
  Payload ID: 6008
  Gene Symbol: FAAP24
  Gene Name: Fanconi anemia core complex associated protein 24
  Uniprot ID: Q9BTP7
  ENSP ID: ENSP00000468475

SEQ ID NO: 30631 - protein, 1455 aa, Homo sapiens
  Payload ID: 6009
  Gene Symbol: FANCA
  Gene Name: Fanconi anemia, complementation group A
  Uniprot ID: O15360
  ENSP ID: ENSP00000373952
MSDSWVPNSASGQDPGGRRRAWAELLAGRVKREKYNPERAQKLKESAVRLLRSHQDLNALLLEVEGPLCKKLSLSKVIDCDSSEAYANHSSSFIGSALQDQASRLGVPVGILSAGMVASSVGQICTAPAETSHPVLLTVEQRKKLSSLLEFAQYLLAHSMFSRLSFCQELWKIQSSLLLEAVWHLHVQGIVSLQELLESHPDMHAVGSWLFRNLCCLCEQMEASCQHADVARAMLSDFVQMFVLRGFQKNSDLRRTVEPEKMPQVTVDVLQRMLIFALDALAAGVQEESSTHKIVRCWFGVFSGHTLGSVISTDPLKRFFSHTLTQILTHSPVLKASDAVQMQREWSFARTHPLLTSLYRRLFVMLSAEELVGHLQEVLETQEVHWQRVLSFVSALVVCFPEAQQLLEDWVARLMAQAFESCQLDSMVTAFLVVRQAALEGPSAFLSYADWFKASFGSTRGYHGCSKKALVFLFTFLSELVPFESPRYLQVHILHPPLVPGKYRSLLTDYISLAKTRLADLKVSIENMGLYEDLSSAGDITEPHSQALQDVEKAIMVFEHTGNIPVTVMEASIFRRPYYVSHFLPALLTPRVLPKVPDSRVAFIESLKRADKIPPSLYSTYCQACSAAEEKPEDAALGVRAEPNSAEEPLGQLTAALGELRASMTDPSQRDVISAQVAVISERLRAVLGHNEDDSSVEISKIQLSINTPRLEPREHMAVDLLLTSFCQNLMAASSVAPPERQGPWAALFVRTMCGRVLPAVLTRLCQLLRHQGPSLSAPHVLGLAALAVHLGESRSALPEVDVGPPAPGAGLPVPALFDSLLTCRTRDSLFFCLKFCTAAISYSLCKFSSQSRDTLCSCLSPGLIKKFQFLMFRLFSEARQPLSEEDVASLSWRPLHLPSADWQRAALSLWTHRTFREVLKEEDVHLTYQDWLHLELEIQPEADALSDTERQDFHQWAIHEHFLPESSASGGCDGDLQAACTILVNALMDFHQSSRSYDHSENSDLVFGGRTGNEDIISRLQEMVADLELQQDLIVPLGHTPSQEHFLFEIFRRRLQALTSGWSVAASLQRQRELLMYKRILLRLPSSVLCGSSFQAEQPITARCEQFFHLVNSEMRNFCSHGGALTQDITAHFFRGLLNACLRSRDPSLMVDFILAKCQTKCPLILTSALVWWPSLEPVLLCRWRRHCQSPLPRELQKLQEGRQFASDFLSPEAASPAPNPDWLSAAALHFAIQQVREENIRKQLKKLDCEREELLVFLFFFSLMGLLSSHLTSNSTTDLPKAFHVCAAILECLEKRKISWLALFQLTESDLRLGRLLLRVAPDQHTRLLPFAFYSLLSYFHEDAAIREEAFLHVAVDMYLKLVQLFVAGDTSTVSPPAGRSLELKGQGNPVELITKARLFLLQLIPRCPKKSFSHVAELLADRGDCDPEVSAALQSRQQAAPDADLSQEPHLF

SEQ ID NO: 30632 - protein, 297 aa, Homo sapiens
  Payload ID: 6009
  Gene Symbol: FANCA
  Gene Name: Fanconi anemia, complementation group A
  Uniprot ID: O15360
  ENSP ID: ENSP00000373953
MSDSWVPNSASGQDPGGRRRAWAELLAGRVKREKYNPERAQKLKESAVRLLRSHQDLNALLLEVEGPLCKKLSLSKVIDCDSSEAYANHSSSFIGSALQDQASRLGVPVGILSAGMVASSVGQICTAPAETSHPVLLTVEQRKKLSSLLEFAQYLLAHSMFSRLSFCQELWKIQSSLLLEAVWHLHVQGIVSLQELLESHPDMHAVGSWLFRNLCCLCEQMEASCQHADVARAMLSDFVQMFVLRGFQKNSDLRRTVEPEKMPQVTVDVLQRMLIFALDALAAGVQEESSTHKIVRC

SEQ ID NO: 30633 - protein, 265 aa, Homo sapiens
  Payload ID: 6009
  Gene Symbol: FANCA
  Gene Name: Fanconi anemia, complementation group A
  ENSP ID: ENSP00000443409
MSDSWVPNSASGQDPGGRRRAWAELLAGRVKREKYNPERAQKLKESAVRLLRSHQDLNALLLEVEGPLCKKLSLSKVIDCDSSEAYANHSSSFIGSALQDQASRLGVPVGILSAGMVASSVGQICTAPAETSHPVLLTVEQRSSLLLEAVWHLHVQGIVSLQELLESHPDMHAVGSWLFRNLCCLCEQMEASCQHADVARAMLSDFVQMFVLRGFQKNSDLRRTVEPEKMPQVTVDVLQRMLIFALDALAAGVQEESSTHKIVRC

SEQ ID NO: 30634 - protein, 302 aa, Homo sapiens
  Payload ID: 6009
  Gene Symbol: FANCA
  Gene Name: Fanconi anemia, complementation group A
  ENSP ID: ENSP00000443675
MSDSWVPNSASGQDPGGRRRAWAELLAGRVKREKYNPERAQKLKESAVRLLRSHQDLNALLLEVEGPLCKKLSLSKVIDCDSSEAYANHSSSFIGSALQDQASRLGVPVGILSAGMVASSVGQICTAPAETSHPVLLTVEQRKKLSSLLEFAQYLLAHSMFSRLSFCQELWKIQSSLLLEAVWHLHVQGIVSLQELLESHPDMHAVGSWLFRNLCCLCEQMEASCQHADVARAMLSDFVQMFVLRGFQKNSDLRRTVEPEKMPQVTVDVLQRMLIFALDALAAGVQEESSTHKIVRASAARS

SEQ ID NO: 30635 - protein, 109 aa, Homo sapiens
  Payload ID: 6009
  Gene Symbol: FANCA
  Gene Name: Fanconi anemia, complementation group A
  ENSP ID: ENSP00000454217
  MOD_RES (1)..(1): Any amino acid
XASLSWRPLHLPSADWQRAALSLWTHRTFREVLKEEDVHLTYQDWLHLELEIQPEADALSDTERQDFHQWAIHEHFLPESSASGGCDGDLQAACTILVNALMDFHQRRW

SEQ ID NO: 30636 - protein, 240 aa, Homo sapiens
  Payload ID: 6009
  Gene Symbol: FANCA
  Gene Name: Fanconi anemia, complementation group A
  ENSP ID: ENSP00000454977
  MOD_RES (1)..(1): Any amino acid
XLSAAALHFAIQQVREENIRKQLKKLDCEREELLVFLFFFSLMGLLSSHLTSNSTTDLPKAFHVCAAILECLEKRKISWLALFQLTESDLRLGRLLLRVAPDQHTRLLPFAFYSLLSYFHEDAAIREEAFLHVAVDMYLKLVQLFVAGDTSTVSPPAGRSLELKGQAGQPRGTDNKSSSFSAAVNTSVPEKELLTRGRGNVKMPTLGHVGDMRIDSCLGHVPAWLAIQLDYFCQSPSPVV

SEQ ID NO: 30637 - protein, 158 aa, Homo sapiens
  Payload ID: 6009
  Gene Symbol: FANCA
  Gene Name: Fanconi anemia, complementation group A
  ENSP ID: ENSP00000455941
MSDSWVPNSASGQDPGGRRRAWAELLGRWARQAAGVGGVRPGTVSPVPRSLPARASAGRIPGRRARGAVRGGRPAGAARLPRTRPLLRLGGRPQPPPAGRSLLSRTPPPPAALSGGPGVRGLGLPSAQRPPLASRPRAPLPRALLGRLPRRPRWGRLR

SEQ ID NO: 30638 - protein, 114 aa, Homo sapiens
  Payload ID: 6009
  Gene Symbol: FANCA
  Gene Name: Fanconi anemia, complementation group A
  ENSP ID: ENSP00000455946
MSDSWVPNSASGQDPGGRRRAWAELLAGRVKREKYNPERAQKLKESAVRLLRSHQDLNALLLEVEGPLCKKLSLSKVIDCDSSEAYANHSSSFIGSSLKAGGSRGYSLSRDGCL

SEQ ID NO: 30639 - protein, 101 aa, Homo sapiens
  Payload ID: 6009
  Gene Symbol: FANCA
  Gene Name: Fanconi anemia, complementation group A
  ENSP ID: ENSP00000455969
PHSQALQDVEKAIMVFEHTGNIPVTVMEASIFRRPYYVSHFLPALLTPRVLPKVPDSRVAFIESLKRWSLALLPRLECNCTILAHCKLCLLGWSNCPASAS

SEQ ID NO: 30640 - protein, 168 aa, Homo sapiens
  Payload ID: 6009
  Gene Symbol: FANCA
  Gene Name: Fanconi anemia, complementation group A
  ENSP ID: ENSP00000455974
  MOD_RES (1)..(1): Any amino acid
XFRRRLQALTSGWSVAASLQRQRELLMYKRILLRLPSSVLCGSSFQAEQPITARCEQFFHLVNSEMRNFCSHGGALTQDITAHFFRGLLNACLRSRDPSLMVDFILAKCQTKCPLILTSALVWWPSLEPVLLCRWRRHCQSPLPRELQKLQEGRQFASDYWFSFSSSP

SEQ ID NO: 30641 - protein, 316 aa, Homo sapiens
  Payload ID: 6009
  Gene Symbol: FANCA
  Gene Name: Fanconi anemia, complementation group A
  ENSP ID: ENSP00000456443
MSDSWVPNSASGQDPGGRRRAWAELLAGRVKREKYNPERAQKLKESAVRLLRSHQDLNALLLEVEGPLCKKLSLSKVIDCDSSEAYANHSSSFIGSALQDQASRLGVPVGILSAGMVASSVGQICTAPAETSHPVLLTVEQRKKLSSLLEFAQYLLAHSMFSRLSFCQELWKIQSSLLLEAVWHLHVQGIVSLQELLESHPDMHAVGSWLFRNLCCLCEQMEASCQHADVARAMLSDFVQMFVLRGFQKNSDLRRTVEPEKMPQVTVDVLQRMLIFALDALAAGVQEESSTHKIVRCWYVPEGGLPECAAGRCLPN

SEQ ID NO: 30642 - protein, 153 aa, Homo sapiens
  Payload ID: 6009
  Gene Symbol: FANCA
  Gene Name: Fanconi anemia, complementation group A
  ENSP ID: ENSP00000456481
  MOD_RES (1)..(1): Any amino acid
XKKLDCEREESTTDLPKAFHVCAAILECLEKRKISWLALFQLTESDLRLGRLLLRVAPDQHTRLLPFAFYSLLSYFHEDAAIREEAFLHVAVDMYLKLVQLFVAGDTSTVSPPAGRSLELKGQGNPVELITKARLFLLQLIPRCPKKSFSHVA

SEQ ID NO: 30643 - protein, 182 aa, Homo sapiens
  Payload ID: 6009
  Gene Symbol: FANCA
  Gene Name: Fanconi anemia, complementation group A
  ENSP ID: ENSP00000456588
  MOD_RES (1)..(1): Any amino acid
XFSEARQPLSEEDVASLSWRPLHLPSADWQRAALSLWTHRTFREVLKEEDVHLTYQDWLHLELEIQPEADALSDTERQDFHQWAIHEHFLPESSASGGCDGDLQAACTILVNALMDFHQSSRSYDHSENSDLVFGGRTGNEDIISRLQDPPPPAFVCPLRQQLPGRTAHHCQMRAVLPLGQL

SEQ ID NO: 30644 - protein, 195 aa, Homo sapiens
  Payload ID: 6009
  Gene Symbol: FANCA
  Gene Name: Fanconi anemia, complementation group A
  ENSP ID: ENSP00000456608
AFHVCAAILECLEKRKISWLALFQLTESDLRLGRLLLRVAPDQHTRLLPFAFYSLLSYFHEDAAIREEAFLHVAVDMYLKLVQLFVAGDTSTVSPPAGRSLELKGQAGARASPTSRGAPPSRRLLLPKNVPAQHADYGGHTSPVSLIPRCPKKSFSHVAELLADRGDCDPEVSAALQSRQQAAPDADLSQEPHLF

SEQ ID NO: 30645 - protein, 210 aa, Homo sapiens
  Payload ID: 6009
  Gene Symbol: FANCA
  Gene Name: Fanconi anemia, complementation group A
  ENSP ID: ENSP00000456722
VKREKYNPERAQKLKESAVRLLRSHQDLNALLLEVEGPLCKKLSLSKVIDCDSSEAYANHSSSFIGSALQDQASRLGVPVGILSAGMVASSVGQICTAPAETSHPVLLTVEQRKKLSSLLEFAQYLLAHSMFSRLSFCQELWKIQSSLLLEAVWHLHVQGIVSLQELLESHPDMHAVGSWLFRNLCCLCEQMEASCQHADVARAMLSGHG

SEQ ID NO: 30646 - protein, 125 aa, Homo sapiens
  Payload ID: 6009
  Gene Symbol: FANCA
  Gene Name: Fanconi anemia, complementation group A
  ENSP ID: ENSP00000456762
  MOD_RES (1)..(1): Any amino acid
XSLLLEAVWHLHVQGIVSLQELLESHPDMHAVGSWLFRNLCCLCEQMEASCQHADVARAMLSDFVQMFVLRGFQKNSDLRRTVEPEKMPQVTVDVLQRMLIFALDALAAGVQEESSTHKIVRCCI

SEQ ID NO: 30647 - protein, 1424 aa, Homo sapiens
  Payload ID: 6009
  Gene Symbol: FANCA
  Gene Name: Fanconi anemia, complementation group A
  Uniprot ID: O15360
  ENSP ID: ENSP00000456829
MSDSWVPNSASGQDPGGRRRAWAELLAGRVKREKYNPERAQKLKESAVRLLRSHQDLNALLLEVEGPLCKKLSLSKVIDCDSSEAYANHSSSFIGSALQDQASRLGVPVGILSAGMVASSVGQICTAPAETSHPVLLTVEQRKKLSSLLEFAQYLLAHSMFSRLSFCQELWKIQSSLLLEAVWHLHVQGIVSLQELLESHPDMHAVGSWLFRNLCCLCEQMEASCQHADVARAMLSDFVQMFVLRGFQKNSDLRRTVEPEKMPQVTVDVLQRMLIFALDALAAGVQEESSTHKIVRCWFGVFSGHTLGSVISTDPLKRFFSHTLTQILTHSPVLKASDAVQMQREWSFARTHPLLTSLYRRLFVMLSAEELVGHLQEVLETQEVHWQRVLSFVSALVVCFPEAQQLLEDWVARLMAQAFESCQLDSMVTAFLVVRQAALEGPSAFLSYADWFKASFGSTRGYHGCSKKALVFLFTFLSELVPFESPRYLQVHILHPPLVPGKYRSLLTDYISLAKTRLADLKVSIENMGLYEDLSSAGDITEPHSQALQDVEKAIMVFEHTGNIPVTVMEASIFRRPYYVSHFLPALLTPRVLPKVPDSRVAFIESLKRADKIPPSLYSTYCQACSAAEEKPEDAALGVRAEPNSAEEPLGQLTAALGELRASMTDPSQRDVISAQVAVISERLRAVLGHNEDDSSVEISKIQLSINTPRLEPREHMAVDLLLTSFCQNLMAASSVAPPERQGPWAALFVRTMCGRVLPAVLTRLCQLLRHQGPSLSAPHVLGLAALAVHLGESRSALPEVDVGPPAPGAGLPVPALFDSLLTCRTRDSLFFCLKFCTAAISYSLCKFSSQSRDTLCSCLSPGLIKKFQFLMFRLFSEARQPLSEEDVASLSWRPLHLPSADWQRAALSLWTHRTFREVLKEEDVHLTYQDWLHLELEIQPEADALSDTERQDFHQWAIHEHFLPESSASGGCDGDLQAACTILVNALMDFHQSSRSYDHSENSDLVFGGRTGNEDIISRLQEMVADLELQQDLIVPLGHTPSQEHFLFEIFRRRLQALTSGWSVAASLQRQRELLMYKRILLRLPSSVLCGSSFQAEQPITARCEQFFHLVNSEMRNFCSHGGALTQDITAHFFRGLLNACLRSRDPSLMVDFILAKCQTKCPLILTSALVWWPSLEPVLLCRWRRHCQSPLPRELQKLQEGRQFASDFLSPEAASPAPNPDWLSAAALHFAIQQVREENIRKQLKKLDCEREELLVFLFFFSLMGLLSSHLTSNSTTDLPKAFHVCAAILECLEKRKISWLALFQLTESDLRLGRLLLRVAPDQHTRLLPFAFYSLLSYFHEDAAIREEAFLHVAVDMYLKLVQLFVAGDTSTVSPPAGRSLELKGQAGQPRGTDNKSSSFSAAVNTSVPEKELLTRGRAAG

SEQ ID NO: 30648 - protein, 51 aa, Homo sapiens
  Payload ID: 6009
  Gene Symbol: FANCA
  Gene Name: Fanconi anemia, complementation group A
  ENSP ID: ENSP00000456993
  MOD_RES (1)..(1): Any amino acid
XLSLWTHRTFREVLKEEDVHVGDRSFSCIMPRPESRVCVCSSGKNSSTWSW

SEQ ID NO: 30649 - protein, 214 aa, Homo sapiens
  Payload ID: 6009
  Gene Symbol: FANCA
  Gene Name: Fanconi anemia, complementation group A
  ENSP ID: ENSP00000457006
PSLEPVLLCRWRRHCQSPLPRELQKLQEGRQFASDFLSPEAASPAPNPDWLSAAALHFAIQQVREENIRKQLKKLDCEREELLVFLFFFSLMGLLSSHLTSNSTTDLPKAFHVCAAILECLEKRKISWLALFQLTESDAAIREEAFLHVAVDMYLKLVQLFVAGDTSTVSPPAGRSLELKGQPRGTDNKSSSFSAAVNTSVPEKELLTRGRAAG

SEQ ID NO: 30650 - protein, 63 aa, Homo sapiens
  Payload ID: 6009
  Gene Symbol: FANCA
  Gene Name: Fanconi anemia, complementation group A
  ENSP ID: ENSP00000457027
GPSLSAPHVLGLAALAVHLGESRSALPEVDVGPPAPGAGLPVPALFDSLLTCRTRDSLFFCLK

SEQ ID NO: 30651 - protein, 41 aa, Homo sapiens
  Payload ID: 6009
  Gene Symbol: FANCA
  Gene Name: Fanconi anemia, complementation group A
  ENSP ID: ENSP00000457647
  MOD_RES (1)..(1): Any amino acid
XALDALAAGVQEESSTHKIVRCWYVPEGGLPECAAGRCLPN

SEQ ID NO: 30652 - protein, 77 aa, Homo sapiens
  Payload ID: 6009
  Gene Symbol: FANCA
  Gene Name: Fanconi anemia, complementation group A
  ENSP ID: ENSP00000457970
  MOD_RES (1)..(1): Any amino acid
XKKFQFLMFRLFSEARQPLSEEDVASLSWRPLHLPSADWQRAALSLWTHRTFREVLKEEDVHLVMVMCTCSPSHLRG

SEQ ID NO: 30653 - protein, 859 aa, Homo sapiens
  Payload ID: 6010
  Gene Symbol: FANCB
  Gene Name: Fanconi anemia, complementation group B
  Uniprot ID: Q8NB91
  ENSP ID: ENSP00000326819
MTSKQAMSSNEQERLLCYNGEVLVFQLSKGNFADKEPTKTPILHVRRMVFDRGTKVFVQKSTGFFTIKEENSHLKIMCCNCVSDFRTGINLPYIVIEKNKKNNVFEYFLLILHSTNKFEMRLSFKLGYEMKDGLRVLNGPLILWRHVKAFFFISSQTGKVVSVSGNFSSIQWAGEIENLGMVLLGLKECCLSEEECTQEPSKSDYAIWNTKFCVYSLESQEVLSDIYIIPPAYSSVVTYVHICATEIIKNQLRISLIALTRKNQLISFQNGTPKNVCQLPFGDPCAVQLMDSGGGNLFFVVSFISNNACAVWKESFQVAAKWEKLSLVLIDDFIGSGTEQVLLLFKDSLNSDCLTSFKITDLGKINYSSEPSDCNEDDLFEDKQENRYLVVPPLETGLKVCFSSFRELRQHLLLKEKIISKSYKALINLVQGKDDNTSSAEEKECLVPLCGEEENSVHILDEKLSDNFQDSEQLVEKIWYRVIDDSLVVGVKTTSSLKLSLNDVTLSLLMDQAHDSRFRLLKCQNRVIKLSTNPFPAPYLMPCEIGLEAKRVTLTPDSKKEESFVCEHPSKKECVQIITAVTSLSPLLTFSKFCCTVLLQIMERESGNCPKDRYVVCGRVFLSLEDLSTGKYLLTFPKKKPIEHMEDLFALLAAFHKSCFQITSPGYALNSMKVWLLEHMKCEIIKEFPEVYFCERPGSFYGTLFTWKQRTPFEGILIIYSRNQTVMFQCLHNLIRILPINCFLKNLKSGSENFLIDNMAFTLEKELVTLSSLSSAIAKHESNFMQRCEVSKGKSSVVAAALSDRRENIHPYRKELQREKKKMLQTNLKVSGALYREITLKVAEVQLKSDFAAQKLSNL

SEQ ID NO: 30654 - protein, 859 aa, Homo sapiens; identical to SEQ ID NO: 30653
  Payload ID: 6010
  Gene Symbol: FANCB
  Gene Name: Fanconi anemia, complementation group B
  Uniprot ID: Q8NB91
  ENSP ID: ENSP00000381378

SEQ ID NO: 30655 - protein, 818 aa, Homo sapiens
  Payload ID: 6010
  Gene Symbol: FANCB
  Gene Name: Fanconi anemia, complementation group B
  ENSP ID: ENSP00000397849
MTSKQAMSSNEQERLLCYNGEVLVFQLSKGNFADKEPTKTPILHVRRMVFDRGTKVFVQKSTGFFTIKEENSHLKIMCCNCVSDFRTGINLPYIVIEKNKKNNVFEYFLLILHSTNKFEMRLSFKLGYEMKDGLRVLNGPLILWRHVKAFFFISSQTGKVVSVSGNFSSIQWAGEIENLGMVLLGLKECCLSEEECTQEPSKSDYAIWNTKFCVYSLESQEVLSDIYIIPPAYSSVVTYVHICATEIIKNQLRISLIALTRKNQLISFQNGTPKNVCQLPFGDPCAVQLMDSGGGNLFFVVSFISNNACAVWKESFQVAAKWEKLSLVLIDDFIGSGTEQVLLLFKDSLNSDCLTSFKITDLGKINYSSEPSDCNEDDLFEDKQENRYLVVPPLETGLKVCFSSFRELRQHLLLKEKIISKSYKALINLVQGKDDNTSSAEEKECLVPLCGEEENSVHILDEKLSDNFQDSEQLVEKIWYRVIDDSLVVGVKTTSSLKLSLNDVTLSLLMDQAHDSRFRLLKCQNRVIKLSTNPFPAPYLMPCEIGLEAKRVTLTPDSKKEESFVCEHPSKKECVQIITAVTSLSPLLTFSKFCCTVLLQIMERESGNCPKDRYVVCGRVFLSLEDLSTGKYLLTFPKKKPIEHMEDLFALLAAFHKSCFQITSPGYALNSMKVWLLEHMKCEIIKEFPEVYFCERPGSFYGTLFTWKQRTPFEGILIIYSRNQTVMFQCLHNLIRILPINCFLKNLKSGSENFLIDNMAFTLEKELVTLSSLSSAIAKHESNFMQRCEVSKGKSSVVAAALSDRRENIHPYRKELQR

SEQ ID NO: 30656 - protein, 558 aa, Homo sapiens
  Payload ID: 6011
  Gene Symbol: FANCC
  Gene Name: Fanconi anemia, complementation group C
  Uniprot ID: Q00597
  ENSP ID: ENSP00000289081
MAQDSVDLSCDYQFWMQKLSVWDQASTLETQQDTCLHVAQFQEFLRKMYEALKEMDSNTVIERFPTIGQLLAKACWNPFILAYDESQKILIWCLCCLINKEPQNSGQSKLNSWIQGVLSHILSALRFDKEVALFTQGLGYAPIDYYPGLLKNMVLSLASELRENHLNGFNTQRRMAPERVASLSRVCVPLITLTDVDPLVEALLICHGREPQEILQPEFFEAVNEAILLKKISLPMSAVVCLWLRHLPSLEKAMLHLFEKLISSERNCLRRIECFIKDSSLPQAACHPAIFRVVDEMFRCALLETDGALEIIATIQVFTQCFVEALEKASKQLRFALKTYFPYTSPSLAMVLLQDPQDIPRGHWLQTLKHISELLREAVEDQTHGSCGGPFESWFLFIHFGGWAEMVAEQLLMSAAEPPTALLWLLAFYYGPRDGRQQRAQTMVQVKAVLGHLLAMSRSSSLSAQDLQTVAGQGTDTDLRAPAQQLIRHLLLNFLLWAPGGHTIAWDVITLMAHTAEITHEIIGFLDQTLYRWNRLGIESPRSEKLARELLKELRTQV

SEQ ID NO: 30657 - protein, 558 aa, Homo sapiens; identical to SEQ ID NO: 30656
  Payload ID: 6011
  Gene Symbol: FANCC
  Gene Name: Fanconi anemia, complementation group C
  Uniprot ID: Q00597
  ENSP ID: ENSP00000364454

SEQ ID NO: 30658 - protein, 150 aa, Homo sapiens
  Payload ID: 6011
  Gene Symbol: FANCC
  Gene Name: Fanconi anemia, complementation group C
  ENSP ID: ENSP00000406908
MAQDSVDLSCDYQFWMQKLSVWDQASTLETQQDTCLHVAQFQEFLRKMYEALKEMDSNTVIERFPTIGQLLAKACWNPFILAYDESQKILIWCLCCLINKEPQNSGQSKLNSWIQGVLSHILSALRFDKEVALFTQGLGYAPIDYYPGLL

SEQ ID NO: 30659 - protein, 492 aa, Homo sapiens
  Payload ID: 6011
  Gene Symbol: FANCC
  Gene Name: Fanconi anemia, complementation group C
  ENSP ID: ENSP00000479931
MAQDSVDLSCDYQFWMQKLSVWDQASTLETQQDTCLHVAQFQEFLRKMYEALKEMDSNTVIERFPTIGQLLAKACWNPFILAYDESQKILIWCLCCLINKEPQNSGQSKLNSWIQGVLSHILSALRFDKEVALFTQGLGYAPIDYYPGLLKNMVLSLASELRENHLNGFNTQRRMAPERVASLSRVCVPLITLTDVDPLVEALLICHGREPQEILQPEFFEAVNEAILLKKISLPMSAVVCLWLRHLPSLEKAMLHLFEKLISSERNCLRRIECFIKDSSLPQAACHPAIFRVVDEMFRCALLETDGALEIIATIQVFTQCFVEALEKASKQLRFALKTYFPYTSPSLAMVLLQDPQDIPRGHWLQTLKHISELLREAVEDQTHGSCGGPFESWFLFIHFGGWAEMVAEQLLMSAAEPPTALLWLLAFYYGPRDGRQQRAQTMMAYVMATCRHGDLQPCGQRRSPVPTEVARDETLPAHSPAKRRPFFPKVI

SEQ ID NO: 30660 - protein, 1471 aa, Homo sapiens
  Payload ID: 6012
  Gene Symbol: FANCD2
  Gene Name: Fanconi anemia, complementation group D2
  Uniprot ID: Q9BXW9
  ENSP ID: ENSP00000287647
MVSKRRLSKSEDKESLTEDASKTRKQPLSKKTKKSHIANEVEENDSIFVKLLKISGIILKTGESQNQLAVDQIAFQKKLFQTLRRHPSYPKIIEEFVSGLESYIEDEDSFRNCLLSCERLQDEEASMGASYSKSLIKLLLGIDILQPAIIKTLFEKLPEYFFENKNSDEINIPRLIVSQLKWLDRVVDGKDLTTKIMQLISIAPENLQHDIITSLPEILGDSQHADVGKELSDLLIENTSLTVPILDVLSSLRLDPNFLLKVRQLVMDKLSSIRLEDLPVIIKFILHSVTAMDTLEVISELREKLDLQHCVLPSRLQASQVKLKSKGRASSSGNQESSGQSCIILLFDVIKSAIRYEKTISEAWIKAIENTASVSEHKVFDLVMLFIIYSTNTQTKKYIDRVLRNKIRSGCIQEQLLQSTFSVHYLVLKDMCSSILSLAQSLLHSLDQSIISFGSLLYKYAFKFFDTYCQQEVVGALVTHICSGNEAEVDTALDVLLELVVLNPSAMMMNAVFVKGILDYLDNISPQQIRKLFYVLSTLAFSKQNEASSHIQDDMHLVIRKQLSSTVFKYKLIGIIGAVTMAGIMAADRSESPSLTQERANLSDEQCTQVTSLLQLVHSCSEQSPQASALYYDEFANLIQHEKLDPKALEWVGHTICNDFQDAFVVDSCVVPEGDFPFPVKALYGLEEYDTQDGIAINLLPLLFSQDFAKDGGPVTSQESGQKLVSPLCLAPYFRLLRLCVERQHNGNLEEIDGLLDCPIFLTDLEPGEKLESMSAKERSFMCSLIFLTLNWFREIVNAFCQETSPEMKGKVLTRLKHIVELQIILEKYLAVTPDYVPPLGNFDVETLDITPHTVTAISAKIRKKGKIERKQKTDGSKTSSSDTLSEEKNSECDPTPSHRGQLNKEFTGKEEKTSLLLHNSHAFFRELDIEVFSILHCGLVTKFILDTEMHTEATEVVQLGPPELLFLLEDLSQKLESMLTPPIARRVPFLKNKGSRNIGFSHLQQRSAQEIVHCVFQLLTPMCNHLENIHNYFQCLAAENHGVVDGPGVKVQEYHIMSSCYQRLLQIFHGLFAWSGFSQPENQNLLYSALHVLSSRLKQGEHSQPLEELLSQSVHYLQNFHQSIPSFQCALYLIRLLMVILEKSTASAQNKEKIASLARQFLCRVWPSGDKEKSNISNDQLHALLCIYLEHTESILKAIEEIAGVGVPELINSPKDASSSTFPTLTRHTFVVFFRVMMAELEKTVKKIEPGTAADSQQIHEEKLLYWNMAVRDFSILINLIKVFDSHPVLHVCLKYGRLFVEAFLKQCMPLLDFSFRKHREDVLSLLETFQLDTRLLHHLCGHSKIHQDTRLTQHVPLLKKTLELLVCRVKAMLTLNNCREAFWLGNLKNRDLQGEEIKSQNSQESTADESEDDMSSQASKSKATEVSLQNPPESGTDGCILLIVLSWWSRTLPTYVYCQMLLCPFPFPP

SEQ ID NO: 30661 - protein, 1451 aa, Homo sapiens
  Payload ID: 6012
  Gene Symbol: FANCD2
  Gene Name: Fanconi anemia, complementation group D2
  Uniprot ID: Q9BXW9
  ENSP ID: ENSP00000373318
MVSKRRLSKSEDKESLTEDASKTRKQPLSKKTKKSHIANEVEENDSIFVKLLKISGIILKTGESQNQLAVDQIAFQKKLFQTLRRHPSYPKIIEEFVSGLESYIEDEDSFRNCLLSCERLQDEEASMGASYSKSLIKLLLGIDILQPAIIKTLFEKLPEYFFENKNSDEINIPRLIVSQLKWLDRVVDGKDLTTKIMQLISIAPENLQHDIITSLPEILGDSQHADVGKELSDLLIENTSLTVPILDVLSSLRLDPNFLLKVRQLVMDKLSSIRLEDLPVIIKFILHSVTAMDTLEVISELREKLDLQHCVLPSRLQASQVKLKSKGRASSSGNQESSGQSCIILLFDVIKSAIRYEKTISEAWIKAIENTASVSEHKVFDLVMLFIIYSTNTQTKKYIDRVLRNKIRSGCIQEQLLQSTFSVHYLVLKDMCSSILSLAQSLLHSLDQSIISFGSLLYKYAFKFFDTYCQQEVVGALVTHICSGNEAEVDTALDVLLELVVLNPSAMMMNAVFVKGILDYLDNISPQQIRKLFYVLSTLAFSKQNEASSHIQDDMHLVIRKQLSSTVFKYKLIGIIGAVTMAGIMAADRSESPSLTQERANLSDEQCTQVTSLLQLVHSCSEQSPQASALYYDEFANLIQHEKLDPKALEWVGHTICNDFQDAFVVDSCVVPEGDFPFPVKALYGLEEYDTQDGIAINLLPLLFSQDFAKDGGPVTSQESGQKLVSPLCLAPYFRLLRLCVERQHNGNLEEIDGLLDCPIFLTDLEPGEKLESMSAKERSFMCSLIFLTLNWFREIVNAFCQETSPEMKGKVLTRLKHIVELQIILEKYLAVTPDYVPPLGNFDVETLDITPHTVTAISAKIRKKGKIERKQKTDGSKTSSSDTLSEEKNSECDPTPSHRGQLNKEFTGKEEKTSLLLHNSHAFFRELDIEVFSILHCGLVTKFILDTEMHTEATEVVQLGPPELLFLLEDLSQKLESMLTPPIARRVPFLKNKGSRNIGFSHLQQRSAQEIVHCVFQLLTPMCNHLENIHNYFQCLAAENHGVVDGPGVKVQEYHIMSSCYQRLLQIFHGLFAWSGFSQPENQNLLYSALHVLSSRLKQGEHSQPLEELLSQSVHYLQNFHQSIPSFQCALYLIRLLMVILEKSTASAQNKEKIASLARQFLCRVWPSGDKEKSNISNDQLHALLCIYLEHTESILKAIEEIAGVGVPELINSPKDASSSTFPTLTRHTFVVFFRVMMAELEKTVKKIEPGTAADSQQIHEEKLLYWNMAVRDFSILINLIKVFDSHPVLHVCLKYGRLFVEAFLKQCMPLLDFSFRKHREDVLSLLETFQLDTRLLHHLCGHSKIHQDTRLTQHVPLLKKTLELLVCRVKAMLTLNNCREAFWLGNLKNRDLQGEEIKSQNSQESTADESEDDMSSQASKSKATEDGEEDEVSAGEKEQDSDESYDDSD

SEQ ID NO: 30662 - protein, 749 aa, Homo sapiens
  Payload ID: 6012
  Gene Symbol: FANCD2
  Gene Name: Fanconi anemia, complementation group D2
  ENSP ID: ENSP00000389936
  MOD_RES (1)..(1): Any amino acid
XLNPSAMMMNAVFVKGILDYLDNISPQQIRKLFYVLSTLAFSKQNEASSHIQDDMHLVIRKQLSSTVFKYKLIGIIGAVTMAGIMAADRSESPSLTQERANLSDEQCTQVTSLLQLVHSCSEQSPQASALYYDEFANLIQHEKLDPKALEWVGHTICNDFQDAFVVDSCVVPEGDFPFPVKALYGLEEYDTQDGIAINLLPLLFSQDFAKDGGPVTSQESGQKLVSPLCLAPYFRLLRLCVERQHNGNLEEIDGLLDCPIFLTDLEPGEKLESMSAKERSFMCSLIFLTLNWFREIVNAFCQETSPEMKGKVLTRLKHIVELQIILEKYLAVTPDYVPPLGNFDVETLDITPHTVTAISAKIRKKGKIERKQKTDGSKTSSSDTLSEEKNSECDPTPSHRGQLNKEFTGKEEKTSLLLHNSHAFFRELDIEVFSILHCGLVTKFILDTEMHTEATEVVQLGPPELLFLLEDLSQKLESMLTPPIARRVPFLKNKGSRNIGFSHLQQRSAQEIVHCVFQLLTPMCNHLENIHNYFQCLAAENHGVVDGPGVKVQEYHIMSSCYQRLLQIFHGLFAWSGFSQPENQNLLYSALHVLSSRLKQGEHSQPLEELLSQSVHYLQNFHQSIPSFQCALYLIRLLMVILEKSTASAQNKEKIASLARQFLCRVWPSGDKEKSNISNDQLHALLCIYLEHTESILKAIEEIAGVGVPELINSPKDASSSTFPTLTRFMKRNSSTGTWLFETSVSSST

SEQ ID NO: 30663 - protein, 1451 aa, Homo sapiens; identical to SEQ ID NO: 30661
  Payload ID: 6012
  Gene Symbol: FANCD2
  Gene Name: Fanconi anemia, complementation group D2
  Uniprot ID: Q9BXW9
  ENSP ID: ENSP00000398754

SEQ ID NO: 30664 - protein, 241 aa, Homo sapiens
  Payload ID: 6012
  Gene Symbol: FANCD2
  Gene Name: Fanconi anemia, complementation group D2
  Uniprot ID: Q9BXW9
  ENSP ID: ENSP00000399354
MVSKRRLSKSEDKESLTEDASKTRKQPLSKKTKKSHIANEVEENDSIFVKLLKISGIILKTGESQNQLAVDQIAFQKKLFQTLRRHPSYPKIIEEFVSGLESYIEDEDSFRNCLLSCERLQDEEASMGASYSKSLIKLLLGIDILQPAIIKTLFEKLPEYFFENKNSDEINIPRLIVSQLKWLDRVVDGKDLTTKIMQLISIAPENLQHDIITSLPEILGDSQHADVGKELRWINPLSSSK

SEQ ID NO: 30665 - protein, 38 aa, Homo sapiens
  Payload ID: 6012
  Gene Symbol: FANCD2
  Gene Name: Fanconi anemia, complementation group D2
  ENSP ID: ENSP00000402166
MVSKRRLSKSEDKESLTEDASKMGISLCHPGWSAVVIS

SEQ ID NO: 30666 - protein, 38 aa, Homo sapiens; identical to SEQ ID NO: 30665
  Payload ID: 6012
  Gene Symbol: FANCD2
  Gene Name: Fanconi anemia, complementation group D2
  ENSP ID: ENSP00000486945

SEQ ID NO: 30667 - protein, 536 aa, Homo sapiens
  Payload ID: 6013
  Gene Symbol: FANCE
  Gene Name: Fanconi anemia, complementation group E
  Uniprot ID: Q9HB96
  ENSP ID: ENSP00000229769
MATPDAGLPGAEGVEPAPWAQLEAPARLLLQALQAGPEGARRGLGVLRALGSRGWEPFDWGRLLEALCREEPVVQGPDGRLELKPLLLRLPRICQRNLMSLLMAVRPSLPESGLLSVLQIAQQDLAPDPDAWLRALGELLRRDLGVGTSMEGASPLSERCQRQLQSLCRGLGLGGRRLKSPQAPDPEEEENRDSQQPGKRRKDSEEEAASPEGKRVPKRLRCWEEEEDHEKERPEHKSLESLADGGSASPIKDQPVMAVKTGEDGSNLDDAKGLAESLELPKAIQDQLPRLQQLLKTLEEGLEGLEDAPPVELQLLHECSPSQMDLLCAQLQLPQLSDLGLLRLCTWLLALSPDLSLSNATVLTRSLFLGRILSLTSSASRLLTTALTSFCAKYTYPVCSALLDPVLQAPGTGPAQTELLCCLVKMESLEPDAQVLMLGQILELPWKEETFLVLQSLLERQVEMTPEKFSVLMEKLCKKGLAATTSMAYAKLMLTVMTKYQANITETQRLGLAMALEPNTTFLRKSLKAALKHLGP

SEQ ID NO: 30668 - protein, 374 aa, Homo sapiens
  Payload ID: 6014
  Gene Symbol: FANCF
  Gene Name: Fanconi anemia, complementation group F
  Uniprot ID: Q9NPI8
  ENSP ID: ENSP00000330875
MESLLQHLDRFSELLAVSSTTYVSTWDPATVRRALQWARYLRHIHRRFGRHGPIRTALERRLHNQWRQEGGFGRGPVPGLANFQALGHCDVLLSLRLLENRALGDAARYHLVQQLFPGPGVRDADEETLQESLARLARRRSAVHMLRFNGYRENPNLQEDSLMKTQAELLLERLQEVGKAEAERPARFLSSLWERLPQNNFLKVIAVALLQPPLSRRPQEELEPGIHKSPGEGSQVLVHWLLGNSEVFAAFCRALPAGLLTLVTSRHPALSPVYLGLLTDWGQRLHYDLQKGIWVGTESQDVPWEELHNRFQSLCQAPPPLKDKVLTALETCKAQDGDFEVPGLSIWTDLLLALRSGAFRKRQVLGLSAGLSSV

SEQ ID NO: 30669 - protein, 622 aa, Homo sapiens
  Payload ID: 6015
  Gene Symbol: FANCG
  Gene Name: Fanconi anemia, complementation group G
  Uniprot ID: O15287
  ENSP ID: ENSP00000367910
MSRQTTSVGSSCLDLWREKNDRLVRQAKVAQNSGLTLRRQQLAQDALEGLRGLLHSLQGLPAAVPVLPLELTVTCNFIILRASLAQGFTEDQAQDIQRSLERVLETQEQQGPRLEQGLRELWDSVLRASCLLPELLSALHRLVGLQAALWLSADRLGDLALLLETLNGSQSGASKDLLLLLKTWSPPAEELDAPLTLQDAQGLKDVLLTAFAYRQGLQELITGNPDKALSSLHEAASGLCPRPVLVQVYTALGSCHRKMGNPQRALLYLVAALKEGSAWGPPLLEASRLYQQLGDTTAELESLELLVEALNVPCSSKAPQFLIEVELLLPPPDLASPLHCGTQSQTKHILASRCLQTGRAGDAAEHYLDLLALLLDSSEPRFSPPPSPPGPCMPEVFLEAAVALIQAGRAQDALTLCEELLSRTSSLLPKMSRLWEDARKGTKELPYCPLWVSATHLLQGQAWVQLGAQKVAISEFSRCLELLFRATPEEKEQGAAFNCEQGCKSDAALQQLRAAALISRGLEWVASGQDTKALQDFLLSVQMCPGNRDTYFHLLQTLKRLDRRDEATALWWRLEAQTKGSHEDALWSLPLYLESYLSWIRPSDRDAFLEEFRTSLPKSCDL

SEQ ID NO: 30670 - protein, 215 aa, Homo sapiens
  Payload ID: 6015
  Gene Symbol: FANCG
  Gene Name: Fanconi anemia, complementation group G
  ENSP ID: ENSP00000409607
MSRQTTSVGSSCLDLWREKNDRLVRQAKVAQNSGLTLRRQQLAQDALEGLRGLLHSLQGLPAAVPVLPLELTVTCNFIILRASLAQGFTEDQAQDIQRSLERVLETQEQQGPRLEQGLRELWDSVLRASCLLPELLSALHRLVGLQAALWLSADRLGDLALLLETLNGSQSGASKDLLLLLKTWSPPAEELDAPLTLQDAQGLKDVLLTAFAYRQ

SEQ ID NO: 30671 - protein, 106 aa, Homo sapiens
  Payload ID: 6015
  Gene Symbol: FANCG
  Gene Name: Fanconi anemia, complementation group G
  ENSP ID: ENSP00000412793
MSRQTTSVGSSCLDLWREKNDRLVRQAKVAQNSGLTLRRQQLAQDALEGLRGLLHSLQGLPAAVPVLPLELTVTCNFIILRASLAQGFTEDQAQDIQRSLEREWSL

SEQ ID NO: 30672 - protein, 1268 aa, Homo sapiens
  Payload ID: 6016
  Gene Symbol: FANCI
  Gene Name: Fanconi anemia, complementation group I
  Uniprot ID: Q9NVI1
  ENSP ID: ENSP00000300027
MDQKILSLAAEKTADKLQEFLQTLREGDLTNLLQNQAVKGKVAGALLRAIFKGSPCSEEAGTLRRRKIYTCCIQLVESGDLQKEIASEIIGLLMLEAHHFPGPLLVELANEFISAVREGSLVNGKSLELLPIILTALATKKENLAYGKGVLSGEECKKQLINTLCSGRWDQQYVIQLTSMFKDVPLTAEEVEFVVEKALSMFSKMNLQEIPPLVYQLLVLSSKGSRKSVLEGIIAFFSALDKQHNEEQSGDELLDVVTVPSGELRHVEGTIILHIVFAIKLDYELGRELVKHLKVGQQGDSNNNLSPFSIALLLSVTRIQRFQDQVLDLLKTSVVKSFKDLQLLQGSKFLQNLVPHRSYVSTMILEVVKNSVHSWDHVTQGLVELGFILMDSYGPKKVLDGKTIETSPSLSRMPNQHACKLGANILLETFKIHEMIRQEILEQVLNRVVTRASSPISHFLDLLSNIVMYAPLVLQSCSSKVTEAFDYLSFLPLQTVQRLLKAVQPLLKVSMSMRDCLILVLRKAMFANQLDARKSAVAGFLLLLKNFKVLGSLSSSQCSQSLSVSQVHVDVHSHYNSVANETFCLEIMDSLRRCLSQQADVRLMLYEGFYDVLRRNSQLANSVMQTLLSQLKQFYEPKPDLLPPLKLEACILTQGDKISLQEPLDYLLCCIQHCLAWYKNTVIPLQQGEEEEEEEEAFYEDLDDILESITNRMIKSELEDFELDKSADFSQSTSIGIKNNICAFLVMGVCEVLIEYNFSISSFSKNRFEDILSLFMCYKKLSDILNEKAGKAKTKMANKTSDSLLSMKFVSSLLTALFRVLLWRYTSIPTSVEESGKKEKGKSISLLCLEGLQKIFSAVQQFYQPKIQQFLRALDVTDKEGEEREDADVSVTQRTAFQIRQFQRSLLNLLSSQEEDFNSKEALLLVTVLTSLSKLLEPSSPQFVQMLSWTSKICKENSREDALFCKSLMNLLFSLHVSYKSPVILLRDLSQDIHGHLGDIDQDVEVEKTNHFAIVNLRTAAPTVCLLVLSQAEKVLEEVDWLITKLKGQVSQETLSEEASSQATLPNQPVEKAIIMQLGTLLTFFHELVQTALPSGSCVDTLLKDLCKMYTTLTALVRYYLQVCQSSGGIPKNMEKLVKLSGSHLTPLCYSFISYVQNKSKSLNYTGEKKEKPAAVATAMARVLRETKPIPNLIFAIEQYEKFLIHLSKKSKVNLMQHMKLSTSRDFKIKGNILDMVLREDGEDENEEGTASEHGGQNKEPAKKKRKK

SEQ ID NO: 30673 - protein, 1328 aa, Homo sapiens
  Payload ID: 6016
  Gene Symbol: FANCI
  Gene Name: Fanconi anemia, complementation group I
  Uniprot ID: Q9NVI1
  ENSP ID: ENSP00000310842
MDQKILSLAAEKTADKLQEFLQTLREGDLTNLLQNQAVKGKVAGALLRAIFKGSPCSEEAGTLRRRKIYTCCIQLVESGDLQKEIASEIIGLLMLEAHHFPGPLLVELANEFISAVREGSLVNGKSLELLPIILTALATKKENLAYGKGVLSGEECKKQLINTLCSGRWDQQYVIQLTSMFKDVPLTAEEVEFVVEKALSMFSKMNLQEIPPLVYQLLVLSSKGSRKSVLEGIIAFFSALDKQHNEEQSGDELLDVVTVPSGELRHVEGTIILHIVFAIKLDYELGRELVKHLKVGQQGDSNNNLSPFSIALLLSVTRIQRFQDQVLDLLKTSVVKSFKDLQLLQGSKFLQNLVPHRSYVSTMILEVVKNSVHSWDHVTQGLVELGFILMDSYGPKKVLDGKTIETSPSLSRMPNQHACKLGANILLETFKIHEMIRQEILEQVLNRVVTRASSPISHFLDLLSNIVMYAPLVLQSCSSKVTEAFDYLSFLPLQTVQRLLKAVQPLLKVSMSMRDCLILVLRKAMFANQLDARKSAVAGFLLLLKNFKVLGSLSSSQCSQSLSVSQVHVDVHSHYNSVANETFCLEIMDSLRRCLSQQADVRLMLYEGFYDVLRRNSQLANSVMQTLLSQLKQFYEPKPDLLPPLKLEACILTQGDKISLQEPLDYLLCCIQHCLAWYKNTVIPLQQGEEEEEEEEAFYEDLDDILESITNRMIKSELEDFELDKSADFSQSTSIGIKNNICAFLVMGVCEVLIEYNFSISSFSKNRFEDILSLFMCYKKLSDILNEKAGKAKTKMANKTSDSLLSMKFVSSLLTALFRDSIQSHQESLSVLRSSNEFMRYAVNVALQKVQQLKETGHVSGPDGQNPEKIFQNLCDITRVLLWRYTSIPTSVEESGKKEKGKSISLLCLEGLQKIFSAVQQFYQPKIQQFLRALDVTDKEGEEREDADVSVTQRTAFQIRQFQRSLLNLLSSQEEDFNSKEALLLVTVLTSLSKLLEPSSPQFVQMLSWTSKICKENSREDALFCKSLMNLLFSLHVSYKSPVILLRDLSQDIHGHLGDIDQDVEVEKTNHFAIVNLRTAAPTVCLLVLSQAEKVLEEVDWLITKLKGQVSQETLSEEASSQATLPNQPVEKAIIMQLGTLLTFFHELVQTALPSGSCVDTLLKDLCKMYTTLTALVRYYLQVCQSSGGIPKNMEKLVKLSGSHLTPLCYSFISYVQNKSKSLNYTGEKKEKPAAVATAMARVLRETKPIPNLIFAIEQYEKFLIHLSKKSKVNLMQHMKLSTSRDFKIKGNILDMVLREDGEDENEEGTASEHGGQNKEPAKKKRKK

SEQ ID NO: 30674 - protein, 1095 aa, Homo sapiens
  Payload ID: 6016
  Gene Symbol: FANCI
  Gene Name: Fanconi anemia, complementation group I
  ENSP ID: ENSP00000413249
MDQKILSLAAEKTADKLQEFLQTLREGDLTNLLQNQAVKGKVAGALLRAIFKGSPCSEEAGTLRRRKIYTCCIQLVESGDLQKEIASEIIGLLMLEAHHFPGPLLVELANEFISAVREGSLVNGKSLELLPIILTALATKKENLAYGKGVLSGEECKKQLINTLCSGRWDQQYVIQLTSMFKDVPLTAEEVEFVVEKALSMFSKMNLQEIPPLVYQLLVLSSKGSRKSVLEGIIAFFSALDKQHNEEQSGDELLDVVTVPSGELRHVEGTIILHIVFAIKLDYELGRELVKHLKVGQQGDSNNNLSPFSIALLLSVTRIQRFQDQVLDLLKTSVVKSFKDLQLLQGSKFLQNLVPHRSYVSTMILEVVKNSVHSWDHVTQGLVELGFILMDSYGPKKVLDGKTIETSPSLSRMPNQHACKLGANILLETFKIHEMIRQEILEQVLNRVVTRASSPISHFLDLLSNIVMYAPLVLQSCSSKVTEAFDYLSFLPLQTVQRLLKAVQPLLKVSMSMRDCLILVLRKAMFANQLDARKSAVAGFLLLLKNFKVLGSLSSSQCSQSLSVSQVHVDVHSHYNSVANETFCLEIMDSLRRCLSQQADVRLMLYEGFYDVLRRNSQLANSVMQTLLSQLKQFYEPKPDLLPPLKLEACILTQGDKISLQEPLDYLLCCIQHCLAWYKNTVIPLQQGEEEEEEEEAFYEDLDDILESITNRMIKSELEDFELDKSADFSQSTSIGIKNNICAFLVMGVCEVLIEYNFSISSFSKNRFEDILSLFMCYKKLSDILNEKAGKAKTKMANKTSDSLLSMKFVSSLLTALFRVLLWRYTSIPTSVEESGKKEKGKSISLLCLEGLQKIFSAVQQFYQPKIQQFLRALDVTDKEGEEREDADVSVTQRTAFQIRQFQRSLLNLLSSQEEDFNSKEALLLVTVLTSLSKLLEPSSPQFVQMLSWTSKICKENSREDALFCKSLMNLLFSLHVSYKSPVILLRDLSQDIHGHLGDIDQDVEVEKTNHFAIVNLRTAAPTVCLLVLSQAEKVLEEVDWLITKLKGQVSQETLSVSPGVSELRRNSKKYGKAGEAVWFSSDPPVLFFHFLRTE

SEQ ID NO: 30675 - protein, 226 aa, Homo sapiens
  Payload ID: 6016
  Gene Symbol: FANCI
  Gene Name: Fanconi anemia, complementation group I
  ENSP ID: ENSP00000454371
MDQKILSLAAEKTADKLQEFLQTLREGDLTNLLQNQAVKGKVAGALLRAIFKGSPCSEEAGTLRRRKIYTCCIQLVESGDLQKEIASEIIGLLMLEAHHFPGPLLVELANEFISAVREGSLVNGKSLELLPIILTALATKKENLAYGKGVLSGEECKKQLINTLCSGRWDQQYVIQLTSMFKDVPLTAEEVEFVVEKALSMFSKMNLQEIPPLVYQLLVLSSKVQM

SEQ ID NO: 30676 - protein, 145 aa, Homo sapiens
  Payload ID: 6016
  Gene Symbol: FANCI
  Gene Name: Fanconi anemia, complementation group I
  ENSP ID: ENSP00000454669
ECKKQLINTLCSGRWDQQYVIQLTSMFKDVPLTAEEVEFVVEKALSMFSKMNLQEIPPLVYQLLVLSSKGSRKSVLEGIIAFFSALDKQHNEEQSGDELLDVVTVPSGELRHVEGTIILHIVFAIKLDYELGRELVKHLKVASNL

SEQ ID NO: 30677 - protein, 1090 aa, Homo sapiens [sequence omitted]

SEQ ID NO: 30678 - protein, 157 aa, Homo sapiens
  Payload ID: 6016
  Gene Symbol: FANCI
  Gene Name: Fanconi anemia, complementation group I
  ENSP ID: ENSP00000455735
MDQKILSLAAEKTADKLQEFLQTLREGDLTNLLQNQAVKGKVAGALLRAIFKGSPCSEEAGTLRRRKIYTCCIQLVESGDLQKEIASEIIGLLMLEAHHFPGPLLVELANEFISAVREGSLVNGKSLELLPIILTALATKKENLAYGKGVLSGEECK

SEQ ID NO: 30679 - protein, 125 aa, Homo sapiens
  Payload ID: 6016
  Gene Symbol: FANCI
  Gene Name: Fanconi anemia, complementation group I
  ENSP ID: ENSP00000456552
MDQKILSLAAEKTADKLQEFLQTLREGDLTNLLQNQAVKGKVAGALLRAIFKGSPCSEEAGTLRRRKIYTCCIQLVESGDLQKEIASEIIGLLMLEAHHFPGPLLVELANEFISAVREGSLVNGK

SEQ ID NO: 30680 - protein, 215 aa, Homo sapiens
  Payload ID: 6016
  Gene Symbol: FANCI
  Gene Name: Fanconi anemia, complementation group I
  ENSP ID: ENSP00000457029
MDQKILSLAAEKTADKLQEFLQTLREGDLTNLLQNQAVKGKVAGALLRAIFKGSPCSEEAGTLRRRKIYTCCIQLVESGDLQKEIASEIIGLLMLEAHHFPGPLLVELANEFISAVREGSLVNGKSLELLPIILTALATKKENLAYGKGVLSGEECKKQLINTLCSGRWDQQYVIQLTSMFKDVPLTAEEVEFVVEKALSMFSKMNLQEIPPLVY

SEQ ID NO: 30681 - protein, 252 aa, Homo sapiens
  Payload ID: 6016
  Gene Symbol: FANCI
  Gene Name: Fanconi anemia, complementation group I
  Uniprot ID: Q9NVI1
  ENSP ID: ENSP00000458024
MDQKILSLAAEKTADKLQEFLQTLREGDLTNLLQNQAVKGKVAGALLRAIFKGSPCSEEAGTLRRRKIYTCCIQLVESGDLQKEIASEIIGLLMLEAHHFPGPLLVELANEFISAVREGSLVNGKSLELLPIILTALATKKENLAYGKGVLSGEECKKQLINTLCSGRWDQQYVIQLTSMFKDVPLTAEEVEFVVEKALSMFSKMNLQEIPPLVYQLLVLSSKGSRKSVLEGIIAFFSALDKQHNEEQSGDE

SEQ ID NO: 30682 - protein, 375 aa, Homo sapiens
  Payload ID: 6017
  Gene Symbol: FANCL
  Gene Name: Fanconi anemia, complementation group L
  Uniprot ID: Q9NW38
  ENSP ID: ENSP00000233741
MAVTEASLLRQCPLLLPQNRSKTVYEGFISAQGRDFHLRIVLPEDLQLKNARLLCSWQLRTILSGYHRIVQQRMQHSPDLMSFMMELKMLLEVALKNRQELYALPPPPQFYSSLIEEIGTLGWDKLVYADTCFSTIKLKAEDASGREHLITLKLKAKYPAESPDYFVDFPVPFCASWTPQSSLISIYSQFLAAIESLKAFWDVMDEIDEKTWVLEPEKPPRSATARRIALGNNVSINIEVDPRHPTMLPECFFLGADHVVKPLGIKLSRNIHLWDPENSVLQNLKDVLEIDFPARAILEKSDFTMDCGICYAYQLDGTIPDQVCDNSQCGQPFHQICLYEWLRGLLTSRQSFNIIFGECPYCSKPITLKMSGRKH

SEQ ID NO: 30683 - protein, 258 aa, Homo sapiens
  Payload ID: 6017
  Gene Symbol: FANCL
  Gene Name: Fanconi anemia, complementation group L
  ENSP ID: ENSP00000384046
MRDSSRLRLVYADTCFSTIKLKAEDASGREHLITLKLKAKYPAESPDYFVDFPVPFCASWTPQSSLISIYSQFLAAIESLKAFWDVMDEIDEKTWVLEPEKPPRSATARRIALGNNVSINIEVDPRHPTMLPECFFLGADHVVKPLGIKLSRNIHLWDPENSVLQNLKDVLEIDFPARAILEKSDFTMDCGICYAYQLDGTIPDQVCDNSQCGQPFHQICLYEWLRGLLTSRQSFNIIFGECPYCSKPITLKMSGRKH

SEQ ID NO: 30684 - protein, 380 aa, Homo sapiens
  Payload ID: 6017
  Gene Symbol: FANCL
  Gene Name: Fanconi anemia, complementation group L
  Uniprot ID: Q9NW38
  ENSP ID: ENSP00000385021
MAVTEASLLRQCPLLLPQNRSKTVYEGFISAQGRDFHLRIVLPEDLQLKNARLLCSWQLRTILSGYHRIVQQRMQHSPDLMSFMMELKMLLEVALKNRQELYALPPPPQFYSSLIEEIGTLGWDKLVYADTCFSTIKLKAEDASGREHLITLKLKAKYPAESPDYFVDFPVPFCASWTPQVNSPQSSLISIYSQFLAAIESLKAFWDVMDEIDEKTWVLEPEKPPRSATARRIALGNNVSINIEVDPRHPTMLPECFFLGADHVVKPLGIKLSRNIHLWDPENSVLQNLKDVLEIDFPARAILEKSDFTMDCGICYAYQLDGTIPDQVCDNSQCGQPFHQICLYEWLRGLLTSRQSFNIIFGECPYCSKPITLKMSGRKH

SEQ ID NO: 30685 - protein, 347 aa, Homo sapiens
  Payload ID: 6017
  Gene Symbol: FANCL
  Gene Name: Fanconi anemia, complementation group L
  ENSP ID: ENSP00000386097
MAVTEASLLRQCPLLLPQNRSKTVYEGFISAQGRDFHLRIVLPEDLQLKNARLLCSWQLRTILSGYHRIVQQRMQHSPDLMSFMMELKMLLEVALKNRQELYALPPPPQFYSSLIEEIGTLGWDKLVYADTCFSTIKLKAEDASGREHLITLKLKAKYPAESPDYFVDFPVPFCASWTPQSSLISIYSQFLAAIESLKAFWDVMDEIDEKTWVLEPEKPPRSATARRIALVVKPLGIKLSRNIHLWDPENSVLQNLKDVLEIDFPARAILEKSDFTMDCGICYAYQLDGTIPDQVCDNSQCGQPFHQICLYEWLRGLLTSRQSFNIIFGECPYCSKPITLKMSGRKH

SEQ ID NO: 30686 - protein, 145 aa, Homo sapiens
  Payload ID: 6017
  Gene Symbol: FANCL
  Gene Name: Fanconi anemia, complementation group L
  ENSP ID: ENSP00000389448
MRDSSRLRLVYADTCFSTIKLKAEDASGREHLITLKLKAKYPAESPDYFVDFPVPFCASWTPQVNSPQSSLISIYSQFLAAIESLKAFWDVMDEIDEKTWVLEPEKPPRSATARRIALGNNVSINIEVDPRHPTMLPECFFLGAD

SEQ ID NO: 30687 - protein, 158 aa, Homo sapiens
  Payload ID: 6017
  Gene Symbol: FANCL
  Gene Name: Fanconi anemia, complementation group L
  ENSP ID: ENSP00000390991
MAVTEASLLRQCPLLLPQNRSKTVYEGFISAQSSLISIYSQFLAAIESLKAFWDVMDEIDEKTWVLEPEKPPRSATARRIALGNNVSINIEVDPRHPTMLPECFFLGADHVVKPLGIKLSRNIHLWDPENSVLQNLKDVLEIDFPARAILEKSDFTMD

SEQ ID NO: 30688 - protein, 288 aa, Homo sapiens
  Payload ID: 6017
  Gene Symbol: FANCL
  Gene Name: Fanconi anemia, complementation group L
  ENSP ID: ENSP00000400969
  MOD_RES (1)..(1): Any amino acid
XAVTEASLLRQCPLLLPQNRSKTVYEGFISAQGRDFHLRIVLPEDLQLKNARLLCSWQLRTILSGYHRIVQQRMQHSPDLMSFMMELKMLLEVALKNRQELYALPPPPQFYSSLIEEIGTLGWDKLVYADTCFSTIKLKAEDASGREHLITLKLKAKYPAESPDYFVDFPVPFCASWTPQVTDQAKMDVKIAVLPSSLISIYSQFLAAIESLKAFWDVMDEIDEKTWVLEPEKPPRSATARRIALGNNVSINIEVDPRHPTMLPECFFLGADHVVKPLGIKLSRNIHL

SEQ ID NO: 30689 - protein, 301 aa, Homo sapiens
  Payload ID: 6017
  Gene Symbol: FANCL
  Gene Name: Fanconi anemia, complementation group L
  ENSP ID: ENSP00000401280
MAVTEASLLRQCPLLLPQNRSKTVYEGFISAQEVALKNRQELYALPPPPQFYSSLIEEIGTLGWDKLVYADTCFSTIKLKAEDASGREHLITLKLKAKYPAESPDYFVDFPVPFCASWTPQSSLISIYSQFLAAIESLKAFWDVMDEIDEKTWVLEPEKPPRSATARRIALGNNVSINIEVDPRHPTMLPECFFLGADHVVKPLGIKLSRNIHLWDPENSVLQNLKDVLEIDFPARAILEKSDFTMDCGICYAYQLDGTIPDQVCDNSQCGQPFHQICLYEWLRGLLTSRQSFNIIFGECP

SEQ ID NO: 30690 - protein, 124 aa, Homo sapiens
  Payload ID: 6017
  Gene Symbol: FANCL
  Gene Name: Fanconi anemia, complementation group L
  ENSP ID: ENSP00000483263
NRSKTVYEGFISAQGRDFHLRIVLPEDLQLKNARLLCSWQLRTILSGYHRIVQQRMQHSPDLMSFMMELKMLLEVALKNRQELYALPPPPQFYSSLIEEIGTLGWDKDKVLLYCPGESHTPGLK

SEQ ID NO: 30691 - protein, 2048 aa, Homo sapiens
  Payload ID: 6018
  Gene Symbol: FANCM
  Gene Name: Fanconi anemia, complementation group M
  Uniprot ID: Q8IYD8
  ENSP ID: ENSP00000267430
MSGRQRTLFQTWGSSISRSSGTPGCSSGTERPQSPGSSKAPLPAAAEAQLESDDDVLLVAAYEAERQLCLENGGFCTSAGALWIYPTNCPVRDYQLHISRAALFCNTLVCLPTGLGKTFIAAVVMYNFYRWFPSGKVVFMAPTKPLVTQQIEACYQVMGIPQSHMAEMTGSTQASTRKEIWCSKRVLFLTPQVMVNDLSRGACPAAEIKCLVIDEAHKALGNYAYCQVVRELVKYTNHFRILALSATPGSDIKAVQQVITNLLIGQIELRSEDSPDILTYSHERKVEKLIVPLGEELAAIQKTYIQILESFARSLIQRNVLMRRDIPNLTKYQIILARDQFRKNPSPNIVGIQQGIIEGEFAICISLYHGYELLQQMGMRSLYFFLCGIMDGTKGMTRSKNELGRNEDFMKLYNHLECMFARTRSTSANGISAIQQGDKNKKFVYSHPKLKKLEEVVIEHFKSWNAENTTEKKRDETRVMIFSSFRDSVQEIAEMLSQHQPIIRVMTFVGHASGKSTKGFTQKEQLEVVKQFRDGGYNTLVSTCVGEEGLDIGEVDLIICFDSQKSPIRLVQRMGRTGRKRQGRIVIILSEGREERIYNQSQSNKRSIYKAISSNRQVLHFYQRSPRMVPDGINPKLHKMFITHGVYEPEKPSRNLQRKSSIFSYRDGMRQSSLKKDWFLSEEEFKLWNRLYRLRDSDEIKEITLPQVQFSSLQNEENKPAQESTTGIHQLSLSEWRLWQDHPLPTHQVDHSDRCRHFIGLMQMIEGMRHEEGECSYELEVESYLQMEDVTSTFIAPRNESNNLASDTFITHKKSSFIKNINQGSSSSVIESDEECAEIVKQTHIKPTKIVSLKKKVSKEIKKDQLKKENNHGIIDSVDNDRNSTVENIFQEDLPNDKRTSDTDEIAATCTINENVIKEPCVLLTECQFTNKSTSSLAGNVLDSGYNSFNDEKSVSSNLFLPFEEELYIVRTDDQFYNCHSLTKEVLANVERFLSYSPPPLSGLSDLEYEIAKGTALENLLFLPCAEHLRSDKCTCLLSHSAVNSQQNLELNSLKCINYPSEKSCLYDIPNDNISDEPSLCDCDVHKHNQNENLVPNNRVQIHRSPAQNLVGENNHDVDNSDLPVLSTDQDESLLLFEDVNTEFDDVSLSPLNSKSESLPVSDKTAISETPLVSQFLISDELLLDNNSELQDQITRDANSFKSRDQRGVQEEKVKNHEDIFDCSRDLFSVTFDLGFCSPDSDDEILEHTSDSNRPLDDLYGRYLEIKEISDANYVSNQALIPRDHSKNFTSGTVIIPSNEDMQNPNYVHLPLSAAKNEELLSPGYSQFSLPVQKKVMSTPLSKSNTLNSFSKIRKEILKTPDSSKEKVNLQRFKEALNSTFDYSEFSLEKSKSSGPMYLHKSCHSVEDGQLLTSNESEDDEIFRRKVKRAKGNVLNSPEDQKNSEVDSPLHAVKKRRFPINRSELSSSDESENFPKPCSQLEDFKVCNGNARRGIKVPKRQSHLKHVARKFLDDEAELSEEDAEYVSSDENDESENEQDSSLLDFLNDETQLSQAINDSEMRAIYMKSLRSPMMNNKYKMIHKTHKNINIFSQIPEQDETYLEDSFCVDEEESCKGQSSEEEVCVDFNLITDDCFANSKKYKTRRAVMLKEMMEQNCAHSKKKLSRIILPDDSSEEENNVNDKRESNIAVNPSTVKKNKQQDHCLNSVPSGSSAQSKVRSTPRVNPLAKQSKQTSLNLKDTISEVSDFKPQNHNEVQSTTPPFTTVDSQKDCRKFPVPQKDGSALEDSSTSGASCSKSRPHLAGTHTSLRLPQEGKGTCILVGGHEITSGLEVISSLRAIHGLQVEVCPLNGCDYIVSNRMVVERRSQSEMLNSVNKNKFIEQIQHLQSMFERICVIVEKDREKTGDTSRMFRRTKSYDSLLTTLIGAGIRILFSSCQEETADLLKELSLVEQRKNVGIHVPTVVNSNKSEALQFYLSIPNISYITALNMCHQFSSVKRMANSSLQEISMYAQVTHQKAEEIYRYIHYVFDIQMLPNDLNQDRLKSDI

SEQ ID NO: 30692 - protein, 2022 aa, Homo sapiens
  Payload ID: 6018
  Gene Symbol: FANCM
  Gene Name: Fanconi anemia, complementation group M
  Uniprot ID: Q8IYD8
  ENSP ID: ENSP00000442493
MSGRQRTLFQTWGSSISRSSGTPGCSSGTERPQSPGSSKAPLPAAAEAQLESDDDVLLVAAYEAERQLCLENGGFCTSAGALWIYPTNCPVRDYQLHISRAALFCNTLVCLPTGLGKTFIAAVVMYNFYRWFPSGKVVFMAPTKPLVTQQIEACYQVMGIPQSHMAEMTGSTQASTRKEIWCSKRVLFLTPQVMVNDLSRGACPAAEIKCLVIDEAHKALGNYAYCQAVQQVITNLLIGQIELRSEDSPDILTYSHERKVEKLIVPLGEELAAIQKTYIQILESFARSLIQRNVLMRRDIPNLTKYQIILARDQFRKNPSPNIVGIQQGIIEGEFAICISLYHGYELLQQMGMRSLYFFLCGIMDGTKGMTRSKNELGRNEDFMKLYNHLECMFARTRSTSANGISAIQQGDKNKKFVYSHPKLKKLEEVVIEHFKSWNAENTTEKKRDETRVMIFSSFRDSVQEIAEMLSQHQPIIRVMTFVGHASGKSTKGFTQKEQLEVVKQFRDGGYNTLVSTCVGEEGLDIGEVDLIICFDSQKSPIRLVQRMGRTGRKRQGRIVIILSEGREERIYNQSQSNKRSIYKAISSNRQVLHFYQRSPRMVPDGINPKLHKMFITHGVYEPEKPSRNLQRKSSIFSYRDGMRQSSLKKDWFLSEEEFKLWNRLYRLRDSDEIKEITLPQVQFSSLQNEENKPAQESTTGIHQLSLSEWRLWQDHPLPTHQVDHSDRCRHFIGLMQMIEGMRHEEGECSYELEVESYLQMEDVTSTFIAPRNESNNLASDTFITHKKSSFIKNINQGSSSSVIESDEECAEIVKQTHIKPTKIVSLKKKVSKEIKKDQLKKENNHGIIDSVDNDRNSTVENIFQEDLPNDKRTSDTDEIAATCTINENVIKEPCVLLTECQFTNKSTSSLAGNVLDSGYNSFNDEKSVSSNLFLPFEEELYIVRTDDQFYNCHSLTKEVLANVERFLSYSPPPLSGLSDLEYEIAKGTALENLLFLPCAEHLRSDKCTCLLSHSAVNSQQNLELNSLKCINYPSEKSCLYDIPNDNISDEPSLCDCDVHKHNQNENLVPNNRVQIHRSPAQNLVGENNHDVDNSDLPVLSTDQDESLLLFEDVNTEFDDVSLSPLNSKSESLPVSDKTAISETPLVSQFLISDELLLDNNSELQDQITRDANSFKSRDQRGVQEEKVKNHEDIFDCSRDLFSVTFDLGFCSPDSDDEILEHTSDSNRPLDDLYGRYLEIKEISDANYVSNQALIPRDHSKNFTSGTVIIPSNEDMQNPNYVHLPLSAAKNEELLSPGYSQFSLPVQKKVMSTPLSKSNTLNSFSKIRKEILKTPDSSKEKVNLQRFKEALNSTFDYSEFSLEKSKSSGPMYLHKSCHSVEDGQLLTSNESEDDEIFRRKVKRAKGNVLNSPEDQKNSEVDSPLHAVKKRRFPINRSELSSSDESENFPKPCSQLEDFKVCNGNARRGIKVPKRQSHLKHVARKFLDDEAELSEEDAEYVSSDENDESENEQDSSLLDFLNDETQLSQAINDSEMRAIYMKSLRSPMMNNKYKMIHKTHKNINIFSQIPEQDETYLEDSFCVDEEESCKGQSSEEEVCVDFNLITDDCFANSKKYKTRRAVMLKEMMEQNCAHSKKKLSRIILPDDSSEEENNVNDKRESNIAVNPSTVKKNKQQDHCLNSVPSGSSAQSKVRSTPRVNPLAKQSKQTSLNLKDTISEVSDFKPQNHNEVQSTTPPFTTVDSQKDCRKFPVPQKDGSALEDSSTSGASCSKSRPHLAGTHTSLRLPQEGKGTCILVGGHEITSGLEVISSLRAIHGLQVEVCPLNGCDYIVSNRMVVERRSQSEMLNSVNKNKFIEQIQHLQSMFERICVIVEKDREKTGDTSRMFRRTKSYDSLLTTLIGAGIRILFSSCQEETADLLKELSLVEQRKNVGIHVPTVVNSNKSEALQFYLSIPNISYITALNMCHQFSSVKRMANSSLQEISMYAQVTHQKAEEIYRYIHYVFDIQMLPNDLNQDRLKSDI

SEQ ID NO: 30693 - protein, 669 aa, Homo sapiens
  Payload ID: 6018
  Gene Symbol: FANCM
  Gene Name: Fanconi anemia, complementation group M
  Uniprot ID: Q8IYD8
  ENSP ID: ENSP00000450596
MSGRQRTLFQTWGSSISRSSGTPGCSSGTERPQSPGSSKAPLPAAAEAQLESDDDVLLVAAYEAERQLCLENGGFCTSAGALWIYPTNCPVRDYQLHISRAALFCNTLVCLPTGLGKTFIAAVVMYNFYRWFPSGKVVFMAPTKPLVTQQIEACYQVMGIPQSHMAEMTGSTQASTRKEIWCSKRVLFLTPQVMVNDLSRGACPAAEIKCLVIDEAHKALGNYAYCQVVRELVKYTNHFRILALSATPGSDIKAVQQVITNLLIGQIELRSEDSPDILTYSHERKVEKLIVPLGEELAAIQKTYIQILESFARSLIQRNVLMRRDIPNLTKYQIILARDQFRKNPSPNIVGIQQGIIEGEFAICISLYHGYELLQQMGMRSLYFFLCGIMDGTKGMTRSKNELGRNEDFMKLYNHLECMFARTRSTSANGISAIQQGDKNKKFVYSHPKLKKLEEVVIEHFKSWNAENTTEKKRDETRVMIFSSFRDSVQEIAEMLSQHQPIIRVMTFVGHASGKSTKGFTQKEQLEVVKQFRDGGYNTLVSTCVGEEGLDIGEVDLIICFDSQKSPIRLVQRMGRTGRKRQGRIVIILSEGREERIYNQSQSNKRSIYKAISSNRQVLHFYQRSPRMVPDGINPKLHKMFITHGVYEPEKPSRNLQRKSSIFSYRDGK

SEQ ID NO: 30694 - protein, 1016 aa, Homo sapiens
  Payload ID: 6018
  Gene Symbol: FANCM
  Gene Name: Fanconi anemia, complementation group M
  ENSP ID: ENSP00000450632
  MOD_RES (1)..(1): Any amino acid
XIPNDNISDEPSLCDCDVHKHNQNENLVPNNRVQIHRSPAQNLVGENNHDVDNSDLPVLSTDQDESLLLFEDVNTEFDDVSLSPLNSKSESLPVSDKTAISETPLVSQFLISDELLLDNNSELQDQITRDANSFKSRDQRGVQEEKVKNHEDIFDCSRDLFSVTFDLGFCSPDSDDEILEHTSDSNRPLDDLYGRYLEIKEISDANYVSNQALIPRDHSKNFTSGTVIIPSNEDMQNPNYVHLPLSAAKNEELLSPGYSQFSLPVQKKVMSTPLSKSNTLNSFSKIRKEILKTPDSSKEKVNLQRFKEALNSTFDYSEFSLEKSKSSGPMYLHKSCHSVEDGQLLTSNESEDDEIFRRKVKRAKGNVLNSPEDQKNSEVDSPLHAVKKRRFPINRSELSSSDESENFPKPCSQLEDFKVCNGNARRGIKVPKRQSHLKHVARKFLDDEAELSEEDAEYVSSDENDESENEQDSSLLDFLNDETQLSQAINDSEMRAIYMKSLRSPMMNNKYKMIHKTHKNINIFSQIPEQDETYLEDSFCVDEEESCKGQSSEEEVCVDFNLITDDCFANSKKYKTRRAVMLKEMMEQNCAHSKKKLSRIILPDDSSEEENNVNDKRESNIAVNPSTVKKNKQQDHCLNSVPSGSSAQSKVRSTPRVNPLAKQSKQTSLNLKDTISEVSDFKPQNHNEVQSTTPPFTTVDSQKDCRKFPVPQKRFGHLALMFPMPSASAKRGAHGPQDLADYFGKESWDGSALEDSSTSGASCSKSRPHLAGTHTSLRLPQEGKGTCILVGGHEITSGLEVISSLRAIHGLQVEVCPLNGCDYIVSNRMVVERRSQSEMLNSVNKNKFIEQIQHLQSMFERICVIVEKDREKTGDTSRMFRRTKSYDSLLTTLIGAGIRILFSSCQEETADLLKELSLVEQRKNVGIHVPTVVNSNKSEALQFYLSIPNISYITALNMCHQFSSVKRMANSSLQEISMYAQVTHQKAEEIYRYIHYVFDIQMLPNDLNQDRLKSDI

SEQ ID NO: 30695 - protein, 106 aa, Homo sapiens
  Payload ID: 6018
  Gene Symbol: FANCM
  Gene Name: Fanconi anemia, complementation group M
  ENSP ID: ENSP00000450797
VNKNKFIEQIQHLQSMFERICVIVEKDREKTGDTSRMFRRTKSYDSLLTTLIGAGIRILFSSCQEETADLLKELSLVEQRKNVGIHVPTVVNSNKTHFKKSPCMHK

SEQ ID NO: 30696 - protein, 135 aa, Homo sapiens
  Payload ID: 6018
  Gene Symbol: FANCM
  Gene Name: Fanconi anemia, complementation group M
  ENSP ID: ENSP00000451846
DGSALEDSSTSGASCSKSRPHLAGTHTSLRLPQEGKGTCILVGGHEITSGLEVISSLRAIHGLQVEVCPLNGCDYIVSNRMVVERRSQSEMLNSVNKNKFIEQIQHLQSMFERICVIVEKDREKTVPAKKKPQIC

SEQ ID NO: 30697 - protein, 1564 aa, Homo sapiens
  Payload ID: 6018
  Gene Symbol: FANCM
  Gene Name: Fanconi anemia, complementation group M
  ENSP ID: ENSP00000452033
LECMFARTRSTSANGISAIQQGDKNKKFVYSHPKLKKLEEVVIEHFKSWNAENTTEKKRDETRVMIFSSFRDSVQEIAEMLSQHQPIIRVMTFVGHASGKSTKGFTQKEQLEIYNQSQSNKRSIYKAISSNRQVLHFYQRSPRMVPDGINPKLHKMFITHGVYEPEKPSRNLQRKSSIFSYRDGMRQSSLKKDWFLSEEEFKLWNRLYRLRDSDEIKEITLPQVQFSSLQNEENKPAQESTTGIHQLSLSEWRLWQDHPLPTHQVDHSDRCRHFIGLMQMIEGMRHEEGECSYELEVESYLQMEDVTSTFIAPRNESNNLASDTFITHKKSSFIKNINQGSSSSVIESDEECAEIVKQTHIKPTKIVSLKKKVSKEIKKDQLKKENNHGIIDSVDNDRNSTVENIFQEDLPNDKRTSDTDEIAATCTINENVIKEPCVLLTECQFTNKSTSSLAGNVLDSGYNSFNDEKSVSSNLFLPFEEELYIVRTDDQFYNCHSLTKEVLANVERFLSYSPPPLSGLSDLEYEIAKGTALENLLFLPCAEHLRSDKCTCLLSHSAVNSQQNLELNSLKCINYPSEKSCLYDIPNDNISDEPSLCDCDVHKHNQNENLVPNNRVQIHRSPAQNLVGENNHDVDNSDLPVLSTDQDESLLLFEDVNTEFDDVSLSPLNSKSESLPVSDKTAISETPLVSQFLISDELLLDNNSELQDQITRDANSFKSRDQRGVQEEKVKNHEDIFDCSRDLFSVTFDLGFCSPDSDDEILEHTSDSNRPLDDLYGRYLEIKEISDANYVSNQALIPRDHSKNFTSGTVIIPSNEDMQNPNYVHLPLSAAKNEELLSPGYSQFSLPVQKKVMSTPLSKSNTLNSFSKIRKEILKTPDSSKEKVNLQRFKEALNSTFDYSEFSLEKSKSSGPMYLHKSCHSVEDGQLLTSNESEDDEIFRRKVKRAKGNVLNSPEDQKNSEVDSPLHAVKKRRFPINRSELSSSDESENFPKPCSQLEDFKVCNGNARRGIKVPKRQSHLKHVARKFLDDEAELSEEDAEYVSSDENDESENEQDSSLLDFLNDETQLSQAINDSEMRAIYMKSLRSPMMNNKYKMIHKTHKNINIFSQIPEQDETYLEDSFCVDEEESCKGQSSEEEVCVDFNLITDDCFANSKKYKTRRAVMLKEMMEQNCAHSKKKLSRIILPDDSSEEENNVNDKRESNIAVNPSTVKKNKQQDHCLNSVPSGSSAQSKVRSTPRVNPLAKQSKQTSLNLKDTISEVSDFKPQNHNEVQSTTPPFTTVDSQKDCRKFPVPQKDGSALEDSSTSGASCSKSRPHLAGTHTSLRLPQEGKGTCILVGGHEITSGLEVISSLRAIHGLQVEVCPLNGCDYIVSNRMVVERRSQSEMLNSVNKNKFIEQIQHLQSMFERICVIVEKDREKTGDTSRMFRRTKSYDSLLTTLIGAGIRILFSSCQEETADLLKELSLVEQRKNVGIHVPTVVNSNKSEALQFYLSIPNISYITALNMCHQFSSVKRMANSSLQEISMYAQVTHQKAEEIYRYIHYVFDIQMLPNDLNQDRLKSDI

SEQ ID NO: 30698 - protein, 653 aa, Homo sapiens
  Payload ID: 6019
  Gene Symbol: FUBP1
  Gene Name: far upstream element (FUSE) binding protein 1
  Uniprot ID: Q96AE4
  ENSP ID: ENSP00000294623
MADYSTVPPPSSGSAGGGGGGGGGGGVNDAFKDALQRARQIAAKIGGDAGTSLNSNDYGYGGQKRPLEDGDQPDAKKVAPQNDSFGTQLPPMHQQQRSVMTEEYKVPDGMVGFIIGRGGEQISRIQQESGCKIQIAPDSGGLPERSCMLTGTPESVQSAKRLLDQIVEKGRPAPGFHHGDGPGNAVQEIMIPASKAGLVIGKGGETIKQLQERAGVKMVMIQDGPQNTGADKPLRITGDPYKVQQAKEMVLELIRDQGGFREVRNEYGSRIGGNEGIDVPIPRFAVGIVIGRNGEMIKKIQNDAGVRIQFKPDDGTTPERIAQITGPPDRCQHAAEIITDLLRSVQAGNPGGPGPGGRGRGRGQGNWNMGPPGGLQEFNFIVPTGKTGLIIGKGGETIKSISQQSGARIELQRNPPPNADPNMKLFTIRGTPQQIDYARQLIEEKIGGPVNPLGPPVPHGPHGVPGPHGPPGPPGPGTPMGPYNPAPYNPGPPGPAPHGPPAPYAPQGWGNAYPHWQQQAPPDPAKAGTDPNSAAWAAYYAHYYQQQAQPPPAAPAGAPTTTQTNGQGDQQNPAPAGQVDYTKAWEEYYKKMGQAVPAPTGAPPGGQPDYSAAWAEYYRQQAAYYAQTSPQGMPQHPPAPQCRFDPASIELAL

SEQ ID NO: 30699 - protein, 655 aa, Homo sapiens
  Payload ID: 6019
  Gene Symbol: FUBP1
  Gene Name: far upstream element (FUSE) binding protein 1
  ENSP ID: ENSP00000359803
MADYSTVPPPSSGSAGGGGGGGGGGGVNDAFKDALQRARQIAAKIGGDAGTSLNSNDYGYGGQKRPLEDGDQPDAKKVAPQNDSFGTQLPPMHQQQSRSVMTEEYKVPDGMVGFIIGRGGEQISRIQQESGCKIQIAPDSGGLPERSCMLTGTPESVQSAKRLLDQIVEKGRPAPGFHHGDGPGNAVQEIMIPASKAGLVIGKGGETIKQLQERAGVKMVMIQDGPQNTGADKPLRITGDPYKVQQAKEMVLELIRDQGGFREVRNEYGSRIGGNEGIDVPIPRFAVGIVIGRNGEMIKKIQNDAGVRIQFKPDDGTTPERIAQITGPPDRCQHAAEIITDLLRSVQAGNPGGPGPGGRGRGRGQGNWNMGPPGGLQEFNFIVPTGKTGLIIGKGGETIKSISQQSGARIELQRNPPPNADPNMKLFTIRGTPQQIDYARQLIEEKIGGPVNPLGPPVPHGPHGVPGPHGPPGPPGPGTPMGPYNPAPYNPGPPGPAPHGPPAPYAPQGWGNAYPHWQQQAPPDPAKAGTDPNSAAWAAYYAHYYQQQAQPPPAAPAGAPTTTQTNGQGDQQNPAPAGQVDYTKAWEEYYKKMGQAVPAPTGAPPGGQPDYSAAWAEYYRQQAAYYAQTSPQGMPQHPPAPQGFANHARSHHHLY

SEQ ID NO: 30700 - protein, 644 aa, Homo sapiens
  Payload ID: 6019
  Gene Symbol: FUBP1
  Gene Name: far upstream element (FUSE) binding protein 1
  Uniprot ID: Q96AE4
  ENSP ID: ENSP00000359804
MADYSTVPPPSSGSAGGGGGGGGGGGVNDAFKDALQRARQIAAKIGGDAGTSLNSNDYGYGGQKRPLEDGDQPDAKKVAPQNDSFGTQLPPMHQQQSRSVMTEEYKVPDGMVGFIIGRGGEQISRIQQESGCKIQIAPDSGGLPERSCMLTGTPESVQSAKRLLDQIVEKGRPAPGFHHGDGPGNAVQEIMIPASKAGLVIGKGGETIKQLQERAGVKMVMIQDGPQNTGADKPLRITGDPYKVQQAKEMVLELIRDQGGFREVRNEYGSRIGGNEGIDVPIPRFAVGIVIGRNGEMIKKIQNDAGVRIQFKPDDGTTPERIAQITGPPDRCQHAAEIITDLLRSVQAGNPGGPGPGGRGRGRGQGNWNMGPPGGLQEFNFIVPTGKTGLIIGKGGETIKSISQQSGARIELQRNPPPNADPNMKLFTIRGTPQQIDYARQLIEEKIGGPVNPLGPPVPHGPHGVPGPHGPPGPPGPGTPMGPYNPAPYNPGPPGPAPHGPPAPYAPQGWGNAYPHWQQQAPPDPAKAGTDPNSAAWAAYYAHYYQQQAQPPPAAPAGAPTTTQTNGQGDQQNPAPAGQVDYTKAWEEYYKKMGQAVPAPTGAPPGGQPDYSAAWAEYYRQQAAYYAQTSPQGMPQHPPAPQGQ

SEQ ID NO: 30701 - protein, 232 aa, Homo sapiens
  Payload ID: 6019
  Gene Symbol: FUBP1
  Gene Name: far upstream element (FUSE) binding protein 1
  ENSP ID: ENSP00000402630
MADYSTVPPPSSGSAGGGGGGGGGGGVNDAFKDALQRARQIAAKIGGDAGTSLNSNDYGYGGQKRPLEDGDGSWTSPSSTTHWEGMPSPFKDQPDAKKVAPQNDSFGTQLPPMHQQQRSVMTEEYKVPDGMVGFIIGRGGEQISRIQQESGCKIQIAPDSGGLPERSCMLTGTPESVQSAKRLLDQIVEKGRPAPGFHHGDGPGNAVQEIMIPASKAGLVIGKGGETIKQLQ

SEQ ID NO: 30702 - protein, 572 aa, Homo sapiens
  Payload ID: 6020
  Gene Symbol: FUBP3
  Gene Name: far upstream element (FUSE) binding protein 3
  Uniprot ID: Q96I24
  ENSP ID: ENSP00000318177
MAELVQGQSAPVGMKAEGFVDALHRVRQIAAKIDSIPHLNNSTPLVDPSVYGYGVQKRPLDDGVGNQLGALVHQRTVITEEFKVPDKMVGFIIGRGGEQISRIQAESGCKIQIASESSGIPERPCVLTGTPESIEQAKRLLGQIVDRCRNGPGFHNDIDSNSTIQEILIPASKVGLVIGRGGETIKQLQERTGVKMVMIQDGPLPTGADKPLRITGDAFKVQQAREMVLEIIREKDQADFRGVRGDFNSRMGGGSIEVSVPRFAVGIVIGRNGEMIKKIQNDAGVRIQFKPDDGISPERAAQVMGPPDRCQHAAHIISELILTAQERDGFGGLAAARGRGRGRGDWSVGAPGGVQEITYTVPADKCGLVIGKGGENIKSINQQSGAHVELQRNPPPNSDPNLRRFTIRGVPQQIEVARQLIDEKVGGTNLGAPGAFGQSPFSQPPAPPHQNTFPPRSSGCFPNMAAKVNGNPHSTPVSGPPAFLTQGWGSTYQAWQQPTQQVPSQQSQPQSSQPNYSKAWEDYYKKQSHAASAAPQASSPPDYTMAWAEYYRQQVAFYGQTLGQAQAHSQEQ

SEQ ID NO: 30703 - protein, 419 aa, Homo sapiens
  Payload ID: 6021
  Gene Symbol: FDPS
  Gene Name: farnesyl diphosphate synthase
  Uniprot ID: P14324
  ENSP ID: ENSP00000349078
MPLSRWLRSVGVFLLPAPYWAPRERWLGSLRRPSLVHGYPVLAWHSARCWCQAWTEEPRALCSSLRMNGDQNSDVYAQEKQDFVQHFSQIVRVLTEDEMGHPEIGDAIARLKEVLEYNAIGGKYNRGLTVVVAFRELVEPRKQDADSLQRAWTVGWCVELLQAFFLVADDIMDSSLTRRGQICWYQKPGVGLDAINDANLLEACIYRLLKLYCREQPYYLNLIELFLQSSYQTEIGQTLDLLTAPQGNVDLVRFTEKRYKSIVKYKTAFYSFYLPIAAAMYMAGIDGEKEHANAKKILLEMGEFFQIQDDYLDLFGDPSVTGKIGTDIQDNKCSWLVVQCLQRATPEQYQILKENYGQKEAEKVARVKALYEELDLPAVFLQYEEDSYSHIMALIEQYAAPLPPAVFLGLARKIYKRRK

SEQ ID NO: 30704 - protein, 419 aa, Homo sapiens; identical to SEQ ID NO: 30703
  Payload ID: 6021
  Gene Symbol: FDPS
  Gene Name: farnesyl diphosphate synthase
  Uniprot ID: P14324
  ENSP ID: ENSP00000357340

SEQ ID NO: 30705 - protein, 353 aa, Homo sapiens
  Payload ID: 6021
  Gene Symbol: FDPS
  Gene Name: farnesyl diphosphate synthase
  Uniprot ID: P14324
  ENSP ID: ENSP00000391755
MNGDQNSDVYAQEKQDFVQHFSQIVRVLTEDEMGHPEIGDAIARLKEVLEYNAIGGKYNRGLTVVVAFRELVEPRKQDADSLQRAWTVGWCVELLQAFFLVADDIMDSSLTRRGQICWYQKPGVGLDAINDANLLEACIYRLLKLYCREQPYYLNLIELFLQSSYQTEIGQTLDLLTAPQGNVDLVRFTEKRYKSIVKYKTAFYSFYLPIAAAMYMAGIDGEKEHANAKKILLEMGEFFQIQDDYLDLFGDPSVTGKIGTDIQDNKCSWLVVQCLQRATPEQYQILKENYGQKEAEKVARVKALYEELDLPAVFLQYEEDSYSHIMALIEQYAAPLPPAVFLGLARKIYKRRK

SEQ ID NO: 30706 - protein, 80 aa, Homo sapiens
  Payload ID: 6021
  Gene Symbol: FDPS
  Gene Name: farnesyl diphosphate synthase
  ENSP ID: ENSP00000478032
MNGDQNSDVYAQEKQDFVQHFSQIVRVLTEDEMGHPEIGDAIARLKESLALSPGLECDGVISACCNLHLLGSSDSPASAF

SEQ ID NO: 30707 - protein, 353 aa, Homo sapiens; identical to SEQ ID NO: 30705
  Payload ID: 6021
  Gene Symbol: FDPS
  Gene Name: farnesyl diphosphate synthase
  Uniprot ID: P14324
  ENSP ID: ENSP00000478235

SEQ ID NO: 30708 - protein, 274 aa, Homo sapiens
  Payload ID: 6021
  Gene Symbol: FDPS
  Gene Name: farnesyl diphosphate synthase
  ENSP ID: ENSP00000479557
MPLSRWLRSVGVFLLPAPYWAPRERWLGSLRRPSLVHGYPVLAWHSARCWCQAWTEEPRALCSSLRMNGDQNSDVYAQEKQDFVQHFSQIVRVLTEDEMGHPEIGDAIARLKEVLEYNAIGGKYNRGLTVVVAFRELVEPRKQDADSLQRAWTVGWCVELLQAFFLVADDIMDSSLTRRGQICWYQKPGVGLDAINDANLLEACIYRLLKLYCREQPYYLNLIELFLQSSYQTEIGQTLDLLTAPQGNVDLVRFTEKRYKSIVKYKTAFYSFYL

SEQ ID NO: 30709 - protein, 353 aa, Homo sapiens; identical to SEQ ID NO: 30705
  Payload ID: 6021
  Gene Symbol: FDPS
  Gene Name: farnesyl diphosphate synthase
  Uniprot ID: P14324
  ENSP ID: ENSP00000480142

SEQ ID NO: 30710 - protein, 248 aa, Homo sapiens
  Payload ID: 6021
  Gene Symbol: FDPS
  Gene Name: farnesyl diphosphate synthase
  ENSP ID: ENSP00000483188
MDSSLTRRGQICWYQKPGVGLDAINDANLLEACIYRLLKLYCREQPYYLNLIELFLQSSYQTEIGQTLDLLTAPQGNVDLVRFTEKRYKSIVKYKTAFYSFYLPIAAAMYMAGIDGEKEHANAKKILLEMGEFFQIQDDYLDLFGDPSVTGKIGTDIQDNKCSWLVVQCLQRATPEQYQILKENYGQKEAEKVARVKALYEELDLPAVFLQYEEDSYSHIMALIEQYAAPLPPAVFLGLARKIYKRRK

SEQ ID NO: 30711 - protein, 174 aa, Homo sapiens
  Payload ID: 6021
  Gene Symbol: FDPS
  Gene Name: farnesyl diphosphate synthase
  ENSP ID: ENSP00000484099
MPLSRWLRSVGVFLLPAPYWAPRERWLGSLRRPSLVHGYPVLAWHSARCWCQAWTEEPRALCSSLRMNGDQNSDVYAQEKQDFVQHFSQIVRVLTEDEMGHPEIGDAIARLKEVLEYNAIGGKYNRGLTVVVAFRELVEPRKQDADSLQRAWTVGWCVELLQAFFLVADDIMDS

SEQ ID NO: 30712 - protein, 417 aa, Homo sapiens
  Payload ID: 6022
  Gene Symbol: FDFT1
  Gene Name: farnesyl-diphosphate farnesyltransferase 1
  Uniprot ID: P37268
  ENSP ID: ENSP00000220584
MEFVKCLGHPEEFYNLVRFRIGGKRKVMPKMDQDSLSSSLKTCYKYLNQTSRSFAAVIQALDGEMRNAVCIFYLVLRALDTLEDDMTISVEKKVPLLHNFHSFLYQPDWRFMESKEKDRQVLEDFPTISLEFRNLAEKYQTVIADICRRMGIGMAEFLDKHVTSEQEWDKYCHYVAGLVGIGLSRLFSASEFEDPLVGEDTERANSMGLFLQKTNIIRDYLEDQQGGREFWPQEVWSRYVKKLGDFAKPENIDLAVQCLNELITNALHHIPDVITYLSRLRNQSVFNFCAIPQVMAIATLAACYNNQQVFKGAVKIRKGQAVTLMMDATNMPAVKAIIYQYMEEIYHRIPDSDPSSSKTRQIISTIRTQNLPNCQLISRSHYSPIYLSFVMLLAALSWQYLTTLSQVTEDYVQTGEH

SEQ ID NO: 30713 - protein, 374 aa, Homo sapiens
  Payload ID: 6022
  Gene Symbol: FDFT1
  Gene Name: farnesyl-diphosphate farnesyltransferase 1
  Uniprot ID: P37268
  ENSP ID: ENSP00000390367
MEFVKCLGHPEEFYNLVRFRIGGKRKVMPKMDQDSLSSSLKTCYKYLNQTSRSFAAVIQALDGEMRNAVCIFYLVLRALDTLEDDMTISVEKKVPLLHNFHSFLYQPDWRFMESKEKDRQVLEDFPTYCHYVAGLVGIGLSRLFSASEFEDPLVGEDTERANSMGLFLQKTNIIRDYLEDQQGGREFWPQEVWSRYVKKLGDFAKPENIDLAVQCLNELITNALHHIPDVITYLSRLRNQSVFNFCAIPQVMAIATLAACYNNQQVFKGAVKIRKGQAVTLMMDATNMPAVKAIIYQYMEEIYHRIPDSDPSSSKTRQIISTIRTQNLPNCQLISRSHYSPIYLSFVMLLAALSWQYLTTLSQVTEDYVQTGEH

SEQ ID NO: 30714 - protein, 332 aa, Homo sapiens
  Payload ID: 6022
  Gene Symbol: FDFT1
  Gene Name: farnesyl-diphosphate farnesyltransferase 1
  Uniprot ID: P37268
  ENSP ID: ENSP00000431649
MTISVEKKVPLLHNFHSFLYQPDWRFMESKEKDRQVLEDFPTISLEFRNLAEKYQTVIADICRRMGIGMAEFLDKHVTSEQEWDKYCHYVAGLVGIGLSRLFSASEFEDPLVGEDTERANSMGLFLQKTNIIRDYLEDQQGGREFWPQEVWSRYVKKLGDFAKPENIDLAVQCLNELITNALHHIPDVITYLSRLRNQSVFNFCAIPQVMAIATLAACYNNQQVFKGAVKIRKGQAVTLMMDATNMPAVKAIIYQYMEEIYHRIPDSDPSSSKTRQIISTIRTQNLPNCQLISRSHYSPIYLSFVMLLAALSWQYLTTLSQVTEDYVQTGEH

SEQ ID NO: 30715 - protein, 353 aa, Homo sapiens
  Payload ID: 6022
  Gene Symbol: FDFT1
  Gene Name: farnesyl-diphosphate farnesyltransferase 1
  Uniprot ID: P37268
  ENSP ID: ENSP00000431749
MRNAVCIFYLVLRALDTLEDDMTISVEKKVPLLHNFHSFLYQPDWRFMESKEKDRQVLEDFPTISLEFRNLAEKYQTVIADICRRMGIGMAEFLDKHVTSEQEWDKYCHYVAGLVGIGLSRLFSASEFEDPLVGEDTERANSMGLFLQKTNIIRDYLEDQQGGREFWPQEVWSRYVKKLGDFAKPENIDLAVQCLNELITNALHHIPDVITYLSRLRNQSVFNFCAIPQVMAIATLAACYNNQQVFKGAVKIRKGQAVTLMMDATNMPAVKAIIYQYMEEIYHRIPDSDPSSSKTRQIISTIRTQNLPNCQLISRSHYSPIYLSFVMLLAALSWQYLTTLSQVTEDYVQTGEH

SEQ ID NO: 30716 - protein, 150 aa, Homo sapiens
  Payload ID: 6022
  Gene Symbol: FDFT1
  Gene Name: farnesyl-diphosphate farnesyltransferase 1
  ENSP ID: ENSP00000431852
MEFVKCLGHPEEFYNLVRFRIGGKRKVMPKMDQDSLSSSLKTCYKYLNQTSRSFAAVIQALDGEMRNAVCIFYLVLRALDTLEDDMTISVEKKVPLLHNFHSFLYQPDWRFMESKEKDRQVLEDFPTISLEFRNLAEKYQTVIADICRRM

SEQ ID NO: 30717 - protein, 353 aa, Homo sapiens; identical to SEQ ID NO: 30715
  Payload ID: 6022
  Gene Symbol: FDFT1
  Gene Name: farnesyl-diphosphate farnesyltransferase 1
  Uniprot ID: P37268
  ENSP ID: ENSP00000432331

SEQ ID NO: 30718 - protein, 45 aa, Homo sapiens
  Payload ID: 6022
  Gene Symbol: FDFT1
  Gene Name: farnesyl-diphosphate farnesyltransferase 1
  ENSP ID: ENSP00000432551
MEFVKCLGHPEEFYNLVRFRIGGKRKVMPKMDQITSHEGRFWNEV

SEQ ID NO: 30719 - protein, 67 aa, Homo sapiens
  Payload ID: 6022
  Gene Symbol: FDFT1
  Gene Name: farnesyl-diphosphate farnesyltransferase 1
  ENSP ID: ENSP00000433985
MEFVKCLGHPEEFYNLVRFRIGGKRKVMPKMDQTGGSWRARRRIARCWRTSQRSPLSLEIWLRNTKQ

SEQ ID NO: 30720 - protein, 410 aa, Homo sapiens
  Payload ID: 6022
  Gene Symbol: FDFT1
  Gene Name: farnesyl-diphosphate farnesyltransferase 1
  ENSP ID: ENSP00000434714
MEFVKCLGHPEEFYNLVRFRIGGKRKDSLSSSLKTCYKYLNQTSRSFAAVIQALDGEMRNAVCIFYLVLRALDTLEDDMTISVEKKVPLLHNFHSFLYQPDWRFMESKEKDRQVLEDFPTISLEFRNLAEKYQTVIADICRRMGIGMAEFLDKHVTSEQEWDKYCHYVAGLVGIGLSRLFSASEFEDPLVGEDTERANSMGLFLQKTNIIRDYLEDQQGGREFWPQEVWSRYVKKLGDFAKPENIDLAVQCLNELITNALHHIPDVITYLSRLRNQSVFNFCAIPQVMAIATLAACYNNQQVFKGAVKIRKGQAVTLMMDATNMPAVKAIIYQYMEEIYHRIPDSDPSSSKTRQIISTIRTQNLPNCQLISRSHYSPIYLSFVMLLAALSWQYLTTLSQVTEDYVQTGEH

SEQ ID NO: 30721 - protein, 51 aa, Homo sapiens
  Payload ID: 6022
  Gene Symbol: FDFT1
  Gene Name: farnesyl-diphosphate farnesyltransferase 1
  ENSP ID: ENSP00000434770
MEFVKCLGHPEEFYNLVRFRIGGKRKVMPKMDQQRSVHILSGSPSSGHTGR

SEQ ID NO: 30722 - protein, 113 aa, Homo sapiens
  Payload ID: 6022
  Gene Symbol: FDFT1
  Gene Name: farnesyl-diphosphate farnesyltransferase 1
  ENSP ID: ENSP00000435900
MRNAVCIFYLVLRALDTLEDDMTISVEKKVPLLHNFHSFLYQPDWRFMESKEKDRQVLEDFPTISLEFRNLAEKYQTVIADICRRMGIGMAEFLDKHVTSEQEWDKPQSLKTP

SEQ ID NO: 30723 - protein, 332 aa, Homo sapiens; identical to SEQ ID NO: 30714
  Payload ID: 6022
  Gene Symbol: FDFT1
  Gene Name: farnesyl-diphosphate farnesyltransferase 1
  Uniprot ID: P37268
  ENSP ID: ENSP00000436069

SEQ ID NO: 30724 - protein, 353 aa, Homo sapiens; identical to SEQ ID NO: 30715
  Payload ID: 6022
  Gene Symbol: FDFT1
  Gene Name: farnesyl-diphosphate farnesyltransferase 1
  Uniprot ID: P37268
  ENSP ID: ENSP00000444248

SEQ ID NO: 30725 - protein, 417 aa, Homo sapiens; identical to SEQ ID NO: 30712
  Payload ID: 6022
  Gene Symbol: FDFT1
  Gene Name: farnesyl-diphosphate farnesyltransferase 1
  Uniprot ID: P37268
  ENSP ID: ENSP00000480828

SEQ ID NO: 30726 - protein, 417 aa, Homo sapiens; identical to SEQ ID NO: 30712
  Payload ID: 6022
  Gene Symbol: FDFT1
  Gene Name: farnesyl-diphosphate farnesyltransferase 1
  Uniprot ID: P37268
  ENSP ID: ENSP00000481481

SEQ ID NO: 30727 - protein, 353 aa, Homo sapiens; identical to SEQ ID NO: 30715
  Payload ID: 6022
  Gene Symbol: FDFT1
  Gene Name: farnesyl-diphosphate farnesyltransferase 1
  Uniprot ID: P37268
  ENSP ID: ENSP00000484122

SEQ ID NO: 30728 - protein, 353 aa, Homo sapiens; identical to SEQ ID NO: 30715
  Payload ID: 6022
  Gene Symbol: FDFT1
  Gene Name: farnesyl-diphosphate farnesyltransferase 1
  Uniprot ID: P37268
  ENSP ID: ENSP00000485229

SEQ ID NO: 30729 - protein, 379 aa, Homo sapiens
  Payload ID: 6023
  Gene Symbol: FNTA
  Gene Name: farnesyltransferase, CAAX box, alpha
  Uniprot ID: P49354
  ENSP ID: ENSP00000303423
MAATEGVGEAAQGGEPGQPAQPPPQPHPPPPQQQHKEEMAAEAGEAVASPMDDGFVSLDSPSYVLYRDRAEWADIDPVPQNDGPNPVVQIIYSDKFRDVYDYFRAVLQRDERSERAFKLTRDAIELNAANYTVWHFRRVLLKSLQKDLHEEMNYITAIIEEQPKNYQVWHHRRVLVEWLRDPSQELEFIADILNQDAKNYHAWQHRQWVIQEFKLWDNELQYVDQLLKEDVRNNSVWNQRYFVISNTTGYNDRAVLEREVQYTLEMIKLVPHNESAWNYLKGILQDRGLSKYPNLLNQLLDLQPSHSSPYLIAFLVDIYEDMLENQCDNKEDILNKALELCEILAKEKDTIRKEYWRYIGRSLQSKHSTENDSPTNVQQ

SEQ ID NO: 30730 - protein, 196 aa, Homo sapiens
  Payload ID: 6023
  Gene Symbol: FNTA
  Gene Name: farnesyltransferase, CAAX box, alpha
  ENSP ID: ENSP00000432411
GVGEAAQGGEPGQPAQPPPQPHPPPPQQQHKEEMAAEAGEAVASPMDDGDRAEWADIDPVPQNDGPNPVVQIIYSDKFRDVYDYFRAVLQRDERSERAFKLTRDAIELNAANYTVWHFRRVLLKSLQKDLHEEMNYITAIIEEQPKNYQVWHHRRVLVEWLRDPSQELEFIADILNQDAKNYHAWQHRQWVIQEFK

SEQ ID NO: 30731 - protein, 117 aa, Homo sapiens
  Payload ID: 6023
  Gene Symbol: FNTA
  Gene Name: farnesyltransferase, CAAX box, alpha
  ENSP ID: ENSP00000432892
MAATEGVGEAAQGGEPGQPAQPPPQPHPPPPQQQHKEEMAAEAGEAVASPMDDGFVSLDSPSYVLYRHFRRVLLKSLQKDLHEEMNYITAIIEEQPKNYQVWNLNFGIMSCSMWTNF

SEQ ID NO: 30732 - protein, 249 aa, Homo sapiens
  Payload ID: 6023
  Gene Symbol: FNTA
  Gene Name: farnesyltransferase, CAAX box, alpha
  ENSP ID: ENSP00000434430
MSVFRDRAEWADIDPVPQNDGPNPVVQIIYSDKFRDVYDYFRAVLQRDERSERAFKLTRDAIELNAANYTVWHFRRVLLKSLQKDLHEEMNYITAIIEEQPKNYQVWHHRRVLVEWLRDPSQELEFIADILNQDAKNYHAWQHRQWVIQEFKLWDNELQYVDQLLKEDVRNNSVWNQRYFVISNTTGYNDRAVLEREVQYTLEMIKLVPHNESAWNYLKGILQDRGLSKYPNLLNQLLDLQPSHSSPYL

SEQ ID NO: 30733 - protein, 67 aa, Homo sapiens
  Payload ID: 6023
  Gene Symbol: FNTA
  Gene Name: farnesyltransferase, CAAX box, alpha
  ENSP ID: ENSP00000435455
MAATEGVGEAAQGGEPGQPAQPPPQPHPPPPQQQHKEEMAAEAGEAVASPMDDGFVSLDSPSYVLYS

SEQ ID NO: 30734 - protein, 60 aa, Homo sapiens
  Payload ID: 6023
  Gene Symbol: FNTA
  Gene Name: farnesyltransferase, CAAX box, alpha
  ENSP ID: ENSP00000436998
MNYITAIIEEQPKNYQVWHHRRVLVEWLRDPSQELEFIADILNQDAKNYHAWQHRQWVIQ

SEQ ID NO: 30735 - protein, 67 aa, Homo sapiens; identical to SEQ ID NO: 30733
  Payload ID: 6023
  Gene Symbol: FNTA
  Gene Name: farnesyltransferase, CAAX box, alpha
  ENSP ID: ENSP00000437208

SEQ ID NO: 30736 - protein, 228 aa, Homo sapiens
  Payload ID: 6023
  Gene Symbol: FNTA
  Gene Name: farnesyltransferase, CAAX box, alpha
  ENSP ID: ENSP00000473479
MNYITAIIEEQPKNYQVWHHRRVLVEWLRDPSQELEFIADILNQDAKNYHAWQHRQWVIQEFKLWDNELQYVDQLLKEDVRNNSVWNQRYFVISNTTGYNDRAVLEREVQYTLEMIKLVPHNESAWNYLKGILQDRGLSKYPNLLNQLLDLQPSHSSPYLIAFLVDIYEDMLENQCDNKEDILNKALELCEILAKEKDTIRKEYWRYIGRSLQSKHSTENDSPTNVQQ

SEQ ID NO: 30737 - protein, 437 aa, Homo sapiens
  Payload ID: 6024
  Gene Symbol: FNTB
  Gene Name: farnesyltransferase, CAAX box, beta
  Uniprot ID: P49356
  ENSP ID: ENSP00000246166
MASPSSFTYYCPPSSSPVWSEPLYSLRPEHARERLQDDSVETVTSIEQAKVEEKIQEVFSSYKFNHLVPRLVLQREKHFHYLKRGLRQLTDAYECLDASRPWLCYWILHSLELLDEPIPQIVATDVCQFLELCQSPEGGFGGGPGQYPHLAPTYAAVNALCIIGTEEAYDIINREKLLQYLYSLKQPDGSFLMHVGGEVDVRSAYCAASVASLTNIITPDLFEGTAEWIARCQNWEGGIGGVPGMEAHGGYTFCGLAALVILKRERSLNLKSLLQWVTSRQMRFEGGFQGRCNKLVDGCYSFWQAGLLPLLHRALHAQGDPALSMSHWMFHQQALQEYILMCCQCPAGGLLDKPGKSRDFYHTCYCLSGLSIAQHFGSGAMLHDVVLGVPENALQPTHPVYNIGPDKVIQATTYFLQKPVPGFEELKDETSAEPATD

SEQ ID NO: 30738 - protein, 490 aa, Homo sapiens
  Payload ID: 6025
  Gene Symbol: FAF1
  Gene Name: Fas (TNFRSF6) associated factor 1
  ENSP ID: ENSP00000360843
MILADFQACTGIENIDEAITLLEQNNWDLVAAINGVIPQENGILQSEYGGETIPGPAFNPASHPASAPTSSSSSAFRPVMPSRQIVERQPRMLDFRVEYRDRNVDVVLEDTCTVGEIKQILENELQIPVSKMLLKGWKTGDVEDSTVLKSLHLPKNNSLYVLTPDLPPPSSSSHAGALQEFSSRYGDCHPVFFIGSLEAAFQEAFYVKARDRKLLAIYLHHDESVLTNVFCSQMLCAESIVSYLSQNFITWAWDLTKDSNRARFLTMCNRHFGSVVAQTIRTQKTDQFPLFLIIMGKRSSNEVLNVIQGNTTVDELMMRLMAAMEIFTAQQQEDIKDEDEREARENVKREQDEAYRLSLEADRAKREAHEREMAEQFRLEQIRKEQEEEREAIRLSLEQALPPEPKEENAEPVSKLRIRTPSGEFLERRFLASNKLQIVFDFVASKGFPWDEYKLLSTFPRRDVTQLDPNKSLLEVKLFPQETLFLEAKE

SEQ ID NO: 30739 - protein, 650 aa, Homo sapiens
  Payload ID: 6025
  Gene Symbol: FAF1
  Gene Name: Fas (TNFRSF6) associated factor 1
  Uniprot ID: Q9UNN5
  ENSP ID: ENSP00000379457
MASNMDREMILADFQACTGIENIDEAITLLEQNNWDLVAAINGVIPQENGILQSEYGGETIPGPAFNPASHPASAPTSSSSSAFRPVMPSRQIVERQPRMLDFRVEYRDRNVDVVLEDTCTVGEIKQILENELQIPVSKMLLKGWKTGDVEDSTVLKSLHLPKNNSLYVLTPDLPPPSSSSHAGALQESLNQNFMLIITHREVQREYNLNFSGSSTIQEVKRNVYDLTSIPVRHQLWEGWPTSATDDSMCLAESGLSYPCHRLTVGRRSSPAQTREQSEEQITDVHMVSDSDGDDFEDATEFGVDDGEVFGMASSALRKSPMMPENAENEGDALLQFTAEFSSRYGDCHPVFFIGSLEAAFQEAFYVKARDRKLLAIYLHHDESVLTNVFCSQMLCAESIVSYLSQNFITWAWDLTKDSNRARFLTMCNRHFGSVVAQTIRTQKTDQFPLFLIIMGKRSSNEVLNVIQGNTTVDELMMRLMAAMEIFTAQQQEDIKDEDEREARENVKREQDEAYRLSLEADRAKREAHEREMAEQFRLEQIRKEQEEEREAIRLSLEQALPPEPKEENAEPVSKLRIRTPSGEFLERRFLASNKLQIVFDFVASKGFPWDEYKLLSTFPRRDVTQLDPNKSLLEVKLFPQETLFLEAKE

SEQ ID NO: 30740 - protein, 464 aa, Homo sapiens
  Payload ID: 6025
  Gene Symbol: FAF1
  Gene Name: Fas (TNFRSF6) associated factor 1
  ENSP ID: ENSP00000434929
MLIITHREVQREYNLNFSGSSTIQEVKRNVYDLTSIPVRHQLWEGWPTSATDDSMCLAESGLSYPCHRLTVGRRSSPAQTREQSEEQITDVHMVSDSDGDDFEDATEFGVDDGEVFGMASSALRKSPMMPENAENEGDALLQFTAEFSSRYGDCHPVFFIGSLEAAFQEAFYVKARDRKLLAIYLHHDESVLTNVFCSQMLCAESIVSYLSQNFITWAWDLTKDSNRARFLTMCNRHFGSVVAQTIRTQKTDQFPLFLIIMGKRSSNEVLNVIQGNTTVDELMMRLMAAMEIFTAQQQEDIKDEDEREARENVKREQDEAYRLSLEADRAKREAHEREMAEQFRLEQIRKEQEEEREAIRLSLEQALPPEPKEENAEPVSKLRIRTPSGEFLERRFLASNKLQIVFDFVASKGFPWDEYKLLSTFPRRDIPGLSRMGKHACSRSLYIHFMFFILILKTWIISCF

SEQ ID NO: 30741 - protein, 1092 aa, Homo sapiens
  Payload ID: 6026
  Gene Symbol: FBF1
  Gene Name: Fas (TNFRSF6) binding factor 1
  ENSP ID: ENSP00000324292
  MOD_RES (1)..(1): Any amino acid
XSLLGDDVFSTMAGLEEADAEVSGISEADPQALLQAMKDLDGMDADILGLKKSNSAPSKKAAKDPGKGELPNHPKPAGGAIPTKKSLPSPSSSGHQNRRFSSEDLEDPLRGLLSYDEGGITKQPPVTQSKTASDKSPSTVRDQGPSIPLTPGDTPIRKKEELLFDDGDDIMATLGFGDSPKAEKRQIGDQEGPRPARSTLDELLGRGMATKLLARPGTGEHREFKLDKKYQRPQDSEDMWGDEDFTFGAYQPTVVSSEGRQSRRQSVRFFADSGADPKGEPGSKQSPPMASSPIQPRKGGADWLGLKDEDLDLFPASPTREAHRESSVPVTPSVPPPASQHSTPAGLPPSRAKPPTEGAGSPAKASQASKLRASKEEKEDWLSHALSRKKSQGLAREQHAGTSEGLHLAGTAGHPPSGSQPLTSTQGLEHAAAGGSSGTTARERPCVRPGVSGSPVTQNHAASALPTGSPKRGTAPGDLSATEPATCFPSTQKPTEPSVPVQPLLPESLARSLLPSTEYQKQLLAAQVQLQCSPAELQAELLHSQARLAELEAQVRKLELERAQHELLLGSLQQQHQADLELIESAHRSRIKVLETSYQQREERLRRENEELSARYLSQCQEAEQARAELTAQHQRRLAAIAQEKDQEMERLRELQRASILDMRRDHEEQLQRLKLLKDREVDAATSATSHTRSLNSIIHQMEKFSSSLHELSSRVEASHLTTSQERELGIRQRDEQLRALQERLGQQQRDMEEERSRQQEVIGKMEARLNEQSRLLEQERWRVTAEQSKAESMQRALEEQRKVTAQQMAMERAELERAKSALLEEQKSVMLKCGEERRRLAAEWAEFSAQQKLSKERAEREAERALQVDTQREGTLISLAKEQAELKIRASELRAEEKQLAAERAALEQERQELRLEKERINATALRVKLRAEEVESMSKVASEKYEEGERALREAQQVQAEQQARLQAVQQQQERLRKQEQHMHQEHLSLAQQRLQLDRARQDLPSSLVGLFPRAQGPAASSQSALMPPAPTTRWCSQPPTGLDPSPLHLHARLALLRHMAEQDRDFLENEQFFLETLKKGSYNLTSHSA

SEQ ID NO: 30742 - protein, 1133 aa, Homo sapiens
  Payload ID: 6026
  Gene Symbol: FBF1
  Gene Name: Fas (TNFRSF6) binding factor 1
  Uniprot ID: Q8TES7
  ENSP ID: ENSP00000465132
MAPKTKKGCKVTLPEKPVKLASHTRDTTGVSQMFPSSKARTKSLLGDDVFSTMAGLEEADAEVSGISEADPQALLQAMKDLDGMDADILGLKKSNSAPSKKAAKDPGKGELPNHPKPAGGAIPTKKSLPSPSSSGHQNRRFSSEDLEDPLRGLLSYDEGGITKQPPVTQSKTASDKSPSTVRDQGPSIPLTPGDTPIRKKEELLFDDGDDIMATLGFGDSPKAEKRQIGDQEGPRPARSTLDELLGRGMATKLLARPGTGEHREFKLDKKYQRPQDSEDMWGDEDFTFGAYQPTVVSSEGRQSRRQSVSRFFADSGADPKGEPGSKQSPPMASSPIQPRKGGADWLGLKDEDLDLFPASPTREAHRESSVPVTPSVPPPASQHSTPAGLPPSRAKPPTEGAGSPAKASQASKLRASKEEKEDWLSHALSRKKSQGLAREQHAGTSEGLHLAGTAGHPPSGSQPLTSTQGLEHAAAGGSSGTTARERPCVRPGVSGSPVTQNHAASALPTGSPKRGTAPGDLSATEPATCFPSTQKPTEPSVPVQPLLPESLARSLLPSTEYQKQLLAAQVQLQCSPAELQAELLHSQARLAELEAQVRKLELERAQHELLLGSLQQQHQADLELIESAHRSRIKVLETSYQQREERLRRENEELSARYLSQCQEAEQARAELTAQHQRRLAAIAQEKDQEMERLRELQRASILDMRRDHEEQLQRLKLLKDREVDAATSATSHTRSLNSIIHQMEKFSSSLHELSSRVEASHLTTSQERELGIRQRDEQLRALQERLGQQQRDMEEERSRQQEVIGKMEARLNEQSRLLEQERWRVTAEQSKAESMQRALEEQRKVTAQQMAMERAELERAKSALLEEQKSVMLKCGEERRRLAAEWAEFSAQQKLSKERAEREAERALQVDTQREGTLISLAKQAELKIRASELRAEEKQLAAERAALEQERQELRLEKERINATALRVKLRAEEVESMSKVASEKYEEGERALREAQQVQAEQQARLQAVQQQQERLRKQEQHMHQEHLSLAQQRLQLDRARQDLPSSLVGLFPRAQGPAASSQSALMPPAPTTRWCSQPPTGLDPSPLHLHARLALLRHMAEQDRDFLENEQFFLETLKKGSYNLTSHSA

SEQ ID NO: 30743 - protein, 88 aa, Homo sapiens
  Payload ID: 6026
  Gene Symbol: FBF1
  Gene Name: Fas (TNFRSF6) binding factor 1
  ENSP ID: ENSP00000465937
LNEQSRLLEQERWRVTAEQSKAESMQRALEEQRKVTAQQMAMERAELERAKSALLEEQKSVMLKCGEERRRLAAEWAEFSAQQKLRAG

SEQ ID NO: 30744 - protein, 1148 aa, Homo sapiens
  Payload ID: 6026
  Gene Symbol: FBF1
  Gene Name: Fas (TNFRSF6) binding factor 1
  ENSP ID: ENSP00000467004
  MOD_RES (1)..(1): Any amino acid
XAPKTKKGCKGSIDDFLGDLLGDDMTLPEKPVKLASHTRDTTGVSQMFPSSKARTKSLLGDDVFSTMAGLEEADAEVSGISEADPQALLQAMKDLDGMDADILGLKKSNSAPSKKAAKDPGKGELPNHPKPAGGAIPTKKSLPSPSSSGHQNRRFSSEDLEDPLRGLLSYDEGGITKQPPVTQSKTASDKSPSTVRDQGPSIPLTPGDTPIRKKEELLFDDGDDIMATLGFGDSPKAEKRQIGDQEGPRPARSTLDELLGRGMATKLLARPGTGEHREFKLDKKYQRPQDSEDMWGDEDFTFGAYQPTVVSSEGRQSRRQSVSRFFADSGADPKGEPGSKQSPPMASSPIQPRKGGADWLGLKDEDLDLFPASPTREAHRESSVPVTPSVPPPASQHSTPAGLPPSRAKPPTEGAGSPAKASQASKLRASKEEKEDWLSHALSRKKSQGLAREQHAGTSEGLHLAGTAGHPPSGSQPLTSTQGLEHAAAGGSSGTTARERPCVRPGVSGSPVTQNHAASALPTGSPKRGTAPGDLSATEPATCFPSTQKPTEPSVPVQPLLPESLARSLLPSTEYQKQLLAAQVQLQCSPAELQAELLHSQARLAELEAQVRKLELERAQHELLLGSLQQQHQADLELIESAHRSRIKVLETSYQQREERLRRENEELSARYLSQCQEAEQARAELTAQHQRRLAAIAQEKDQEMERLRELQRASILDMRRDHEEQLQRLKLLKDREVDAATSATSHTRSLNSIIHQMEKFSSSLHELSSRVEASHLTTSQERELGIRQRDEQLRALQERLGQQQRDMEEERSRQQEVIGKMEARLNEQSRLLEQERWRVTAEQSKAESMQRALEEQRKVTAQQMAMERAELERAKSALLEEQKSVMLKCGEERRRLAAEWAEFSAQQKLSKERAEREAERALQVDTQREGTLISLAKEQAELKIRASELRAEEKQLAAERAALEQERQELRLEKERINATALRVKLRAEEVESMSKVASEKYEEGERALREAQQVQAEQQARLQAVQQQQERLRKQEQHMHQEHLSLAQQRLQLDRARQDLPSSLVGLFPRAQGPAASSQSALMPPAPTTRWCSQPPTGLDPSPLHLHARLALLRHMAEQDRDFLENEQFFLETLKKGSYNLTSHSA

SEQ ID NO: 30745 - protein, 150 aa, Homo sapiens
  Payload ID: 6026
  Gene Symbol: FBF1
  Gene Name: Fas (TNFRSF6) binding factor 1
  ENSP ID: ENSP00000467481
  MOD_RES (1)..(1): Any amino acid
XRESSVPVTPSVPPPASQHSTPAGLPPSRAKPPTEGAGSPAKASQASKLRASKEEKEDWLSHALSRKKSQGLAREQHAGTSEGLHLAGTAGHPPSGSLTWAFCHLHLERCLSSANLSPAHKGLSTQLLEGVLEQLHEKDRVSGLVSRGPL

SEQ ID NO: 30746 - protein, 92 aa, Homo sapiens
  Payload ID: 6026
  Gene Symbol: FBF1
  Gene Name: Fas (TNFRSF6) binding factor 1
  ENSP ID: ENSP00000468699
RARQDLPSSLVGLFPRAQGPAASSQSALMPPAPTTRWCSQPPTGLDPSPLHLHARLALLRHMAEQDRDFLENEQFFLETLKKGSYNLTSHSA

SEQ ID NO: 30747 - protein, 50 aa, Homo sapiens
  Payload ID: 6026
  Gene Symbol: FBF1
  Gene Name: Fas (TNFRSF6) binding factor 1
  ENSP ID: ENSP00000475294
MVGRVQSKMHGKRTCLPSCIPKDLDCMQHSGGWAARTRMETLEKSDRRWH

SEQ ID NO: 30748 - protein, 1133 aa, Homo sapiens
  Payload ID: 6026
  Gene Symbol: FBF1
  Gene Name: Fas (TNFRSF6) binding factor 1
  Uniprot ID: Q8TES7
  ENSP ID: ENSP00000486708
MAPKTKKGCKVTLPEKPVKLASHTRDTTGVSQMFPSSKARTKSLLGDDVFSTMAGLEEADAEVSGISEADPQALLQAMKDLDGMDADILGLKKSNSAPSKKAAKDPGKGELPNHPKPAGGAIPTKKSLPSPSSSGHQNRRFSSEDLEDPLRGLLSYDEGGITKQPPVTQSKTASDKSPSTVRDQGPSIPLTPGDTPIRKKEELLFDDGDDIMATLGFGDSPKAEKRQIGDQEGPRPARSTLDELLGRGMATKLLARPGTGEHREFKLDKKYQRPQDSEDMWGDEDFTFGAYQPTVVSSEGRQSRRQSVRFFADSGADPKGEPGSKQSPPMASSPIQPRKGGADWLGLKDEDLDLFPASPTREAHRESSVPVTPSVPPPASQHSTPAGLPPSRAKPPTEGAGSPAKASQASKLRASKEEKEDWLSHALSRKKSQGLAREQHAGTSEGLHLAGTAGHPPSGSQPLTSTQGLEHAAAGGSSGTTARERPCVRPGVSGSPVTQNHAASALPTGSPKRGTAPGDLSATEPATCFPSTQKPTEPSVPVQPLLPESLARSLLPSTEYQKQLLAAQVQLQCSPAELQAELLHSQARLAELEAQVRKLELERAQHELLLGSLQQQHQADLELIESAHRSRIKVLETSYQQREERLRRENEELSARYLSQCQEAEQARAELTAQHQRRLAAIAQEKDQEMERLRELQRASILDMRRDHEEQLQRLKLLKDREVDAATSATSHTRSLNSIIHQMEKFSSSLHELSSRVEASHLTTSQERELGIRQRDEQLRALQERLGQQQRDMEEERSRQQEVIGKMEARLNEQSRLLEQERWRVTAEQSKAESMQRALEEQRKVTAQQMAMERAELERAKSALLEEQKSVMLKCGEERRRLAAEWAEFSAQQKLSKERAEREAERALQVDTQREGTLISLAKEQAELKIRASELRAEEKQLAAERAALEQERQELRLEKERINATALRVKLRAEEVESMSKVASEKYEEGERALREAQQVQAEQQARLQAVQQQQERLRKQEQHMHQEHLSLAQQRLQLDRARQDLPSSLVGLFPRAQGPAASSQSALMPPAPTTRWCSQPPTGLDPSPLHLHARLALLRHMAEQDRDFLENEQFFLETLKKGSYNLTSHSA

SEQ ID NO: 30749 - protein, 208 aa, Homo sapiens
  Payload ID: 6027
  Gene Symbol: FADD
  Gene Name: Fas (TNFRSF6)-associated via death domain
  Uniprot ID: Q13158
  ENSP ID: ENSP00000301838
MDPFLVLLHSVSSSLSSSELTELKFLCLGRVGKRKLERVQSGLDLFSMLLEQNDLEPGHTELLRELLASLRRHDLLRRVDDFEAGAAAGAAPGEEDLCAAFNVICDNVGKDWRRLARQLKVSDTKIDSIEDRYPRNLTERVRESLRIWKNTEKENATVAHLVGALRSCQMNLVADLVQEVQQARDLQNRSGAMSPMSWNSDASTSEAS

SEQ ID NO: 30750 - protein, 213 aa, Homo sapiens
  Payload ID: 6028
  Gene Symbol: FAIM
  Gene Name: Fas apoptotic inhibitory molecule
  Uniprot ID: Q9NVQ4
  ENSP ID: ENSP00000342805
MLLPFIRTLPLLCYNHLLVSPDSATLSPPYSLEKMTDLVAVWDVALSDGVHKIEFEHGTTSGKRVVYVDGKEEIRKEWMFKLVGKETFYVGAAKTKATINIDAISGFAYEYTLEINGKSLKKYMEDRSKTTNTWVLHMDGENFRIVLEKDAMDVWCNGKKLETAGEFVDDGTETHFSIGNHDCYIKAVSSGKRKEGIIHTLIVDNREIPEIAS

SEQ ID NO: 30751 - protein, 201 aa, Homo sapiens
  Payload ID: 6028
  Gene Symbol: FAIM
  Gene Name: Fas apoptotic inhibitory molecule
  Uniprot ID: Q9NVQ4
  ENSP ID: ENSP00000353775
MASGDDSPIFEDDESPPYSLEKMTDLVAVWDVALSDGVHKIEFEHGTTSGKRVVYVDGKEEIRKEWMFKLVGKETFYVGAAKTKATINIDAISGFAYEYTLEINGKSLKKYMEDRSKTTNTWVLHMDGENFRIVLEKDAMDVWCNGKKLETAGEFVDDGTETHFSIGNHDCYIKAVSSGKRKEGIIHTLIVDNREIPEIAS

SEQ ID NO: 30752 - protein, 179 aa, Homo sapiens
  Payload ID: 6028
  Gene Symbol: FAIM
  Gene Name: Fas apoptotic inhibitory molecule
  Uniprot ID: Q9NVQ4
  ENSP ID: ENSP00000376754
MTDLVAVWDVALSDGVHKIEFEHGTTSGKRVVYVDGKEEIRKEWMFKLVGKETFYVGAAKTKATINIDAISGFAYEYTLEINGKSLKKYMEDRSKTTNTWVLHMDGENFRIVLEKDAMDVWCNGKKLETAGEFVDDGTETHFSIGNHDCYIKAVSSGKRKEGIIHTLIVDNREIPEIAS

SEQ ID NO: 30753 - protein, 179 aa, Homo sapiens; identical to SEQ ID NO: 30752
  Payload ID: 6028
  Gene Symbol: FAIM
  Gene Name: Fas apoptotic inhibitory molecule
  Uniprot ID: Q9NVQ4
  ENSP ID: ENSP00000376755

SEQ ID NO: 30754 - protein, 179 aa, Homo sapiens; identical to SEQ ID NO: 30752
  Payload ID: 6028
  Gene Symbol: FAIM
  Gene Name: Fas apoptotic inhibitory molecule
  Uniprot ID: Q9NVQ4
  ENSP ID: ENSP00000417642

SEQ ID NO: 30755 - protein, 128 aa, Homo sapiens
  Payload ID: 6028
  Gene Symbol: FAIM
  Gene Name: Fas apoptotic inhibitory molecule
  ENSP ID: ENSP00000420543
MTDLVAVWDVALSDGVHKIEFEHGTTSGKRVVYVDGKEEIRKEWMFKLVGKETFYVGAAKTKATINIDAISGFAYEYTLEINGKSLKKYMEDRSKTTNTWVLHMDGENFRIVLEKDAMDVWCNGKKLE

SEQ ID NO: 30756 - protein, 316 aa, Homo sapiens
  Payload ID: 6029
  Gene Symbol: FAIM2
  Gene Name: Fas apoptotic inhibitory molecule 2
  Uniprot ID: Q9BWQ8
  ENSP ID: ENSP00000321951
MTQGKLSVANKAPGTEGQQQVHGEKKEAPAVPSAPPSYEEATSGEGMKAGAFPPAPTAVPLHPSWAYVDPSSSSSYDNGFPTGDHELFTTFSWDDQKVRRVFVRKVYTILLIQLLVTLAVVALFTFCDPVKDYVQANPGWYWASYAVFFATYLTLACCSGPRRHFPWNLILLTVFTLSMAYLTGMLSSYYNTTSVLLCLGITALVCLSVTVFSFQTKFDFTSCQGVLFVLLMTLFFSGLILAILLPFQYVPWLHAVYAALGAGVFTLFLALDTQLLMGNRRHSLSPEEYIFGALNIYLDIIYIFTFFLQLFGTNRE

SEQ ID NO: 30757 - protein, 266 aa, Homo sapiens
  Payload ID: 6029
  Gene Symbol: FAIM2
  Gene Name: Fas apoptotic inhibitory molecule 2
  ENSP ID: ENSP00000446771
MVYTSHYKSPGRRPLKTHPTVTYWRVNEGSSSSYDNGFPTGDHELFTTFSWDDQKVRRVFVRKVYTILLIQLLVTLAVVALFTFCDPVKDYVQANPGWYWASYAVFFATYLTLACCSGPRRHFPWNLILLTVFTLSMAYLTGMLSSYYNTTSVLLCLGITALVCLSVTVFSFQTKFDFTSCQGVLFVLLMTLFFSGLILAILLPFQYVPWLHAVYAALGAGVFTLFLALDTQLLMGNRRHSLSPEEYIFGALNIYLDIIYIFTFFL

SEQ ID NO: 30758 - protein, 208 aa, Homo sapiens
  Payload ID: 6029
  Gene Symbol: FAIM2
  Gene Name: Fas apoptotic inhibitory molecule 2
  ENSP ID: ENSP00000447715
MTQGKLSVANKAPGTEGQQQVHGEKKEAPAVPSAPPSYEEATSGEGMKAGAFPPAPTAVPLHPSWAYVDPSSSSSYDNGFPTGDHELFTTFSWDDQKVRRVFVRKNPSHPQVYTILLIQLLVTLAVVALFTFCDPVKDYVQANPGWYWASYAVFFATYLTLACCSGPRRHFPWNLILLTVFTLSMAYLTGMLSSSTSPPARACSSCFS

SEQ ID NO: 30759 - protein, 111 aa, Homo sapiens
  Payload ID: 6029
  Gene Symbol: FAIM2
  Gene Name: Fas apoptotic inhibitory molecule 2
  ENSP ID: ENSP00000449360
MKAGAFPPAPTAVPLHPSWAYVDPSSSSSYDNGFPTGDHELFTTFSWDDQKVRRVFVRKVYTILLIQLLVTLAVVALFTFCDPVKDYVQANPGWYWASYAVFFATYLTLAC

SEQ ID NO: 30760 - protein, 248 aa, Homo sapiens
  Payload ID: 6029
  Gene Symbol: FAIM2
  Gene Name: Fas apoptotic inhibitory molecule 2
  ENSP ID: ENSP00000449711
MTQGKLSVANKAPGTEGQQQVHGEKKEAPAVPSAPPSYEEATSGEGMKAGAFPPAPTAVPLHPSWAYVDPSSSSSYDNGFPTGDHELFTTFSWDDQKVRRVFVRKVYTILLIQLLVTLAVVALFTFCDPVKDYVQANPGWYWASYAVFFATYLTLACCSGPRRHFPWNLILLTVFTLSMAYLTGMLSSYYNTTSVLLCLGITALVCLSVTVFSFQTKFDFTSCQGVLFVLLMTLFFSGLILAILLPFQ

SEQ ID NO: 30761 - protein, 145 aa, Homo sapiens
  Payload ID: 6029
  Gene Symbol: FAIM2
  Gene Name: Fas apoptotic inhibitory molecule 2
  ENSP ID: ENSP00000449957
  MOD_RES (1)..(1): Any amino acid
XYVQANPGWYWASYAVFFATYLTLACCSGPRRHFPWNLILLTVFTLSMAYLTGMLSSYYNTTSVLLCLGITALVCLSVTVFSFQTKFDFTSCQGVLFVLLMTLFFSGLILAILLPFQYFLALDTQLLMGNRRHSLSPEEYIFGAL

SEQ ID NO: 30762 - protein, 270 aa, Homo sapiens
  Payload ID: 6029
  Gene Symbol: FAIM2
  Gene Name: Fas apoptotic inhibitory molecule 2
  Uniprot ID: Q9BWQ8
  ENSP ID: ENSP00000450132
MKAGAFPPAPTAVPLHPSWAYVDPSSSSSYDNGFPTGDHELFTTFSWDDQKVRRVFVRKVYTILLIQLLVTLAVVALFTFCDPVKDYVQANPGWYWASYAVFFATYLTLACCSGPRRHFPWNLILLTVFTLSMAYLTGMLSSYYNTTSVLLCLGITALVCLSVTVFSFQTKFDFTSCQGVLFVLLMTLFFSGLILAILLPFQYVPWLHAVYAALGAGVFTLFLALDTQLLMGNRRHSLSPEEYIFGALNIYLDIIYIFTFFLQLFGTNRE

SEQ ID NO: 30763 - protein, 445 aa, Homo sapiens
  Payload ID: 6030
  Gene Symbol: FAF2
  Gene Name: Fas associated factor family member 2
  Uniprot ID: Q96CS3
  ENSP ID: ENSP00000261942
MAAPEERDLTQEQTEKLLQFQDLTGIESMDQCRHTLEQHNWNIEAAVQDRLNEQEGVPSVFNPPPSRPLQVNTADHRIYSYVVSRPQPRGLLGWGYYLIMLPFRFTYYTILDIFRFALRFIRPDPRSRVTDPVGDIVSFMHSFEEKYGRAHPVFYQGTYSQALNDAKRELRFLLVYLHGDDHQDSDEFCRNTLCAPEVISLINTRMLFWACSTNKPEGYRVSQALRENTYPFLAMIMLKDRRMTVVGRLEGLIQPDDLINQLTFIMDANQTYLVSERLEREERNQTQVLRQQQDEAYLASLRADQEKERKKREERERKRRKEEEVQQQKLAEERRRQNLQEEKERKLECLPPEPSPDDPESVKIIFKLPNDSRVERRFHFSQSLTVIHDFLFSLKESPEKFQIEANFPRRVLPCIPSEEWPNPPTLQEAGLSHTEVLFVQDLTDE

SEQ ID NO: 30764 - protein, 48 aa, Homo sapiens
  Payload ID: 6030
  Gene Symbol: FAF2
  Gene Name: Fas associated factor family member 2
  ENSP ID: ENSP00000424146
MDLTGIESMDQCRHTLEQHNWNIEAAVQDRLNEQEGVPSVFNPPPSRP

SEQ ID NO: 30765 - protein, 233 aa, Homo sapiens [sequence omitted]

SEQ ID NO: 30766 - protein, 220 aa, Homo sapiens
  Payload ID: 6031
  Gene Symbol: FAS
  Gene Name: Fas cell surface death receptor
  Uniprot ID: P25445
  ENSP ID: ENSP00000347426
MLGIWTLLPLVLTSVARLSSKSVNAQVTDINSKGLELRKTVTTVETQNLEGLHHDGQFCHKPCPPGERKARDCTVNGDEPDCVPCQEGKEYTDKAHFSSKCRRCRLCDEGHGLEVEINCTRTQNTKCRCKPNFFCNSTVCEHCDPCTKCEHGIIKECTLTSNTKCKEEGSRSNLGWLCLLLLPIPLIVWVKRKEVQKTCRKHRKENQGSHESPTLNPMLT

SEQ ID NO: 30767 - protein, 335 aa, Homo sapiens
  Payload ID: 6031
  Gene Symbol: FAS
  Gene Name: Fas cell surface death receptor
  Uniprot ID: P25445
  ENSP ID: ENSP00000347979
MLGIWTLLPLVLTSVARLSSKSVNAQVTDINSKGLELRKTVTTVETQNLEGLHHDGQFCHKPCPPGERKARDCTVNGDEPDCVPCQEGKEYTDKAHFSSKCRRCRLCDEGHGLEVEINCTRTQNTKCRCKPNFFCNSTVCEHCDPCTKCEHGIIKECTLTSNTKCKEEGSRSNLGWLCLLLLPIPLIVWVKRKEVQKTCRKHRKENQGSHESPTLNPETVAINLSDVDLSKYITTIAGVMTLSQVKGFVRKNGVNEAKIDEIKNDNVQDTAEQKVQLLRNWHQLHGKKEAYDTLIKDLKKANLCTLAEKIQTIILKDITSDSENSNFRNEIQSLV

SEQ ID NO: 30768 - protein, 314 aa, Homo sapiens
  Payload ID: 6031
  Gene Symbol: FAS
  Gene Name: Fas cell surface death receptor
  Uniprot ID: P25445
  ENSP ID: ENSP00000349896
MLGIWTLLPLVLTSVARLSSKSVNAQVTDINSKGLELRKTVTTVETQNLEGLHHDGQFCHKPCPPGERKARDCTVNGDEPDCVPCQEGKEYTDKAHFSSKCRRCRLCDEGHGLEVEINCTRTQNTKCRCKPNFFCNSTVCEHCDPCTKCEHGIIKECTLTSNTKCKEEVKRKEVQKTCRKHRKENQGSHESPTLNPETVAINLSDVDLSKYITTIAGVMTLSQVKGFVRKNGVNEAKIDEIKNDNVQDTAEQKVQLLRNWHQLHGKKEAYDTLIKDLKKANLCTLAEKIQTIILKDITSDSENSNFRNEIQSLV

SEQ ID NO: 30769 - protein, 103 aa, Homo sapiens
  Payload ID: 6031
  Gene Symbol: FAS
  Gene Name: Fas cell surface death receptor
  Uniprot ID: P25445
  ENSP ID: ENSP00000420975
MLGIWTLLPLVLTSVARLSSKSVNAQVTDINSKGLELRKTVTTVETQNLEGLHHDGQFCHKPCPPDVNMESSRNAHSPATPSAKRKDPDLTWGGFVFFFCQFH

SEQ ID NO: 30770 - protein, 132 aa, Homo sapiens
  Payload ID: 6031
  Gene Symbol: FAS
  Gene Name: Fas cell surface death receptor
  Uniprot ID: P25445
  ENSP ID: ENSP00000422453
MLGIWTLLPLVLTSVARLSSKSVNAQVTDINSKGLELRKTVTTVETQNLEGLHHDGQFCHKPCPPGERKARDCTVNGDEPDCVPCQEGKEYTDKAHFSSKCRRCRLCDEGHDVNMESSRNAHSPATPSAKRK

SEQ ID NO: 30771 - protein, 149 aa, Homo sapiens
  Payload ID: 6031
  Gene Symbol: FAS
  Gene Name: Fas cell surface death receptor
  Uniprot ID: P25445
  ENSP ID: ENSP00000423755
MLGIWTLLPLVLTSVARLSSKSVNAQVTDINSKGLELRKTVTTVETQNLEGLHHDGQFCHKPCPPGERKARDCTVNGDEPDCVPCQEGKEYTDKAHFSSKCRRCRLCDEGHDVNMESSRNAHSPATPSAKRKDPDLTWGGFVFFFCQFH

SEQ ID NO: 30772 - protein, 86 aa, Homo sapiens
  Payload ID: 6031
  Gene Symbol: FAS
  Gene Name: Fas cell surface death receptor
  Uniprot ID: P25445
  ENSP ID: ENSP00000424113
MLGIWTLLPLVLTSVARLSSKSVNAQVTDINSKGLELRKTVTTVETQNLEGLHHDGQFCHKPCPPDVNMESSRNAHSPATPSAKRK

SEQ ID NO: 30773 - protein, 149 aa, Homo sapiens; identical to SEQ ID NO: 30771
  Payload ID: 6031
  Gene Symbol: FAS
  Gene Name: Fas cell surface death receptor
  Uniprot ID: P25445
  ENSP ID: ENSP00000425159

SEQ ID NO: 30774 - protein, 216 aa, Homo sapiens
  Payload ID: 6031
  Gene Symbol: FAS
  Gene Name: Fas cell surface death receptor
  ENSP ID: ENSP00000477997
MLGIWTLLPLVLTSVARLSSKSVNAQVTDINSKGLELRKTVTTVETQNLEGLHHDGQFCHKPCPPGERKARDCTVNGDEPDCVPCQEGKEYTDKAHFSSKCRRCRLCDEGHGLEVEINCTRTQNTKCRCKPNFFCNSTVCEHCDPCTKCEHGIIKECTLTSNTKCKEEGSRSNLGWLCLLLLPIPLIVWVKRKEVQKTCRKHRKENQGSHESNFKS

SEQ ID NO: 30775 - protein, 254 aa, Homo sapiens
  Payload ID: 6031
  Gene Symbol: FAS
  Gene Name: Fas cell surface death receptor
  ENSP ID: ENSP00000484575
MLGIWTLLPLVLTSVARLSSKSVNAQVTDINSKGLELRKTVTTVETQNLEGLHHDGQFCHKPCPPGERKARDCTVNGDEPDCVPCQEGKEYTDKAHFSSKCRRCRLCDEGHGLEVEINCTRTQNTKCRCKPNFFCNSTVCEHCDPCTKCEHGIIKECTLTSNTKCKEEGSRSNLGWLCLLLLPIPLIVWVKRKEVQKTCRKHRKENQGSHESPTLNPETVAINLSDVDLSKYITTIAGVMTLSQVKGFVREWCQ

SEQ ID NO: 30776 - protein, 244 aa, Homo sapiens
  Payload ID: 6031
  Gene Symbol: FAS
  Gene Name: Fas cell surface death receptor
  ENSP ID: ENSP00000485876
MLGIWTLLPLVLTSVARLSSKSVNAQVTDINSKGLELRKTVTTVETQNLEGLHHDGQFCHKPCPPGERKARDCTVNGDEPDCVPCQEGKEYTDKAHFSSKCRRCRLCDEGHGLEVEINCTRTQNTKCRCKPNFFCNSTVCEHCDPCTKCEHGIIKECTLTSNTKCKEEGSRSNLGWLCLLLLPIPLIVWVKRKEVQKTCRKHRKENQGSHESPTLNPETVAINLSDVDLSKYHHYCWSHDTKSS

SEQ ID NO: 30777 - protein, 127 aa, Homo sapiens
  Payload ID: 6032
  Gene Symbol: FASLG
  Gene Name: Fas ligand (TNF superfamily, member 6)
  Uniprot ID: P48023
  ENSP ID: ENSP00000344739
MQQPFNYPYPQIYWVDSSASSPWAPPGTVLPCPTSVPRRPGQRRPPPPPPPPPLPPPPPPPPLPPLPLPPLKKRGNHSTGLCLLVMFFMVLVALVGLGLGMFQLFHLQKELAELREATPVHPLKKRS

SEQ ID NO: 30778 - protein, 281 aa, Homo sapiens
  Payload ID: 6032
  Gene Symbol: FASLG
  Gene Name: Fas ligand (TNF superfamily, member 6)
  Uniprot ID: P48023
  ENSP ID: ENSP00000356694
MQQPFNYPYPQIYWVDSSASSPWAPPGTVLPCPTSVPRRPGQRRPPPPPPPPPLPPPPPPPPLPPLPLPPLKKRGNHSTGLCLLVMFFMVLVALVGLGLGMFQLFHLQKELAELRESTSQMHTASSLEKQIGHPSPPPEKKELRKVAHLTGKSNSRSMPLEWEDTYGIVLLSGVKYKKGGLVINETGLYFVYSKVYFRGQSCNNLPLSHKVYMRNSKYPQDLVMMEGKMMSYCTTGQMWARSSYLGAVFNLTSADHLYVNVSELSLVNFEESQTFFGLYKL

SEQ ID NO: 30779 - protein, 549 aa, Homo sapiens
  Payload ID: 6033
  Gene Symbol: FASTK
  Gene Name: Fas-activated serine/threonine kinase
  Uniprot ID: Q14296
  ENSP ID: ENSP00000297532
MRRPRGEPGPRAPRPTEGATCAGPGESWSPSPNSMLRVLLSAQTSPARLSGLLLIPPVQPCCLGPSKWGDRPVGGGPSAGPVQGLQRLLEQAKSPGELLRWLGQNPSKVRAHHYSVALRRLGQLLGSRPRPPPVEQVTLQDLSQLIIRNCPSFDIHTIHVCLHLAVLLGFPSDGPLVCALEQERRLRLPPKPPPPLQPLLRGGQGLEAALSCPRFLRYPRQHLISSLAEARPEELTPHVMVLLAQHLARHRLREPQLLEAIAHFLVVQETQLSSKVVQKLVLPFGRLNYLPLEQQFMPCLERILAREAGVAPLATVNILMSLCQLRCLPFRALHFVFSPGFINYISGTPHALIVRRYLSLLDTAVELELPGYRGPRLPRRQQVPIFPQPLITDRARCKYSHKDIVAEGLRQLLGEEKYRQDLTVPPGYCTDFLLCASSSGAVLPVRTQDPFLPYPPRSCPQGQAASSATTRDPAQRVVLVLRERWHFCRDGRVLLGSRALRERHLGLMGYQLLPLPFEELESQRGLPQLKSYLRQKLQALGLRWGPEGG

SEQ ID NO: 30780 - protein, 408 aa, Homo sapiens
  Payload ID: 6033
  Gene Symbol: FASTK
  Gene Name: Fas-activated serine/threonine kinase
  Uniprot ID: Q14296
  ENSP ID: ENSP00000324817
MRRPRGEPGPRAPRPTEGATCAGPGESCFPSDGPLVCALEQERRLRLPPKPPPPLQPLLRGGQGLEAALSCPRFLRYPRQHLISSLAEARPEELTPHVMVLLAQHLARHRLREPQLLEAIAHFLVVQETQLSSKVVQKLVLPFGRLNYLPLEQQFMPCLERILAREAGVAPLATVNILMSLCQLRCLPFRALHFVFSPGFINYISGTPHALIVRRYLSLLDTAVELELPGYRGPRLPRRQQVPIFPQPLITDRARCKYSHKDIVAEGLRQLLGEEKYRQDLTVPPGYCTDFLLCASSSGAVLPVRTQDPFLPYPPRSCPQGQAASSATTRDPAQRVVLVLRERWHFCRDGRVLLGSRALRERHLGLMGYQLLPLPFEELESQRGLPQLKSYLRQKLQALGLRWGPEGG

SEQ ID NO: 30781 - protein, 522 aa, Homo sapiens
  Payload ID: 6033
  Gene Symbol: FASTK
  Gene Name: Fas-activated serine/threonine kinase
  Uniprot ID: Q14296
  ENSP ID: ENSP00000418516
MRRPRGEPGPRAPRPTEGATCAGPGESWSPSPNSMLRVLLSAQTSPARLSGLLLIPPVQPCCLGPSKWGDRPVGGGPSAGPVQGLQRLLEQAKSPGELLRWLGQNPSKVRAHHYSVALRRLGQLLGSRPRPPPVEQVTLQDLSQLIIRNCPSFDIHTIHVCLHLAVLLGFPSDGPLVCALEQERRLRLPPKPPPPLQPLLREARPEELTPHVMVLLAQHLARHRLREPQLLEAIAHFLVVQETQLSSKVVQKLVLPFGRLNYLPLEQQFMPCLERILAREAGVAPLATVNILMSLCQLRCLPFRALHFVFSPGFINYISGTPHALIVRRYLSLLDTAVELELPGYRGPRLPRRQQVPIFPQPLITDRARCKYSHKDIVAEGLRQLLGEEKYRQDLTVPPGYCTDFLLCASSSGAVLPVRTQDPFLPYPPRSCPQGQAASSATTRDPAQRVVLVLRERWHFCRDGRVLLGSRALRERHLGLMGYQLLPLPFEELESQRGLPQLKSYLRQKLQALGLRWGPEGG

SEQ ID NO: 30782 - protein, 465 aa, Homo sapiens [sequence omitted]

SEQ ID NO: 30783 - protein, 392 aa, Homo sapiens
  Payload ID: 6034
  Gene Symbol: FEZ1
  Gene Name: fasciculation and elongation protein zeta 1 (zygin I)
  Uniprot ID: Q99689
  ENSP ID: ENSP00000278919
MEAPLVSLDEEFEDLRPSCSEDPEEKPQCFYGSSPHHLEDPSLSELENFSSEIISFKSMEDLVNEFDEKLNVCFRNYNAKTENLAPVKNQLQIQEEEETLQDEEVWDALTDNYIPSLSEDWRDPNIEALNGNCSDTEIHEKEEEEFNEKSENDSGINEEPLLTADQVIEEIEEMMQNSPDPEEEEEVLEEEDGGETSSQADSVLLQEMQALTQTFNNNWSYEGLRHMSGSELTELLDQVEGAIRDFSEELVQQLARRDELEFEKEVKNSFITVLIEVQNKQKEQRELMKKRRKEKGLSLQSSRIEKGNQMPLKRFSMEGISNILQSGIRQTFGSSGTDKQYLNTVIPYEKKASPPSVEDLQMLTNILFAMKEDNEKVPTLLTDYILKVLCPT

SEQ ID NO: 30784 - protein, 104 aa, Homo sapiens
  Payload ID: 6034
  Gene Symbol: FEZ1
  Gene Name: fasciculation and elongation protein zeta 1 (zygin I)
  Uniprot ID: Q99689
  ENSP ID: ENSP00000393425
MEAPLVSLDEEFEDLRPSCSEDPEEKPQCFYGSSPHHLEDPSLSELENFSSEIISFKSMEDLVNEFDEKLNVCFRNYNAKTENLAPVKNQLQIQEEEETLQDEE

SEQ ID NO: 30785 - protein, 104 aa, Homo sapiens; identical to SEQ ID NO: 30784
  Payload ID: 6034
  Gene Symbol: FEZ1
  Gene Name: fasciculation and elongation protein zeta 1 (zygin I)
  Uniprot ID: Q99689
  ENSP ID: ENSP00000431521

SEQ ID NO: 30786 - protein, 79 aa, Homo sapiens
  Payload ID: 6034
  Gene Symbol: FEZ1
  Gene Name: fasciculation and elongation protein zeta 1 (zygin I)
  ENSP ID: ENSP00000434803
MEAPLVSLDEEFEDLRPSCSEDPEEKPQCFYGSSPHHLEDPSLSELENFSSEIISFKSMEDLVNEFDEKLNVCFRNYNA

SEQ ID NO: 30787 - protein, 207 aa, Homo sapiens
  Payload ID: 6034
  Gene Symbol: FEZ1
  Gene Name: fasciculation and elongation protein zeta 1 (zygin I)
  ENSP ID: ENSP00000463116
  MOD_RES (1)..(1): Any amino acid
XVWDALTDNYIPSLSEDWRDPNIEALNGNCSDTETYSIHREVFSNGLMDRINQLPVSLEPTQGRRPEVCLIHEKEEEEFNEKSENDSGINEEPLLTADQVIEEIEEMMQNSPDPEEEEEVLEEEDGGETSSQADSVLLQEMQALTQTFNNNWSYEGLRHMSGSELTELLDQVEGAIRDFSEELVQQLARRDELEFEKEVKNSFITVL

SEQ ID NO: 30788 - protein, 182 aa, Homo sapiens
  Payload ID: 6035
  Gene Symbol: FEZ2
  Gene Name: fasciculation and elongation protein zeta 2 (zygin II)
  ENSP ID: ENSP00000305843
MMQESPDPEDDETPTQSDRLSMLSQEIQTLKRSSTGSYEERVKRLSVSELNEILEEIETAIKEYSEELVQQLALRDELEFEKEVKNSFISVLIEVQNKQKEHKETAKKKKKLKNGSSQNGKNERSHMPGTYLTTVIPYEKKNGPPSVEDLQILTKILRAMKEDSEKVPSLLTDYILKVLCPT

SEQ ID NO: 30789 - protein, 245 aa, Homo sapiens
  Payload ID: 6035
  Gene Symbol: FEZ2
  Gene Name: fasciculation and elongation protein zeta 2 (zygin II)
  ENSP ID: ENSP00000350685
MPVDWKSSHTRTLHLLTLNLSEKGVSDSLLFDTSDDEELREQLDMHSIIVSCVNDEPLFTADQVIEEIEEMMQESPDPEDDETPTQSDRLSMLSQEIQTLKRSSTGSYEERVKRLSVSELNEILEEIETAIKEYSEELVQQLALRDELEFEKEVKNSFISVLIEVQNKQKEHKETAKKKKKLKNGSSQNGKNERSHMPGTYLTTVIPYEKKNGPPSVEDLQILTKILRAMKEDSEKVPSLLTDYI

SEQ ID NO: 30790 - protein, 380 aa, Homo sapiens
  Payload ID: 6035
  Gene Symbol: FEZ2
  Gene Name: fasciculation and elongation protein zeta 2 (zygin II)
  Uniprot ID: Q9UHY8
  ENSP ID: ENSP00000368547
MAADGDWQDFYEFQEPARSLLDQENCNASPEPGAEAGAEAGGGADGFPAPACSLEEKLSLCFRPSDPGAEPPRTAVRPITERSLLQGDEIWNALTDNYGNVMPVDWKSSHTRTLHLLTLNLSEKGVSDSLLFDTSDDEELREQLDMHSIIVSCVNDEPLFTADQVIEEIEEMMQESPDPEDDETPTQSDRLSMLSQEIQTLKRSSTGSYEERVKRLSVSELNEILEEIETAIKEYSEELVQQLALRDELEFEKEVKNSFISVLIEVQNKQKEHKETAKKKKKLKNGSSQNGKNERSHMPGTRFSMEGISNVIQNGLRHTFGNSGGEKQYLTTVIPYEKKNGPPSVEDLQILTKILRAMKEDSEKVPSLLTDYILKVLCPT

SEQ ID NO: 30791 - protein, 353 aa, Homo sapiens
  Payload ID: 6035
  Gene Symbol: FEZ2
  Gene Name: fasciculation and elongation protein zeta 2 (zygin II)
  Uniprot ID: Q9UHY8
  ENSP ID: ENSP00000385112
MAADGDWQDFYEFQEPARSLLDQENCNASPEPGAEAGAEAGGGADGFPAPACSLEEKLSLCFRPSDPGAEPPRTAVRPITERSLLQGDEIWNALTDNYGNVMPVDWKSSHTRTLHLLTLNLSEKGVSDSLLFDTSDDEELREQLDMHSIIVSCVNDEPLFTADQVIEEIEEMMQESPDPEDDETPTQSDRLSMLSQEIQTLKRSSTGSYEERVKRLSVSELNEILEEIETAIKEYSEELVQQLALRDELEFEKEVKNSFISVLIEVQNKQKEHKETAKKKKKLKNGSSQNGKNERSHMPGTYLTTVIPYEKKNGPPSVEDLQILTKILRAMKEDSEKVPSLLTDYILKVLCPT

SEQ ID NO: 30792 - protein, 305 aa, Homo sapiens
  Payload ID: 6035
  Gene Symbol: FEZ2
  Gene Name: fasciculation and elongation protein zeta 2 (zygin II)
  ENSP ID: ENSP00000390985
MAADGDWQDFYEFQEPARSLLDQENCNASPEPGAEAGAEAGGGADGFPAPACSLEEKLSLCFRPSDPGAEPPRTAVRPITERSLLQGDEIWNALTDNYGNVMPVDWKSSHTRTLHLLTLNLSEKGVSDSLLFDTSDDEELREQLDMHSIIVSCVNDEPLFTADQVIEEIEEMMQESPDPEDDETPTQSDRLSMLSQEIQTLKRSSTGSYEERVKRLSVSELNEILEEIETAIKEYSEELVQQLALRDELEFEKEVKNSFISVLIEVQNKQKEHKETAKKKKKLKNGSSQNGKNERSHMPGTFFVP

SEQ ID NO: 30793 - protein, 138 aa, Homo sapiens
  Payload ID: 6035
  Gene Symbol: FEZ2
  Gene Name: fasciculation and elongation protein zeta 2 (zygin II)
  ENSP ID: ENSP00000395619
  MOD_RES (1)..(1): Any amino acid
XILEEIETAIKEYSEELVQQLALRDELEFEKEVKNSFISVLIEVQNKQKEHKETAKKKKKLKNGSSQNGKNERSHMPGTYLTTVIPYEKKNGPPSVEDLQILTKILRAMKEDSEKVPSLLTDYILKEPIATICEQMKP

SEQ ID NO: 30794 - protein, 70 aa, Homo sapiens
  Payload ID: 6035
  Gene Symbol: FEZ2
  Gene Name: fasciculation and elongation protein zeta 2 (zygin II)
  ENSP ID: ENSP00000396982
  MOD_RES (1)..(1): Any amino acid
XSNVIQNGLRHTFGNSGGEKQYLTTVIPYEKKNGPPSVEDLQILTKILRAMKEDSEKVPSLLTDYILKGL

SEQ ID NO: 30795 - protein, 63 aa, Homo sapiens
  Payload ID: 6035
  Gene Symbol: FEZ2
  Gene Name: fasciculation and elongation protein zeta 2 (zygin II)
  ENSP ID: ENSP00000410879
MPVDWKSSHTRTLHLLTLNLSEKGVSDSLLFDTSDDEELREQLDMHSIIVSCVNDEPLFTADQ

SEQ ID NO: 30796 - protein, 183 aa, Homo sapiens
  Payload ID: 6035
  Gene Symbol: FEZ2
  Gene Name: fasciculation and elongation protein zeta 2 (zygin II)
  ENSP ID: ENSP00000415325
  MOD_RES (1)..(1): Any amino acid
XTLKRSSTGSYEERVKRLSVSELNEILEEIETAIKEYSEELVQQLALRDELEFEKEVKNSFISVLIEVQNKQKEHKETAKKKKKLKNGSSQNGKNERSHMPGTYLTTVIPYEKKNGPPSVEDLQILTKKRRLLVNNPVPLFLSPLFGNFKSGKQLSVLRAMKEDSEKVPSLLTDYILKVLCPT

SEQ ID NO: 30797 - protein, 493 aa, Homo sapiens
  Payload ID: 6036
  Gene Symbol: FSCN1
  Gene Name: fascin actin-bundling protein 1
  Uniprot ID: Q16658
  ENSP ID: ENSP00000371798
MTANGTAEAVQIQFGLINCGNKYLTAEAFGFKVNASASSLKKKQIWTLEQPPDEAGSAAVCLRSHLGRYLAADKDGNVTCEREVPGPDCRFLIVAHDDGRWSLQSEAHRRYFGGTEDRLSCFAQTVSPAEKWSVHIAMHPQVNIYSVTRKRYAHLSARPADEIAVDRDVPWGVDSLITLAFQDQRYSVQTADHRFLRHDGRLVARPEPATGYTLEFRSGKVAFRDCEGRYLAPSGPSGTLKAGKATKVGKDELFALEQSCAQVVLQAANERNVSTRQGMDLSANQDEETDQETFQLEIDRDTKKCAFRTHTGKYWTLTATGGVQSTASSKNASCYFDIEWRDRRITLRASNGKFVTSKKNGQLAASVETAGDSELFLMKLINRPIIVFRGEHGFIGCRKVTGTLDANRSSYDVFQLEFNDGAYNIKDSTGKYWTVGSDSAVTSSGDTPVDFFFEFCDYNKVAIKVGGRYLKGDHAGVLKASAETVDPASLWEY

SEQ ID NO: 30798 - protein, 137 aa, Homo sapiens
  Payload ID: 6036
  Gene Symbol: FSCN1
  Gene Name: fascin actin-bundling protein 1
  ENSP ID: ENSP00000383982
MDLSANQDEETDQETFQLEIDRDTKKCAFRTHTGKYWTLTATGGVQSTASSKNASCYFDIEWRDRRITLRASNGKFVTSKKNGQLAASVETAGDSELFLMKLINRPIIVFRGEHGFIGCRKVTGTLDANRSSYDVFQ

SEQ ID NO: 30799 - protein, 132 aa, Homo sapiens
  Payload ID: 6036
  Gene Symbol: FSCN1
  Gene Name: fascin actin-bundling protein 1
  ENSP ID: ENSP00000404506
MDLSANQDEETDQETFQLEIDRDTKKCAFRTHTGKYWTLTATGGVQSTASSKNASCYFDIEWRDRRITLRASNGKFVTSKKNGQLAASVETAGDSELFLMKLINRPIIVFRGEHGFIGCRKVTGTLDANRSS

SEQ ID NO: 30800 - protein, 120 aa, Homo sapiens
  Payload ID: 6036
  Gene Symbol: FSCN1
  Gene Name: fascin actin-bundling protein 1
  ENSP ID: ENSP00000409967
MDLSANQDEETDQETFQLEIDRDTKKCAFRTHTGKYWTLTATGGVQSTASSKNASCYFDIEWRDRRITLRASNGKFVTSKKNGQLAASVETAGDSELFLMKLINRPIIVFRGEHGFIGCR

SEQ ID NO: 30801 - protein, 516 aa, Homo sapiens
  Payload ID: 6037
  Gene Symbol: FSCN2
  Gene Name: fascin actin-bundling protein 2, retinal
  Uniprot ID: O14926
  ENSP ID: ENSP00000334665
MPTNGLHQVLKIQFGLVNDTDRYLTAESFGFKVNASAPSLKRKQTWVLEPDPGQGTAVLLRSSHLGRYLSAEEDGRVACEAEQPGRDCRFLVLPQPDGRWVLRSEPHGRFFGGTEDQLSCFATAVSPAELWTVHLAIHPQAHLLSVSRRRYVHLCPREDEMAADGDKPWGVDALLTLIFRSRRYCLKSCDSRYLRSDGRLVWEPEPRACYTLEFKAGKLAFKDCDGHYLAPVGPAGTLKAGRNTRPGKDELFDLEESHPQVVLVAANHRYVSVRQGVNVSANQDDELDHETFLMQIDQETKKCTFYSSTGGYWTLVTHGGIHATATQVSANTMFEMEWRGRRVALKASNGRYVCMKKNGQLAAISDFVGPPPRPAWTGKVAGGAAQQTLSPPGKDEEFTLKLINRPILVLRGLDGFVCHHRGSNQLDTNRSVYDVFHLSFSDGAYRIRGRDGGFWYTGSHGSVCSDGERAEDFVFEFRERGRLAIRARSGKYLRGGASGLLRADADAPAGTALWEY

SEQ ID NO: 30802 - protein, 492 aa, Homo sapiens
  Payload ID: 6037
  Gene Symbol: FSCN2
  Gene Name: fascin actin-bundling protein 2, retinal
  Uniprot ID: O14926
  ENSP ID: ENSP00000388716
MPTNGLHQVLKIQFGLVNDTDRYLTAESFGFKVNASAPSLKRKQTWVLEPDPGQGTAVLLRSSHLGRYLSAEEDGRVACEAEQPGRDCRFLVLPQPDGRWVLRSEPHGRFFGGTEDQLSCFATAVSPAELWTVHLAIHPQAHLLSVSRRRYVHLCPREDEMAADGDKPWGVDALLTLIFRSRRYCLKSCDSRYLRSDGRLVWEPEPRACYTLEFKAGKLAFKDCDGHYLAPVGPAGTLKAGRNTRPGKDELFDLEESHPQVVLVAANHRYVSVRQGVNVSANQDDELDHETFLMQIDQETKKCTFYSSTGGYWTLVTHGGIHATATQVSANTMFEMEWRGRRVALKASNGRYVCMKKNGQLAAISDFVGKDEEFTLKLINRPILVLRGLDGFVCHHRGSNQLDTNRSVYDVFHLSFSDGAYRIRGRDGGFWYTGSHGSVCSDGERAEDFVFEFRERGRLAIRARSGKYLRGGASGLLRADADAPAGTALWEY

SEQ ID NO: 30803 - protein, 498 aa, Homo sapiens
  Payload ID: 6038
  Gene Symbol: FSCN3
  Gene Name: fascin actin-bundling protein 3, testicular
  Uniprot ID: Q9NQT6
  ENSP ID: ENSP00000265825
MDETEWIHRHPKAEDLRVGLISWAGTYLTFEACKNTVTATAKSLGRRQTWEILVSNEHETQAVVRLKSVQGLYLLCECDGTVCYGRPRTSHHGCFLLRFHRNSKWTLQCLISGRYLESNGKDVFCTSHVLSAYHMWTPRPALHVHVILYSPIHRCYARADPTMGRIWVDAAVPCLEECGFLLHFRDGCYHLETSTHHFLSHVDRLFSQPSSQTAFHMQVRPGGLVALCDGEGGMLYPQGTHLLLGMGCNPMRGEEWFILQHCPTWVSLRSKTGRFISVIYDGEVRAASERLNRMSLFQFECDSESPTVQLRSANGYYLSQRRHRAVMADGHPLESDTFFRMHWNCGRIILQSCRGRFLGIAPNSLLMANVILPGPNEEFGILFANRSFLVLRGRYGYVGSSSGHDLIQCNQDQPDRIHLLPCRPGIYHFQAQGGSFWSITSFGTFRPWGKFALNFCIELQGSNLLTVLAPNGFYMRADQSGTLLADSEDITRECIWEF

SEQ ID NO: 30804 - protein, 79 aa, Homo sapiens
  Payload ID: 6038
  Gene Symbol: FSCN3
  Gene Name: fascin actin-bundling protein 3, testicular
  ENSP ID: ENSP00000402472
MDETEWIHRHPKAEDLRVGLISWAGTYLTFEACKNTVTATAKSLGRRQHRVVVSERREVESTGWLCQKEEKWRAQVDHS

SEQ ID NO: 30805 - protein, 147 aa, Homo sapiens
  Payload ID: 6038
  Gene Symbol: FSCN3
  Gene Name: fascin actin-bundling protein 3, testicular
  ENSP ID: ENSP00000473531
MWTPRPALHVHVILYSPIHRCYARADPTMGRIWVDAAVPCLEECGFLLHFRDGCYHLETSTHHFLSHVDRLFSQPSSQTAFHMQVRPGGLVALCDGEGGMLYPQGTHLLLGMGCNPMRGEEWFILQHCPTWVSLRSKTGRFISVIYD

SEQ ID NO: 30806 - protein, 253 aa, Homo sapiens
  Payload ID: 6039
  Gene Symbol: FASTKD1
  Gene Name: FAST kinase domains 1
  ENSP ID: ENSP00000396769
MKKTPVFLESLVTNMLRLRAICPFSWRVFQFRPISCEPLIIQMNKCTDEEQMFGFIERNKAILSEKQVGCAFDMLWKLQKQKTSLLKNAEYVRDHPQFLTLHNLATNKFKLMNDDTLVNVLYVTQQFDIKLLSEFSSCLADQHLYFSPLMGKIADIVHRNLETTQDLSSLSVLMVNISSLISRHFQQQLVNKTELLFDTIDSSEVNVAKSIAKFLRNVRYRYQPLLERCNNVFLSNVDHLDLDSISKILSVYK

SEQ ID NO: 30807 - protein, 276 aa, Homo sapiens
  Payload ID: 6039
  Gene Symbol: FASTKD1
  Gene Name: FAST kinase domains 1
  ENSP ID: ENSP00000399551
MKKTPVFLESLVTNMLRLRAICPFSWRVFQFRPISCEPLIIQMNKCTDEEQMFGFIERNKAILSEKQVGCAFDMLWKLQKQKTSLLKNAEYVRDHPQFLTLHNLATNKFKLMNDDTLVNVLYVTQQFAGEAHDPLVEALVTEAWRRLERFDIKLLSEFSSCLADQHLYFSPLMGKIADIVHRNLETTQDLSSLSVLMVNISSLISRHFQQQLVNKTELLFDTIDSSEVNVAKSIAKFLRNVRYRYQPLLERCNNVFLSNVDHLDLDSISKILSVYK

SEQ ID NO: 30808 - protein, 847 aa, Homo sapiens
  Payload ID: 6039
  Gene Symbol: FASTKD1
  Gene Name: FAST kinase domains 1
  Uniprot ID: Q53R41
  ENSP ID: ENSP00000400513
MKKTPVFLESLVTNMLRLRAICPFSWRVFQFRPISCEPLIIQMNKCTDEEQMFGFIERNKAILSEKQVGCAFDMLWKLQKQKTSLLKNAEYVRDHPQFLTLHNLATNKFKLMNDDTLVNVLYVTQQFAGEAHDPLVEALVTEAWRRLERFDIKLLSEFSSCLADQHLYFSPLMGKIADIVHRNLETTQDLSSLSVLMVNISSLISRHFQQQLVNKTELLFDTIDSSEVNVAKSIAKFLRNVRYRYQPLLERCNNVFLSNVDHLDLDSISKILSVYKFLQFNSFEFIIMAKKKLTEMIPLCNHPASFVKLFVALGPIAGPEEKKQLKSTMLLMSEDLTGEQALAVLGAMGDMESRNSCLIKRVTSVLHKHLDGYKPLELLKITQELTFLHFQRKEFFAKLRELLLSYLKNSFIPTEVSVLVRAISLLPSPHLDEVGISRIEAVLPQCDLNNLSSFATSVLRWIQHDHMYLDNMTAKQLKLLQKLDHYGRQRLQHSNSLDLLRKELKSLKGNTFPESLLEEMIATLQHFMDDINYINVGEIASFISSTDYLSTLLLDRIASVAVQQIEKIHPFTIPAIIRPFSVLNYDPPQRDEFLGTCVQHLNSYLGILDPFILVFLGFSLATLEYFPEDLLKAIFNIKFLARLDSQLEILSPSRSARVQFHLMELNRSVCLECPEFQIPWFHDRFCQQYNKGIGGMDGTQQQIFKMLAEVLGGINCVKASVLTPYYHKVDFECILDKRKKPLPYGSHNIALGQLPEMPWESNIEIVGSRLPPGAERIALEFLDSKALCRNIPHMKGKSAMKKRHLEILGYRVIQISQFEWNSMALSTKDARMDYLRECIFGEVKSCL

SEQ ID NO: 30809 - protein, 804 aa, Homo sapiens
  Payload ID: 6039
  Gene Symbol: FASTKD1
  Gene Name: FAST kinase domains 1
  Uniprot ID: Q53R41
  ENSP ID: ENSP00000403229
MKKTPVFLESLVTNMLRLRAICPFSWRVFQFRPISCEPLIIQMNKCTDEEQMFGFIERNKAILSEKQVGCAFDMLWKLQKQKTSLLKNAEYVRDHPQFLTLHNLATNKFKLMNDDTLVNVLYVTQQFAGEAHDPLVEALVTEAWRRLERFDIKLLSEFSSCLADQHLYFSPLMGKIADIVHRNLETTQDLSSLSVLMVNISSLISRHFQQQLVNKTELLFDTIDSSEVNVAKSIAKFLRNVRYRYQPLLERCNNVFLSNVDHLDLDSISKILSVYKFLQFNSFEFIIMAKKKLTEMIPLCNHPASFVKLFVALGPIAGPEEKKQLKSTMLLMSEDLTGEQALAVLGAMGDMESRNSCLIKRVTSVLHKHLDGYKPLELLKITQELTFLHFQRKEFFAKLRELLLSYLKNSFIPTEVSVLVRAISLLPSPHLDEVGISRIEAVLPQCDLNNLSSFATSVLRWIQHDHMYLDNMTAKQLKLLQKLDHYGRQRLQHSNSLDLLRKELKSLKGNTFPESLLEEMIATLQHFMDDINYINVGEIASFISSTDYLSTLLLDRIASVAVQQIEKIHPFTIPAIIRPFSVLNYDPPQRDEFLGTCVQHLNSYLGILDPFILVFLGFSLATLEYFPEDLLKAIFNIKFLARLDSQLESIGGMDGTQQQIFKMLAEVLGGINCVKASVLTPYYHKVDFECILDKRKKPLPYGSHNIALGQLPEMPWESNIEIVGSRLPPGAERIALEFLDSKALCRNIPHMKGKSAMKKRHLEILGYRVIQISQFEWNSMALSTKDARMDYLRECIFGEVKSCL

SEQ ID NO: 30810 - protein, 104 aa, Homo sapiens
  Payload ID: 6039
  Gene Symbol: FASTKD1
  Gene Name: FAST kinase domains 1
  ENSP ID: ENSP00000408667
MGKIADIVHRNLETTQDLSSLSVLMVNISSLISRHFQQQLVNKTELLFDTIDSSEVNVAKSIAKFLRNVRYRYQPLLERCNNVFLSNVDHLDLDSISKILSVYK

SEQ ID NO: 30811 - protein, 710 aa, Homo sapiens
  Payload ID: 6040
  Gene Symbol: FASTKD2
  Gene Name: FAST kinase domains 2
  Uniprot ID: Q9NYY8
  ENSP ID: ENSP00000236980
MLTTLKPFGSVSVESKMNNKAGSFFWNLRQFSTLVSTSRTMRLCCLGLCKPKIVHSNWNILNNFHNRMQSTDIIRYLFQDAFIFKSDVGFQTKGISTLTALRIERLLYAKRLFFDSKQSLVPVDKSDDELKKVNLNHEVSNEDVLTKETKPNRISSRKLSEECNSLSDVLDAFSKAPTFPSSNYFTAMWTIAKRLSDDQKRFEKRLMFSHPAFNQLCEHMMREAKIMQYKYLLFSLHAIVKLGIPQNTILVQTLLRVTQERINECDEICLSVLSTVLEAMEPCKNVHVLRTGFRILVDQQVWKIEDVFTLQVVMKCIGKDAPIALKRKLEMKALRELDRFSVLNSQHMFEVLAAMNHRSLILLDECSKVVLDNIHGCPLRIMINILQSCKDLQYHNLDLFKGLADYVAATFDIWKFRKVLFILILFENLGFRPVGLMDLFMKRIVEDPESLNMKNILSILHTYSSLNHVYKCQNKEQFVEVMASALTGYLHTISSENLLDAVYSFCLMNYFPLAPFNQLLQKDIISELLTSDDMKNAYKLHTLDTCLKLDDTVYLRDIALSLPQLPRELPSSHTNAKVAEVLSSLLGGEGHFSKDVHLPHNYHIDFEIRMDTNRNQVLPLSDVDTTSATDIQRVAVLCVSRSAYCLGSSHPRGFLAMKMRHLNAMGFHVILVNNWEMDKLEMEDAVTFLKTKIYSVEALPVAAVNVQSTQ

SEQ ID NO: 30812 - protein, 710 aa, Homo sapiens; identical to SEQ ID NO: 30811
  Payload ID: 6040
  Gene Symbol: FASTKD2
  Gene Name: FAST kinase domains 2
  Uniprot ID: Q9NYY8
  ENSP ID: ENSP00000384929

SEQ ID NO: 30813 - protein, 710 aa, Homo sapiens; identical to SEQ ID NO: 30811
  Payload ID: 6040
  Gene Symbol: FASTKD2
  Gene Name: FAST kinase domains 2
  Uniprot ID: Q9NYY8
  ENSP ID: ENSP00000385990

SEQ ID NO: 30814 - protein, 124 aa, Homo sapiens
  Payload ID: 6040
  Gene Symbol: FASTKD2
  Gene Name: FAST kinase domains 2
  ENSP ID: ENSP00000409927
MLTTLKPFGSVSVESKMNNKAGSFFWNLRQFSTLVSTSRTMRLCCLGLCKPKIVHSNWNILNNFHNRMQSTDIIRYLFQDAFIFKSDVGFQTKGISTLTALRIERLLYAKRLFFDSKQSLVPVD

SEQ ID NO: 30815 - protein, 662 aa, Homo sapiens
  Payload ID: 6041
  Gene Symbol: FASTKD3
  Gene Name: FAST kinase domains 3
  Uniprot ID: Q14CZ7
  ENSP ID: ENSP00000264669
MALITLRKNLYRLSDFQMHRALAALKNKPLNHVHKVVKERLCPWLCSRQPEPFGVKFHHAHCKKFHSKNGNDLHPLGGPVFSQVSDCDRLEQNVKNEESQMFYRRLSNLTSSEEVLSFISTMETLPDTMAAGALQRICEVEKKDGDQGLPKEILENSIFQALCFQFEKEPSQLSNTSLVTALQALILLHVDPQSSLLLNLVAECQNRLRKGGMEVRNLCILGESLITLHSSGCVTLELIINQLQGEKLETFTPEDIVALYRILQACTEKVDEHQTFLNKINNFSLSIVSNLSPKLISQMLTALVVLDQSQAFPLIIKLGKYVVRHVPHFTNEELRRVLEAFIYFGHHDTFFTKALEHRVAAVCLTLDPEVVCRVMEYCSRELILSKPILNAVAETFVCQTEKFSPRQISALMEPFGKLNYLPPNASALFRKLENVLFTHFNYFPPKSLLKLLHSCSLNECHPVNFLAKIFKPLFLQRLQGKESHLDTLSRAQLTQLFLASVLECPFYKGPKLLPKYQVKSFLTPCCSLETPVDSQLYRYVKIGLTNLLGARLYFAPKVLTPYCYTIDVEIKLDEEGFVLPSTANEDIHKRIALCIDGPKRFCSNSKHLLGKEAIKQRHLQLLGYQVVQIPYHEIGMLKSRRELVEYLQRKLFSQNTVHWLQE

SEQ ID NO: 30816 - protein, 608 aa, Homo sapiens
  Payload ID: 6041
  Gene Symbol: FASTKD3
  Gene Name: FAST kinase domains 3
  ENSP ID: ENSP00000421798
MALITLRKNLYRLSDFQMHRALAALKNKPLNHVHKVVKERLCPWLCSRQPEPFGVKFHHAHCKKFHSKNGNDLHPLGGPVFSQVSDCDRLEQNVKNEESQMFYRRLSNLTSSEEVLSFISTMETLPDTMAAGALQRICEVEKKDGDQGLPKEILENSIFQALCFQFEKEPSQLSNTSLVTALQALILLHVDPQSSLLLNLVAECQNRLRKGGMEVRNLCILGESLITLHSSGCVTLELIINQLQGEKLETFTPEDIVALYRILQACTEKVDEHQTFLNKINNFSLSIVSNLSPKLISQMLTALVVLDQSQAFPLIIKLGKYVVRHVPHFTNEELRRVLEAFIYFGHHDTFFTKALEHRVAAVCLTLDPEVVCRVMEYCSRELILSKPILNAVAETFVCQTEKFSPRQISALMEPFGKLNYLPPNASALFRKLENVLFTHFNYFPPKSLLKLLHSCSLNECHPVNFLAKIFKPLFLQRLQGKESHLDTLSRAQLTQLFLASVLECPFYKGPKLLPKYQVKSFLTPCCSLETPVDSQLYRYVKIGLTNLLGARLYFAPKVLTPYCYTIAFSPIDQCKVEGIKAKQRNEYRKIVFVRVSHEEFFLSSLTRC

SEQ ID NO: 30817 - protein, 181 aa, Homo sapiens
  Payload ID: 6041
  Gene Symbol: FASTKD3
  Gene Name: FAST kinase domains 3
  ENSP ID: ENSP00000422443
MHRALAALKNKPLNHVHKVVKERLCPWLCSRQPEPFGVKFHHAHCKKFHSKNGNDLHPLGGPVFSQVSDCDRLEQNVKNEESQMFYRRLSNLTSSEEVLSFISTMETLPDTMAAGALQRICEVEKKDGDQGLPKEILENSIFQALCFQFEKEPSQLSNTSLVTALQALILLHVDPQSSLLL

SEQ ID NO: 30818 - protein, 57 aa, Homo sapiens
  Payload ID: 6041
  Gene Symbol: FASTKD3
  Gene Name: FAST kinase domains 3
  ENSP ID: ENSP00000424568
MALITLRKNLYRLSDFQMHRALAALKNKPLNHVHKVVKERLCPWLCDTRTHYKSTSR

SEQ ID NO: 30819 - protein, 244 aa, Homo sapiens
  Payload ID: 6041
  Gene Symbol: FASTKD3
  Gene Name: FAST kinase domains 3
  ENSP ID: ENSP00000426008
MALITLRKNLYRLSDFQMHRALAALKNKPLNHVHKVVKERLCPWLCSRQPEPFGVKFHHAHCKKFHSKNGNDLHPLGGPVFSQVSDCDRLEQNVKNEESQMFYRRLSNLTSSEEVLSFISTMETLPDTMAAGALQRICEVEKKDGDQGLPKEILENSIFQALCFQFEKEPSQLSNTSLVTALQALILLHVDPQSSLLLNLVAECQNRLRKGGMEVRNLCILGESLITLHSSGCVTLELIINQLQ

SEQ ID NO: 30820 - protein, 764 aa, Homo sapiens
  Payload ID: 6042
  Gene Symbol: FASTKD5
  Gene Name: FAST kinase domains 5
  Uniprot ID: Q7L8L6
  ENSP ID: ENSP00000369618
MAATLKSLKLVRYRAFCSPSAFGAVRSVSYWNVSSTQHGGQDPPEHISLCHSAKKVKNICSTFSSRRILTTSSAHPGLEFSKTSSSKASTLQLGSPRATGVDEEDVEVFDSFENMRVFLQLRPEYRVHSYNASETSQLLSVSEGELILHKVRVNQNNLQAQVIVDYLCKLSSLPAEQHPVLLGSTSFALLCQLSVKKIQLFDTQDLINVLKAFVILGIPHSHSMLDVYETKCCHQVWEMNMDQLLLVADLWRYLGRKVPRFLNIFSSYLNLHWKDLSLSQLVHLIYVIGENRQVSQDLMQKLESLILKYIDLINLEEVGTICLGFFKSSTNLSEFVMRKIGDLACANIQHLSSRSLVNIVKMFRFTHVDHINFMKQIGEIAPQRIPSLGVQGVMHLTLYCSALRFLNEGVMNAVAASLPPRVAHCRSKDVAKILWSFGTLNYKPPNAEEFYSSLISEIHRKMPEFNQYPEHLPTCLLGLAFLEYFPVELIDFALSPGFVRLAQERTKFDLLKELYTLDGTVGIECPDYRGNRLSTHLQQEGSELLWYLAEKDMNSKPEFLETVFLLETMLGGPQYVKHHMILPHTRSSDLEVQLDVNLKPLPFNREATPAENVAKLRLEHVGVSLTDDLMNKLLKGKARGHFQGKTESEPGQQPMELENKAAVPLGGFLCNVADKSGAMEMAGLCPAACMQTPRMKLAVQFTNRNQYCYGSRDLLGLHNMKRRQLARLGYRVVELSYWEWLPLLKRTRLEKLAFLHEKVFTSAL

SEQ ID NO: 30821 - protein, 4588 aa, Homo sapiens
  Payload ID: 6043
  Gene Symbol: FAT1
  Gene Name: FAT atypical cadherin 1
  Uniprot ID: Q14517
  ENSP ID: ENSP00000406229
MGRHLALLLLLLLLFQHFGDSDGSQRLEQTPLQFTHLEYNVTVQENSAAKTYVGHPVKMGVYITHPAWEVRYKIVSGDSENLFKAEEYILGDFCFLRIRTKGGNTAILNREVKDHYTLIVKALEKNTNVEARTKVRVQVLDTNDLRPLFSPTSYSVSLPENTAIRTSIARVSATDADIGTNGEFYYSFKDRTDMFAIHPTSGVIVLTGRLDYLETKLYEMEILAADRGMKLYGSSGISSMAKLTVHIEQANECAPVITAVTLSPSELDRDPAYAIVTVDDCDQGANGDIASLSIVAGDLLQQFRTVRSFPGSKEYKVKAIGGIDWDSHPFGYNLTLQAKDKGTPPQFSSVKVIHVTSPQFKAGPVKFEKDVYRAEISEFAPPNTPVVMVKAIPAYSHLRYVFKSTPGKAKFSLNYNTGLISILEPVKRQQAAHFELEVTTSDRKASTKVLVKVLGANSNPPEFTQTAYKAAFDENVPIGTTVMSLSAVDPDEGENGYVTYSIANLNHVPFAIDHFTGAVSTSENLDYELMPRVYTLRIRASDWGLPYRREVEVLATITLNNLNDNTPLFEKINCEGTIPRDLGVGEQITTVSAIDADELQLVQYQIEAGNELDFFSLNPNSGVLSLKRSLMDGLGAKVSFHSLRITATDGENFATPLYINITVAASHKLVNLQCEETGVAKMLAEKLLQANKLHNQGEVEDIFFDSHSVNAHIPQFRSTLPTGIQVKENQPVGSSVIFMNSTDLDTGFNGKLVYAVSGGNEDSCFMIDMETGMLKILSPLDRETTDKYTLNITVYDLGIPQKAAWRLLHVVVVDANDNPPEFLQESYFVEVSEDKEVHSEIIQVEATDKDLGPNGHVTYSIVTDTDTFSIDSVTGVVNIARPLDRELQHEHSLKIEARDQAREEPQLFSTVVVKVSLEDVNDNPPTFIPPNYRVKVREDLPEGTVIMWLEAHDPDLGQSGQVRYSLLDHGEGNFDVDKLSGAVRIVQQLDFEKKQVYNLTVRAKDKGKPVSLSSTCYVEVEVVDVNENLHPPVFSSFVEKGTVKEDAPVGSLVMTVSAHDEDARRDGEIRYSIRDGSGVGVFKIGEETGVIETSDRLDRESTSHYWLTVFATDQGVVPLSSFIEIYIEVEDVNDNAPQTSEPVYYPEIMENSPKDVSVVQIEAFDPDSSSNDKLMYKITSGNPQGFFSIHPKTGLITTTSRKLDREQQDEHILEVTVTDNGSPPKSTIARVIVKILDENDNKPQFLQKFYKIRLPEREKPDRERNARREPLYHVIATDKDEGPNAEISYSIEDGNEHGKFFIEPKTGVVSSKRFSAAGEYDILSIKAVDNGRPQKSSTTRLHIEWISKPKPSLEPISFEESFFTFTVMESDPVAHMIGVISVEPPGIPLWFDITGGNYDSHFDVDKGTGTIIVAKPLDAEQKSNYNLTVEATDGTTTILTQVFIKVIDTNDHRPQFSTSKYEVVIPEDTAPETEILQISAVDQDEKNKLIYTLQSSRDPLSLKKFRLDPATGSLYTSEKLDHEAVHQHTLTVMVRDQDVPVKRNFARIVVNVSDTNDHAPWFTASSYKGRVYESAAVGSVVLQVTALDKDKGKNAEVLYSIESGNIGNSFMIDPVLGSIKTAKELDRSNQAEYDLMVKATDKGSPPMSEITSVRIFVTIADNASPKFTSKEYSVELSETVSIGSFVGMVTAHSQSSVVYEIKDGNTGDAFDINPHSGTIITQKALDFETLPIYTLIIQGTNMAGLSTNTTVLVHLQDENDNAPVFMQAEYTGLISESASINSVVLTDRNVPLVIRAADADKDSNALLVYHIVEPSVHTYFAIDSSTGAIHTVLSLDYEETSIFHFTVQVHDMGTPRLFAEYAANVTVHVIDINDCPPVFAKPLYEASLLLPTYKGVKVITVNATDADSSAFSQLIYSITEGNIGEKFSMDYKTGALTVQNTTQLRSRYELTVRASDGRFAGLTSVKINVKESKESHLKFTQDVYSAVVKENSTEAETLAVITAIGNPINEPLFYHILNPDRRFKISRTSGVLSTTGTPFDREQQEAFDVVVEVTEEHKPSAVAHVVVKVIVEDQNDNAPVFVNLPYYAVVKVDTEVGHVIRYVTAVDRDSGRNGEVHYYLKEHHEHFQIGPLGEISLKKQFELDTLNKEYLVTVVAKDGGNPAFSAEVIVPITVMNKAMPVFEKPFYSAEIAESIQVHSPVVHVQANSPEGLKVFYSITDGDPFSQFTINFNTGVINVIAPLDFEAHPAYKLSIRATDSLTGAHAEVFVDIIVDDINDNPPVFAQQSYAVTLSEASVIGTSVVQVRATDSDSEPNRGISYQMFGNHSKSHDHFHVDSSTGLISLLRTLDYEQSRQHTIFVRAVDGGMPTLSSDVIVTVDVTDLNDNPPLFEQQIYEARISEHAPHGHFVTCVKAYDADSSDIDKLQYSILSGNDHKHFVIDSATGIITLSNLHRHALKPFYSLNLSVSDGVFRSSTQVHVTVIGGNLHSPAFLQNEYEVELAENAPLHTLVMEVKTTDGDSGIYGHVTYHIVNDFAKDRFYINERGQIFTLEKLDRETPAEKVISVRLMAKDAGGKVAFCTVNVILTDDNDNAPQFRATKYEVNIGSSAAKGTSVVKVLASDADEGSNADITYAIEADSESVKENLEINKLSGVITTKESLIGLENEFFTFFVRAVDNGSPSKESVVLVYVKILPPEMQLPKFSEPFYTFTVSEDVPIGTEIDLIRAEHSGTVLYSLVKGNTPESNRDESFVIDRQSGRLKLEKSLDHETTKWYQFSILARCTQDDHEMVASVDVSIQVKDANDNSPVFESSPYEAFIVENLPGGSRVIQIRASDADSGTNGQVMYSLDQSQSVEVIESFAINMETGWITTLKELDHEKRDNYQIKVVASDHGEKIQLSSTAIVDVTVTDVNDSPPRFTAEIYKGTVSEDDPQGGVIAILSTTDADSEEINRQVTYFITGGDPLGQFAVETIQNEWKVYVKKPLDREKRDNYLLTITATDGTFSSKAIVEVKVLDANDNSPVCEKTLYSDTIPEDVLPGKLIMQISATDADIRSNAEITYTLLGSGAEKFKLNPDTGELKTSTPLDREEQAVYHLLVRATDGGGRFCQASIVLTLEDVNDNAPEFSADPYAITVFENTEPGTLLTRVQATDADAGLNRKILYSLIDSADGQFSINELSGIIQLEKPLDRELQAVYTLSLKAVDQGLPRRLTATGTVIVSVLDINDNPPVFEYREYGATVSEDILVGTEVLQVYAASRDIEANAEITYSIISGNEHGKFSIDSKTGAVFIIENLDYESSHEYYLTVEATDGGTPSLSDVATVNVNVTDINDNTPVFSQDTYTTVISEDAVLEQSVITVMADDADGPSNSHIHYSIIDGNQGSSFTIDPVRGEVKVTKLLDRETISGYTLTVQASDNGSPPRVNTTTVNIDVSDVNDNAPVFSRGNYSVIIQENKPVGFSVLQLVVTDEDSSHNGPPFFFTIVTGNDEKAFEVNPQGVLLTSSAIKRKEKDHYLLQVKVADNGKPQLSSLTYIDIRVIEESIYPPAILPLEIFITSSGEEYSGGVIGKIHATDQDVYDTLTYSLDPQMDNLFSVSSTGGKLIAHKKLDIGQYLLNVSVTDGKFTTVADITVHIRQVTQEMLNHTIAIRFANLTPEEFVGDYWRNFQRALRNILGVRRNDIQIVSLQSSEPHPHLDVLLFVEKPGSAQISTKQLLHKINSSVTDIEEIIGVRILNVFQKLCAGLDCPWKFCDEKVSVDESVMSTHSTARLSFVTPRHHRAAVCLCKEGRCPPVHHGCEDDPCPEGSECVSDPWEEKHTCVCPSGRFGQCPGSSSMTLTGNSYVKYRLTENENKLEMKLTMRLRTYSTHAVVMYARGTDYSILEIHHGRLQYKFDCGSGPGIVSVQSIQVNDGQWHAVALEVNGNYARLVLDQVHTASGTAPGTLKTLNLDNYVFFGGHIRQQGTRHGRSPQVGNGFRGCMDSIYLNGQELPLNSKPRSYAHIEESVDVSPGCFLTATEDCASNPCQNGGVCNPSPAGGYYCKCSALYIGTHCEISVNPCSSKPCLYGGTCVVDNGGFVCQCRGLYTGQRCQLSPYCKDEPCKNGGTCFDSLDGAVCQCDSGFRGERCQSDIDECSGNPCLHGALCENTHGSYHCNCSHEYRGRHCEDAAPNQYVSTPWNIGLAEGIGIVVFVAGIFLLVVVFVLCRKMISRKKKHQAEPKDKHLGPATAFLQRPYFDSKLNKNIYSDIPPQVPVRPISYTPSIPSDSRNNLDRNSFEGSAIPEHPEFSTFNPESVHGHRKAVAVCSVAPNLPPPPPSNSPSDSDSIQKPSWDFDYDTKVVDLDPCLSKKPLEEKPSQPYSARESLSEVQSLSSFQSESCDDNGYHWDTSDWMPSVPLPDIQEFPNYEVIDEQTPLYSADPNAIDTDYYPGGYDIESDFPPPPEDFPAADELPPLPPEFSNQFESIHPPRDMPAAGSLGSSSRNRQRFNLNQYLPNFYPLDMSEPQTKGTGENSTCREPHAPYPPGYQRHFEAPAVESMPMSVYASTASCSDVSACCEVESEVMMSDYESGDDGHFEEVTIPPLDSQQHTEV

SEQ ID NO: 30822 - protein, 119 aa, Homo sapiens
  Payload ID: 6043
  Gene Symbol: FAT1
  Gene Name: FAT atypical cadherin 1
  ENSP ID: ENSP00000420869
LSKKPLEEKPSQPYSARESLSEVQSLSSFQSESCDDNASIVTVMHLVNAVVDTVSTEESLAAPDLSKPRGYHWDTSDWMPSVPLPDIQEFPNYEVIDEQTPLYSADPNAIDTDYYPGGY

SEQ ID NO: 30823 - protein, 52 aa, Homo sapiens
  Payload ID: 6043
  Gene Symbol: FAT1
  Gene Name: FAT atypical cadherin 1
  ENSP ID: ENSP00000421003
MTMAVIVRNKEKKVIFEFSGQISGSSFRSHFPPLPYSILFVVHTFLSHLELS

SEQ ID NO: 30824 - protein, 488 aa, Homo sapiens
  Payload ID: 6043
  Gene Symbol: FAT1
  Gene Name: FAT atypical cadherin 1
  ENSP ID: ENSP00000423736
MGRHLALLLLLLLLFQHFGDSDGSQRLEQTPLQFTHLEYNVTVQENSAAKTYVGHPVKMGVYITHPAWEVRYKIVSGDSENLFKAEEYILGDFCFLRIRTKGGNTAILNREVKDHYTLIVKALEKNTNVEARTKVRVQVLDTNDLRPLFSPTSYSVSLPENTAIRTSIARVSATDADIGTNGEFYYSFKDRTDMFAIHPTSGVIVLTGRLDYLETKLYEMEILAADRGMKLYGSSGISSMAKLTVHIEQANECAPVITAVTLSPSELDRDPAYAIVTVDDCDQGANGDIASLSIVAGDLLQQFRTVRSFPGSKEYKVKAIGGIDWDSHPFGYNLTLQAKDKGTPPQFSSVKVIHVTSPQFKAGPVKFEKDVYRAEISEFAPPNTPVVMVKAIPAYSHLRYVFKSTPGKAKFSLNYNTGLISILEPVKRQQAAHFELEVTTSDRKASTKVLVKVLGANSNPPEFTQTAYKAAFDENVPIGTTVMSLSAV

SEQ ID NO: 30825 - protein, 285 aa, Homo sapiens
  Payload ID: 6043
  Gene Symbol: FAT1
  Gene Name: FAT atypical cadherin 1
  ENSP ID: ENSP00000423801
  MOD_RES (1)..(1): Any amino acid
XSTTEALFASVEDYILVRGVSLVHTAKMNPVRMAEHALTVWMAPFVSVIRVLGEKGVRVISTSALETLACTGPSVRTRTAPITATAATSTGDVTARMLRPTTKVVDLDPCLSKKPLEEKPSQPYSARESLSEVQSLSSFQSESCDDNGYHWDTSDWMPSVPLPDIQEFPNYEVIDEQTPLYSADPNAIDTDYYPGGYDIESDFPPPPEDFPAADELPPLPPEFSNQFESIHPPRDMPAAGSLGSSSRNRQRFNLNQYLPNFYPLDMSEPQTKGTGENSTCREPHA

SEQ ID NO: 30826 - protein, 368 aa, Homo sapiens
  Payload ID: 6043
  Gene Symbol: FAT1
  Gene Name: FAT atypical cadherin 1
  ENSP ID: ENSP00000424157
  MOD_RES (1)..(1): Any amino acid
XDSKLNKNIYSDIPPQVPVRPISYTPSIPSDSRNNLDRNSFEGSAIPEHPEFSTFNPESVHGHRKAVAVCSVAPNLPPPPPSNSPSDSDSIQKPSWDFDYDTKVVDLDPCLSKKPLEEKPSQPYSARESLSEVQSLSSFQSESCDDNESLAAPDLSKPRGYHWDTSDWMPSVPLPDIQEFPNYEVIDEQTPLYSADPNAIDTDYYPGGYDIESDFPPPPEDFPAADELPPLPPEFSNQFESIHPPRDMPAAGSLGSSSRNRQRFNLNQYLPNFYPLDMSEPQTKGTGENSTCREPHAPYPPGYQRHFEAPAVESMPMSVYASTASCSDVSACCEVESEVMMSDYESGDDGHFEEVTIPPLDSQQHTEV

SEQ ID NO: 30827 - protein, 4590 aa, Homo sapiens
  Payload ID: 6043
  Gene Symbol: FAT1
  Gene Name: FAT atypical cadherin 1
  ENSP ID: ENSP00000479573
MGRHLALLLLLLLLFQHFGDSDGSQRLEQTPLQFTHLEYNVTVQENSAAKTYVGHPVKMGVYITHPAWEVRYKIVSGDSENLFKAEEYILGDFCFLRIRTKGGNTAILNREVKDHYTLIVKALEKNTNVEARTKVRVQVLDTNDLRPLFSPTSYSVSLPENTAIRTSIARVSATDADIGTNGEFYYSFKDRTDMFAIHPTSGVIVLTGRLDYLETKLYEMEILAADRGMKLYGSSGISSMAKLTVHIEQANECAPVITAVTLSPSELDRDPAYAIVTVDDCDQGANGDIASLSIVAGDLLQQFRTVRSFPGSKEYKVKAIGGIDWDSHPFGYNLTLQAKDKGTPPQFSSVKVIHVTSPQFKAGPVKFEKDVYRAEISEFAPPNTPVVMVKAIPAYSHLRYVFKSTPGKAKFSLNYNTGLISILEPVKRQQAAHFELEVTTSDRKASTKVLVKVLGANSNPPEFTQTAYKAAFDENVPIGTTVMSLSAVDPDEGENGYVTYSIANLNHVPFAIDHFTGAVSTSENLDYELMPRVYTLRIRASDWGLPYRREVEVLATITLNNLNDNTPLFEKINCEGTIPRDLGVGEQITTVSAIDADELQLVQYQIEAGNELDFFSLNPNSGVLSLKRSLMDGLGAKVSFHSLRITATDGENFATPLYINITVAASHKLVNLQCEETGVAKMLAEKLLQANKLHNQGEVEDIFFDSHSVNAHIPQFRSTLPTGIQVKENQPVGSSVIFMNSTDLDTGFNGKLVYAVSGGNEDSCFMIDMETGMLKILSPLDRETTDKYTLNITVYDLGIPQKAAWRLLHVVVVDANDNPPEFLQESYFVEVSEDKEVHSEIIQVEATDKDLGPNGHVTYSIVTDTDTFSIDSVTGVVNIARPLDRELQHEHSLKIEARDQAREEPQLFSTVVVKVSLEDVNDNPPTFIPPNYRVKVREDLPEGTVIMWLEAHDPDLGQSGQVRYSLLDHGEGNFDVDKLSGAVRIVQQLDFEKKQVYNLTVRAKDKGKPVSLSSTCYVEVEVVDVNENLHPPVFSSFVEKGTVKEDAPVGSLVMTVSAHDEDARRDGEIRYSIRDGSGVGVFKIGEETGVIETSDRLDRESTSHYWLTVFATDQGVVPLSSFIEIYIEVEDVNDNAPQTSEPVYYPEIMENSPKDVSVVQIEAFDPDSSSNDKLMYKITSGNPQGFFSIHPKTGLITTTSRKLDREQQDEHILEVTVTDNGSPPKSTIARVIVKILDENDNKPQFLQKFYKIRLPEREKPDRERNARREPLYHVIATDKDEGPNAEISYSIEDGNEHGKFFIEPKTGVVSSKRFSAAGEYDILSIKAVDNGRPQKSSTTRLHIEWISKPKPSLEPISFEESFFTFTVMESDPVAHMIGVISVEPPGIPLWFDITGGNYDSHFDVDKGTGTIIVAKPLDAEQKSNYNLTVEATDGTTTILTQVFIKVIDTNDHRPQFSTSKYEVVIPEDTAPETEILQISAVDQDEKNKLIYTLQSSRDPLSLKKFRLDPATGSLYTSEKLDHEAVPAHLTVMVRDQDVPVKRNFARIVVNVSDTNDHAPWFTASSYKGRVYESAAVGSVVLQVTALDKDKGKNAEVLYSIESGTFGNIGNSFMIDPVLGSIKTAKELDRSNQAEYDLMVKATDKGSPPMSEITSVRIFVTIADNASPKFTSKEYSVELSETVSIGSFVGMVTAHSQSSVVYEIKDGNTGDAFDINPHSGTIITQKALDFETLPIYTLIIQGTNMAGLSTNTTVLVHLQDENDNAPVFMQAEYTGLISESASINSVVLTDRNVPLVIRAADADKDSNALLVYHIVEPSVHTYFAIDSSTGAIHTVLSLDYEETSIFHFTVQVHDMGTPRLFAEYAANVTVHVIDINDCPPVFAKPLYEASLLLPTYKGVKVITVNATDADSSAFSQLIYSITEGNIGEKFSMDYKTGALTVQNTTQLRSRYELTVRASDGRFAGLTSVKINVKESKESHLKFTQDVYSAVVKENSTEAETLAVITAIGNPINEPLFYHILNPDRRFKISRTSGVLSTTGTPFDREQQEAFDVVVEVTEEHKPSAVAHVVVKVIVEDQNDNAPVFVNLPYYAVVKVDTEVGHVIRYVTAVDRDSGRNGEVHYYLKEHHEHFQIGPLGEISLKKQFELDTLNKEYLVTVVAKDGGNPAFSAEVIVPITVMNKAMPVFEKPFYSAEIAESIQVHSPVVHVQANSPEGLKVFYSITDGDPFSQFTINFNTGVINVIAPLDFEAHPAYKLSIRATDSLTGAHAEVFVDIIVDDINDNPPVFAQQSYAVTLSEASVIGTSVVQVRATDSDSEPNRGISYQMFGNHSKSHDHFHVDSSTGLISLLRTLDYEQSRQHTIFVRAVDGGMPTLSSDVIVTVDVTDLNDNPPLFEQQIYEARISEHAPHGHFVTCVKAYDADSSDIDKLQYSILSGNDHKHFVIDSATGIITLSNLHRHALKPFYSLNLSVSDGVFRSSTQVHVTVIGGNLHSPAFLQNEYEVELAENAPLHTLVMEVKTTDGDSGIYGHVTYHIVNDFAKDRFYINERGQIFTLEKLDRETPAEKVISVRLMAKDAGGKVAFCTVNVILTDDNDNAPQFRATKYEVNIGSSAAKGTSVVKVLASDADEGSNADITYAIEADSESVKENLEINKLSGVITTKESLIGLENEFFTFFVRAVDNGSPSKESVVLVYVKILPPEMQLPKFSEPFYTFTVSEDVPIGTEIDLIRAEHSGTVLYSLVKGNTPESNRDESFVIDRQSGRLKLEKSLDHETTKWYQFSILARCTQDDHEMVASVDVSIQVKDANDNSPVFESSPYEAFIVENLPGGSRVIQIRASDADSGTNGQVMYSLDQSQSVEVIESFAINMETGWITTLKELDHEKRDNYQIKVVASDHGEKIQLSSTAIVDVTVTDVNDSPPRFTAEIYKGTVSEDDPQGGVIAILSTTDADSEEINRQVTYFITGGDPLGQFAVETIQNEWKVYVKKPLDREKRDNYLLTITATDGTFSSKAIVEVKVLDANDNSPVCEKTLYSDTIPEDVLPGKLIMQISATDADIRSNAEITYTLLGSGAEKFKLNPDTGELKTSTPLDREEQAVYHLLVRATDGGGRFCQASIVLTLEDVNDNAPEFSADPYAITVFENTEPGTLLTRVQATDADAGLNRKILYSLIDSADGQFSINELSGIIQLEKPLDRELQAVYTLSLKAVDQGLPRRLTATGTVIVSVLDINDNPPVFEYREYGATVSEDILVGTEVLQVYAASRDIEANAEITYSIISGNEHGKFSIDSKTGAVFIIENLDYESSHEYYLTVEATDGGTPSLSDVATVNVNVTDINDNTPVFSQDTYTTVISEDAVLEQSVITVMADDADGPSNSHIHYSIIDGNQGSSFTIDPVRGEVKVTKLLDRETISGYTLTVQASDNGSPPRVNTTTVNIDVSDVNDNAPVFSRGNYSVIIQENKPVGFSVLQLVVTDEDSSHNGPPFFFTIVTGNDEKAFEVNPQGVLLTSSAIKRKEKDHYLLQVKVADNGKPQLSSLTYIDIRVIEESIYPPAILPLEIFITSSGEEYSGGVIGKIHATDQDVYDTLTYSLDPQMDNLFSVSSTGGKLIAHKKLDIGQYLLNVSVTDGKFTTVADITVHIRQVTQEMLNHTIAIRFANLTPEEFVGDYWRNFQRALRNILGVRRNDIQIVSLQSSEPHPHLDVLLFVEKPGSAQISTKQLLHKINSSVTDIEEIIGVRILNVFQKLCAGLDCPWKFCDEKVSVDESVMSTHSTARLSFVTPRHHRAAVCLCKEGRCPPVHHGCEDDPCPEGSECVSDPWEEKHTCVCPSGRFGQCPGSSSMTLTGNSYVKYRLTENENKLEMKLTMRLRTYSTHAVVMYARGTDYSILEIHHGRLQYKFDCGSGPGIVSVQSIQVNDGQWHAVALEVNGNYARLVLDQVHTASGTAPGTLKTLNLDNYVFFGGHIRQQGTRHGRSPQVGNGFRGCMDSIYLNGQELPLNSKPRSYAHIEESVDVSPGCFLTATEDCASNPCQNGGVCNPSPAGGYYCKCSALYIGTHCEISVNPCSSKPCLYGGTCVVDNGGFVCQCRGLYTGQRCQLSPYCKDEPCKNGGTCFDSLDGAVCQCDSGFRGERCQSDIDECSGNPCLHGALCENTHGSYHCNCSHEYRGRHCEDAAPNQYVSTPWNIGLAEGIGIVVFVAGIFLLVVVFVLCRKMISRKKKHQAEPKDKHLGPATAFLQRPYFDSKLNKNIYSDIPPQVPVRPISYTPSIPSDSRNNLDRNSFEGSAIPEHPEFSTFNPESVHGHRKAVAVCSVAPNLPPPPPSNSPSDSDSIQKPSWDFDYDTKVVDLDPCLSKKPLEEKPSQPYSARESLSEVQSLSSFQSESCDDNGYHWDTSDWMPSVPLPDIQEFPNYEVIDEQTPLYSADPNAIDTDYYPGGYDIESDFPPPPEDFPAADELPPLPPEFSNQFESIHPPRDMPAAGSLGSSSRNRQRFNLNQYLPNFYPLDMSEPQTKGTGENSTCREPHAPYPPGYQRHFEAPAVESMPMSVYASTASCSDVSACCEVESEVMMSDYESGDDGHFEEVTIPPLDSQQHTEV

SEQ ID NO: 30828 - protein, 4349 aa, Homo sapiens
  Payload ID: 6044
  Gene Symbol: FAT2
  Gene Name: FAT atypical cadherin 2
  Uniprot ID: Q9NYQ8
  ENSP ID: ENSP00000261800
MTIALLGFAIFLLHCATCEKPLEGILSSSAWHFTHSHYNATIYENSSPKTYVESFEKMGIYLAEPQWAVRYRIISGDVANVFKTEEYVVGNFCFLRIRTKSSNTALLNREVRDSYTLIIQATEKTLELEALTRVVVHILDQNDLKPLFSPPSYRVTISEDMPLKSPICKVTATDADLGQNAEFYYAFNTRSEMFAIHPTSGVVTVAGKLNVTWRGKHELQVLAVDRMRKISEGNGFGSLAALVVHVEPALRKPPAIASVVVTPPDSNDGTTYATVLVDANSSGAEVESVEVVGGDPGKHFKAIKSYARSNEFSLVSVKDINWMEYLHGFNLSLQARSGSGPYFYSQIRGFHLPPSKLSSLKFEKAVYRVQLSEFSPPGSRVVMVRVTPAFPNLQYVLKPSSENVGFKLNARTGLITTTKLMDFHDRAHYQLHIRTSPGQASTVVVIDIVDCNNHAPLFNRSSYDGTLDENIPPGTSVLAVTATDRDHGENGYVTYSIAGPKALPFSIDPYLGIISTSKPMDYELMKRIYTFRVRASDWGSPFRREKEVSIFLQLRNLNDNQPMFEEVNCTGSIRQDWPVGKSIMTMSAIDVDELQNLKYEIVSGNELEYFDLNHFSGVISLKRPFINLTAGQPTSYSLKITASDGKNYASPTTLNITVVKDPHFEVPVTCDKTGVLTQFTKTILHFIGLQNQESSDEEFTSLSTYQINHYTPQFEDHFPQSIDVLESVPINTPLARLAATDPDAGFNGKLVYVIADGNEEGCFDIELETGLLTVAAPLDYEATNFYILNVTVYDLGTPQKSSWKLLTVNVKDWNDNAPRFPPGGYQLTISEDTEVGTTIAELTTKDADSEDNGRVRYTLLSPTEKFSLHPLTGELVVTGHLDRESEPRYILKVEARDQPSKGHQLFSVTDLIITLEDVNDNSPQCITEHNRLKVPEDLPPGTVLTFLDASDPDLGPAGEVRYVLMDGAHGTFRVDLMTGALILERELDFERRAGYNLSLWASDGGRPLARRTLCHVEVIVLDVNENLHPPHFASFVHQGQVQENSPSGTQVIVVAAQDDDSGLDGELQYFLRAGTGLAAFSINQDTGMIQTLAPLDREFASYYWLTVLAVDRGSVPLSSVTEVYIEVTDANDNPPQMSQAVFYPSIQEDAPVGTSVLQLDAWDPDSSSKGKLTFNITSGNYMGFFMIHPVTGLLSTAQQLDRENKDEHILEVTVLDNGEPSLKSTSRVVVGILDVNDNPPIFSHKLFNVRLPERLSPVSPGPVYRLVASDLDEGLNGRVTYSIEDSDEEAFSIDLVTGVVSSSSTFTAGEYNILTIKATDSGQPPLSASVRLHIEWIPWPRPSSIPLAFDETYYSFTVMETDPVNHMVGVISVEGRPGLFWFNISGGDKDMDFDIEKTTGSIVIARPLDTRRRSNYNLTVEVTDGSRTIATQVHIFMIANINHHRPQFLETRYEVRVPQDTVPGVELLRVQAIDQDKGKSLIYTIHGSQDPGSASLFQLDPSSGVLVTVGKLDLGSGPSQHTLTVMVRDQEIPIKRNFVWVTIHVEDGNLHPPRFTQLHYEASVPDTIAPGTELLQVRAMDADRGVNAEVHYSLLKGNSEGFFNINALLGIITLAQKLDQANHAPHTLTVKAEDQGSPQWHDLATVIIHVYPSDRSAPIFSKSEYFVEIPESIPVGSPILLVSAMSPSEVTYELREGNKDGVFSMNSYSGLISTQKKLDHEKISSYQLKIRGSNMAGAFTDVMVVVDIIDENDNAPMFLKSTFVGQISEAAPLYSMIMDKNNNPFVIHASDSDKEANSLLVYKILEPEALKFFKIDPSMGTLTIVSEMDYESMPSFQFCVYVHDQGSPVLFAPRPAQVIIHVRDVNDSPPRFSEQIYEVAIVGPIHPGMELLMVRASDEDSEVNYSIKTGNADEAVTIHPVTGSISVLNPAFLGLSRKLTIRASDGLYQDTALVKISLTQVLDKSLQFDQDVYWAAVKENLQDRKALVILGAQGNHLNDTLSYFLLNGTDMFHMVQSAGVLQTRGVAFDREQQDTHELAVEVRDNRTPQRVAQGLVRVSIEDVNDNPPKFKHLPYYTIIQDGTEPGDVLFQVSATDEDLGTNGAVTYEFAEDYTYFRIDPYLGDISLKKPFDYQALNKYHLKVIARDGGTPSLQSEEEVLVTVRNKSNPLFQSPYYKVRVPENITLYTPILHTQARSPEGLRLIYNIVEEEPLMLFTTDFKTGVLTVTGPLDYESKTKHVFTVRATDTALGSFSEATVEVLVEDVNDNPPTFSQLVYTTSISEGLPAQTPVIQLLASDQDSGRNRDVSYQIVEDGSDVSKFFQINGSTGEMSTVQELDYEAQQHFHVKVRAMDKGDPPLTGETLVVVNVSDINDNPPEFRQPQYEANVSELATCGHLVLKVQAIDPDSRDTSRLEYLILSGNQDRHFFINSSSGIISMFNLCKKHLDSSYNLRVGASDGVFRATVPVYINTTNANKYSPEFQQHLYEAELAENAMVGTKVIDLLAIDKDSGPYGTIDYTIINKLASEKFSINPNGQIATLQKLDRENSTERVIAIKVMARDGGGRVAFCTVKIILTDENDNPPQFKASEYTVSIQSNVSKDSPVIQVLAYDADEGQNADVTYSVNPEDLVKDVIEINPVTGVVKVKDSLVGLENQTLDFFIKAQDGGPPHWNSLVPVRLQVVPKKVSLPKFSEPLYTFSAPEDLPEGSEIGIVKAVAAQDPVIYSLVRGTTPESNKDGVFSLDPDTGVIKVRKPMDHESTKLYQIDVMAHCLQNTDVVSLVSVNIQVGDVNDNRPVFEADPYKAVLTENMPVGTSVIQVTAIDKDTGRDGQVSYRLSADPGSNVHELFAIDSESGWITTLQELDCETCQTYHFHVVAYDHGQTIQLSSQALVQVSITDENDNAPRFASEEYRGSVVENSEPGELVATLKTLDADISEQNRQVTCYITEGDPLGQFGISQVGDEWRISSRKTLDREHTAKYLLRVTASDGKFQASVTVEIFVLDVNDNSPQCSQLLYTGKVHEDVFPGHFILKVSATDLDTDTNAQITYSLHGPGAHEFKLDPHTGELTTLTALDRERKDVFNLVAKATDGGGRSCQADITLHVEDVNDNAPRFFPSHCAVAVFDNTTVKTPVAVVFARDPDQGANAQVVYSLPDSAEGHFSIDATTGVIRLEKPLQVRPQAPLELTVRASDLGTPIPLSTLGTVTVSVVGLEDYLPVFLNTEHSVQVPEDAPPGTEVLQLATLTRPGAEKTGYRVVSGNEQGRFRLDARTGILYVNASLDFETSPKYFLSIECSRKSSSSLSDVTTVMVNITDVNEHRPQFPQDPYSTRVLENALVGDVILTVSATDEDGPLNSDITYSLIGGNQLGHFTIHPKKGELQVAKALDREQASSYSLKLRATDSGQPPLHEDTDIAIQVADVNDNPPRFFQLNYSTTVQENSPIGSKVLQLILSDPDSPENGPPYSFRITKGNNGSAFRVTPDGWLVTAEGLSRRAQEWYQLQIQASDSGIPPLSSLTSVRVHVTEQSHYAPSALPLEIFITVGEDEFQGGMVGKIHATDRDPQDTLTYSLAEEETLGRHFSVGAPDGKIIAAQGLPRGHYSFNVTVSDGTFTTTAGVHVYVWHVGQEALQQAMWMGFYQLTPEELVSDHWRNLQRFLSHKLDIKRANIHLASLQPAEAVAGVDVLLVFEGHSGTFYEFQELASIITHSAKEMEHSVGVQMRSAMPMVPCQGPTCQGQICHNTVHLDPKVGPTYSTARLSILTPRHHLQRSCSCNGTATRFSGQSYVRYRAPAARNWHIHFYLKTLQPQAILLFTNETASVSLKLASGVPQLEYHCLGGFYGNLSSQRHVNDHEWHSILVEEMDASIRLMVDSMGNTSLVVPENCRGLRPERHLLLGGLILLHSSSNVSQGFEGCLDAVVVNEEALDLLAPGKTVAGLLETQALTQCCLHSDYCSQNTCLNGGKCSWTHGAGYVCKCPPQFSGKHCEQGRENCTFAPCLEGGTCILSPKGASCNCPHPYTGDRCEMEARGCSEGHCLVTPEIQRGDWGQQELLIITVAVAFIIISTVGLLFYCRRCKSHKPVAMEDPDLLARSVGVDTQAMPAIELNPLSASSCNNLNQPEPSKASVPNELVTFGPNSKQRPVVCSVPPRLPPAAVPSHSDNEPVIKRTWSSEEMVYPGGAMVWPPTYSRNERWEYPHSEVTQGPLPPSAHRHSTPVVMPEPNGLYGGFPFPLEMENKRAPLPPRYSNQNLEDLMPSRPPSPRERLVAPCLNEYTAISYYHSQFRQGGGGPCLADGGYKGVGMRLSRAGPSYAVCEVEGAPLAGQGQPRVPPNYEGSDMVESDYGSCEEVMF

SEQ ID NO: 30829 - protein, 1122 aa, Homo sapiens
  Payload ID: 6044
  Gene Symbol: FAT2
  Gene Name: FAT atypical cadherin 2
  ENSP ID: ENSP00000429678
  MOD_RES (1)..(1): Any amino acid
XGANAQVVYSLPDSAEGHFSIDATTGVIRLEKPLQVRPQAPLELTVRASDLGTPIPLSTLGTVTVSVVGLEDYLPVFLNTEHSVQVPEDAPPGTEVLQLATLTRPGAEKTGYRVVSGNEQGRFRLDARTGILYVNASLDFETSPKYFLSIECSRKSSSSLSDVTTVMVNITDVNEHRPQFPQDPYSTRVLENALVGDVILTVSATDEDGPLNSDITYSLIGGNQLGHFTIHPKKGELQVAKALDREQASSYSLKLRATDSGQPPLHEDTDIAIQVADVNDNPPRFFQLNYSTTVQENSPIGSKVLQLILSDPDSPENGPPYSFRITKGNNGSAFRVTPDGWLVTAEGLSRRAQEWYQLQIQASDSGIPPLSSLTSVRVHVTEQSHYAPSALPLEIFITVGEDEFQGGMVGKIHATDRDPQDTLTYSLAEEETLGRHFSVGAPDGKIIAAQGLPRGHYSFNVTVSDGTFTTTAGVHVYVWHVGQEALQQAMWMGFYQLTPEELVSDHWRNLQRFLSHKLDIKRANIHLASLQPAEAVAGVDVLLVFEGHSGTFYEFQELASIITHSAKEMEHSVGVQMRSAMPMVPCQGPTCQGQICHNTVHLDPKVGPTYSTARLSILTPRHHLQRSCSCNGTATRFSGQSYVRYRAPAARNWHIHFYLKTLQPQAILLFTNETASVSLKGFEGCLDAVVVNEEALDLLAPGKTVAGLLETQALTQCCLHSDYCSQNTCLNGGKCSWTHGAGYVCKCPPQFSGKHCEQGRENCTFAPCLEGGTCILSPKGASCNCPHPYTGDRCEMEARGCSEGHCLVTPEIQRGDWGQQELLIITVAVAFIIISTVGLLFYCRRCKSHKPVAMEDPDLLARSVGVDTQAMPAIELNPLSASSCNNLNQPEPSKASVPNELVTFGPNSKQRPVVCSVPPRLPPAAVPSHSDNEPVIKRTWSSEEMVYPGGAMVWPPTYSRNERWEYPHSEVTQGPLPPSAHRHSTPVVMPEPNGLYGGFPFPLEMENKRAPLPPRYSNQNLEDLMPSRPPSPRERLVAPCLNEYTAISYYHSQFRQGGGGPCLADGGYKGVGMRLSRAGPSYAVCEVEGAPLAGQGQPRVPPNYEGSDMVESDYGSCEEVMF

SEQ ID NO: 30830 - protein, 4557 aa, Homo sapiens
  Payload ID: 6045
  Gene Symbol: FAT3
  Gene Name: FAT atypical cadherin 3
  Uniprot ID: Q8TDW7
  ENSP ID: ENSP00000387040
MDIIMGHCVGTRPPACCLILLLFKLLATVSQGLPGTGPLGFHFTHSIYNATVYENSAARTYVNSQSRMGITLIDLSWDIKYRIVSGDEEGFFKAEEVIIADFCFLRIRTKGGNSAILNREIQDNYLLIVKGSVRGEDLEAWTKVNIQVLDMNDLRPLFSPTTYSVTIAESTPLRTSVAQVTATDADIGSNGEFYYYFKNKVDLFSVHPTSGVISLSGRLNYDEKNRYDLEILAVDRGMKLYGNNGVSSTAKLYVHIERINEHAPTIHVVTHVPFSLEKEPTYAVVTVDDLDDGANGEIESVSIVAGDPLDQFFLAKEGKWLNEYKIKERKQIDWESFPYGYNLTLQAKDKGSPQKCSALKAVYIGNPTRDTVPIRFEKEVYDVSISEFSPPGVVVAIVKLSPEPIDVEYKLSPGEDAVYFKINPRSGLIVTARPLNTVKKEVYKLEVTNKEGDLKAQVTISIEDANDHTPEFQQPLYDAYVNESVPVGTSVLTVSASDKDKGENGYITYSIASLNLLPFVINQFTGVISTTEELDFESSPEIYRFIVRASDWGSPYRHESEVNVTIRIGNVNDNSPLFEKVACQGVISYDFPVGGHITAVSAIDIDELELVKYKIISGNELGFFYLNPDSGVLQLKKSLTNSGIKNGNFALRITATDGENLADPMSINISVLHGKVSSKSFSCRETRVAQKLAEKLLIKAKANGKLNLEDGFLDFYSINRQGPYFDKSFPSDVAVKEDLPVGANILKIKAYDADSGFNGKVLFTISDGNTDSCFNIDMETGQLKVLMPMDREHTDLYLLNITIYDLGNPQKSSWRLLTINVEDANDNSPVFIQDSYSVNILESSGIGTEIIQVEARDKDLGSNGEVTYSVLTDTQQFAINSSTGIVYVADQLDRESKANYSLKIEARDKAESGQQLFSVVTLKVFLDDVNDCSPAFIPSSYSVKVLEDLPVGTVIAWLETHDPDLGLGGQVRYSLVNDYNGRFEIDKASGAIRLSKELDYEKQQFYNLTVRAKDKGRPVSLSSVSFVEVEVVDVNENLHTPYFPDFAVVGSVKENSRIGTSVLQVTARDEDSGRDGEIQYSIRDGSGLGRFSIDDESGVITAADILDRETMGSYWLTVYATDRGVVPLYSTIEVYIEVEDVNDNAPLTSEPIYYPVVMENSPKDVSVIQIQAEDPDSSSNEKLTYRITSGNPQNFFAINIKTGLITTTSRKLDREQQAEHFLEVTVTDGGPSPKQSTIWVVVQVLDENDNKPQFPEKVYQIKLPERDRKKRGEPIYRAFAFDRDEGPNAEISYSIVDGNDDGKFFIDPKTGMVSSRKQFTAGSYDILTIKAVDNGRPQKSSTARLHIEWIKKPPPSPIPLTFDEPFYNFTVMESDRVTEIVGVVSVQPANTPLWFDIVGGNFDSAFDAEKGVGTIVIAKPLDAEQRSIYNMSVEVTDGTNVAVTQVFIKVLDNNDNGPEFSQPNYDVTISEDVLPDTEILQIEATDRDEKHKLSYTVHSSIDSISMRKFRIDPSTGVLYTAERLDHEAQDKHILNIMVRDQEFPYRRNLARVIVNVEDANDHSPYFTNPLYEASVFESAALGSAVLQVTALDKDKGENAELIYTIEAGNTGNMFKIEPVLGIITICKEPDMTTMGQFVLSIKVTDQGSPPMSATAIVRISVTMSDNSHPKFIHKDYQAEVNENVDIGTSVILISAISQSTLIYEVKDGDINGIFTINPYSGVITTQKALDYERTSSYQLIIQATNMAGMASNATVNIQIVDENDNAPVFLFSQYSGSLSEAAPINSIVRSLDNSPLVIRATDADSNRNALLVYQIVESTAKKFFTVDSSTGAIRTIANLDHETIAHFHFHVHVRDSGSPQLTAESPVEVNIEVTDVNDNPPVFTQAVFETILLLPTYVGVEVLKVSATDPDSEVPPELTYSLMEGSLDHFLIDSNSGVLTIKNNNLSKDHYMLIVKVSDGKFYSTSMVTIMVKEAMDSGLHFTQSFYSTSISENNTNITKVAIVNAVGNRLNEPLKYSILNPGNKFKIKSTSGVIQTTGVPFDREEQELYELVVEASRELDHLRVARVVVRVNIEDINDNSPVFVGLPYYAAVQVDAEPGTLIYQVTAIDKDKGPNGEVTYVLQDDYGHFEINPNSGNVILKEAFNSDLSNIEYGVTILAKDGGKPSLSTSVELPITIVNKAMPVFDKPFYTASVNEDIRMNTPILSINATSPEGQGIIYIIIDGDPFKQFNIDFDTGVLKVVSPLDYEVTSAYKLTIRASDALTGARAEVTVDLLVNDVNDNPPIFDQPTYNTTLSEASLIGTPVLQVVSIDADSENNKMVHYQIVQDTYNSTDYFHIDSSSGLILTARMLDHELVQHCTLKVRSIDSGFPSLSSEVLVHIYISDVNDNPPVFNQLIYESYVSELAPRGHFVTCVQASDADSSDFDRLEYSILSGNDRTSFLMDSKSGVITLSNHRKQRMEPLYSLNVSVSDGLFTSTAQVHIRVLGANLYSPAFSQSTYVAEVRENVAAGTKVIHVRATDGDPGTYGQISYAIINDFAKDRFLIDSNGQVITTERLDRENPLEGDVSIFVRALDGGGRTTFCTVRVIVVDENDNAPQFMTVEYRASVRADVGRGHLVTQVQAIDPDDGANSRITYSLYSEASVSVADLLEIDPDNGWMVTKGNFNQLKNTVLSFFVKAVDGGIPVKHSLIPVYIHVLPPETFLPSFTQSQYSFTIAEDTAIGSTVDTLRILPSQNVWFSTVNGERPENNKGGIFVIEQETGTIKLDKRLDRETSPAFHFKVAATIPLDKVDIVFTVDVDIKVLDLNDNKPVFETSSYDTIIMEGMPVGTKLTQVRAIDMDWGANGQVTYSLHSDSQPEKVMEAFNIDSNTGWISTLKDLDHETDPTFTFSVVASDLGEAFSLSSTALVSVRVTDINDNAPVFAQEVYRGNVKESDPPGEVVAVLSTWDRDTSDVNRQVSYHITGGNPRGRFALGLVQSEWKVYVKRPLDREEQDIYFLNITATDGLFVTQAMVEVSVSDVNDNSPVCDQVAYTALLPEDIPSNKIILKVSAKDADIGSNGYIRYSLYGSGNSEFFLDPESGELKTLALLDRERIPVYSLMAKATDGGGRFCQSNIHLILEDVNDNPPVFSSDHYNTCVYENTATKALLTRVQAVDPDIGINRKVVYSLADSAGGVFSIDSSSGIIILEQPLDREQQSSYNISVRATDQSPGQSLSSLTTVTITVLDINDNPPVFERRDYLVTVPEDTSPGTQVLAVFATSKDIGTNAEITYLIRSGNEQGKFKINPKTGGISVSEVLDYELCKRFYLVVEAKDGGTPALSAVATVNINLTDVNDNPPKFSQDVYSAVISEDALVGDSVILLIAEDVDSQPNGQIHFSIVNGDRDNEFTVDPVLGLVKVKKKLDRERVSGYSLLVQAVDSGIPAMSSTATVNIDISDVNDNSPVFTPANYTAVIQENKPVGTSILQLVVTDRDSFHNGPPFSFSILSGNEEEEFVLDPHGILRSAVVFQHTESLEYVLCVQAKDSGKPQQVSHTYIRVRVIEESTHKPTAIPLEIFIVTMEDDFPGGVIGKIHATDQDMYDVLTFALKSEQKSLFKVNSHDGKIIALGGLDSGKYVLNVSVSDGRFQVPIDVVVHVEQLVHEMLQNTVTIRFENVSPEDFVGLHMHGFRRTLRNAVLTQKQDSLRIISIQPVAGTNQLDMLFAVEMHSSEFYKPAYLIQKLSNARRHLENIMRISAILEKNCSGLDCQEQHCEQGLSLDSHALMTYSTARISFVCPRFYRNVRCTCNGGLCPGSNDPCVEKPCPGDMQCVSYEASRRPFLCQCPPGKLGECSGHTSLSFAGNSYIKYRLSENSKEEDFKLALRLRTLQSNGIIMYTRANPCIILKIVDGKLWFQLDCGSGPGILGISGRAVNDGSWHSVFLELNRNFTSLSLDDSYVERRRAPLYFQTLSTESSIYFGALVQADNIRSLTDTRVTQVLSGFQGCLDSVILNNNELPLQNKRSSFAEVVGLTELKLGCVLYPDACKRSPCQHGGSCTGLPSGGYQCTCLSQFTGRNCESEITACFPNPCRNGGSCDPIGNTFICNCKAGLTGVTCEEDINECEREECENGGSCVNVFGSFLCNCTPGYVGQYCGLRPVVVPNIQAGHSYVGKEELIGIAVVLFVIFILVVLFIVFRKKVFRKNYSRNNITLVQDPATAALLNKSNGIPFRNLRGSGDGRNVYQEVGPPQVPVRPMAYTPCFQSDSRSNLDKIVDGLGGEHQEMTTFHPESPRILTARRGVVVCSVAPNLPAVSPCRSDCDSIRKNGWDAGTENKGVDDPGEVTCFAGSNKGSNSEVQSLSSFQSDSGDDNAYHWDTSDWMPGARLSDIEEVPNYENQDGGSAHQGSTRELESDYYLGGYDIDSEYPPPHEEEFLSQDQLPPPLPEDFPDQYEALPPSQPVSLASTLSPDCRRRPQFHPSQYLPPHPFPNETDLVGPPASCEFSTFAVSMNQGTEPTGPADSVSLSLHNSRGTSSSDVSANCGFDDSEVAMSDYESVGELSLASLHIPFVETQHQTQV

SEQ ID NO: 30831 - protein, 4439 aa, Homo sapiens
  Payload ID: 6045
  Gene Symbol: FAT3
  Gene Name: FAT atypical cadherin 3
  ENSP ID: ENSP00000432586
MNDLRPLFSPTTYSVTIAESTPLRTSVAQVTATDADIGSNGEFYYYFKNKVDLFSVHPTSGVISLSGRLNYDEKNRYDLEILAVDRGMKLYGNNGVSSTAKLYVHIERINEHAPTIHVVTHVPFSLEKEPTYAVVTVDDLDDGANGEIESVSIVAGDPLDQFFLAKEGKWLNEYKIKERKQIDWESFPYGYNLTLQAKDKGSPQKCSALKAVYIGNPTRDTVPIRFEKEVYDVSISEFSPPGVVVAIVKLSPEPIDVEYKLSPGEDAVYFKINPRSGLIVTARPLNTVKKEVYKLEVTNKEGDLKAQVTISIEDANDHTPEFQQPLYDAYVNESVPVGTSVLTVSASDKDKGENGYITYSIASLNLLPFVINQFTGVISTTEELDFESSPEIYRFIVRASDWGSPYRHESEVNVTIRIGNVNDNSPLFEKVACQGVISYDFPVGGHITAVSAIDIDELELVKYKIISGNELGFFYLNPDSGVLQLKKSLTNSGIKNGNFALRITATDGENLADPMSINISVLHGKVSSKSFSCRETRVAQKLAEKLLIKAKANGKLNLEDGFLDFYSINRQGPYFDKSFPSDVAVKEDLPVGANILKIKAYDADSGFNGKVLFTISDGNTDSCFNIDMETGQLKVLMPMDREHTDLYLLNITIYDLGNPQKSSWRLLTINVEDANDNSPVFIQDSYSVNILESSGIGTEIIQVEARDKDLGSNGEVTYSVLTDTQQFAINSSTGIVYVADQLDRESKANYSLKIEARDKAESGQQLFSVVTLKVFLDDVNDCSPAFIPSSYSVKVLEDLPVGTVIAWLETHDPDLGLGGQVRYSLVNDYNGRFEIDKASGAIRLSKELDYEKQQFYNLTVRAKDKGRPVSLSSVSFVEVEVVDVNENLHTPYFPDFAVVGSVKENSRIGTSVLQVTARDEDSGRDGEIQYSIRDGSGLGRFSIDDESGVITAADILDRETMGSYWLTVYATDRGVVPLYSTIEVYIEVEDVNDNAPLTSEPIYYPVVMENSPKDVSVIQIQAEDPDSSSNEKLTYRITSGNPQNFFAINIKTGLITTTSRKLDREQQAEHFLEVTVTDGGPSPKQSTIWVVVQVLDENDNKPQFPEKVYQIKLPERDRKKRGEPIYRAFAFDRDEGPNAEISYSIVDGNDDGKFFIDPKTGMVSSRKQFTAGSYDILTIKAVDNGRPQKSSTARLHIEWIKKPPPSPIPLTFDEPFYNFTVMESDRVTEIVGVVSVQPANTPLWFDIVGGNFDSAFDAEKGVGTIVIAKPLDAEQRSIYNMSVEVTDGTNVAVTQVFIKVLDNNDNGPEFSQPNYDVTISEDVLPDTEILQIEATDRDEKHKLSYTVHSSIDSISMRKFRIDPSTGVLYTAERLDHEAQDKHILNIMVRDQEFPYRRNLARVIVNVEDANDHSPYFTNPLYEASVFESAALGSAVLQVTALDKDKGENAELIYTIEAGNTGNMFKIEPVLGIITICKEPDMTTMGQFVLSIKVTDQGSPPMSATAIVRISVTMSDNSHPKFIHKDYQAEVNENVDIGTSVILISAISQSTLIYEVKDGDINGIFTINPYSGVITTQKALDYERTSSYQLIIQATNMAGMASNATVNIQIVDENDNAPVFLFSQYSGSLSEAAPINSIVRSLDNSPLVIRATDADSNRNALLVYQIVESTAKKFFTVDSSTGAIRTIANLDHETIAHFHFHVHVRDSGSPQLTAESPVEVNIEVTDVNDNPPVFTQAVFETILLLPTYVGVEVLKVSATDPDSEVPPELTYSLMEGSLDHFLIDSNSGVLTIKNNNLSKDHYMLIVKVSDGKFYSTSMVTIMVKEAMDSGLHFTQSFYSTSISENNTNITKVAIVNAVGNRLNEPLKYSILNPGNKFKIKSTSGVIQTTGVPFDREEQELYELVVEASRELDHLRVARVVVRVNIEDINDNSPVFVGLPYYAAVQVDAEPGTLIYQVTAIDKDKGPNGEVTYVLQDDYGHFEINPNSGNVILKEAFNSDLSNIEYGVTILAKDGGKPSLSTSVELPITIVNKAMPVFDKPFYTASVNEDIRMNTPILSINATSPEGQGIIYIIIDGDPFKQFNIDFDTGVLKVVSPLDYEVTSAYKLTIRASDALTGARAEVTVDLLVNDVNDNPPIFDQPTYNTTLSEASLIGTPVLQVVSIDADSENNKMVHYQIVQDTYNSTDYFHIDSSSGLILTARMLDHELVQHCTLKVRSIDSGFPSLSSEVLVHIYISDVNDNPPVFNQLIYESYVSELAPRGHFVTCVQASDADSSDFDRLEYSILSGNDRTSFLMDSKSGVITLSNHRKQRMEPLYSLNVSVSDGLFTSTAQVHIRVLGANLYSPAFSQSTYVAEVRENVAAGTKVIHVRATDGDPGTYGQISYAIINDFAKDRFLIDSNGQVITTERLDRENPLEGDVSIFVRALDGGGRTTFCTVRVIVVDENDNAPQFMTVEYRASVRADVGRGHLVTQVQAIDPDDGANSRITYSLYSEASVSVADLLEIDPDNGWMVTKGNFNQLKNTVLSFFVKAVDGGIPVKHSLIPVYIHVLPPETFLPSFTQSQYSFTIAEDTAIGSTVDTLRILPSQNVWFSTVNGERPENNKGGIFVIEQETGTIKLDKRLDRETSPAFHFKVAATIPLDKVDIVFTVDVDIKVLDLNDNKPVFETSSYDTIIMEGMPVGTKLTQVRAIDMDWGANGQVTYSLHSDSQPEKVMEAFNIDSNTGWISTLKDLDHETDPTFTFSVVASDLGEAFSLSSTALVSVRVTDINDNAPVFAQEVYRGNVKESDPPGEVVAVLSTWDRDTSDVNRQVSYHITGGNPRGRFALGLVQSEWKVYVKRPLDREEQDIYFLNITATDGLFVTQAMVEVSVSDVNDNSPVCDQVAYTALLPEDIPSNKIILKVSAKDADIGSNGYIRYSLYGSGNSEFFLDPESGELKTLALLDRERIPVYSLMAKATDGGGRFCQSNIHLILEDVNDNPPVFSSDHYNTCVYENTATKALLTRVQAVDPDIGINRKVVYSLADSAGGVFSIDSSSGIIILEQPLDREQQSSYNISVRATDQSPGQSLSSLTTVTITVLDINDNPPVFERRDYLVTVPEDTSPGTQVLAVFATSKDIGTNAEITYLIRSGNEQGKFKINPKTGGISVSEVLDYELCKRFYLVVEAKDGGTPALSAVATVNINLTDVNDNPPKFSQDVYSAVISEDALVGDSVILLIAEDVDSQPNGQIHFSIVNGDRDNEFTVDPVLGLVKVKKKLDRERVSGYSLLVQAVDSGIPAMSSTATVNIDISDVNDNSPVFTPANYTAVIQENKPVGTSILQLVVTDRDSFHNGPPFSFSILSGNEEEEFVLDPHGILRSAVVFQHTESLEYVLCVQAKDSGKPQQVSHTYIRVRVIEESTHKPTAIPLEIFIVTMEDDFPGGVIGKIHATDQDMYDVLTFALKSEQKSLFKVNSHDGKIIALGGLDSGKYVLNVSVSDGRFQVPIDVVVHVEQLVHEMLQNTVTIRFENVSPEDFVGLHMHGFRRTLRNAVLTQKQDSLRIISIQPVAGTNQLDMLFAVEMHSSEFYKPAYLIQKLSNARRHLENIMRISAILEKNCSGLDCQEQHCEQGLSLDSHALMTYSTARISFVCPRFYRNVRCTCNGGLCPGSNDPCVEKPCPGDMQCVSYEASRRPFLCQCPPGKLGECSGHTSLSFAGNSYIKYRLSENSKEEDFKLALRLRTLQSNGIIMYTRANPCIILKIVDGKLWFQLDCGSGPGILGISGRAVNDGSWHSVFLELNRNFTSLSLDDSYVERRRAPLYFQTLSTESSIYFGALVQADNIRSLTDTRVTQVLSGFQGCLDSVILNNNELPLQNKRSSFAEVVGLTELKLGCVLYPDACKRSPCQHGGSCTGLPSGGYQCTCLSQFTGRNCESEITACFPNPCRNGGSCDPIGNTFICNCKAGLTGVTCEEDINECEREECENGGSCVNVFGSFLCNCTPGYVGQYCGLRPVVVPNIQAGHSYVGKEELIGIAVVLFVIFILVVLFIVFRKKVFRKNYSRNNITLVQDPATAALLNKSNGIPFRNLRGSGDGRNVYQEVGPPQVPVRPMAYTPCFQSDSRSNLDKIVDGLGGEHQEMTTFHPESPRILTARRGVVVCSVAPNLPAVSPCRSDCDSIRKNGWDAGTENKGVDDPGEVTCFAGSNKGSNSEVQSLSSFQSDSGDDNASIVTVIQLVNNVVDTIENEVSVMDQGQNYNRAYHWDTSDWMPGARLSDIEEVPNYENQDGGSAHQGSTRELESDYYLGGYDIDSEYPPPHEEEFLSQDQLPPPLPEDFPDQYEALPPSQPVSLASTLSPDCRRRPQFHPSQYLPPHPFPNETDLVGPPASCEFSTFAVSMNQGTEPTGPADSVSLSLHNSRGTSSSDVSANCGFDDSEVAMSDYESVGELSLASLHIPFVETQHQTQV

SEQ ID NO: 30832 - protein, 892 aa, Homo sapiens
  Payload ID: 6045
  Gene Symbol: FAT3
  Gene Name: FAT atypical cadherin 3
  ENSP ID: ENSP00000436399
MHGFRRTLRNAVLTQKQDSLRIISIQPVAGTNQLDMLFAVEMHSSEFYKPAYLIQKLSNARRHLENIMRISAILEKNCSGLDCQEQHCEQGLSLDSHALMTYSTARISFVCPRFYRNVRCTCNGGLCPGSNDPCVEKPCPGDMQCVSYEASRRPFLCQCPPGKLGECSGHTSLSFAGNSYIKYRLSENSKEEDFKLALRLRTLQSNGIIMYTRANPCIILKIVDGKLWFQLDCGSGPGILGISGRAVNDGSWHSVFLELNRNFTSLSLDDSYVERRRAPLYFQTLSTESSIYFGALVQADNIRSLTDTRVTQVLSGFQGCLDSVILNNNELPLQNKRSSFAEVVGLTELKLGCVLYPDACKRSPCQHGGSCTGLPSGGYQCTCLSQFTGRNCESEITACFPNPCRNGGSCDPIGNTFICNCKAGLTGVTCEEDINECEREECENGGSCVNVFGSFLCNCTPGYVGQYCGLRPVVVPNIQAGHSYVGKEELIGIAVVLFVIFILVVLFIVFRKKVFRKNYSRNNITLVQDPATAALLNKSNGIPFRNLRGSGDGRNVYQEVGPPQVPVRPMAYTPCFQSDSRSNLDKIVDGLGGEHQEMTTFHPESPRILTARRGVVVCSVAPNLPAVSPCRSDCDSIRKNGWDAGTENKGVDDPGEVTCFAGSNKGSNSEVQSLSSFQSDSGDDNAYHWDTSDWMPGARLSDIEEVPNYENQDGGSAHQGSTRELESDYYLGGYDIDSEYPPPHEEEFLSQDQLPPPLPEDFPDQYEALPPSQPVSLASTLSPDCRRRPQFHPSQYLPPHPFPNETDLVGPPASCEFSTFAVSMNQGTEPTGPADSVSLSLHNSRGTSSSDVSANCGFDDSEVAMSDYESVGELSLASLHIPFVETQHQTQV

SEQ ID NO: 30833 - protein, 3222 aa, Homo sapiens
  Payload ID: 6046
  Gene Symbol: FAT4
  Gene Name: FAT atypical cadherin 4
  Uniprot ID: Q6V0I7
  ENSP ID: ENSP00000335169
MVTTVVAVGDTLAQPLAAAEVFIVEITLQDINDNPPVFPTDMLDLTVEENIGDGSKIMQLTAMDADEGANALVTYTIISGADDSFRIDPESGDLIATRRLDRERRSKYSLLVRADDGLQSSDMRINITVSDVNDHTPKFSRPVYSFDIPEDTIPGSLVAAILATDDDSGVNGEITYIVNEDDEDGIFFLNPITGVFNLTRLLDYEVQQYYILTVRAEDGGGQFTTIRVYFNILDVNDNPPIFSLNSYSTSLMENLPVGSTVLVFNVTDADDGINSQLTYSIASGDSLGQFTVDKNGVLKVLKALDRESQSFYNLVVQVHDLPQIPASRFTSTAQVSIILLDVNDNPPTFLSPKLTYIPENTPIDTVVFKAQATDPDSGPNSYIEYTLLNPLGNKFSIGTIDGEVRLTGELDREEVSNYTLTVVATDKGQPSLSSSTEVVVMVLDINDNNPIFAQALYKVEINENTLTGTDIIQVFAADGDEGTNGQVRYGIVNGNTNQEFRIDSVTGAITVAKPLDREKTPTYHLTVQATDRGSTPRTDTSTVSIVLLDINDFVPVFELSPYSVNVPENLGTLPRTILQVVARDDDRGSNSKLSYVLFGGNEDNAFTLSASGELGVTQSLDRETKERFVLMITATDSGSPALTGTGTINVIVDDVNDNVPTFASKAYFTTIPEDAPTGTDVLLVNASDADASKNAVIRIIGGNSQFTINPSTGQIITSALLDRETKDNYTLVVVCSDAGSPEPLSSSTSVLVTVTDVNDNPPRFQHHPYVTHIPSPTLPGSFVFAVTVTDADIGPNSELHYSLSGRNSEKFHIDPLRGAIMAAGPLNGASEVTFSVHVKDGGSFPKTDSTTVTVRFVNKADFPKVRAKEQTFMFPENQPVSSLVTTITGSSLRGEPMSYYIASGNLGNTFQIDQLTGQVSISQPLDFEKIQKYVVWIEARDGGFPPFSSYEKLDITVLDVNDNAPIFKEDPFISEILENLSPRKILTVSAMDKDSGPNGQLDYEIVNGNMENSFSINHATGEIRSVRPLDREKVSHYVLTIKSSDKGSPSQSTSVKVMINILDENDNAPRFSQIFSAHVPENSPLGYTVTRVTTSDEDIGINAISRYSIMDASLPFTINPSTGDIVISRPLNREDTDRYRIRVSAHDSGWTVSTDVTIFVTDINDNAPRFSRTSYYLDCPELTEIGSKVTQVFATDPDEGSNGQVFYFIKSQSEYFRINATTGEIFNKQILKYQNVTGFSNVNINRHSFIVTSSDRGKPSLISETTVTINIVDSNDNAPQFLKSKYFTPVTKNVKVGTKLIRVTAIDDKDFGLNSEVEYFISNDNHLGKFKLDNDTGWISVASSLISDLNQNFFITVTAKDKGNPPLSSQATVHITVTEENYHTPEFSQSHMSATIPESHSIGSIVRTVSARDRDAAMNGLIKYSISSGNEEGIFAINSSTGILTLAKALDYELCQKHEMTISAIDGGWVARTGYCSVTVNVIDVNDNSPVFLSDDYFPTVLENAPSGTTVIHLNATDADSGTNAVIAYTVQSSDSDLFVIDPNTGVITTQGFLDFETKQSYHLTVKAFNVPDEERCSFATVNIQLKGTNEYVPRFVSKLYYFEISEAAPKGTIVGEVFASDRDLGTDGEVHYLIFGNSRKKGFQINKKTGQIYVSGILDREKEERVSLKVLAKNFGSIRGADIDEVTVNVTVLDANDPPIFTLNIYSVQISEGVPIGTHVTFVSAFDSDSIPSWSRFSYFIGSGNENGAFSINPQTGQITVTAELDRETLPIYNLSVLAVDSGTPSATGSASLLVTLEDINDNGPMLTVSEGEVMENKRPGTLVMTLQSTDPDLPPNQGPFTYYLLSTGPATSYFSLSTAGVLSTTREIDREQIADFYLSVVTKDSGVPQMSSTGTVHITVIDQNDNPSQSRTVEIFVNYYGNLFPGGILGSVKPQDPDVLDSFHCSLTSGVTSLFSIPGGTCDLNSQPRSTDGTFDLTVLSNDGVHSTVTSNIRVFFAGFSNATVDNSILLRLGVPTVKDFLTNHYLHFLRIASSQLTGLGTAVQLYSAYEENNRTFLLAAVKRNHNQYVNPSGVATFFESIKEILLRQSGVKVESVDHDSCVHGPCQNGGSCLRRLAVSSVLKSRESLPVIIVANEPLQPFLCKCLPGYAGSWCEIDIDECLPSPCHSGGTCHNLVGGFSCSCPDGFTGRACERDINECLQSPCKNGAICQNFPGSFNCVCKTGYTGVFGKHCELNSYGFEELSYMEFPSLDPNNNYIYVKFATIKSHALLLYNYDNQTGDRAEFLALEIAEERLRFSYNLGSGTYKLTTMKKVSDGHFHTVIARRAGMAASLTVDSCSENQEPGYCTVSNVAVSDDWTLDVQPNRVTVGGIRSLEPILQRRGHVESHDFVGCIMEFAVNGRPLEPSQALAAQGILDQYGDFISYCFKEKKCKKVCFTVTPDTALSLEGKGRLDYHMSQNEKREYLLRQSLRGAMLEPFGVNSLEVKFRTRSENGVLIHIQESSNYTTVKIKNGKVYFTSDAGIAGKVERNIPEVYVADGHWHTFLIGKNGTATVLSVDRIYNRDIIHPTQDFGGLDVLTISLGGIPPNQAHRDAQTAGFDGCIASMWYGGESLPFSGKHSLASISKTDPSVKIGCRGPNICASNPCWGDLLCINQWYAYRCVPPGDCASHPCQNGGSCEPGLHSGFTCSCPDSHTGRTCEMVVACLGVLCPQGKVCKAGSPAGHVCVLSQGPEEISLPLWAVPAIVGSCATVLALLVLSLILCNQCRGKKAKNPKEEKKPKEKKKKGSENVAFDDPDNIPPYGDDMTVRKQPEGNPKPDIIERENPYLIYDETDIPHNSETIPSAPLASPEQEIEHYDIDNASSIAPSDADIIQHYKQFRSHTPKFSIQRHSPLGFARQSPMPLGASSLTYQPSYGQGLRTSSLSHSACPTPNPLSRHSPAPFSKSSTFYRNSPARELHLPIRDGNTLEMHGDTCQPGIFNYATRLGRRSKSPQAMASHGSRPGSRLKQPIGQIPLESSPPVGLSIEEVERLNTPRPRNPSICSADHGRSSSEEDCRRPLSRTRNPADGIPAPESSSDSDSHESFTCSEMEYDREKPMVYTSRMPKLSQVNESDADDEDNYGARLKPRRYHGRRAEGGPVGTQAAAPGTADNTLPMKLGQQAGTFNWDNLLNWGPGFGHYVDVFKDLASLPEKAAANEEGKAGTTKPVPKDGEAEQYV

SEQ ID NO: 30834 - protein, 4981 aa, Homo sapiens
  Payload ID: 6046
  Gene Symbol: FAT4
  Gene Name: FAT atypical cadherin 4
  Uniprot ID: Q6V0I7
  ENSP ID: ENSP00000377862
MDLAPDRATGRPWLPLHTLSVSQLLRVFWLLSLLPGQAWVHGAEPRQVFQVLEEQPPGTLVGTIQTRPGFTYRLSESHALFAINSSTGALYTTSTIDRESLPSDVINLVVLSSAPTYPTEVRVLVRDLNDNAPVFPDPSIVVTFKEDSSSGRQVILDTATDSDIGSNGVDHRSYRIIRGNEAGRFRLDITLNPSGEGAFLHLVSKGGLDREVTPQYQLLVEVEDKGEPKRRGYLQVNVTVQDINDNPPVFGSSHYQAGVPEDAVVGSSVLQVAAADADEGTNADIRYRLQDEGTPFQMDPETGLITVREPLDFEARRQYSLTVQAMDRGVPSLTGRAEALIQLLDVNDNDPVVKFRYFPATSRYASVDENAQVGTVVALLTVTDADSPAANGNISVQILGGNEQRHFEVQSSKVPNLSLIKVASALDRERIPSYNLTVSVSDNYGAPPGAAVQARSSVASLVIFVNDINDHPPVFSQQVYRVNLSEEAPPGSYVSGISATDGDSGLNANLRYSIVSGNGLGWFHISEHSGLVTTGSSGGLDRELASQIVLNISARDQGVHPKVSYAQLVVTLLDVNDEKPVFSQPEGYDVSVVENAPTGTELLMLRATDGDLGDNGTVRFSLQEAETDRRSFRLDPVSGRLSTISSLDREEQAFYSLLVLATDLGSPPQSSMARINVSLLDINDNSPVFYPVQYFAHIKENEPGGSYITTVSATDPDLGTNGTVKYSISAGDRSRFQVNAQSGVISTRMALDREEKTAYQLQIVATDGGNLQSPNQAIVTITVLDTQDNPPVFSQVAYSFVVFENVALGYHVGSVSASTMDLNSNISYLITTGDQKGMFAINQVTGQLTTANVIDREEQSFYQLKVVASGGTVTGDTMVNITVKDLNDNSPHFLQAIESVNVVENWQAGHSIFQAKAVDPDEGVNGMVLYSLKQNPKNLFAINEKNGTISLLGPLDVHAGSYQIEILASDMGVPQLSSSVILTVYVHDVNDNSPVFDQLSYEVTLSESEPVNSRFFKVQASDKDSGANGEIAYTIAEGNTGDAFGIFPDGQLYIKSELDRELQDRYVLMVVASDRAVEPLSATVNVTVILEDVNDNRPLFNSTNYTFYFEEEQRAGSFVGKVSAVDKDFGPNGEVRYSFEMVQPDFELHAISGEITNTHQFDRESLMRRRGTAVFSFTVIATDQGIPQPLKDQATVHVYMKDINDNAPKFLKDFYQATISESAANLTQVLRVSASDVDEGNNGLIHYSIIKGNEERQFAIDSTSGQVTLIGKLDYEATPAYSLVIQAVDSGTIPLNSTCTLNIDILDENDNTPSFPKSTLFVDVLENMRIGELVSSVTATDSDSGDNADLYYSITGTNNHGTFSISPNTGSIFLAKKLDFETQSLYKLNITAKDQGRPPRSSTMSVVIHVRDFNDNPPSFPPGDIFKSIVENIPIGTSVISVTAHDPDADINGQLSYTIIQQMPRGNHFTIDEVKGTIYTNAEIDREFANLFELTVKANDQAVPIETRRYALKNVTILVTDLNDNVPMFISQNALAADPSAVIGSVLTTIMAADPDEGANGEIEYEIINGDTDTFIVDRYSGDLRVASALVPSQLIYNLIVSATDLGPERRKSTTELTIILQGLDGPVFTQPKYITILKEGEPIGTNVISIEAASPRGSEAPVEYYIVSVRCEEKTVGRLFTIGRHTGIIQTAAILDREQGACLYLVDVYAIEKSTAFPRTQRAEVEITLQDINDNPPVFPTDMLDLTVEENIGDGSKIMQLTAMDADEGANALVTYTIISGADDSFRIDPESGDLIATRRLDRERRSKYSLLVRADDGLQSSDMRINITVSDVNDHTPKFSRPVYSFDIPEDTIPGSLVAAILATDDDSGVNGEITYIVNEDDEDGIFFLNPITGVFNLTRLLDYEVQQYYILTVRAEDGGGQFTTIRVYFNILDVNDNPPIFSLNSYSTSLMENLPVGSTVLVFNVTDADDGINSQLTYSIASGDSLGQFTVDKNGVLKVLKALDRESQSFYNLVVQVHDLPQIPASRFTSTAQVSIILLDVNDNPPTFLSPKLTYIPENTPIDTVVFKAQATDPDSGPNSYIEYTLLNPLGNKFSIGTIDGEVRLTGELDREEVSNYTLTVVATDKGQPSLSSSTEVVVMVLDINDNNPIFAQALYKVEINENTLTGTDIIQVFAADGDEGTNGQVRYGIVNGNTNQEFRIDSVTGAITVAKPLDREKTPTYHLTVQATDRGSTPRTDTSTVSIVLLDINDFVPVFELSPYSVNVPENLGTLPRTILQVVARDDDRGSNSKLSYVLFGGNEDNAFTLSASGELGVTQSLDRETKERFVLMITATDSGSPALTGTGTINVIVDDVNDNVPTFASKAYFTTIPEDAPTGTDVLLVNASDADASKNAVIRIIGGNSQFTINPSTGQIITSALLDRETKDNYTLVVVCSDAGSPEPLSSSTSVLVTVTDVNDNPPRFQHHPYVTHIPSPTLPGSFVFAVTVTDADIGPNSELHYSLSGRNSEKFHIDPLRGAIMAAGPLNGASEVTFSVHVKDGGSFPKTDSTTVTVRFVNKADFPKVRAKEQTFMFPENQPVSSLVTTITGSSLRGEPMSYYIASGNLGNTFQIDQLTGQVSISQPLDFEKIQKYVVWIEARDGGFPPFSSYEKLDITVLDVNDNAPIFKEDPFISEILENLSPRKILTVSAMDKDSGPNGQLDYEIVNGNMENSFSINHATGEIRSVRPLDREKVSHYVLTIKSSDKGSPSQSTSVKVMINILDENDNAPRFSQIFSAHVPENSPLGYTVTRVTTSDEDIGINAISRYSIMDASLPFTINPSTGDIVISRPLNREDTDRYRIRVSAHDSGWTVSTDVTIFVTDINDNAPRFSRTSYYLDCPELTEIGSKVTQVFATDPDEGSNGQVFYFIKSQSEYFRINATTGEIFNKQILKYQNVTGFSNVNINRHSFIVTSSDRGKPSLISETTVTINIVDSNDNAPQFLKSKYFTPVTKNVKVGTKLIRVTAIDDKDFGLNSEVEYFISNDNHLGKFKLDNDTGWISVASSLISDLNQNFFITVTAKDKGNPPLSSQATVHITVTEENYHTPEFSQSHMSATIPESHSIGSIVRTVSARDRDAAMNGLIKYSISSGNEEGIFAINSSTGILTLAKALDYELCQKHEMTISAIDGGWVARTGYCSVTVNVIDVNDNSPVFLSDDYFPTVLENAPSGTTVIHLNATDADSGTNAVIAYTVQSSDSDLFVIDPNTGVITTQGFLDFETKQSYHLTVKAFNVPDEERCSFATVNIQLKGTNEYVPRFVSKLYYFEISEAAPKGTIVGEVFASDRDLGTDGEVHYLIFGNSRKKGFQINKKTGQIYVSGILDREKEERVSLKVLAKNFGSIRGADIDEVTVNVTVLDANDPPIFTLNIYSVQISEGVPIGTHVTFVSAFDSDSIPSWSRFSYFIGSGNENGAFSINPQTGQITVTAELDRETLPIYNLSVLAVDSGTPSATGSASLLVTLEDINDNGPMLTVSEGEVMENKRPGTLVMTLQSTDPDLPPNQGPFTYYLLSTGPATSYFSLSTAGVLSTTREIDREQIADFYLSVVTKDSGVPQMSSTGTVHITVIDQNDNPSQSRTVEIFVNYYGNLFPGGILGSVKPQDPDVLDSFHCSLTSGVTSLFSIPGGTCDLNSQPRSTDGTFDLTVLSNDGVHSTVTSNIRVFFAGFSNATVDNSILLRLGVPTVKDFLTNHYLHFLRIASSQLTGLGTAVQLYSAYEENNRTFLLAAVKRNHNQYVNPSGVATFFESIKEILLRQSGVKVESVDHDSCVHGPCQNGGSCLRRLAVSSVLKSRESLPVIIVANEPLQPFLCKCLPGYAGSWCEIDIDECLPSPCHSGGTCHNLVGGFSCSCPDGFTGRACERDINECLQSPCKNGAICQNFPGSFNCVCKTGYTGKMCESSVNYCECNPCFNGGSCQSGVDSYYCHCPFGVFGKHCELNSYGFEELSYMEFPSLDPNNNYIYVKFATIKSHALLLYNYDNQTGDRAEFLALEIAEERLRFSYNLGSGTYKLTTMKKVSDGHFHTVIARRAGMAASLTVDSCSENQEPGYCTVSNVAVSDDWTLDVQPNRVTVGGIRSLEPILQRRGHVESHDFVGCIMEFAVNGRPLEPSQALAAQGILDQCPRLEGACTRSPCQHGGTCMDYWSWQQCHCKEGLTGKYCEKSVTPDTALSLEGKGRLDYHMSQNEKREYLLRQSLRGAMLEPFGVNSLEVKFRTRSENGVLIHIQESSNYTTVKIKNGKVYFTSDAGIAGKVERNIPEVYVADGHWHTFLIGKNGTATVLSVDRIYNRDIIHPTQDFGGLDVLTISLGGIPPNQAHRDAQTAGFDGCIASMWYGGESLPFSGKHSLASISKTDPSVKIGCRGPNICASNPCWGDLLCINQWYAYRCVPPGDCASHPCQNGGSCEPGLHSGFTCSCPDSHTGRTCEMVVACLGVLCPQGKVCKAGSPAGHVCVLSQGPEEISLPLWAVPAIVGSCATVLALLVLSLILCNQCRGKKAKNPKEEKKPKEKKKKGSENVAFDDPDNIPPYGDDMTVRKQPEGNPKPDIIERENPYLIYDETDIPHNSETIPSAPLASPEQEIEHYDIDNASSIAPSDADIIQHYKQFRSHTPKFSIQRHSPLGFARQSPMPLGASSLTYQPSYGQGLRTSSLSHSACPTPNPLSRHSPAPFSKSSTFYRNSPARELHLPIRDGNTLEMHGDTCQPGIFNYATRLGRRSKSPQAMASHGSRPGSRLKQPIGQIPLESSPPVGLSIEEVERLNTPRPRNPSICSADHGRSSSEEDCRRPLSRTRNPADGIPAPESSSDSDSHESFTCSEMEYDREKPMVYTSRMPKLSQVNESDADDEDNYGARLKPRRYHGRRAEGGPVGTQAAAPGTADNTLPMKLGQQAGTFNWDNLLNWGPGFGHYVDVFKDLASLPEKAAANEEGKAGTTKPVPKDGEAEQYV

SEQ ID NO: 30835 - protein, 129 aa, Homo sapiens
  Payload ID: 6047
  Gene Symbol: FTO
  Gene Name: fat mass and obesity associated
  ENSP ID: ENSP00000268349
EQRNEILTAILASLTARQNLRREWHARAERSVGASHELPEHYLLIRSQNVGHTGKRMMLRCLCRLTSQTSFQNSEVSFWKQNPRRSTSLRRRRKRDRLFSSNVVMGLSKSSGDFSWPLDCSTRVPIQNS

SEQ ID NO: 30836 - protein, 106 aa, Homo sapiens
  Payload ID: 6047
  Gene Symbol: FTO
  Gene Name: fat mass and obesity associated
  Uniprot ID: Q9C0B1
  ENSP ID: ENSP00000415636
MAQLEALWKKMEGVTNAVLHEVKREGLPVEQRNEILTAILASLTARQNLRREWHARCQSRIARTLPADQKPECRPYWEKDDASMPLPFDLTDIVSELRGQLLEAKP

SEQ ID NO: 30837 - protein, 106 aa, Homo sapiens; identical to SEQ ID NO: 30836
  Payload ID: 6047
  Gene Symbol: FTO
  Gene Name: fat mass and obesity associated
  Uniprot ID: Q9C0B1
  ENSP ID: ENSP00000417422

SEQ ID NO: 30838 - protein, 127 aa, Homo sapiens
  Payload ID: 6047
  Gene Symbol: FTO
  Gene Name: fat mass and obesity associated
  Uniprot ID: Q9C0B1
  ENSP ID: ENSP00000417843
MEWRKVSECNSVEPCREVKKWPYRCIHHGKNFSRMTNAVLHEVKREGLPVEQRNEILTAILASLTARQNLRREWHARCQSRIARTLPADQKPECRPYWEKDDASMPLPFDLTDIVSELRGQLLEAKP

SEQ ID NO: 30839 - protein, 70 aa, Homo sapiens
  Payload ID: 6047
  Gene Symbol: FTO
  Gene Name: fat mass and obesity associated
  ENSP ID: ENSP00000418424
MKRTPTAEEREREAKKLRLLEELEDTWLPYLTPKDDEFYQQALKRKVRMTLISKAGILIFGMLVLRSHGT

SEQ ID NO: 30840 - protein, 505 aa, Homo sapiens
  Payload ID: 6047
  Gene Symbol: FTO
  Gene Name: fat mass and obesity associated
  Uniprot ID: Q9C0B1
  ENSP ID: ENSP00000418823
MKRTPTAEEREREAKKLRLLEELEDTWLPYLTPKDDEFYQQWQLKYPKLILREASSVSEELHKEVQEAFLTLHKHGCLFRDLVRIQGKDLLTPVSRILIGNPGCTYKYLNTRLFTVPWPVKGSNIKHTEAEIAAACETFLKLNDYLQIETIQALEELAAKEKANEDAVPLCMSADFPRVGMGSSYNGQDEVDIKSRAAYNVTLLNFMDPQKMPYLKEEPYFGMGKMAVSWHHDENLVDRSAVAVYSYSCEGPEEESEDDSHLEGRDPDIWHVGFKISWDIETPGLAIPLHQGDCYFMLDDLNATHQHCVLAGSQPRFSSTHRVAECSTGTLDYILQRCQLALQNVCDDVDNDDVSLKSFEPAVLKQGEEIHNEVEFEWLRQFWFQGNRYRKCTDWWCQPMAQLEALWKKMEGVTNAVLHEVKREGLPVEQRNEILTAILASLTARQNLRREWHARCQSRIARTLPADQKPECRPYWEKDDASMPLPFDLTDIVSELRGQLLEAKP

SEQ ID NO: 30841 - protein, 292 aa, Homo sapiens
  Payload ID: 6048
  Gene Symbol: FITM1
  Gene Name: fat storage-inducing transmembrane protein 1
  Uniprot ID: A5D6W6
  ENSP ID: ENSP00000267426
MERGPVVGAGLGAGARIQALLGCLLKVLLWVASALLYFGSEQAARLLGSPCLRRLYHAWLAAVVIFGPLLQFHVNPRTIFASHGNFFNIKFVNSAWGWTCTFLGGFVLLVVFLATRRVAVTARHLSRLVVGAAVWRGAGRAFLLIEDLTGSCFEPLPQGLLLHELPDRRSCLAAGHQWRGYTVSSHTFLLTFCCLLMAEEAAVFAKYLAHGLPAGAPLRLVFLLNVLLLGLWNFLLLCTVIYFHQYTHKVVGAAVGTFAWYLTYGSWYHQPWSPGSPGHGLFPRPHSSRKHN

SEQ ID NO: 30842 - protein, 96 aa, Homo sapiens
  Payload ID: 6048
  Gene Symbol: FITM1
  Gene Name: fat storage-inducing transmembrane protein 1
  Uniprot ID: A5D6W6
  ENSP ID: ENSP00000453741
MAEEAAVFAKYLAHGLPAGAPLRLVFLLNVLLLGLWNFLLLCTVIYFHQYTHKVVGAAVGTFAWYLTYGSWYHQPWSPGSPGHGLFPRPHSSRKHN

SEQ ID NO: 30843 - protein, 262 aa, Homo sapiens
  Payload ID: 6049
  Gene Symbol: FITM2
  Gene Name: fat storage-inducing transmembrane protein 2
  Uniprot ID: Q8N6M3
  ENSP ID: ENSP00000380037
MEHLERCEWLLRGTLVRAAVRRYLPWALVASMLAGSLLKELSPLPESYLSNKRNVLNVYFVKVAWAWTFCLLLPFIALTNYHLTGKAGLVLRRLSTLLVGTAIWYICTSIFSNIEHYTGSCYQSPALEGVRKEHQSKQQCHQEGGFWHGFDISGHSFLLTFCALMIVEEMSVLHEVKTDRSHCLHTAITTLVVALGILTFIWVLMFLCTAVYFHNLSQKVFGTLFGLLSWYGTYGFWYPKAFSPGLPPQSCSLNLKQDSYKK

SEQ ID NO: 30844 - protein, 892 aa, Homo sapiens; identical to SEQ ID NO: 30832
  Payload ID: 6050
  Gene Symbol:
  Gene Name: FAT3
  ENSP ID: ENSP00000488913

SEQ ID NO: 30845 - protein, 4439 aa, Homo sapiens; identical to SEQ ID NO: 30831
  Payload ID: 6050
  Gene Symbol:
  Gene Name: FAT3
  ENSP ID: ENSP00000489343

SEQ ID NO: 30846 - protein, 4557 aa, Homo sapiens; identical to SEQ ID NO: 30830
  Payload ID: 6050
  Gene Symbol:
  Gene Name: FAT3
  ENSP ID: ENSP00000489369

SEQ ID NO: 30847 - protein, 372 aa, Homo sapiens
  Payload ID: 6051
  Gene Symbol: FA2H
  Gene Name: fatty acid 2-hydroxylase
  Uniprot ID: Q7L5A8
  ENSP ID: ENSP00000219368
MAPAPPPAASFSPSEVQRRLAAGACWVRRGARLYDLSSFVRHHPGGEQLLRARAGQDISADLDGPPHRHSANARRWLEQYYVGELRGEQQGSMENEPVALEETQKTDPAMEPRFKVVDWDKDLVDWRKPLLWQVGHLGEKYDEWVHQPVTRPIRLFHSDLIEGLSKTVWYSVPIIWVPLVLYLSWSYYRTFAQGNVRLFTSFTTEYTVAVPKSMFPGLFMLGTFLWSLIEYLIHRFLFHMKPPSDSYYLIMLHFVMHGQHHKAPFDGSRLVFPPVPASLVIGVFYLCMQLILPEAVGGTVFAGGLLGYVLYDMTHYYLHFGSPHKGSYLYSLKAHHVKHHFAHQKSGFGISTKLWDYCFHTLTPEKPHLKTQ

SEQ ID NO: 30848 - protein, 156 aa, Homo sapiens
  Payload ID: 6051
  Gene Symbol: FA2H
  Gene Name: fatty acid 2-hydroxylase
  ENSP ID: ENSP00000455126
MAPAPPPAASFSPSEVQRRLAAGACWVRRGARLYDLSSFVRHHPGGEQLLRARAGQDISADLDGPPHRHSANARRWLEQYYVGELRGEQQGSMENEPVALEETQKTDPAMEPRFKVVDWDKSTRWQCPSPCSPGSSCWGHSSGASSSTSSTASCST

SEQ ID NO: 30849 - protein, 192 aa, Homo sapiens
  Payload ID: 6051
  Gene Symbol: FA2H
  Gene Name: fatty acid 2-hydroxylase
  ENSP ID: ENSP00000464576
MPSFQLPAMATSTMASFSHKDTEKGSMENEPVALEETQKTDPAMEPRFKVVDWDKDLVDWRKPLLWQVGHLGEKYDEWVHQPVTRPIRLFHSDLIEGLSKTVWYSVPIIWVPLVLYLSWSYYRTFAQGNVRLFTSFTTEYTVAVPKSMFPGLFMLGTFLWSLIEYLIHRFLFHMKPPSDSYYLIMLHFVMHG

SEQ ID NO: 30850 - protein, 18 aa, Homo sapiens
  Payload ID: 6051
  Gene Symbol: FA2H
  Gene Name: fatty acid 2-hydroxylase
  ENSP ID: ENSP00000479548
  MOD_RES (1)..(1): Any amino acid
XLFTSFTTGNASFFPDLP

SEQ ID NO: 30851 - protein, 579 aa, Homo sapiens
  Payload ID: 6052
  Gene Symbol: FAAH
  Gene Name: fatty acid amide hydrolase
  Uniprot ID: O00519
  ENSP ID: ENSP00000243167
MVQYELWAALPGASGVALACCFVAAAVALRWSGRRTARGAVVRARQRQRAGLENMDRAAQRFRLQNPDLDSEALLALPLPQLVQKLHSRELAPEAVLFTYVGKAWEVNKGTNCVTSYLADCETQLSQAPRQGLLYGVPVSLKECFTYKGQDSTLGLSLNEGVPAECDSVVVHVLKLQGAVPFVHTNVPQSMFSYDCSNPLFGQTVNPWKSSKSPGGSSGGEGALIGSGGSPLGLGTDIGGSIRFPSSFCGICGLKPTGNRLSKSGLKGCVYGQEAVRLSVGPMARDVESLALCLRALLCEDMFRLDPTVPPLPFREEVYTSSQPLRVGYYETDNYTMPSPAMRRAVLETKQSLEAAGHTLVPFLPSNIPHALETLSTGGLFSDGGHTFLQNFKGDFVDPCLGDLVSILKLPQWLKGLLAFLVKPLLPRLSAFLSNMKSRSAGKLWELQHEIEVYRKTVIAQWRALDLDVVLTPMLAPALDLNAPGRATGAVSYTMLYNCLDFPAGVVPVTTVTAEDEAQMEHYRGYFGDIWDKMLQKGMKKSVGLPVAVQCVALPWQEELCLRFMREVERLMTPEKQSS

SEQ ID NO: 30852 - protein, 49 aa, Homo sapiens
  Payload ID: 6052
  Gene Symbol: FAAH
  Gene Name: fatty acid amide hydrolase
  ENSP ID: ENSP00000481641
  MOD_RES (1)..(1): Any amino acid
XGGSIRFPSSFCGICGLKPTGNRLRSTPALSPCVWGTMRLTTIPCPPRP

SEQ ID NO: 30853 - protein, 532 aa, Homo sapiens
  Payload ID: 6053
  Gene Symbol: FAAH2
  Gene Name: fatty acid amide hydrolase 2
  Uniprot ID: Q6GMR7
  ENSP ID: ENSP00000364035
MAPSFTARIQLFLLRALGFLIGLVGRAALVLGGPKFASKTPRPVTEPLLLLSGMQLAKLIRQRKVKCIDVVQAYINRIKDVNPMINGIVKYRFEEAMKEAHAVDQKLAEKQEDEATLENKWPFLGVPLTVKEAFQLQGMPNSSGLMNRRDAIAKTDATVVALLKGAGAIPLGITNCSELCMWYESSNKIYGRSNNPYDLQHIVGGSSGGEGCTLAAACSVIGVGSDIGGSIRMPAFFNGIFGHKPSPGVVPNKGQFPLAVGAQELFLCTGPMCRYAEDLAPMLKVMAGPGIKRLKLDTKVHLKDLKFYWMEHDGGSFLMSKVDQDLIMTQKKVVVHLETILGASVQHVKLKKMKYSFQLWIAMMSAKGHDGKEPVKFVDLLGDHGKHVSPLWELIKWCLGLSVYTIPSIGLALLEEKLRYSNEKYQKFKAVEESLRKELVDMLGDDGVFLYPSHPTVAPKHHVPLTRPFNFAYTGVFSALGLPVTQCPLGLNAKGLPLGIQVVAGPFNDHLTLAVAQYLEKTFGGWVCPGKF

SEQ ID NO: 30854 - protein, 127 aa, Homo sapiens
  Payload ID: 6054
  Gene Symbol: FABP1
  Gene Name: fatty acid binding protein 1, liver
  Uniprot ID: P07148
  ENSP ID: ENSP00000295834
MSFSGKYQLQSQENFEAFMKAIGLPEELIQKGKDIKGVSEIVQNGKHFKFTITAGSKVIQNEFTVGEECELETMTGEKVKTVVQLEGDNKLVTTFKNIKSVTELNGDIITNTMTLGDIVFKRISKRI

SEQ ID NO: 30855 - protein, 124 aa, Homo sapiens
  Payload ID: 6054
  Gene Symbol: FABP1
  Gene Name: fatty acid binding protein 1, liver
  ENSP ID: ENSP00000377351
MSFSGKYQLQSQENFEAFMKAIGLPEELIQKGKDIKGVSEIVQNGKHFKFTITAGSKVIQNEFTVGEECELETMTGEKVKTVVQLEGDNKLVTTFKNIKSVTELNGDIITNVSWWCSERVAPSA

SEQ ID NO: 30856 - protein, 140 aa, Homo sapiens
  Payload ID: 6055
  Gene Symbol: FABP12
  Gene Name: fatty acid binding protein 12
  Uniprot ID: A6NFH5
  ENSP ID: ENSP00000353650
MIDQLQGTWKSISCENSEDYMKELGIGRASRKLGRLAKPTVTISTDGDVITIKTKSIFKNNEISFKLGEEFEEITPGGHKTKSKVTLDKESLIQVQDWDGKETTITRKLVDGKMVVESTVNSVICTRTYEKVSSNSVSNS

SEQ ID NO: 30857 - protein, 90 aa, Homo sapiens
  Payload ID: 6055
  Gene Symbol: FABP12
  Gene Name: fatty acid binding protein 12
  ENSP ID: ENSP00000427973
  MOD_RES (1)..(1): Any amino acid
XSEDYMKELGIGRASRKLGRLAKPTVTISTDGDVITIKTKSIFKNNEISFKLGEEFEEITPGGHKTKVRPTTVFQTHFKRMLVRYHPRVK

SEQ ID NO: 30858 - protein, 132 aa, Homo sapiens
  Payload ID: 6056
  Gene Symbol: FABP2
  Gene Name: fatty acid binding protein 2, intestinal
  Uniprot ID: P12104
  ENSP ID: ENSP00000274024
MAFDSTWKVDRSENYDKFMEKMGVNIVKRKLAAHDNLKLTITQEGNKFTVKESSTFRNIEVVFELGVTFNYNLADGTELRGTWSLEGNKLIGKFKRTDNGNELNTVREIIGDELVQTYVYEGVEAKRIFKKD

SEQ ID NO: 30859 - protein, 133 aa, Homo sapiens [sequence omitted]

SEQ ID NO: 30860 - protein, 132 aa, Homo sapiens
  Payload ID: 6057
  Gene Symbol: FABP3
  Gene Name: fatty acid binding protein 3, muscle and heart
  ENSP ID: ENSP00000473982
MVDAFLGTWKLVDSKNFDDYMKSLGVGFATRQVASMTKPTTIIEKNGDILTLKTHSTFKNTEISFKLGVEFDETTADDRKVKSIVTLDGGKLVHLQKWDGQETTLVRELIDGKLILTLTHGTAVCTRTYEKE

SEQ ID NO: 30861 - protein, 89 aa, Homo sapiens
  Payload ID: 6057
  Gene Symbol: FABP3
  Gene Name: fatty acid binding protein 3, muscle and heart
  ENSP ID: ENSP00000474078
MVDAFLGTWKLVDSKNFDDYMKSLGVGFATRQVASMTKPTTIIEKNGDILTLKTHSTFKNTEISFKLGVEFDETTADDRKVKHRARMFF

SEQ ID NO: 30862 - protein, 132 aa, Homo sapiens
  Payload ID: 6058
  Gene Symbol: FABP4
  Gene Name: fatty acid binding protein 4, adipocyte
  Uniprot ID: P15090
  ENSP ID: ENSP00000256104
MCDAFVGTWKLVSSENFDDYMKEVGVGFATRKVAGMAKPNMIISVNGDVITIKSESTFKNTEISFILGQEFDEVTADDRKVKSTITLDGGVLVHVQKWDGKSTTIKRKREDDKLVVECVMKGVTSTRVYERA

SEQ ID NO: 30863 - protein, 39 aa, Homo sapiens
  Payload ID: 6058
  Gene Symbol: FABP4
  Gene Name: fatty acid binding protein 4, adipocyte
  ENSP ID: ENSP00000428385
MCDAFVGTWKLVSSENFDDYMKEEWALPPGKWLAWPNLT

SEQ ID NO: 30864 - protein, 135 aa, Homo sapiens
  Payload ID: 6059
  Gene Symbol: FABP5
  Gene Name: fatty acid binding protein 5 (psoriasis-associated)
  Uniprot ID: Q01469
  ENSP ID: ENSP00000297258
MATVQQLEGRWRLVDSKGFDEYMKELGVGIALRKMGAMAKPDCIITCDGKNLTIKTESTLKTTQFSCTLGEKFEETTADGRKTQTVCNFTDGALVQHQEWDGKESTITRKLKDGKLVVECVMNNVTCTRIYEKVE

SEQ ID NO: 30865 - protein, 101 aa, Homo sapiens
  Payload ID: 6059
  Gene Symbol: FABP5
  Gene Name: fatty acid binding protein 5 (psoriasis-associated)
  ENSP ID: ENSP00000379647
MGAMAKPDCIITCDGKNLTIKTESTLKTTQFSCTLGEKFEETTADGRKTQTVCNFTDGALVQHQEWDGKESTITRKLKDGKLVVECVMNNVTCTRIYEKVE

SEQ ID NO: 30866 - protein, 177 aa, Homo sapiens
  Payload ID: 6060
  Gene Symbol: FABP6
  Gene Name: fatty acid binding protein 6, ileal
  Uniprot ID: P51161
  ENSP ID: ENSP00000377549
MKTVTMMMVVEMQALTQVLRAVLSACTWVSRKGDLQRMKQTHKGKPPSSMAFTGKFEMESEKNYDEFMKLLGISSDVIEKARNFKIVTEVQQDGQDFTWSQHYSGGHTMTNKFTVGKESNIQTMGGKTFKATVQMEGGKLVVNFPNYHQTSEIVGDKLVEVSTIGGVTYERVSKRLA

SEQ ID NO: 30867 - protein, 128 aa, Homo sapiens
  Payload ID: 6060
  Gene Symbol: FABP6
  Gene Name: fatty acid binding protein 6, ileal
  Uniprot ID: P51161
  ENSP ID: ENSP00000385433
MAFTGKFEMESEKNYDEFMKLLGISSDVIEKARNFKIVTEVQQDGQDFTWSQHYSGGHTMTNKFTVGKESNIQTMGGKTFKATVQMEGGKLVVNFPNYHQTSEIVGDKLVEVSTIGGVTYERVSKRLA

SEQ ID NO: 30868 - protein, 38 aa, Homo sapiens
  Payload ID: 6060
  Gene Symbol: FABP6
  Gene Name: fatty acid binding protein 6, ileal
  ENSP ID: ENSP00000428766
LTQVLRAVLSACTWVSRKGDLQRMKQTHKGKRTFSQDG

SEQ ID NO: 30869 - protein, 166 aa, Homo sapiens
  Payload ID: 6061
  Gene Symbol: FABP7
  Gene Name: fatty acid binding protein 7, brain
  Uniprot ID: O15540
  ENSP ID: ENSP00000348931
MVEAFCATWKLTNSQNFDEYMKALGVGFATRQVGNVTKPTVIISQEGDKVVIRTLSTFKNTEISFQLGEEFDETTADDRNCKSVVSLDGDKLVHIQKWDGKETNFVREIKDGKMVMVSNDNSPFFLVFFSSPHTSHLLPSSSLLLPFFLLPSFFNNTSLARFFNYM

SEQ ID NO: 30870 - protein, 132 aa, Homo sapiens
  Payload ID: 6061
  Gene Symbol: FABP7
  Gene Name: fatty acid binding protein 7, brain
  Uniprot ID: O15540
  ENSP ID: ENSP00000357429
MVEAFCATWKLTNSQNFDEYMKALGVGFATRQVGNVTKPTVIISQEGDKVVIRTLSTFKNTEISFQLGEEFDETTADDRNCKSVVSLDGDKLVHIQKWDGKETNFVREIKDGKMVMTLTFGDVVAVRHYEKA

SEQ ID NO: 30871 - protein, 132 aa, Homo sapiens
  Payload ID: 6062
  Gene Symbol: FABP9
  Gene Name: fatty acid binding protein 9, testis
  Uniprot ID: Q0Z7S8
  ENSP ID: ENSP00000368362
MVEPFLGTWKLVSSENFEDYMKELGVNFAARNMAGLVKPTVTISVDGKMMTIRTESSFQDTKISFKLGEEFDETTADNRKVKSTITLENGSMIHVQKWLGKETTIKRKIVDEKMVVECKMNNIVSTRIYEKV

SEQ ID NO: 30872 - protein, 501 aa, Homo sapiens
  Payload ID: 6063
  Gene Symbol: FADS1
  Gene Name: fatty acid desaturase 1
  ENSP ID: ENSP00000322229
MGTRAARPAGLPCGAENPARRRLALGARQQIHSWSPRTPSTRLTAPAGPARGVARPAMAPDPVAAETAAQGPTPRYFTWDEVAQRSGCEERWLVIDRKVYNISEFTRRHPGGSRVISHYAGQDATDPFVAFHINKGLVKKYMNSLLIGELSPEQPSFEPTKNKELTDEFRELRATVERMGLMKANHVFFLLYLLHILLLDGAAWLTLWVFGTSFLPFLLCAVLLSAVQAQAGWLQHDFGHLSVFSTSKWNHLLHHFVIGHLKGAPASWWNHMHFQHHAKPNCFRKDPDINMHPFFFALGKILSVELGKQKKKYMPYNHQHKYFFLIGPPALLPLYFQWYIFYFVIQRKKWVDLAWMITFYVRFFLTYVPLLGLKAFLGLFFIVRFLESNWFVWVTQMNHIPMHIDHDRNMDWVSTQLQATCNVHKSAFNDWFSGHLNFQIEHHLFPTMPRHNYHKVAPLVQSLCAKHGIEYQSKPLLSAFADIIHSLKESGQLWLDAYLHQ

SEQ ID NO: 30873 - protein, 47 aa, Homo sapiens
  Payload ID: 6063
  Gene Symbol: FADS1
  Gene Name: fatty acid desaturase 1
  ENSP ID: ENSP00000391229
MNSLLIGELSPEQPSFEPTKNKELTDEFRELRATVERMGLMKANHVF

SEQ ID NO: 30874 - protein, 360 aa, Homo sapiens
  Payload ID: 6063
  Gene Symbol: FADS1
  Gene Name: fatty acid desaturase 1
  Uniprot ID: O60427
  ENSP ID: ENSP00000405087
MNSLLIGELSPEQPSFEPTKNKELTDEFRELRATVERMGLMKANHVFFLLYLLHILLLDGAAWLTLWVFGTSFLPFLLCAVLLSAVQAQAGWLQHDFGHLSVFSTSKWNHLLHHFVIGHLKGAPASWWNHMHFQHHAKPNCFRKDPDINMHPFFFALGKILSVELGKQKKKYMPYNHQHKYFFLIGPPALLPLYFQWYIFYFVIQRKKWVDLAWMITFYVRFFLTYVPLLGLKAFLGLFFIVRFLESNWFVWVTQMNHIPMHIDHDRNMDWVSTQLQATCNVHKSAFNDWFSGHLNFQIEHHLFPTMPRHNYHKVAPLVQSLCAKHGIEYQSKPLLSAFADIIHSLKESGQLWLDAYLHQ

SEQ ID NO: 30875 - protein, 228 aa, Homo sapiens
  Payload ID: 6063
  Gene Symbol: FADS1
  Gene Name: fatty acid desaturase 1
  ENSP ID: ENSP00000407895
  MOD_RES (1)..(1): Any amino acid
XARPAMAPDPVAAETAAQGPTPRYFTWDEVAQRSGCEERWLVIDRKVYNISEFTRRHPGGSRVISHYAGQDATDPFVAFHINKGLVKKYMNSLLIGELSPEQPSFEPTKNKELTDEFRELRATVERMGLMKANHVFFLLYLLHILLLDGAAWLTLWVFGTSFLPFLLCAVLLSAVQHFGRPRWPDHLISVQDQPGQRGETSTKNTKRPGTVAHACNTSTLGGQDGQII

SEQ ID NO: 30876 - protein, 139 aa, Homo sapiens
  Payload ID: 6063
  Gene Symbol: FADS1
  Gene Name: fatty acid desaturase 1
  ENSP ID: ENSP00000416043
MNSLLIGELSPEQPSFEPTKNKELTDEFRELRATVERMGLMKANHVFFLLYLLHILLLDGAAWLTLWVFGTSFLPFLLCAVLLSAVQAQAGWLQHDFGHLSVFSTSKWNHLLHHFVIGHLKGAPASWWNHMHFQHHAKP

SEQ ID NO: 30877 - protein, 175 aa, Homo sapiens
  Payload ID: 6063
  Gene Symbol: FADS1
  Gene Name: fatty acid desaturase 1
  ENSP ID: ENSP00000429016
  MOD_RES (1)..(1): Any amino acid
XGVARPAMAPDPVAAETAAQGPTPRYFTWDEVAQRSGCEERWLVIDRKVYNISEFTRRHPGGSRVISHYAGQDATKELTDEFRELRATVERMGLMKANHVFFLLYLLHILLLDGAAWLTLWVFGTSFLPFLLCAVLLSAVQAQAGWLQHDFGHLSVFSTSKWNHLLHHFVIGHLK

SEQ ID NO: 30878 - protein, 86 aa, Homo sapiens
  Payload ID: 6063
  Gene Symbol: FADS1
  Gene Name: fatty acid desaturase 1
  ENSP ID: ENSP00000438997
MNSLLIGELSPEQPSFEPTKNKELTDEFRELRATVERMGLMKANHVFFLLYLLHILLLDGAAWLTLWVFGTSFLPFLLCAVLLSAV

SEQ ID NO: 30879 - protein, 192 aa, Homo sapiens
  Payload ID: 6063
  Gene Symbol: FADS1
  Gene Name: fatty acid desaturase 1
  ENSP ID: ENSP00000439097
MTFLCSCLLFVSVSSPVGPPALLPLYFQWYIFYFVIQRKKWVDLAWMITFYVRFFLTYVPLLGLKAFLGLFFIVRFLESNWFVWVTQMNHIPMHIDHDRNMDWVSTQLQATCNVHKSAFNDWFSGHLNFQIEHHLFPTMPRHNYHKVAPLVQSLCAKHGIEYQSKPLLSAFADIIHSLKESGQLWLDAYLHQ

SEQ ID NO: 30880 - protein, 109 aa, Homo sapiens
  Payload ID: 6063
  Gene Symbol: FADS1
  Gene Name: fatty acid desaturase 1
  ENSP ID: ENSP00000439790
MNSLLIGELSPEQPSFEPTKNKELTDEFRELRATVERMGLMKANHVFFLLYLLHILLLDGAAWLTLWVFGTSFLPFLLCAVLLSAVQAQAGWLQHDFGHLSVFSTSKWN

SEQ ID NO: 30881 - protein, 153 aa, Homo sapiens
  Payload ID: 6063
  Gene Symbol: FADS1
  Gene Name: fatty acid desaturase 1
  ENSP ID: ENSP00000440652
MNSLLIGELSPEQPSFEPTKNKELTDEFRELRATVERMGLMKANHVFFLLYLLHILLLDGAAWLTLWVFGTSFLPFLLCAVLLSAVQAQAGWLQHDFGHLSVFSTSKWNHLLHHFVIGHLKGAPASWWNHMHFQHHAKPNCFRKDPDINMHPF

SEQ ID NO: 30882 - protein, 360 aa, Homo sapiens; identical to SEQ ID NO: 30874
  Payload ID: 6063
  Gene Symbol: FADS1
  Gene Name: fatty acid desaturase 1
  Uniprot ID: O60427
  ENSP ID: ENSP00000441403

SEQ ID NO: 30883 - protein, 165 aa, Homo sapiens
  Payload ID: 6063
  Gene Symbol: FADS1
  Gene Name: fatty acid desaturase 1
  ENSP ID: ENSP00000441871
MNSLLIGELSPEQPSFEPTKNKELTDEFRELRATVERMGLMKANHVFFLLYLLHILLLDGAAWLTLWVFGTSFLPFLLCAVLLSAVQAQAGWLQHDFGHLSVFSTSKWNHLLHHFVIGHLKGAPASWWNHMHFQHHAKPNCFRKDPDINMHPFFFALGKILSVEV

SEQ ID NO: 30884 - protein, 164 aa, Homo sapiens
  Payload ID: 6063
  Gene Symbol: FADS1
  Gene Name: fatty acid desaturase 1
  ENSP ID: ENSP00000442170
MNSLLIGELSPEQPSFEPTKNKELTDEFRELRATVERMGLMKANHVFFLLYLLHILLLDGAAWLTLWVFGTSFLPFLLCAVLLSAVQAQAGWLQHDFGHLSVFSTSKWNHLLHHFVIGHLKGAPASWWNHMHFQHHAKPNCFRKDPDINMHPFFFALGKILSVE

SEQ ID NO: 30885 - protein, 112 aa, Homo sapiens
  Payload ID: 6063
  Gene Symbol: FADS1
  Gene Name: fatty acid desaturase 1
  ENSP ID: ENSP00000443037
MNSLLIGELSPEQPSFEPTKNKELTDEFRELRATVERMGLMKANHVFFLLYLLHILLLDGAAWLTLWVFGTSFLPFLLCAVLLSAVQAQAGWLQHDFGHLSVFSTSKWNHLL

SEQ ID NO: 30886 - protein, 124 aa, Homo sapiens
  Payload ID: 6063
  Gene Symbol: FADS1
  Gene Name: fatty acid desaturase 1
  ENSP ID: ENSP00000443587
MHFQHHAKPNCFRKDPDINMHPFFFALGKILSVELGKQKKKYMPYNHQHKYFFLIGPPALLPLYFQWYIFYFVIQRKKWVDLAWMITFYVRFFLTYVPLLGLKAFLGLFFIVRFLESNWFVWVT

SEQ ID NO: 30887 - protein, 146 aa, Homo sapiens
  Payload ID: 6063
  Gene Symbol: FADS1
  Gene Name: fatty acid desaturase 1
  ENSP ID: ENSP00000445253
MITFYVRFFLTYVPLLGLKAFLGLFFIVRFLESNWFVWVTQMNHIPMHIDHDRNMDWVSTQLQATCNVHKSAFNDWFSGHLNFQIEHHLFPTMPRHNYHKVAPLVQSLCAKHGIEYQSKPLLSAFADIIHSLKESGQLWLDAYLHQ

SEQ ID NO: 30888 - protein, 16 aa, Homo sapiens
  Payload ID: 6063
  Gene Symbol: FADS1
  Gene Name: fatty acid desaturase 1
  ENSP ID: ENSP00000445442
MNSLLIGELSPEQPSF

SEQ ID NO: 30889 - protein, 110 aa, Homo sapiens
  Payload ID: 6063
  Gene Symbol: FADS1
  Gene Name: fatty acid desaturase 1
  ENSP ID: ENSP00000446270
MNSLLIGELSPEQPSFEPTKNKELTDEFRELRATVERMGLMKANHVFFLLYLLHILLLDGAAWLTLWVFGTSFLPFLLCAVLLSAVQAQAGWLQHDFGHLSVFSTSKWNH

SEQ ID NO: 30890 - protein, 422 aa, Homo sapiens
  Payload ID: 6064
  Gene Symbol: FADS2
  Gene Name: fatty acid desaturase 2
  Uniprot ID: O95864
  ENSP ID: ENSP00000257261
MHGREAGPFVCVCVLLASIPTPQTPLLQASLPPFHPASAGHPITGQQDAFRAFHPDLEFVGKFLKPLLIGELAPEEPSQDHGKNSKITEDFRALRKTAEDMNLFKTNHVFFLLLLAHIIALESIAWFTVFYFGNGWIPTLITAFVLATSQAQAGWLQHDYGHLSVYRKPKWNHLVHKFVIGHLKGASANWWNHRHFQHHAKPNIFHKDPDVNMLHVFVLGEWQPIEYGKKKLKYLPYNHQHEYFFLIGPPLLIPMYFQYQIIMTMIVHKNWVDLAWAVSYYIRFFITYIPFYGILGALLFLNFIRFLESHWFVWVTQMNHIVMEIDQEAYRDWFSSQLTATCNVEQSFFNDWFSGHLNFQIEHHLFPTMPRHNLHKIAPLVKSLCAKHGIEYQEKPLLRALLDIIRSLKKSGKLWLDAYLHK

SEQ ID NO: 30891 - protein, 444 aa, Homo sapiens
  Payload ID: 6064
  Gene Symbol: FADS2
  Gene Name: fatty acid desaturase 2
  Uniprot ID: O95864
  ENSP ID: ENSP00000278840
MGKGGNQGEGAAEREVSVPTFSWEEIQKHNLRTDRWLVIDRKVYNITKWSIQHPGGQRVIGHYAGEDATDAFRAFHPDLEFVGKFLKPLLIGELAPEEPSQDHGKNSKITEDFRALRKTAEDMNLFKTNHVFFLLLLAHIIALESIAWFTVFYFGNGWIPTLITAFVLATSQAQAGWLQHDYGHLSVYRKPKWNHLVHKFVIGHLKGASANWWNHRHFQHHAKPNIFHKDPDVNMLHVFVLGEWQPIEYGKKKLKYLPYNHQHEYFFLIGPPLLIPMYFQYQIIMTMIVHKNWVDLAWAVSYYIRFFITYIPFYGILGALLFLNFIRFLESHWFVWVTQMNHIVMEIDQEAYRDWFSSQLTATCNVEQSFFNDWFSGHLNFQIEHHLFPTMPRHNLHKIAPLVKSLCAKHGIEYQEKPLLRALLDIIRSLKKSGKLWLDAYLHK

SEQ ID NO: 30892 - protein, 55 aa, Homo sapiens
  Payload ID: 6064
  Gene Symbol: FADS2
  Gene Name: fatty acid desaturase 2
  ENSP ID: ENSP00000428522
MDLITVHLLYGCPSLLHGPTLAGTVLGAAGDPRPWPVHASQPPYTGHPYVLPFRA

SEQ ID NO: 30893 - protein, 413 aa, Homo sapiens
  Payload ID: 6064
  Gene Symbol: FADS2
  Gene Name: fatty acid desaturase 2
  Uniprot ID: O95864
  ENSP ID: ENSP00000429500
MTREPPGCRRVNSLMLYTLRSITSHRSSHPERWATSSQDAFRAFHPDLEFVGKFLKPLLIGELAPEEPSQDHGKNSKITEDFRALRKTAEDMNLFKTNHVFFLLLLAHIIALESIAWFTVFYFGNGWIPTLITAFVLATSQAQAGWLQHDYGHLSVYRKPKWNHLVHKFVIGHLKGASANWWNHRHFQHHAKPNIFHKDPDVNMLHVFVLGEWQPIEYGKKKLKYLPYNHQHEYFFLIGPPLLIPMYFQYQIIMTMIVHKNWVDLAWAVSYYIRFFITYIPFYGILGALLFLNFIRFLESHWFVWVTQMNHIVMEIDQEAYRDWFSSQLTATCNVEQSFFNDWFSGHLNFQIEHHLFPTMPRHNLHKIAPLVKSLCAKHGIEYQEKPLLRALLDIIRSLKKSGKLWLDAYLHK

SEQ ID NO: 30894 - protein, 52 aa, Homo sapiens
  Payload ID: 6064
  Gene Symbol: FADS2
  Gene Name: fatty acid desaturase 2
  ENSP ID: ENSP00000429693
MTREPPGCRRVNSLMLYTLRSITSHRSSHPERWATSSQKRKKKTLMPIVMKP

SEQ ID NO: 30895 - protein, 103 aa, Homo sapiens
  Payload ID: 6064
  Gene Symbol: FADS2
  Gene Name: fatty acid desaturase 2
  ENSP ID: ENSP00000430054
MNLFKTNHVFFLLLLAHIIALESIAWFTVFYFGNGWIPTLITAFVLATSQAQAGWLQHDYGHLSVYRKPKWNHLVHKFVIGHLKGASANWWNHRHFQHHAKPN

SEQ ID NO: 30896 - protein, 93 aa, Homo sapiens
  Payload ID: 6064
  Gene Symbol: FADS2
  Gene Name: fatty acid desaturase 2
  ENSP ID: ENSP00000430225
MNLFKTNHVFFLLLLAHIIALESIAWFTVFYFGNGWIPTLITAFVLATSQAQAGWLQHDYGHLSVYRKPKWNHLVHKFVIGHLKGASANWWNH

SEQ ID NO: 30897 - protein, 386 aa, Homo sapiens
  Payload ID: 6064
  Gene Symbol: FADS2
  Gene Name: fatty acid desaturase 2
  Uniprot ID: O95864
  ENSP ID: ENSP00000431091
MGKGGNQGEGAAEREVSVPTFSWEEIQKHNLRTDRWLVIDRKVYNITKWSIQHPGGQRVIGHYAGEDATDAFRAFHPDLEFVGKFLKPLLIGELAPEEPSQDHGKNSKITEDFRALRKTAEDMNLFKTNHVFFLLLLAHIIALESIAWFTVFYFGNGWIPTLITAFVLATSQAQAGWLQHDYGHLSVYRKPKWNHLVHKFVIGHLKGASANWWNHRHFQHHAKPNIFHKDPDVNMLHVFVLGEWQPIEYGKKKLKYLPYNHQHEYFFLIGPPLLIPMYFQYQIIMTMIVHKNWVDLAWAVSYYIRFFITYIPFYGILGALLFLNFIRFLESHWFVWVTQMNHIVMEIDQEAYRDWFSSQLTATCNVEQSFFNDWFSGHLNFQIEHQ

SEQ ID NO: 30898 - protein, 151 aa, Homo sapiens
  Payload ID: 6064
  Gene Symbol: FADS2
  Gene Name: fatty acid desaturase 2
  ENSP ID: ENSP00000437965
MLHVFVLGEWQPIEYGKKKLKYLPYNHQHEYFFLIGPPLLIPMYFQYQIIMTMIVHKNWVDLAWAVSYYIRFFITYIPFYGILGALLFLNFIRFLESHWFVWVTQMNHIVMEIDQEAYRDWFSSQLTATCNVEQSFFNDWFSGHLNFQIEH

SEQ ID NO: 30899 - protein, 95 aa, Homo sapiens
  Payload ID: 6064
  Gene Symbol: FADS2
  Gene Name: fatty acid desaturase 2
  ENSP ID: ENSP00000443867
MLHVFVLGEWQPIEYGKKKLKYLPYNHQHEYFFLIGPPLLIPMYFQYQIIMTMIVHKNWVDLAWAVSYYIRFFITYIPFYGILGALLFLNFIRCL

SEQ ID NO: 30900 - protein, 55 aa, Homo sapiens; identical to SEQ ID NO: 30892
  Payload ID: 6064
  Gene Symbol: FADS2
  Gene Name: fatty acid desaturase 2
  ENSP ID: ENSP00000458917

SEQ ID NO: 30901 - protein, 445 aa, Homo sapiens
  Payload ID: 6065
  Gene Symbol: FADS3
  Gene Name: fatty acid desaturase 3
  Uniprot ID: Q9Y5Q0
  ENSP ID: ENSP00000278829
MGGVGEPGPREGPAQPGAPLPTFCWEQIRAHDQPGDKWLVIERRVYDISRWAQRHPGGSRLIGHHGAEDATDAFRAFHQDLNFVRKFLQPLLIGELAPEEPSQDGPLNAQLVEDFRALHQAAEDMKLFDASPTFFAFLLGHILAMEVLAWLLIYLLGPGWVPSALAAFILAISQAQSWCLQHDLGHASIFKKSWWNHVAQKFVMGQLKGFSAHWWNFRHFQHHAKPNIFHKDPDVTVAPVFLLGESSVEYGKKKRRYLPYNQQHLYFFLIGPPLLTLVNFEVENLAYMLVCMQWADLLWAASFYARFFLSYLPFYGVPGVLLFFVAVRVLESHWFVWITQMNHIPKEIGHEKHRDWVSSQLAATCNVEPSLFTNWFSGHLNFQIEHHLFPRMPRHNYSRVAPLVKSLCAKHGLSYEVKPFLTALVDIVRSLKKSGDIWLDAYLHQ

SEQ ID NO: 30902 - protein, 330 aa, Homo sapiens
  Payload ID: 6065
  Gene Symbol: FADS3
  Gene Name: fatty acid desaturase 3
  ENSP ID: ENSP00000431533
MKLFDASPTFFAFLLGHILAMEVLAWLLIYLLGPGWVPSALAAFILAISQAQSWCLQHDLGHASIFKKSWWNHVAQKFVMGQLKGFSAHWWNFRHFQHHAKPNIFHKDPDVTVAPVFLLGESSVEYGKKKRRYLPYNQQHLYFFLIGPPLLTLVNFEVENLAYMLVCMQWADLLWAASFYARFFLSYLPFYGVPGVLLFFVAVRVLESHWFVWITQMNHIPKEIGHEKHRDWVSSQLAATCNVEPSLFTNWFSGHLNFQIEHQCQHTLPTPSLFPRMPRHNYSRVAPLVKSLCAKHGLSYEVKPFLTALVDIVRSLKKSGDIWLDAYLHQ

SEQ ID NO: 30903 - protein, 116 aa, Homo sapiens
  Payload ID: 6065
  Gene Symbol: FADS3
  Gene Name: fatty acid desaturase 3
  ENSP ID: ENSP00000432012
  MOD_RES (1)..(1): Any amino acid
XVRVLESHWFVWITQMNHIPKEIGHEKHRDWLAATCNVEPSLFTNWFSGHLNFQIEHHLFPRMPRHNYSRVAPLVKSLCAKHGLSYEVKPFLTALVDIVRSLKKSGDIWLDAYLHQ

SEQ ID NO: 30904 - protein, 417 aa, Homo sapiens
  Payload ID: 6065
  Gene Symbol: FADS3
  Gene Name: fatty acid desaturase 3
  ENSP ID: ENSP00000432206
MGGVGEPGPREGPAQPGAPLPTFCWEQIRAHDQPGDKWLVIERRVYDISRWAQRHPGGSRLIGHHGAEDATDAFRAFHQDLNFVRKFLQPLLIGELAPEEPSQDGPLNAQLVEDFRALHQAAEDMKLFDASPTFFAFLLGHILAMEAQSWCLQHDLGHASIFKKSWWNHVAQKFVMGQLKGFSAHWWNFRHFQHHAKPNIFHKDPDVTVAPVFLLGESSVEYGKKKRRYLPYNQQHLYFFLIGPPLLTLVNFEVENLAYMLVCMQWADLLWAASFYARFFLSYLPFYGVPGVLLFFVAVRVLESHWFVWITQMNHIPKEIGHEKHRDWVSSQLAATCNVEPSLFTNWFSGHLNFQIEHHLFPRMPRHNYSRVAPLVKSLCAKHGLSYEVKPFLTALVDIVRSLKKSGDIWLDAYLHQ

SEQ ID NO: 30905 - protein, 188 aa, Homo sapiens
  Payload ID: 6065
  Gene Symbol: FADS3
  Gene Name: fatty acid desaturase 3
  ENSP ID: ENSP00000434551
MKLFDASPTFFAFLLGHILAMEVLAWLLIYLLGPGWVPSALAAFILAISQAQSWCLQHDLGHASIFKKSWWNHVAQKFVMGQLKGFSAHWWNFRHFQHHAKPNIFHKDPDVTVAPVFLLGESSVEYGKKKRRYLPYNQQHLYFFLIGPPLLTLVNFEVENLAYMLVCMQWADLLWAASFYARFFLSYL

SEQ ID NO: 30906 - protein, 229 aa, Homo sapiens
  Payload ID: 6065
  Gene Symbol: FADS3
  Gene Name: fatty acid desaturase 3
  ENSP ID: ENSP00000435597
  MOD_RES (1)..(1): Any amino acid
XNIFHKDPDVTVAPVFLLGESSVEYGKKKRRYLPYNQQHLYFFLIGPPLLTLVNFEVENLAYMLVCMQWADLLWAASFYARFFLSYLPFYGVPGVLLFFVAVRVLESHWFVWITQMNHIPKEIGHEKHRDWVSSQLAATCNVEPSLFTNWFSGHLNFQIEHQCQHTLPTPSLFPRMPRHNYSRVAPLVKSLCAKHGLSYEVKPFLTALVDIVRSLKKSGDIWLDAYLHQ

SEQ ID NO: 30907 - protein, 199 aa, Homo sapiens
  Payload ID: 6065
  Gene Symbol: FADS3
  Gene Name: fatty acid desaturase 3
  ENSP ID: ENSP00000436890
MKLFDASPTFFAFLLGHILAMEVLAWLLIYLLGPGWVPSALAAFILAISQAQSWCLQHDLGHASIFKKSWWNHVAQKFVMGQLKGFSAHWWNFRHFQHHAKPNIFHKDPDVTVAPVFLLGESSVEYGKKKRRYLPYNQQHLYFFLIGPPLLTLVNFEVENLAYMLVCMQWADLLWAASFYARFFLSYLPFYGVPGVLLF

SEQ ID NO: 30908 - protein, 219 aa, Homo sapiens
  Payload ID: 6066
  Gene Symbol: FADS6
  Gene Name: fatty acid desaturase 6
  ENSP ID: ENSP00000464267
TAFTAEHATHGHVKMHHAYTNVVGLGDSSTWRLPCLNRYVYMFLAPFLLPIATPLVAVERLRKVELGTALRTLALISLGLYSHYWLLLNVSGFKNPSSALGCMFLTRSLLAHPYLHVNIFQHIGLPMFSRDNKPRRIHMMSLGVLNLARLPVLDWAFGHSIISCHVEHHLFPRLSDNMCLKVVEGWAGGAGIKGLLEDGKEDSSAWGRCSHYNPGTCGG

SEQ ID NO: 30909 - protein, 350 aa, Homo sapiens
  Payload ID: 6066
  Gene Symbol: FADS6
  Gene Name: fatty acid desaturase 6
  ENSP ID: ENSP00000478413
MEPTEPMEPTEPMEPARSAHRGGEALLRELEVLVQDVVRTSSWWERHGVDCAILALSLFALPAGFLCLRWENALVFASGITILGVCHYTLTVKGSHLATHGALTESKRWSKIWLLFFVEVCTAFTAEHATHGHVKMHHAYTNVVGLGDSSTWRLPCLNRYVYMFLAPFLLPIATPLVAVERLRKVELGTALRTLALISLGLYSHYWLLLNVSGFKNPSSALGCMFLTRSLLAHPYLHVNIFQHIGLPMFSRDNKPRRIHMMSLGVLNLARLPVLDWAFGHSIISCHVEHHLFPRLSDNMCLKVKPVVSQFLREKQLPYNEDSYLARFQLFLRRYEEFMVQAPPITELVGL

SEQ ID NO: 30910 - protein, 123 aa, Homo sapiens
  Payload ID: 6066
  Gene Symbol: FADS6
  Gene Name: fatty acid desaturase 6
  ENSP ID: ENSP00000480385
MEPTEPMEPTEPMEPTEPMEPTEPMEPTEPMEPARSAHRGGEALLRELEVLVQDVVRTSSWWERHGVDCAILALSLFALPAGVHSLHCRARHAWARQDAPCLHQRGGPGGLQHVEAALPQPLC

SEQ ID NO: 30911 - protein, 368 aa, Homo sapiens
  Payload ID: 6066
  Gene Symbol: FADS6
  Gene Name: fatty acid desaturase 6
  ENSP ID: ENSP00000481684
MEPTEPMEPTEPMEPTEPMEPTEPMEPTEPMEPARSAHRGGEALLRELEVLVQDVVRTSSWWERHGVDCAILALSLFALPAGFLCLRWENALVFASGITILGVCHYTLTVKGSHLATHGALTESKRWSKIWLLFFVEVCTAFTAEHATHGHVKMHHAYTNVVGLGDSSTWRLPCLNRYVYMFLAPFLLPIATPLVAVERLRKVELGTALRTLALISLGLYSHYWLLLNVSGFKNPSSALGCMFLTRSLLAHPYLHVNIFQHIGLPMFSRDNKPRRIHMMSLGVLNLARLPVLDWAFGHSIISCHVEHHLFPRLSDNMCLKVKPVVSQFLREKQLPYNEDSYLARFQLFLRRYEEFMVQAPPITELVGL

SEQ ID NO: 30912 - protein, 333 aa, Homo sapiens
  Payload ID: 6067
  Gene Symbol: FAXDC2
  Gene Name: fatty acid hydroxylase domain containing 2
  Uniprot ID: Q96IV6
  ENSP ID: ENSP00000320604
MKGEAGHMLHNEKSKQEGHIWGSMRRTAFILGSGLLSFVAFWNSVTWHLQRFWGASGYFWQAQWERLLTTFEGKEWILFFIGAIQVPCLFFWSFNGLLLVVDTTGKPNFISRYRIQVGKNEPVDPVKLRQSIRTVLFNQCMISFPMVVFLYPFLKWWRDPCRRELPTFHWFLLELAIFTLIEEVLFYYSHRLLHHPTFYKKIHKKHHEWTAPIGVISLYAHPIEHAVSNMLPVIVGPLVMGSHLSSITMWFSLALIITTISHCGYHLPFLPSPEFHDYHHLKFNQCYGVLGVLDHLHGTDTMFKQTKAYERHVLLLGFTPLSESIPDSPKRME

SEQ ID NO: 30913 - protein, 99 aa, Homo sapiens
  Payload ID: 6067
  Gene Symbol: FAXDC2
  Gene Name: fatty acid hydroxylase domain containing 2
  ENSP ID: ENSP00000428834
MRRTAFILGSGLLSFVAFWNSVTWHLQRFWGASGYFWQAQWERLLTTFEGKEWILFFIGGSCETAPVYPHSSFQPVHDIFPHGGLPLSLPQMVERPLPP

SEQ ID NO: 30914 - protein, 50 aa, Homo sapiens
  Payload ID: 6067
  Gene Symbol: FAXDC2
  Gene Name: fatty acid hydroxylase domain containing 2
  ENSP ID: ENSP00000428992
MKGEAGHMLHNEKSKQEGHIWGSMRRTAFILGSGLLSFVAFWNSVTWWIL

SEQ ID NO: 30915 - protein, 43 aa, Homo sapiens
  Payload ID: 6067
  Gene Symbol: FAXDC2
  Gene Name: fatty acid hydroxylase domain containing 2
  ENSP ID: ENSP00000429004
MRRTAFILGSGLLSFVAFWNSVTWCHPSALSLLLELQWASIGG

SEQ ID NO: 30916 - protein, 102 aa, Homo sapiens
  Payload ID: 6067
  Gene Symbol: FAXDC2
  Gene Name: fatty acid hydroxylase domain containing 2
  ENSP ID: ENSP00000429406
MKGEAGHMLHNEKSKQEGHIWGSMRRTAFILGSGLLSFVAFWNSVTWHLQRFWGASGYFWQAQWERLLTTFEGKEWILFFIGWRDLASQWDGSKQRVNSEIS

SEQ ID NO: 30917 - protein, 146 aa, Homo sapiens
  Payload ID: 6067
  Gene Symbol: FAXDC2
  Gene Name: fatty acid hydroxylase domain containing 2
  ENSP ID: ENSP00000429837
MRRTAFILGSGLLSFVAFWNSVTWHLQRFWGASGYFWQAQWERLLTTFEGKEWILFFIGAIQVPCLFFWSFNGLLLVVDTTGKPNFISRYRIQVGKNEPVDPVKLRQSIRTVLFNQCMISFPMVVFLYPFLKWWRDPCRRELPTFH

SEQ ID NO: 30918 - protein, 114 aa, Homo sapiens
  Payload ID: 6067
  Gene Symbol: FAXDC2
  Gene Name: fatty acid hydroxylase domain containing 2
  ENSP ID: ENSP00000429876
MRRTAFILGSGLLSFVAFWNSVTWHLQRFWGASGYFWQAQWERLLTTFEGKEWILFFIGAIQVPCLFFWSFNGLLLVVDTTGKPNFISRYRIQVGKNEPAGETWPRNGMEVNKE

SEQ ID NO: 30919 - protein, 310 aa, Homo sapiens
  Payload ID: 6067
  Gene Symbol: FAXDC2
  Gene Name: fatty acid hydroxylase domain containing 2
  Uniprot ID: Q96IV6
  ENSP ID: ENSP00000430286
MRRTAFILGSGLLSFVAFWNSVTWHLQRFWGASGYFWQAQWERLLTTFEGKEWILFFIGAIQVPCLFFWSFNGLLLVVDTTGKPNFISRYRIQVGKNEPVDPVKLRQSIRTVLFNQCMISFPMVVFLYPFLKWWRDPCRRELPTFHWFLLELAIFTLIEEVLFYYSHRLLHHPTFYKKIHKKHHEWTAPIGVISLYAHPIEHAVSNMLPVIVGPLVMGSHLSSITMWFSLALIITTISHCGYHLPFLPSPEFHDYHHLKFNQCYGVLGVLDHLHGTDTMFKQTKAYERHVLLLGFTPLSESIPDSPKRME

SEQ ID NO: 30920 - protein, 31 aa, Homo sapiens
  Payload ID: 6067
  Gene Symbol: FAXDC2
  Gene Name: fatty acid hydroxylase domain containing 2
  ENSP ID: ENSP00000431015
MKGEAGHMLHNEKSKQEGHIWGSMRRTAFIL

SEQ ID NO: 30921 - protein, 60 aa, Homo sapiens
  Payload ID: 6067
  Gene Symbol: FAXDC2
  Gene Name: fatty acid hydroxylase domain containing 2
  ENSP ID: ENSP00000431084
MKGEAGHMLHNEKSKQVPSKCLVSSSGASMGFYWWLTQQENLTSSLATEFRSARMNLWIL

SEQ ID NO: 30922 - protein, 2511 aa, Homo sapiens
  Payload ID: 6068
  Gene Symbol: FASN
  Gene Name: fatty acid synthase
  Uniprot ID: P49327
  ENSP ID: ENSP00000304592
MEEVVIAGMSGKLPESENLQEFWDNLIGGVDMVTDDDRRWKAGLYGLPRRSGKLKDLSRFDASFFGVHPKQAHTMDPQLRLLLEVTYEAIVDGGINPDSLRGTHTGVWVGVSGSETSEALSRDPETLVGYSMVGCQRAMMANRLSFFFDFRGPSIALDTACSSSLMALQNAYQAIHSGQCPAAIVGGINVLLKPNTSVQFLRLGMLSPEGTCKAFDTAGNGYCRSEGVVAVLLTKKSLARRVYATILNAGTNTDGFKEQGVTFPSGDIQEQLIRSLYQSAGVAPESFEYIEAHGTGTKVGDPQELNGITRALCATRQEPLLIGSTKSNMGHPEPASGLAALAKVLLSLEHGLWAPNLHFHSPNPEIPALLDGRLQVVDQPLPVRGGNVGINSFGFGGSNVHIILRPNTQPPPAPAPHATLPRLLRASGRTPEAVQKLLEQGLRHSQDLAFLSMLNDIAAVPATAMPFRGYAVLGGERGGPEVQQVPAGERPLWFICSGMGTQWRGMGLSLMRLDRFRDSILRSDEAVKPFGLKVSQLLLSTDESTFDDIVHSFVSLTAIQIGLIDLLSCMGLRPDGIVGHSLGEVACGYADGCLSQEEAVLAAYWRGQCIKEAHLPPGAMAAVGLSWEECKQRCPPGVVPACHNSKDTVTISGPQAPVFEFVEQLRKEGVFAKEVRTGGMAFHSYFMEAIAPPLLQELKKVIREPKPRSARWLSTSIPEAQWHSSLARTSSAEYNVNNLVSPVLFQEALWHVPEHAVVLEIAPHALLQAVLKRGLKPSCTIIPLMKKDHRDNLEFFLAGIGRLHLSGIDANPNALFPPVEFPAPRGTPLISPLIKWDHSLAWDVPAAEDFPNGSGSPSAAIYNIDTSSESPDHYLVDHTLDGRVLFPATGYLSIVWKTLARALGLGVEQLPVVFEDVVLHQATILPKTGTVSLEVRLLEASRAFEVSENGNLVVSGKVYQWDDPDPRLFDHPESPTPNPTEPLFLAQAEVYKELRLRGYDYGPHFQGILEASLEGDSGRLLWKDNWVSFMDTMLQMSILGSAKHGLYLPTRVTAIHIDPATHRQKLYTLQDKAQVADVVVSRWLRVTVAGGVHISGLHTESAPRRQQEQQVPILEKFCFTPHTEEGCLSERAALQEELQLCKGLVQALQTKVTQQGLKMVVPGLDGAQIPRDPSQQELPRLLSAACRLQLNGNLQLELAQVLAQERPKLPEDPLLSGLLDSPALKACLDTAVENMPSLKMKVVEVLAGHGHLYSRIPGLLSPHPLLQLSYTATDRHPQALEAAQAELQQHDVAQGQWDPADPAPSALGSADLLVCNCAVAALGDPASALSNMVAALREGGFLLLHTLLRGHPLGDIVAFLTSTEPQYGQGILSQDAWESLFSRVSLRLVGLKKSFYGSTLFLCRRPTPQDSPIFLPVDDTSFRWVESLKGILADEDSSRPVWLKAINCATSGVVGLVNCLRREPGGNRLRCVLLSNLSSTSHVPEVDPGSAELQKVLQGDLVMNVYRDGAWGAFRHFLLEEDKPEEPTAHAFVSTLTRGDLSSIRWVCSSLRHAQPTCPGAQLCTVYYASLNFRDIMLATGKLSPDAIPGKWTSQDSLLGMEFSGRDASGKRVMGLVPAKGLATSVLLSPDFLWDVPSNWTLEEAASVPVVYSTAYYALVVRGRVRPGETLLIHSGSGGVGQAAIAIALSLGCRVFTTVGSAEKRAYLQARFPQLDSTSFANSRDTSFEQHVLWHTGGKGVDLVLNSLAEEKLQASVRCLATHGRFLEIGKFDLSQNHPLGMAIFLKNVTFHGVLLDAFFNESSADWREVWALVQAGIRDGVVRPLKCTVFHGAQVEDAFRYMAQGKHIGKVVVQVLAEEPEAVLKGAKPKLMSAISKTFCPAHKSYIIAGGLGGFGLELAQWLIQRGVQKLVLTSRSGIRTGYQAKQVRRWRRQGVQVQVSTSNISSLEGARGLIAEAAQLGPVGGVFNLAVVLRDGLLENQTPEFFQDVCKPKYSGTLNLDRVTREACPELDYFVVFSSVSCGRGNAGQSNYGFANSAMERICEKRRHEGLPGLAVQWGAIGDVGILVETMSTNDTIVSGTLPQRMASCLEVLDLFLNQPHMVLSSFVLAEKAAAYRDRDSQRDLVEAVAHILGIRDLAAVNLDSSLADLGLDSLMSVEVRQTLERELNLVLSVREVRQLTLRKLQELSSKADEASELACPTPKEDGLAQQQTQLNLRSLLVNPEGPTLMRLNSVQSSERPLFLVHPIEGSTTVFHSLASRLSIPTYGLQCTRAAPLDSIHSLAAYYIDCIRQVQPEGPYRVAGYSYGACVAFEMCSQLQAQQSPAPTHNSLFLFDGSPTYVLAYTQSYRAKLTPGCEAEAETEAICFFVQQFTDMEHNRVLEALLPLKGLEERVAAAVDLIIKSHQGLDRQELSFAARSFYYKLRAAEQYTPKAKYHGNVMLLRAKTGGAYGEDLGADYNLSQVCDGKVSVHVIEGDHRTLLEGSGLESIISIIHSSLAEPRVSVREG

SEQ ID NO: 30923 - protein, 78 aa, Homo sapiens
  Payload ID: 6068
  Gene Symbol: FASN
  Gene Name: fatty acid synthase
  ENSP ID: ENSP00000462949
  MOD_RES (1)..(1): Any amino acid
XLASRLSIPTYGLQCTRGRCSPRAPTAWPATPTGPAWPLKCAPSCRPSRAQPPPTTASSCSTARPPTYWPTPRATGQS

SEQ ID NO: 30924 - protein, 2509 aa, Homo sapiens
  Payload ID: 6068
  Gene Symbol: FASN
  Gene Name: fatty acid synthase
  ENSP ID: ENSP00000488964
MEEVVIAGMSGKLPESENLQEFWDNLIGGVDMVTDDDRRWKAGLYGLPRRSGKLKDLSRFDASFFGVHPKQAHTMDPQLRLLLEVTYEAIVDGGINPDSLRGTHTGVWVGVSGSETSEALSRDPETLVGYSMVGCQRAMMANRLSFFFDFRGPSIALDTACSSSLMALQNAYQAIHSGQCPAAIVGGINVLLKPNTSVQFLRLGMLSPEGTCKAFDTAGNGYCRSEGVVAVLLTKKSLARRVYATILNAGTNTDGFKEQGVTFPSGDIQEQLIRSLYQSAGVAPESFEYIEAHGTGTKVGDPQELNGITRALCATRQEPLLIGSTKSNMGHPEPASGLAALAKVLLSLEHGLWAPNLHFHSPNPEIPALLDGRLQVVDQPLPVRGGNVGINSFGFGGSNVHIILRPNTQPPPAPAPHATLPRLLRASGRTPEAVQKLLEQGLRHSQDLAFLSMLNDIAAVPATAMPFRGYAVLGGERGGPEVQQVPAGERPLWFICSGMGTQWRGMGLSLMRLDRFRDSILRSDEAVKPFGLKVSQLLLSTDESTFDDIVHSFVSLTAIQIGLIDLLSCMGLRPDGIVGHSLGEVACGYADGCLSQEEAVLAAYWRGQCIKEAHLPPGAMAAVGLSWEECKQRCPPGVVPACHNSKDTVTISGPQAPVFEFVEQLRKEGVFAKEVRTGGMAFHSYFMEAIAPPLLQELKKVIREPKPRSARWLSTSIPEAQWHSSLARTSSAEYNVNNLVSPVLFQEALWHVPEHAVVLEIAPHALLQAVLKRGLKPSCTIIPLMKKDHRDNLEFFLAGIGRLHLSGIDANPNALFPPVEFPAPRGTPLISPLIKWDHSLAWDVPAAEDFPNGSGSPSAAIYNIDTSSESPDHYLVDHTLDGRVLFPATGYLSIVWKTLARALGLGVEQLPVVFEDVVLHQATILPKTGTVSLEVRLLEASRAFEVSENGNLVVSGKVYQWDDPDPRLFDHPESPTPNPTEPLFLAQAEVYKELRLRGYDYGPHFQGILEASLEGDSGRLLWKDNWVSFMDTMLQMSILGSAKHGLYLPTRVTAIHIDPATHRQKLYTLQDKAQVADVVVSRWLRVTVAGGVHISGLHTESAPRRQQEQQVPILEKFCFTPHTEEGCLSERAALQEELQLCKGLVQALQTKVTQQGLKMVVPGLDGAQIPRDPSQQELPRLLSAACRLQLNGNLQLELAQVLAQERPKLPEDPLLSGLLDSPALKACLDTAVENMPSLKMKVVLAGHGHLYSRIPGLLSPHPLLQLSYTATDRHPQALEAAQAELQQHDVAQGQWDPADPAPSALGSADLLVCNCAVAALGDPASALSNMVAALREGGFLLLHTLLRGHPLGDIVAFLTSTEPQYGQGILSQDAWESLFSRVSLRLVGLKKSFYGSTLFLCRRPTPQDSPIFLPVDDTSFRWVESLKGILADEDSSRPVWLKAINCATSGVVGLVNCLRREPGGNRLRCVLLSNLSSTSHVPEVDPGSAELQKVLQGDLVMNVYRDGAWGAFRHFLLEEDKPEEPTAHAFVSTLTRGDLSSIRWVCSSLRHAQPTCPGAQLCTVYYASLNFRDIMLATGKLSPDAIPGKWTSQDSLLGMEFSGRDASGKRVMGLVPAKGLATSVLLSPDFLWDVPSNWTLEEAASVPVVYSTAYYALVVRGRVRPGETLLIHSGSGGVGQAAIAIALSLGCRVFTTVGSAEKRAYLQARFPQLDSTSFANSRDTSFEQHVLWHTGGKGVDLVLNSLAEEKLQASVRCLATHGRFLEIGKFDLSQNHPLGMAIFLKNVTFHGVLLDAFFNESSADWREVWALVQAGIRDGVVRPLKCTVFHGAQVEDAFRYMAQGKHIGKVVVQVLAEEPEAVLKGAKPKLMSAISKTFCPAHKSYIIAGGLGGFGLELAQWLIQRGVQKLVLTSRSGIRTGYQAKQVRRWRRQGVQVQVSTSNISSLEGARGLIAEAAQLGPVGGVFNLAVVLRDGLLENQTPEFFQDVCKPKYSGTLNLDRVTREACPELDYFVVFSSVSCGRGNAGQSNYGFANSAMERICEKRRHEGLPGLAVQWGAIGDVGILVETMSTNDTIVSGTLPQRMASCLEVLDLFLNQPHMVLSSFVLAEKAAAYRDRDSQRDLVEAVAHILGIRDLAAVNLDSSLADLGLDSLMSVEVRQTLERELNLVLSVREVRQLTLRKLQELSSKADEASELACPTPKEDGLAQQQTQLNLRSLLVNPEGPTLMRLNSVQSSERPLFLVHPIEGSTTVFHSLASRLSIPTYGLQCTRAAPLDSIHSLAAYYIDCIRQVQPEGPYRVAGYSYGACVAFEMCSQLQAQQSPAPTHNSLFLFDGSPTYVLAYTQSYRAKLTPGCEAEAETEAICFFVQQFTDMEHNRVLEALLPLKGLEERVAAAVDLIIKSHQGLDRQELSFAARSFYYKLRAAEQYTPKAKYHGNVMLLRAKTGGAYGEDLGADYNLSQVCDGKVSVHVIEGDHRTLLEGSGLESIISIIHSSLAEPRVSVREG

SEQ ID NO: 30925 - protein, 150 aa, Homo sapiens
  Payload ID: 6068
  Gene Symbol: FASN
  Gene Name: fatty acid synthase
  ENSP ID: ENSP00000489514
MEEVVIAGMSGKLPESENLQEFWDNLIGGVDMVTDDDRRWKAGLYGLPRRSGKLKDLSRFDASFFGVHPKQAHTMDPQLRLLLEVTYEAIVDGGINPDSLRGTHTGVWVGVSGSETSEALSRDPETLVGYSMVGCQRAMMANRLSFFFDF

SEQ ID NO: 30926 - protein, 515 aa, Homo sapiens
  Payload ID: 6069
  Gene Symbol: FAR1
  Gene Name: fatty acyl CoA reductase 1
  Uniprot ID: Q8WVX9
  ENSP ID: ENSP00000346874
MVSIPEYYEGKNVLLTGATGFLGKVLLEKLLRSCPKVNSVYVLVRQKAGQTPQERVEEVLSGKLFDRLRDENPDFREKIIAINSELTQPKLALSEEDKEVIIDSTNIIFHCAATVRFNENLRDAVQLNVIATRQLILLAQQMKNLEVFMHVSTAYAYCNRKHIDEVVYPPPVDPKKLIDSLEWMDDGLVNDITPKLIGDRPNTYIYTKALAEYVVQQEGAKLNVAIVRPSIVGASWKEPFPGWIDNFNGPSGLFIAAGKGILRTIRASNNALADLVPVDVVVNMSLAAAWYSGVNRPRNIMVYNCTTGSTNPFHWGEVEYHVISTFKRNPLEQAFRRPNVNLTSNHLLYHYWIAVSHKAPAFLYDIYLRMTGRSPRMMKTITRLHKAMVFLEYFTSNSWVWNTENVNMLMNQLNPEDKKTFNIDVRQLHWAEYIENYCLGTKKYVLNEEMSGLPAARKHLNKLRNIRYGFNTILVILIWRIFIARSQMARNIWYFVVSLCYKFLSYFRASSTMRY

SEQ ID NO: 30927 - protein, 139 aa, Homo sapiens
  Payload ID: 6069
  Gene Symbol: FAR1
  Gene Name: fatty acyl CoA reductase 1
  ENSP ID: ENSP00000434624
MMKTITRLHKAMVFLEYFTSNSWVWNTENVNMLMNQLNPEDKKTFNIDVRQLHWAEYIENYCLGTKKYVLNEEMSGLPAARKHLNKLRNIRYGFNTILVILIWRIFIARSQMARNIWYFVVSLCYKFLSYFRASSTMRY

SEQ ID NO: 30928 - protein, 335 aa, Homo sapiens
  Payload ID: 6069
  Gene Symbol: FAR1
  Gene Name: fatty acyl CoA reductase 1
  ENSP ID: ENSP00000437111
MVSIPEYYEGKNVLLTGATGFLGKVLLEKLLRSCPKVNSVYVLVRQKAGQTPQERVEEVLSGKLFDRLRDENPDFREKIIAINSELTQPKLALSEEDKEVIIDSTNIIFHCAATVRFNENLRDAVQLNVIATRQLILLAQQMKNLEVFMHVSTAYAYCNRKHIDEVVYPPPVDPKKLIDSLEWMDDGLVNDITPKLIGDRPNTYIYTKALAEYVVQQEGAKLNVAIVRPSIVGASWKEPFPGWIDNFNGPSGLFIAAGKGILRTIRASNNALADLVPVDVVVNMSLAAAWYSGVNRPRNIMVYNCTTGSTNPFHWGEVGMILPVFLNVRINLKEP

SEQ ID NO: 30929 - protein, 515 aa, Homo sapiens
  Payload ID: 6070
  Gene Symbol: FAR2
  Gene Name: fatty acyl CoA reductase 2
  Uniprot ID: Q96K12
  ENSP ID: ENSP00000182377
MSTIAAFYGGKSILITGATGFLGKVLMEKLFRTSPDLKVIYILVRPKAGQTLQQRVFQILDSKLFEKVKEVCPNVHEKIRAIYADLNQNDFAISKEDMQELLSCTNIIFHCAATVRFDDTLRHAVQLNVTATRQLLLMASQMPKLEAFIHISTAYSNCNLKHIDEVIYPCPVEPKKIIDSLEWLDDAIIDEITPKLIRDWPNIYTYTKALGEMVVQQESRNLNIAIIRPSIVGATWQEPFPGWVDNINGPNGIIIATGKGFLRAIKATPMAVADVIPVDTVVNLMLAVGWYTAVHRPKSTLVYHITSGNMNPCNWHKMGVQVLATFEKIPFERPFRRPNANFTSNSFTSQYWNAVSHRAPAIIYDCYLRLTGRKPRMTKLMNRLLRTVSMLEYFINRSWEWSTYNTEMLMSELSPEDQRVFNFDVRQLNWLEYIENYVLGVKKYLLKEDMAGIPKAKQRLKRLRNIHYLFNTALFLIAWRLLIARSQMARNVWFFIVSFCYKFLSYFRASSTLKV

SEQ ID NO: 30930 - protein, 515 aa, Homo sapiens; identical to SEQ ID NO: 30929
  Payload ID: 6070
  Gene Symbol: FAR2
  Gene Name: fatty acyl CoA reductase 2
  Uniprot ID: Q96K12
  ENSP ID: ENSP00000443291

SEQ ID NO: 30931 - protein, 22 aa, Homo sapiens
  Payload ID: 6070
  Gene Symbol: FAR2
  Gene Name: fatty acyl CoA reductase 2
  ENSP ID: ENSP00000447467
  MOD_RES (1)..(1): Any amino acid
XMAGIPKAKQRLKRSCTPYSTL

SEQ ID NO: 30932 - protein, 85 aa, Homo sapiens
  Payload ID: 6070
  Gene Symbol: FAR2
  Gene Name: fatty acyl CoA reductase 2
  ENSP ID: ENSP00000449187
LSPEDQRVFNFDVRQLNWLEYIENYVLGVKKYLLKEDMAGIPKAKQRLKRLRNIHYLFNTALFLIAWRLLIARSQMARNVWFFIM

SEQ ID NO: 30933 - protein, 418 aa, Homo sapiens
  Payload ID: 6070
  Gene Symbol: FAR2
  Gene Name: fatty acyl CoA reductase 2
  Uniprot ID: Q96K12
  ENSP ID: ENSP00000449349
MQELLSCTNIIFHCAATVRFDDTLRHAVQLNVTATRQLLLMASQMPKLEAFIHISTAYSNCNLKHIDEVIYPCPVEPKKIIDSLEWLDDAIIDEITPKLIRDWPNIYTYTKALGEMVVQQESRNLNIAIIRPSIVGATWQEPFPGWVDNINGPNGIIIATGKGFLRAIKATPMAVADVIPVDTVVNLMLAVGWYTAVHRPKSTLVYHITSGNMNPCNWHKMGVQVLATFEKIPFERPFRRPNANFTSNSFTSQYWNAVSHRAPAIIYDCYLRLTGRKPRMTKLMNRLLRTVSMLEYFINRSWEWSTYNTEMLMSELSPEDQRVFNFDVRQLNWLEYIENYVLGVKKYLLKEDMAGIPKAKQRLKRLRNIHYLFNTALFLIAWRLLIARSQMARNVWFFIVSFCYKFLSYFRASSTLKV

SEQ ID NO: 30934 - protein, 67 aa, Homo sapiens
  Payload ID: 6070
  Gene Symbol: FAR2
  Gene Name: fatty acyl CoA reductase 2
  ENSP ID: ENSP00000449436
MSTIAAFYGGKSILITGATGFLGKVLMEKLFRTSPDLKVIYILVRPKAGQTLQQRVFQILDSKFESY

SEQ ID NO: 30935 - protein, 44 aa, Homo sapiens
  Payload ID: 6070
  Gene Symbol: FAR2
  Gene Name: fatty acyl CoA reductase 2
  ENSP ID: ENSP00000450117
MQELLSCTNIIFHCAATVRFDDTLRHAVQLNVTATRQLLLMASQ

SEQ ID NO: 30936 - protein, 380 aa, Homo sapiens
  Payload ID: 6071
  Gene Symbol: FOS
  Gene Name: FBJ murine osteosarcoma viral oncogene homolog
  Uniprot ID: P01100
  ENSP ID: ENSP00000306245
MMFSGFNADYEASSSRCSSASPAGDSLSYYHSPADSFSSMGSPVNAQDFCTDLAVSSANFIPTVTAISTSPDLQWLVQPALVSSVAPSQTRAPHPFGVPAPSAGAYSRAGVVKTMTGGRAQSIGRRGKVEQLSPEEEEKRRIRRERNKMAAAKCRNRRRELTDTLQAETDQLEDEKSALQTEIANLLKEKEKLEFILAAHRPACKIPDDLGFPEEMSVASLDLTGGLPEVATPESEEAFTLPLLNDPEPKPSVEPVKSISSMELKTEPFDDFLFPASSRPSGSETARSVPDMDLSGSFYAADWEPLHSGSLGMGPMATELEPLCTPVVTCTPSCTAYTSSFVFTYPEADSFPSCAAAHRKGSSSNEPSSDSLSSPTLLAL

SEQ ID NO: 30937 - protein, 344 aa, Homo sapiens
  Payload ID: 6071
  Gene Symbol: FOS
  Gene Name: FBJ murine osteosarcoma viral oncogene homolog
  Uniprot ID: P01100
  ENSP ID: ENSP00000442268
MMFSGFNADYEASSSRCSSASPAGDSLSYYHSPADSFSSMGSPVNAQDFCTDLAVSSANFIPTVTAISTSPDLQWLVQPALVSSVAPSQTRAPHPFGVPAPSAGAYSRAGVVKTMTGGRAQSIGRRGKVEQETDQLEDEKSALQTEIANLLKEKEKLEFILAAHRPACKIPDDLGFPEEMSVASLDLTGGLPEVATPESEEAFTLPLLNDPEPKPSVEPVKSISSMELKTEPFDDFLFPASSRPSGSETARSVPDMDLSGSFYAADWEPLHSGSLGMGPMATELEPLCTPVVTCTPSCTAYTSSFVFTYPEADSFPSCAAAHRKGSSSNEPSSDSLSSPTLLAL

SEQ ID NO: 30938 - protein, 170 aa, Homo sapiens
  Payload ID: 6071
  Gene Symbol: FOS
  Gene Name: FBJ murine osteosarcoma viral oncogene homolog
  ENSP ID: ENSP00000450519
MMFSGFNADYEASSSRCSSASPAGDSLSYYHSPADSFSSMGSPVNAQDFCTDLAVSSANFIPTVTAISTSPDLQWLVQPALVSSVAPSQTRAPHPFGVPAPSAGAYSRAGVVKTMTGGRAQSIGRRGKVEQVRNSSVLFLGMWGLGGKQPRRCRSPVQRMKPLMGLAAHP

SEQ ID NO: 30939 - protein, 232 aa, Homo sapiens
  Payload ID: 6071
  Gene Symbol: FOS
  Gene Name: FBJ murine osteosarcoma viral oncogene homolog
  ENSP ID: ENSP00000450886
MAAAKCRNRRRELTDTLQAETDQLEDEKSALQTEIANLLKEKEKLEFILAAHRPACKIPDDLGFPEEMSVASLDLTGGLPEVATPESEEAFTLPLLNDPEPKPSVEPVKSISSMELKTEPFDDFLFPASSRPSGSETARSVPDMDLSGSFYAADWEPLHSGSLGMGPMATELEPLCTPVVTCTPSCTAYTSSFVFTYPEADSFPSCAAAHRKGSSSNEPSSDSLSSPTLLAL

SEQ ID NO: 30940 - protein, 83 aa, Homo sapiens
  Payload ID: 6071
  Gene Symbol: FOS
  Gene Name: FBJ murine osteosarcoma viral oncogene homolog
  ENSP ID: ENSP00000451786
RLLRGPIADQSPSPFRSPRPLRWGLLQGWRCEDHDRRPSAEHWQEGQGGTEEEEKRRIRRERNKMAAAKCRNRRRELTDTLQA

SEQ ID NO: 30941 - protein, 176 aa, Homo sapiens
  Payload ID: 6071
  Gene Symbol: FOS
  Gene Name: FBJ murine osteosarcoma viral oncogene homolog
  ENSP ID: ENSP00000452386
MMFSGFNADYEASSSRCSSASPAGDSLSYYHSPADSFSSMGSPVNAQDFCTDLAVSSANFIPTVTAISTSPDLQWLVQPALVSSVAPSQTRAPHPFGVPAPSAGAYSRAGVVKTMTGGRAQSIGRRGKVEQLSPEEEEKRRIRRERNKMAAAKCRNRRRELTDTLQAVGTLWVAPF

SEQ ID NO: 30942 - protein, 142 aa, Homo sapiens
  Payload ID: 6071
  Gene Symbol: FOS
  Gene Name: FBJ murine osteosarcoma viral oncogene homolog
  ENSP ID: ENSP00000452440
MTGGRAQSIGRRGKVEQETDQLEDEKSALQTEIANLLKEKEKLEFILAAHRPACKIPDDLGFPEEMSVASLDLTGGLPEVATPESEEAFTLPLLNDPEPKPSVEPVKSISSMELKTEPFDDFLFPASSRPSGSETARSVPDM

SEQ ID NO: 30943 - protein, 137 aa, Homo sapiens
  Payload ID: 6071
  Gene Symbol: FOS
  Gene Name: FBJ murine osteosarcoma viral oncogene homolog
  ENSP ID: ENSP00000452443
MMFSGFNADYEASSSRCSSASPAGDSLSYYHSPADSFSSMGSPVNAQCQLHSHGHCHLDQSGPAVAGAARPRLLRGPIADQSPSPFRSPRPLRWGLLQGWRCEDHDRRPSAEHWQEGQGGTVISRRRREKENPKGKE

SEQ ID NO: 30944 - protein, 266 aa, Homo sapiens
  Payload ID: 6071
  Gene Symbol: FOS
  Gene Name: FBJ murine osteosarcoma viral oncogene homolog
  Uniprot ID: P01100
  ENSP ID: ENSP00000452590
MTGGRAQSIGRRGKVEQLSPEEEEKRRIRRERNKMAAAKCRNRRRELTDTLQAETDQLEDEKSALQTEIANLLKEKEKLEFILAAHRPACKIPDDLGFPEEMSVASLDLTGGLPEVATPESEEAFTLPLLNDPEPKPSVEPVKSISSMELKTEPFDDFLFPASSRPSGSETARSVPDMDLSGSFYAADWEPLHSGSLGMGPMATELEPLCTPVVTCTPSCTAYTSSFVFTYPEADSFPSCAAAHRKGSSSNEPSSDSLSSPTLLAL

SEQ ID NO: 30945 - protein, 338 aa, Homo sapiens
  Payload ID: 6072
  Gene Symbol: FOSB
  Gene Name: FBJ murine osteosarcoma viral oncogene homolog B
  Uniprot ID: P53539
  ENSP ID: ENSP00000245919
MFQAFPGDYDSGSRCSSSPSAESQYLSSVDSFGSPPTAAASQECAGLGEMPGSFVPTVTAITTSQDLQWLVQPTLISSMAQSQGQPLASQPPVVDPYDMPGTSYSTPGMSGYSSGGASGSGGPSTSGTTSGPGPARPARARPRRPREETLTPEEEEKRRVRRERNKLAAAKCRNRRRELTDRLQAETDQLEEEKAELESEIAELQKEKERLEFVLVAHKPGCKIPYEEGPGPGPLAEVRDLPGSAPAKEDGFSWLLPPPPPPPLPFQTSQDAPPNLTASLFTHSEVQVLGDPFPVVNPSYTSSFVLTCPEVSAFAGAQRTSGSDQPSDPLNSPSLLAL

SEQ ID NO: 30946 - protein, 302 aa, Homo sapiens
  Payload ID: 6072
  Gene Symbol: FOSB
  Gene Name: FBJ murine osteosarcoma viral oncogene homolog B
  Uniprot ID: P53539
  ENSP ID: ENSP00000407207
MFQAFPGDYDSGSRCSSSPSAESQYLSSVDSFGSPPTAAASQECAGLGEMPGSFVPTVTAITTSQDLQWLVQPTLISSMAQSQGQPLASQPPVVDPYDMPGTSYSTPGMSGYSSGGASGSGGPSTSGTTSGPGPARPARARPRRPREETETDQLEEEKAELESEIAELQKEKERLEFVLVAHKPGCKIPYEEGPGPGPLAEVRDLPGSAPAKEDGFSWLLPPPPPPPLPFQTSQDAPPNLTASLFTHSEVQVLGDPFPVVNPSYTSSFVLTCPEVSAFAGAQRTSGSDQPSDPLNSPSLLAL

SEQ ID NO: 30947 - protein, 195 aa, Homo sapiens
  Payload ID: 6072
  Gene Symbol: FOSB
  Gene Name: FBJ murine osteosarcoma viral oncogene homolog B
  Uniprot ID: P53539
  ENSP ID: ENSP00000414177
MFQAFPGDYDSGSRCSSSPSAESQYLSSVDSFGSPPTAAASQETDQLEEEKAELESEIAELQKEKERLEFVLVAHKPGCKIPYEEGPGPGPLAEVRDLPGSAPAKEDGFSWLLPPPPPPPLPFQTSQDAPPNLTASLFTHSEVQVLGDPFPVVNPSYTSSFVLTCPEVSAFAGAQRTSGSDQPSDPLNSPSLLAL

SEQ ID NO: 30948 - protein, 177 aa, Homo sapiens
  Payload ID: 6072
  Gene Symbol: FOSB
  Gene Name: FBJ murine osteosarcoma viral oncogene homolog B
  ENSP ID: ENSP00000465068
MFQAFPGDYDSGSRCSSSPSAESQYLSSVDSFGSPPTAAASQECAGLGEMPGSFVPTVTAITTSQDLQWLVQPTLISSMAQSQGQPLASQPPVVDPYDMPGTSYSTPGMSGYSSGGASGSGGPSTSGTTSGPGPARPARARPRRPREETVSKGHQNLAWVGGSKRGRKFLMNGGGLH

SEQ ID NO: 30949 - protein, 137 aa, Homo sapiens
  Payload ID: 6072
  Gene Symbol: FOSB
  Gene Name: FBJ murine osteosarcoma viral oncogene homolog B
  ENSP ID: ENSP00000465528
MPGSFVPTVTAITTSQDLQWLVQPTLISSMAQSQGQPLASQPPVVDPYDMPGTSYSTPGMSGYSSGGASGSGGPSTSGTTSGPGPARPARARPRRPREETLTPEEEEKRRVRRERNKLAAAKCRNRRRELTDRLQAE

SEQ ID NO: 30950 - protein, 237 aa, Homo sapiens
  Payload ID: 6072
  Gene Symbol: FOSB
  Gene Name: FBJ murine osteosarcoma viral oncogene homolog B
  ENSP ID: ENSP00000465552
MFQAFPGDYDSGSRCSSSPSAESQYLSSVDSFGSPPTAAASQECAGLGEMPGSFVPTVTAITTSQDLQWLVQPTLISSMAQSQGQPLASQPPVVDPYDMPGTSYSTPGMSGYSSGGASGSGGPSTSGTTSGPGPARPARARPRRPREETLTPEEEEKRRVRRERNKLAAAKCRNRRRELTDRLQAETDQLEEEKAELESEIAELQKEKERLEFVLVAHKPGCKIPYEEGPGPGPLAE

SEQ ID NO: 30951 - protein, 299 aa, Homo sapiens
  Payload ID: 6072
  Gene Symbol: FOSB
  Gene Name: FBJ murine osteosarcoma viral oncogene homolog B
  Uniprot ID: P53539
  ENSP ID: ENSP00000466530
MFQAFPGDYDSGSRCSSSPSAESQYLSSVDSFGSPPTAAASQSQGQPLASQPPVVDPYDMPGTSYSTPGMSGYSSGGASGSGGPSTSGTTSGPGPARPARARPRRPREETLTPEEEEKRRVRRERNKLAAAKCRNRRRELTDRLQAETDQLEEEKAELESEIAELQKEKERLEFVLVAHKPGCKIPYEEGPGPGPLAEVRDLPGSAPAKEDGFSWLLPPPPPPPLPFQTSQDAPPNLTASLFTHSEVQVLGDPFPVVNPSYTSSFVLTCPEVSAFAGAQRTSGSDQPSDPLNSPSLLAL

SEQ ID NO: 30952 - protein, 263 aa, Homo sapiens
  Payload ID: 6072
  Gene Symbol: FOSB
  Gene Name: FBJ murine osteosarcoma viral oncogene homolog B
  Uniprot ID: P53539
  ENSP ID: ENSP00000467497
MFQAFPGDYDSGSRCSSSPSAESQYLSSVDSFGSPPTAAASQSQGQPLASQPPVVDPYDMPGTSYSTPGMSGYSSGGASGSGGPSTSGTTSGPGPARPARARPRRPREETETDQLEEEKAELESEIAELQKEKERLEFVLVAHKPGCKIPYEEGPGPGPLAEVRDLPGSAPAKEDGFSWLLPPPPPPPLPFQTSQDAPPNLTASLFTHSEVQVLGDPFPVVNPSYTSSFVLTCPEVSAFAGAQRTSGSDQPSDPLNSPSLLAL

SEQ ID NO: 30953 - protein, 289 aa, Homo sapiens
  Payload ID: 6072
  Gene Symbol: FOSB
  Gene Name: FBJ murine osteosarcoma viral oncogene homolog B
  Uniprot ID: P53539
  ENSP ID: ENSP00000468207
MPGSFVPTVTAITTSQDLQWLVQPTLISSMAQSQGQPLASQPPVVDPYDMPGTSYSTPGMSGYSSGGASGSGGPSTSGTTSGPGPARPARARPRRPREETLTPEEEEKRRVRRERNKLAAAKCRNRRRELTDRLQAETDQLEEEKAELESEIAELQKEKERLEFVLVAHKPGCKIPYEEGPGPGPLAEVRDLPGSAPAKEDGFSWLLPPPPPPPLPFQTSQDAPPNLTASLFTHSEVQVLGDPFPVVNPSYTSSFVLTCPEVSAFAGAQRTSGSDQPSDPLNSPSLLAL

SEQ ID NO: 30954 - protein, 188 aa, Homo sapiens
  Payload ID: 6072
  Gene Symbol: FOSB
  Gene Name: FBJ murine osteosarcoma viral oncogene homolog B
  ENSP ID: ENSP00000468482
MPGSFVPTVTAITTSQDLQWLVQPTLISSMAQSQGQPLASQPPVVDPYDMPGTSYSTPGMSGYSSGGASGSGGPSTSGTTSGPGPARPARARPRRPREETLTPEEEEKRRVRRERNKLAAAKCRNRRRELTDRLQAETDQLEEEKAELESEIAELQKEKERLEFVLVAHKPGCKIPYEEGPGPGPLAE

SEQ ID NO: 30955 - protein, 291 aa, Homo sapiens
  Payload ID: 6072
  Gene Symbol: FOSB
  Gene Name: FBJ murine osteosarcoma viral oncogene homolog B
  Uniprot ID: P53539
  ENSP ID: ENSP00000485018
MFQAFPGDYDSGSRCSSSPSAESQYLSSVDSFGSPPTAAASQECAGLGEMPGSFVPTVTAITTSQDLQWLVQPTLISSMAQSQGQPLASQPPVVDPYDMPGTSYSTPGMSGYSSGGASGSGGPSTSGTTSGPGPARPARARPRRPREETLTPEEEEKRRVRRERNKLAAAKCRNRRRELTDRLQAETDQLEEEKAELESEIAELQKEKERLEFVLVAHKPGCKIPYEEGPGPGPLAEEVQVLGDPFPVVNPSYTSSFVLTCPEVSAFAGAQRTSGSDQPSDPLNSPSLLAL

SEQ ID NO: 30956 - protein, 326 aa, Homo sapiens
  Payload ID: 6073
  Gene Symbol: FBXL12
  Gene Name: F-box and leucine-rich repeat protein 12
  Uniprot ID: Q9NXK8
  ENSP ID: ENSP00000247977
MATLVELPDSVLLEIFSYLPVRDRIRISRVCHRWKRLVDDRWLWRHVDLTLYTMRPKVMWHLLRRYMASRLHSLRMGGYLFSGSQAPQLSPALLRALGQKCPNLKRLCLHVADLSMVPITSLPSTLRTLELHSCEISMAWLHKQQDPTVLPLLECIVLDRVPAFRDEHLQGLTRFRALRSLVLGGTYRVTETGLDAGLQELSYLQRLEVLGCTLSADSTLLAISRHLRDVRKIRLTVRGLSAPGLAVLEGMPALESLCLQGPLVTPEMPSPTEILSSCLTMPKLRVLELQGLGWEGQEAEKILCKGLPHCMVIVRACPKESMDWWM

SEQ ID NO: 30957 - protein, 55 aa, Homo sapiens
  Payload ID: 6073
  Gene Symbol: FBXL12
  Gene Name: F-box and leucine-rich repeat protein 12
  ENSP ID: ENSP00000464784
MATLVELPDSVLLEIFSYLPGLSPLEEAGGRPVAVATCRPDALHGPMMPSREIQQ

SEQ ID NO: 30958 - protein, 55 aa, Homo sapiens
  Payload ID: 6073
  Gene Symbol: FBXL12
  Gene Name: F-box and leucine-rich repeat protein 12
  ENSP ID: ENSP00000464858
MATLVELPDSVLLEIFSYLPVRDRIRISRVCHRWKRLVDDRWLWRHVDLTLYTAL

SEQ ID NO: 30959 - protein, 134 aa, Homo sapiens
  Payload ID: 6073
  Gene Symbol: FBXL12
  Gene Name: F-box and leucine-rich repeat protein 12
  ENSP ID: ENSP00000465439
MATLVELPDSVLLEIFSYLPVRDRIRISRVCHRWKRLVDDRWLWRHVDLTLYTVRAAGRAGLGRGRGARTPKTTSPTLGLCVGARAGDLEPGDPGPISASSLTSSSSTSGPQFPHPCNGDKGQYLPHGAIMGLH

SEQ ID NO: 30960 - protein, 53 aa, Homo sapiens
  Payload ID: 6073
  Gene Symbol: FBXL12
  Gene Name: F-box and leucine-rich repeat protein 12
  ENSP ID: ENSP00000466142
MATLVELPDSVLLEIFSYLPVRDRIRISRVCHRWKRLVDDRWLWRHVDLTLYT

SEQ ID NO: 30961 - protein, 85 aa, Homo sapiens
  Payload ID: 6073
  Gene Symbol: FBXL12
  Gene Name: F-box and leucine-rich repeat protein 12
  ENSP ID: ENSP00000467059
MATLVELPDSVLLEIFSYLPVRDRIRISRCGPASGGKGRAEGAAGTWRCDVARGWGRSNRASPPPGSVTAGRGWWTTGGCGDMST

SEQ ID NO: 30962 - protein, 273 aa, Homo sapiens
  Payload ID: 6073
  Gene Symbol: FBXL12
  Gene Name: F-box and leucine-rich repeat protein 12
  Uniprot ID: Q9NXK8
  ENSP ID: ENSP00000467359
MRPKVMWHLLRRYMASRLHSLRMGGYLFSGSQAPQLSPALLRALGQKCPNLKRLCLHVADLSMVPITSLPSTLRTLELHSCEISMAWLHKQQDPTVLPLLECIVLDRVPAFRDEHLQGLTRFRALRSLVLGGTYRVTETGLDAGLQELSYLQRLEVLGCTLSADSTLLAISRHLRDVRKIRLTVRGLSAPGLAVLEGMPALESLCLQGPLVTPEMPSPTEILSSCLTMPKLRVLELQGLGWEGQEAEKILCKGLPHCMVIVRACPKESMDWWM

SEQ ID NO: 30963 - protein, 88 aa, Homo sapiens
  Payload ID: 6073
  Gene Symbol: FBXL12
  Gene Name: F-box and leucine-rich repeat protein 12
  ENSP ID: ENSP00000467467
MRPKVMWHLLRRYMASRLHSLRMGGYLFSGSQAPQLSPALLRALGQKCPNLKRLCLHVADLSMVPITSLPSTLRTLELHSCEISMAWL

SEQ ID NO: 30964 - protein, 85 aa, Homo sapiens; identical to SEQ ID NO: 30961
  Payload ID: 6073
  Gene Symbol: FBXL12
  Gene Name: F-box and leucine-rich repeat protein 12
  ENSP ID: ENSP00000467523

SEQ ID NO: 30965 - protein, 69 aa, Homo sapiens
  Payload ID: 6073
  Gene Symbol: FBXL12
  Gene Name: F-box and leucine-rich repeat protein 12
  ENSP ID: ENSP00000467859
MATLVELPDSVLLEIFSYLPVRDRIRISRCDLKSCGTSFEGTWHPGSIPCGWVATCSLAPRPPSCPLLC

SEQ ID NO: 30966 - protein, 47 aa, Homo sapiens
  Payload ID: 6073
  Gene Symbol: FBXL12
  Gene Name: F-box and leucine-rich repeat protein 12
  ENSP ID: ENSP00000468033
MATLVELPDSVLLEIFSYLPGLSPLEEAGGRPVAVATCRPDALHDAT

SEQ ID NO: 30967 - protein, 273 aa, Homo sapiens; identical to SEQ ID NO: 30962
  Payload ID: 6073
  Gene Symbol: FBXL12
  Gene Name: F-box and leucine-rich repeat protein 12
  Uniprot ID: Q9NXK8
  ENSP ID: ENSP00000468369

SEQ ID NO: 30968 - protein, 41 aa, Homo sapiens
  Payload ID: 6073
  Gene Symbol: FBXL12
  Gene Name: F-box and leucine-rich repeat protein 12
  ENSP ID: ENSP00000468766
  MOD_RES (1)..(1): Any amino acid
XVLLEIFSYLPGLSPLEEAGGRPVAVATCRPDALHGWSAVV

SEQ ID NO: 30969 - protein, 735 aa, Homo sapiens
  Payload ID: 6074
  Gene Symbol: FBXL13
  Gene Name: F-box and leucine-rich repeat protein 13
  Uniprot ID: Q8NEE6
  ENSP ID: ENSP00000321927
MTPELMIKACSFYTGHLVKTHFCTWRDIARTNENVVLAEKMNRAVTCYNFRLQKSVFHHWHSYMEDQKEKLKNILLRIQQIIYCHKLTIILTKWRNTARHKSKKKEDELILKHELQLKKWKNRLILKRAAAEESNFPERSSSEVFLVDETLKCDISLLPERAILQIFFYLSLKDVIICGQVNHAWMLMTQLNSLWNAIDFSSVKNVIPDKYIVSTLQRWRLNVLRLNFRGCLLRPKTFRSVSHCRNLQELNVSDCPTFTDESMRHISEGCPGVLCLNLSNTTITNRTMRLLPRHFHNLQNLSLAYCRRFTDKGLQYLNLGNGCHKLIYLDLSGCTQISVQGFRYIANSCTGIMHLTINDMPTLTDNCVKALVEKCSRITSLVFTGAPHISDCTFRALSACKLRKIRFEGNKRVTDASFKFIDKNYPNLSHIYMADCKGITDSSLRSLSPLKQLTVLNLANCVRIGDMGLKQFLDGPASMRIRELNLSNCVRLSDASVMKLSERCPNLNYLSLRNCEHLTAQGIGYIVNIFSLVSIDLSGTDISNEGLNVLSRHKKLKELSVSECYRITDDGIQAFCKSSLILEHLDVSYCSQLSDMIIKALAIYCINLTSLSIAGCPKITDSAMEMLSAKCHYLHILDISGCVLLTDQILEDLQIGCKQLRILKMQYCTNISKKAAQRMSSKVQQQEYNTNDPPRWFGYDREGNPVTELDNITSSKGALELTVKKSTYSSEDQAA

SEQ ID NO: 30970 - protein, 707 aa, Homo sapiens
  Payload ID: 6074
  Gene Symbol: FBXL13
  Gene Name: F-box and leucine-rich repeat protein 13
  Uniprot ID: Q8NEE6
  ENSP ID: ENSP00000368607
MTPELMIKACSFYTGHLVKTHFCTWRDIARTNENVVLAEKMNRAVTCYNFRLQKSVFHHWHSYMEDQKEKLKNILLRIQQIIYCHKLTIILTKWRNTARHKSKKKEDELILKHELQLKKWKNRLILKRAAAEESNFPERSSSEVFLVDETLKCDISLLPERAILQIFFYLSLKDVIICGQVNHAWMLMTQLNSLWNAIDFSSVKNVIPDKYIVSTLQRWRLNVLRLNFRGCLLRPKTFRSVSHCRNLQELNVSDCPTFTDESMRHISEGCPGVLCLNLSNTTITNRTMRLLPRHFHNLQNLSLAYCRRFTDKGLQYLNLGNGCHKLIYLDLSGCTQISVQGFRYIANSCTGIMHLTINDMPTLTDNCVKALVEKCSRITSLVFTGAPHISDCTFRALSACKLRKIRFEGNKRVTDASFKFIDKNYPNLSHIYMADCKGITDSSLRSLSPLKQLTVLNLANCVRIGDMGLKQFLDGPASMRIRELNLSNCVRLSDASVMKLSERCPNLNYLSLRNCEHLTAQGIGYIVNIFSLVSIDLSGTDISNEAFCKSSLILEHLDVSYCSQLSDMIIKALAIYCINLTSLSIAGCPKITDSAMEMLSAKCHYLHILDISGCVLLTDQILEDLQIGCKQLRILKMQYCTNISKKAAQRMSSKVQQQEYNTNDPPRWFGYDREGNPVTELDNITSSKGALELTVKKSTYSSEDQAA

SEQ ID NO: 30971 - protein, 683 aa, Homo sapiens [sequence omitted]

SEQ ID NO: 30972 - protein, 735 aa, Homo sapiens; identical to SEQ ID NO: 30969
  Payload ID: 6074
  Gene Symbol: FBXL13
  Gene Name: F-box and leucine-rich repeat protein 13
  Uniprot ID: Q8NEE6
  ENSP ID: ENSP00000388608

SEQ ID NO: 30973 - protein, 210 aa, Homo sapiens
  Payload ID: 6074
  Gene Symbol: FBXL13
  Gene Name: F-box and leucine-rich repeat protein 13
  ENSP ID: ENSP00000390126
MASLRNANPRLKNYFKENYIPQVCEALLCGILVTCPEDPLRYLEGMIMVIIKSGLQNLLWDMCITPSMKPNIRRLSETYLEQLFELDDQLMTPELMIKACSFYTGHLVKTHFCTWRDIARTNENVVLAEKMNRAVTCYNFRLQKSVFHHWHSYMEDQKEKLKNILLRIQQIIYCHKLTIILTKWRNTARHKSKKKEDELILKHELQLKKW

SEQ ID NO: 30974 - protein, 690 aa, Homo sapiens
  Payload ID: 6074
  Gene Symbol: FBXL13
  Gene Name: F-box and leucine-rich repeat protein 13
  Uniprot ID: Q8NEE6
  ENSP ID: ENSP00000391550
MTPELMIKACSFYTGHLVKTHFCTWRDIARTNENVVLAEKMNRAVTCYNFRLQKSVFHHWHSYMEDQKEKLKNILLRIQQIIYCHKLTIILTKWRNTARHKSKKKEDELILKHELQLKKWKNRLILKRAAAEESNFPERSSSEVFLVDETLKCDISLLPERAILQIFFYLSLKDVIICGQVNHAWMLMTQLNSLWNAIDFSSVKNVIPDKYIVSTLQRWRLNVLRLNFRGCLLRPKTFRSVSHCRNLQELNVSDCPTFTDESMRHISEGCPGVLCLNLSNTTITNRTMRLLPRHFHNLQNLSLAYCRRFTDKGLQYLNLGNGCHKLIYLDLSGCTQISVQGFRYIANSCTGIMHLTINDMPTLTDNCVKALVEKCSRITSLVFTGAPHISDCTFRALSACKLRKIRFEGNKRVTDASFKFIDKNYPNLSHIYMADCKGITDSSLRSLSPLKQLTVLNLANCVRIGDMGLKQFLDGPASMRIRELNLSNCVRLSDASVMKLSERCPNLNYLSLRNCEHLTAQGIGYIVNIFSLVSIDLSGTDISNEGLNVLSRHKKLKELSVSECYRITDDGIQITDSAMEMLSAKCHYLHILDISGCVLLTDQILEDLQIGCKQLRILKMQYCTNISKKAAQRMSSKVQQQEYNTNDPPRWFGYDREGNPVTELDNITSSKGALELTVKKSTYSSEDQAA

SEQ ID NO: 30975 - protein, 684 aa, Homo sapiens
  Payload ID: 6074
  Gene Symbol: FBXL13
  Gene Name: F-box and leucine-rich repeat protein 13
  ENSP ID: ENSP00000405434
MASLRNANPRLKNYFKENYIPQVCEALLCGILVTCPEDPLRYLEGMIMVIIKSGLQNLLWDMCITPSMKPNIRRLSETYLEQLFELDDQLMTPELMIKACSFYTGHLVKTHFCTWRDIARTNENVVLAEKMNRAVTCYNFRLQKSVFHHWHSYMEDQKEKLKNILLRIQQIIYCHKLTIILTKWRNTARHKSKKKEDELILKHELQLKKWKNRLILKRAAAEESNFPERSSSEVFLVDETLKCDISLLPERAILQIFFYLSLKDVIICGQVNHAWMLMTQLNSLWNAIDFSSVKNVIPDKYIVSTLQRWRLNVLRLNFRGCLLRPKTFRSVSHCRNLQELNVSDCPTFTDESMRHISEGCPGVLCLNLSNTTITNRTMRLLPRHFHNLQNLSLAYCRRFTDKGLQYLNLGNGCHKLIYLDLSGCTQISVQGFRYIANSCTGIMHLTINDMPTLTDNCVKALVEKCSRITSLVFTGAPHISDCTFRALSACKLRKIRFEGNKRVTDASFKFIDKNYPNLSHIYMADCKGITDSSLRSLSPLKQLTVLNLANCVRIGDMGLKQFLDGPASMRIRELNLSNCVRLSDASVMKLSERCPNLNYLSLRNCEHLTAQGIGYIVNIFSLVSIDLSGTDISNEGLNVLSRHKKLKELSVSECYRITDDGIQIARMEASANKEGLPKTPIADY

SEQ ID NO: 30976 - protein, 453 aa, Homo sapiens
  Payload ID: 6074
  Gene Symbol: FBXL13
  Gene Name: F-box and leucine-rich repeat protein 13
  Uniprot ID: Q8NEE6
  ENSP ID: ENSP00000409716
MTPELMIKACSFYTGHLVKTHFCTWRDIARTNENVVLAEKMNRAVTCYNFRLQKSVFHHWHSYMEDQKEKLKNILLRIQQIIYCHKLTIILTKWRNTARHKSKKKEDELILKHELQLKKWKNRLILKRAAAEESNFPERSSSEVFLVDETLKCDISLLPERAILQIFFYLSLKDVIICGQVNHAWMLMTQLNSLWNAIDFSSVKNVIPDKYIVSTLQRWRLNVLRLNFRGCLLRPKTFRSVSHCRNLQELNVSDCPTFTDESMRHISEGCPGVLCLNLSNTTITNRTMRLLPRHFHNLQNLSLAYCRRFTDKGLQYLNLGNGCHKLIYLDLSGCTQITDSAMEMLSAKCHYLHILDISGCVLLTDQILEDLQIGCKQLRILKMQYCTNISKKAAQRMSSKVQQQEYNTNDPPRWFGYDREGNPVTELDNITSSKGALELTVKKSTYSSEDQAA

SEQ ID NO: 30977 - protein, 418 aa, Homo sapiens
  Payload ID: 6075
  Gene Symbol: FBXL14
  Gene Name: F-box and leucine-rich repeat protein 14
  Uniprot ID: Q8N1E6
  ENSP ID: ENSP00000344855
METHISCLFPELLAMIFGYLDVRDKGRAAQVCTAWRDAAYHKSVWRGVEAKLHLRRANPSLFPSLQARGIRRVQILSLRRSLSYVIQGMANIESLNLSGCYNLTDNGLGHAFVQEIGSLRALNLSLCKQITDSSLGRIAQYLKGLEVLELGGCSNITNTGLLLIAWGLQRLKSLNLRSCRHLSDVGIGHLAGMTRSAAEGCLGLEQLTLQDCQKLTDLSLKHISRGLTGLRLLNLSFCGGISDAGLLHLSHMGSLRSLNLRSCDNISDTGIMHLAMGSLRLSGLDVSFCDKVGDQSLAYIAQGLDGLKSLSLCSCHISDDGINRMVRQMHGLRTLNIGQCVRITDKGLELIAEHLSQLTGIDLYGCTRITKRGLERITQLPCLKVLNLGLWQMTDSEKEARGDFSPLFTVRTRGSSRR

SEQ ID NO: 30978 - protein, 300 aa, Homo sapiens
  Payload ID: 6076
  Gene Symbol: FBXL15
  Gene Name: F-box and leucine-rich repeat protein 15
  Uniprot ID: Q9H469
  ENSP ID: ENSP00000224862
MEPPMEPSGGEQEPGAVRFLDLPWEDVLLPHVLNRVPLRQLLRLQRVSRAFRSLVQLHLAGLRRFDAAQVGPQIPRAALARLLRDAEGLQELALAPCHEWLSDEDLVPVLARNPQLRSVALGGCGQLSRRALGALAEGCPRLQRLSLAHCDWVDGLALRGLADRCPALEELDLTACRQLKDEAIVYLAQRRGAGLRSLSLAVNANVGDAAVQELARNCPELHHLDLTGCLRVGSDGVRTLAEYCPVLRSLRVRHCHHVAESSLSRLRKRGVDIDVEPPLHQALVLLQDMAGFAPFVNLQV

SEQ ID NO: 30979 - protein, 296 aa, Homo sapiens
  Payload ID: 6076
  Gene Symbol: FBXL15
  Gene Name: F-box and leucine-rich repeat protein 15
  ENSP ID: ENSP00000358972
MEPSGGEQEPGAVRFLDLPWEDVLLPHVLNRVPLRQLLRLQRVSRAFRSLVQLHLAGLRRFDAAQVGPQIPRAALARLLRDAEGLQELALAPCHEWLSDEDLVPVLARNPQLRSVALGGCGQLSRRALGALAEGCPRLQRLSLAHCDWVDGLALRGLADRCPALEELDLTACRQLKDEAIVYLAQRRGAGLRSLSLAVNANVGDAAVQELARNCPELHHLDLTGCLRVGSDGVRTLAEYCPVLRSLRVRHCHHVAESSLSRLRKRGVDIDVEPPLHQALVLLQDMAGFAPFVNLQV

SEQ ID NO: 30980 - protein, 157 aa, Homo sapiens
  Payload ID: 6076
  Gene Symbol: FBXL15
  Gene Name: F-box and leucine-rich repeat protein 15
  ENSP ID: ENSP00000392215
MRSGFRCDEPAEAVAPERQTVSGAVALASFTSPHTHPVDDGGRHYSWGSPKRILGLGPGDAAKEAGLVRPLQGQSEKILLRTRNRQPMEPPMEPSGGEQEPGAVRFLDLPWEDVLLPHVLNRVPLRQLLRLQRVSRAFRSLVQLHLAGLRRFDAAQV

SEQ ID NO: 30981 - protein, 203 aa, Homo sapiens
  Payload ID: 6076
  Gene Symbol: FBXL15
  Gene Name: F-box and leucine-rich repeat protein 15
  ENSP ID: ENSP00000403646
MEPPMEPSGGEQEPGAVRFLDLPWEDVLLPHVLNRVPLRQLLRLQRVSRAFRSLVQLHLAGLRRFDAAQVGPQIPRAALARLLRDAEGLQELALAPCHEWLSDEDLVPVLARNPQLRSVALGGCGQLSRRALGALAEGCPRLQRLSLAHCDWVDGLALRGLADRCPALEELDLTACRQLKDEAIVYLAQRRGAGLRSLSLAVN

SEQ ID NO: 30982 - protein, 208 aa, Homo sapiens
  Payload ID: 6076
  Gene Symbol: FBXL15
  Gene Name: F-box and leucine-rich repeat protein 15
  ENSP ID: ENSP00000405961
MEPPMEPSGGEQEPGAVRFLDLPWEDVLLPHVLNRVPLRQLLRLQRVSRAFRSLVQLHLAGLRRFDAAQVGPQIPRAALARLLRDAEGLQELALAPCHEWLSDEDLVPVLARNPQLRSVALGGCGQLSRRALGALAEGCPRLQRLSLAHCDWVDGLALRGLADRCPALEELDLTACRQLKDEAIVYLAQRRGAGLRSLSLAVNANVGD

SEQ ID NO: 30983 - protein, 190 aa, Homo sapiens
  Payload ID: 6076
  Gene Symbol: FBXL15
  Gene Name: F-box and leucine-rich repeat protein 15
  ENSP ID: ENSP00000411435
MEPPMEPSGGEQEPGAVRFLDLPWEDVLLPHVLNRVPLRQLLRLQRVSRAFRSLVQLHLAGLRRFDAAQVGPQIPRAALARLLRDAEGLQELALAPCHEWLSDEDLVPVLARNPQLRSVALGGCGQLSRRALGALAEGCPRLQRLSLAHCDWVDGLALRGLADRCPALEELDLTACRQLKDEAIVYLAQR

SEQ ID NO: 30984 - protein, 479 aa, Homo sapiens
  Payload ID: 6077
  Gene Symbol: FBXL16
  Gene Name: F-box and leucine-rich repeat protein 16
  Uniprot ID: Q8N461
  ENSP ID: ENSP00000318674
MSSPGIDGDPKPPCLPRNGLVKLPGQPNGLGAASITKGTPATKNRPCQPPPPPTLPPPSLAAPLSRAALAGGPCTPAGGPASALAPGHPAERPPLATDEKILNGLFWYFSACEKCVLAQVCKAWRRVLYQPKFWAGLTPVLHAKELYNVLPGGEKEFVNLQGFAARGFEGFCLVGVSDLDICEFIDNYALSKKGVKAMSLKRSTITDAGLEVMLEQMQGVVRLELSGCNDFTEAGLWSSLSARITSLSVSDCINVADDAIAAISQLLPNLAELSLQAYHVTDTALAYFTARQGHSTHTLRLLSCWEITNHGVVNVVHSLPNLTALSLSGCSKVTDDGVELVAENLRKLRSLDLSWCPRITDMALEYVACDLHRLEELVLDRCVRITDTGLSYLSTMSSLRSLYLRWCCQVQDFGLKHLLALGSLRLLSLAGCPLLTTTGLSGLVQLQELEELELTNCPGATPELFKYFSQHLPRCLVIE

SEQ ID NO: 30985 - protein, 479 aa, Homo sapiens; identical to SEQ ID NO: 30984
  Payload ID: 6077
  Gene Symbol: FBXL16
  Gene Name: F-box and leucine-rich repeat protein 16
  Uniprot ID: Q8N461
  ENSP ID: ENSP00000380746

SEQ ID NO: 30986 - protein, 267 aa, Homo sapiens
  Payload ID: 6077
  Gene Symbol: FBXL16
  Gene Name: F-box and leucine-rich repeat protein 16
  Uniprot ID: Q8N461
  ENSP ID: ENSP00000455217
MLEQMQGVVRLELSGCNDFTEAGLWSSLSARITSLSVSDCINVADDAIAAISQLLPNLAELSLQAYHVTDTALAYFTARQGHSTHTLRLLSCWEITNHGVVNVVHSLPNLTALSLSGCSKVTDDGVELVAENLRKLRSLDLSWCPRITDMALEYVACDLHRLEELVLDRCVRITDTGLSYLSTMSSLRSLYLRWCCQVQDFGLKHLLALGSLRLLSLAGCPLLTTTGLSGLVQLQELEELELTNCPGATPELFKYFSQHLPRCLVIE

SEQ ID NO: 30987 - protein, 303 aa, Homo sapiens
  Payload ID: 6078
  Gene Symbol: FBXL17
  Gene Name: F-box and leucine-rich repeat protein 17
  Uniprot ID: Q9UF56
  ENSP ID: ENSP00000352683
MSDNGVCVLAFKCPGLLRYTAYRCKQLSDTSIIAVASHCPLLQKVHVGNQDKLTDEGLKQLGSKCRELKDIHFGQCYKISDEGMIVIAKGCLKLQRIYMQENKLVTDQSVKAFAEHCPELQYVGFMGCSVTSKGVIHLTKLRNLSSLDLRHITELDNETVMEIVKRCKNLSSLNLCLNWIINDRCVEVIAKEGQNLKELYLVSCKITDYALIAIGRYSMTIETVDVGWCKEITDQGATLIAQSSKSLRYLGLMRCDKVNEVTVEQLVQQYPHITFSTVLQDCKRTLERAYQMGWTPNMSAASS

SEQ ID NO: 30988 - protein, 314 aa, Homo sapiens
  Payload ID: 6078
  Gene Symbol: FBXL17
  Gene Name: F-box and leucine-rich repeat protein 17
  Uniprot ID: Q9UF56
  ENSP ID: ENSP00000418111
MSDNGVCVLAFKCPGLLRYTAYRCKQLSDTSIIAVASHCPLLQKVHVGNQDKLTDEGLKQLGSKCRELKDIHFGQCYKISDEGMIVIAKGCLKLQRIYMQENKLVTDQSVKAFAEHCPELQYVGFMGCSVTSKGVIHLTKLRNLSSLDLRHITELDNETVMEIVKRCKNLSSLNLCLNWIINDRCVEVIAKEGQNLKELYLVSCKITDYALIAIGRYSMTIETVDVGWCKEITDQGATLIAQSSKSLRYLGLMRCDKVRVDYQVVCFLHISIVNSLMSYPLSFSISTPVYYILYIHFICIYAIIAMHCLPAFVN

SEQ ID NO: 30989 - protein, 701 aa, Homo sapiens
  Payload ID: 6078
  Gene Symbol: FBXL17
  Gene Name: F-box and leucine-rich repeat protein 17
  Uniprot ID: Q9UF56
  ENSP ID: ENSP00000437464
MGHLLSKEPRNRPSQKRPRCCSWCRRRRPLLRLPRRTPAKVPPQPAAPRSRDCFFRGPCMLCFIVHSPGAPAPAGPEEEPPLSPPPRDGAYAAASSSQHLARRYAALAAEDCAAAARRFLLSSAAAAAAAAASASSPASCCKELGLAAAAAWEQQGRSLFLASLGPVRFLGPPAAVQLFRGPTPSPAELPTPPEMVCKRKGAGVPACTPCKQPRCGGGGCGGGGGGGGGGGPAGGGASPPRPPDAGCCQAPEQPPQPLCPPPSSPTSEGAPTEAGGDAVRAGGTAPLSAQQQHECGDADCRESPENPCDCHREPPPETPDINQLPPSILLKIFSNLSLDERCLSASLVCKYWRDLCLDFQFWKQLDLSSRQQVTDELLEKIASRSQNIIEINISDCRSMSDNGVCVLAFKCPGLLRYTAYRCKQLSDTSIIAVASHCPLLQKVHVGNQDKLTDEGLKQLGSKCRELKDIHFGQCYKISDEGMIVIAKGCLKLQRIYMQENKLVTDQSVKAFAEHCPELQYVGFMGCSVTSKGVIHLTKLRNLSSLDLRHITELDNETVMEIVKRCKNLSSLNLCLNWIINDRCVEVIAKEGQNLKELYLVSCKITDYALIAIGRYSMTIETVDVGWCKEITDQGATLIAQSSKSLRYLGLMRCDKVNEVTVEQLVQQYPHITFSTVLQDCKRTLERAYQMGWTPNMSAASS

SEQ ID NO: 30990 - protein, 463 aa, Homo sapiens
  Payload ID: 6078
  Gene Symbol: FBXL17
  Gene Name: F-box and leucine-rich repeat protein 17
  ENSP ID: ENSP00000481439
MVCKRKGAGVPACTPCKQPLCPPPSSPTSEGAPTEAGGDAVRAGGTAPLSAQQQHECGDADCRESPENPCDCHREPPPETPDINQLPPSILLKIFSNLSLDERCLSASLVCKYWRDLCLDFQFWKQLDLSSRQQVTDELLEKIASRSQNIIEINISDCRSMSDNGVCVLAFKCPGLLRYTAYRCKQLSDTSIIAVASHCPLLQKVHVGNQDKLTDEGLKQLGSKCRELKDIHFGQCYKISDEGMIVIAKGCLKLQRIYMQENKLVTDQSVKAFAEHCPELQYVGFMGCSVTSKGVIHLTKLRNLSSLDLRHITELDNETVMEIVKRCKNLSSLNLCLNWIINDRCVEVIAKEGQNLKELYLVSCKITDYALIAIGRYSMTIETVDVGWCKEITDQGATLIAQSSKSLRYLGLMRCDKVNEVTVEQLVQQYPHITFSTVLQDCKRTLERAYQMGWTPNMSAASS

SEQ ID NO: 30991 - protein, 718 aa, Homo sapiens
  Payload ID: 6079
  Gene Symbol: FBXL18
  Gene Name: F-box and leucine-rich repeat protein 18
  Uniprot ID: Q96ME1
  ENSP ID: ENSP00000371805
MASSGEDISNDDDDMHPAAAGMADGVHLLGFSDEILLHILSHVPSTDLILNVRRTCRKLAALCLDKSLIHTVLLQKDYQASEDKVRQLVKEIGREIQQLSMAGCYWLPGSTVEHVARCRSLVKVNLSGCHLTSLRLSKMLSALQHLRSLAIDVSPGFDASQLSSECKATLSRVRELKQTLFTPSYGVVPCCTSLEKLLLYFEILDRTREGAILSGQLMVGQSNVPHYQNLRVFYARLAPGYINQEVVRLYLAVLSDRTPQNLHAFLISVPGSFAESGATKNLLDSMARNVVLDALQLPKSWLNGSSLLQHMKFNNPFYFSFSRCTLSGGHLIQQVINGGKDLRSLASLNLSGCVHCLSPDSLLRKAEDDIDSSILETLVASCCNLRHLNLSAAHHHSSEGLGRHLCQLLARLRHLRSLSLPVCSVADSAPRADRAPAQPAMHAVPRGFGKKVRVGVQSCPSPFSGQACPQPSSVFWSLLKNLPFLEHLELIGSNFSSAMPRNEPAIRNSLPPCSRAQSVGDSEVAAIGQLAFLRHLTLAQLPSVLTGSGLVNIGLQCQQLRSLSLANLGMMGKVVYMPALSDMLKHCKRLRDLRLEQPYFSANAQFFQALSQCPSLQRLCLVSRSGTLQPDAVLAFMARCLQVVMCHLFTGESLATCKSLQQSLLRSFQAERPALNVVIFPLLHEGLTDVIRDVPLVHLDEITLFKSRVAEEPPNLWW

SEQ ID NO: 30992 - protein, 685 aa, Homo sapiens
  Payload ID: 6079
  Gene Symbol: FBXL18
  Gene Name: F-box and leucine-rich repeat protein 18
  ENSP ID: ENSP00000405896
  MOD_RES (1)..(1): Any amino acid
XCRSLVKVNLSGCHLTSLRLSKMLSALQHLRSLAIDVSPGFDASQLSSECKATLSRVRELKQTLFTPSYGVVPCCTSLEKLLLYFEILDRTREGAILSGQLMVGQSNVPHYQNLRVFYARLAPGYINQEVVRLYLAVLSDRTPQNLHAFLISVPGSFAESGATKNLLDSMARNVVLDALQLPKSWLNGSSLLQHMKFNNPFYFSFSRCTLSGGHLIQQVINGGKDLRSLASLNLSGCVHCLSPDSLLRKAEDDIDSSILETLVASCCNLRHLNLSAAHHHSSEGLGRHLCQLLARLRHLRSLSLPVCSVADSAPRADRAPAQPAMHAVPRGFGKKVRVGVQSCPSPFSGQACPQPSSVFWSLLKNLPFLEHLELIGSNFSSAMPRNEPAIRNSLPPCSRAQSVGDSEVAAIGQLAFLRHLTLAQLPSVLTGSGLVNIGLQCQQLRSLSLANLGMMGKVVYMPALSDMLKHCKRLRDLRLEQPYFSANAQFFQALSQCPSLQRLCLVSRSGTLQPDAVLAFMARCLQVVMCHLFTGESLATCKSLQQSLLRRWGEVTGRRPQLFTELREEPSARTSRATGRRQPCLPDSGVVCCPCGRPLAVSGIILVGVSPSLVVKTTCVYRVLFKNLDYASIFFLVCLFETESHSVVQAGVQWRDLSSLQPLLSGLQPQPPEQLGLQVCTTIPG

SEQ ID NO: 30993 - protein, 668 aa, Homo sapiens
  Payload ID: 6079
  Gene Symbol: FBXL18
  Gene Name: F-box and leucine-rich repeat protein 18
  Uniprot ID: Q96ME1
  ENSP ID: ENSP00000415064
MASSGEDISNDDDDMHPAAAGMADGVHLLGFSDEILLHILSHVPSTDLILNVRRTCRKLAALCLDKSLIHTVLLQKDYQASEDKVRQLVKEIGREIQQLSMAGCYWLPGSTVEHVARCRSLVKVNLSGCHLTSLRLSKMLSALQHLRSLAIDVSPGFDASQLSSECKATLSRVRELKQTLFTPSYGVVPCCTSLEKLLLYFEILDRTREGAILSGQLMVGQSNVPHYQNLRVFYARLAPGYINQEVVRLYLAVLSDRTPQNLHAFLISVPGSFAESGATKNLLDSMARNVVLDALQLPKSWLNGSSLLQHMKFNNPFYFSFSRCTLSGGHLIQQVINGGKDLRSLASLNLSGCVHCLSPDSLLRKAEDDIDSSILETLVASCCNLRHLNLSAAHHHSSEGLGRHLCQLLARLRHLRSLSLPVCSVADSAPRADRAPAQPAMHAVPRGFGKKVRVGVQSCPSPFSGQACPQPSSVFWSLLKNLPFLEHLELIGSNFSSAMPRNEPAIRNSLPPCSRAQSVGDSEVAAIGQLAFLRHLTLAQLPSVLTGSGLVNIGLQCQQLRSLSLANLGMMGKVVYMPALSDMLKHCKRLRDLRLEQPYFSANAQFFQALSQCPSLQRLCLVSRSGTLQPDAVLAFMARCLQVVMCHLFTGESLATCKSLQQSLLRSR

SEQ ID NO: 30994 - protein, 365 aa, Homo sapiens
  Payload ID: 6079
  Gene Symbol: FBXL18
  Gene Name: F-box and leucine-rich repeat protein 18
  Uniprot ID: Q96ME1
  ENSP ID: ENSP00000444797
MASSGEDISNDDDDMHPAAAGMADGVHLLGFSDEILLHILSHVPSTDLILNVRRTCRKLAALCLDKSLIHTVLLQKDYQASEDKVRQLVKEIGREIQQLSMAGCYWLPGSTVEHVARCRSLVKVNLSGCHLTSLRLSKMLSALQHLRSLAIDVSPGFDASQLSSECKATLSRVRELKQTLFTPSYGVVPCCTSLEKLLLYFEILDRTREGAILSGQLMVGQSNVPHYQNLRVFYARLAPGYINQEVVRLYLAVLSDRTPQNLHAFLISVPGSFAESGATKNLLDSMARNVVLDALQLPKSWLNGSSLLQHMKFNNPFYFSFSRCTLSGGHLIQQVINGGKDLRSLASLNLSGCVHCLSPDSLLCR

SEQ ID NO: 30995 - protein, 259 aa, Homo sapiens
  Payload ID: 6079
  Gene Symbol: FBXL18
  Gene Name: F-box and leucine-rich repeat protein 18
  ENSP ID: ENSP00000481397
MHAVPRGFGKKVRVGVQSCPPLLGPGVPPALLRVLVSAEEPALPGTPRADWVQLLLRHAPQRARHPQLAPTLQPRTECRGLGGGRHRPAGLPAAPDARTAAQRPYGLRAGQYRPAVPAVAVPVAGQPGHDGEGGVHARALRHVEALQAAEGPQAGAALLQRQRPVLPGAEPVPLAAAPVPGLSQRHPPARCRAGLHGSLPAGCHVPPVHRGVPRHLQEPAAVASPQLPGRAARVKRRHLPSAPRGPDRRHPGRPPGAPG

SEQ ID NO: 30996 - protein, 674 aa, Homo sapiens
  Payload ID: 6080
  Gene Symbol: FBXL19
  Gene Name: F-box and leucine-rich repeat protein 19
  ENSP ID: ENSP00000339712
MSSSSRGPGAGARRRRTRCRRCRACVRTECGDCHFCRDMKKFGGPGRMKQSCLLRQCTAPVLPHTAVCLLCGEAGKEDTVEGEEEKFGLSLMECTICNEIVHPGCLKMGKAEGVINAEIPNCWECPRCTQEGRTSKDSGEGPGRRRADNGEEGASLGSGWKLTEEPPLPPPPPRRKGPLPAGPPPEDVPGPPKRKEREAGNEPPTPRKKVKGGRERHLKKVGGDACLLRGSDPGGPGLLPPRVLNPSQAFSSCHPGLPPENWEKPKPPLASAEGPAVPSPSPQREKLERFKRMCQLLERVPDTSSSSSDSDSDSDSSGTSLSEDEAPGEARNGRRPARGSSGEKENRGGRRAVRPGSGGPLLSWPLGPAPPPRPPQLERHVVRPPPRSPEPDTLPLAAGSDHPLPRAAWLRVFQHLGPRELCICMRVCRTWSRWCYDKRLWPRMDLSRRKSLTPPMLSGVVRRQPRALDLSWTGVSKKQLMWLLNRLQGLQELVLSGCSWLSVSALGSAPLPALRLLDLRWIEDVKDSQLRELLLPPPDTKPGQTESRGRLQGVAELRLAGLELTDASLRLLLRHAPQLSALDLSHCAHVGDPSVHLLTAPTSPLRETLVHLNLAGCHRLTDHCLPLFRRCPRLRRLDLRSCRQLSPEACARLAAAGPPGPFRCPEEKLLLKDS

SEQ ID NO: 30997 - protein, 694 aa, Homo sapiens
  Payload ID: 6080
  Gene Symbol: FBXL19
  Gene Name: F-box and leucine-rich repeat protein 19
  Uniprot ID: Q6PCT2
  ENSP ID: ENSP00000369666
MGMKVPGKGESGPSALLTPPMSSSSRGPGAGARRRRTRCRRCRACVRTECGDCHFCRDMKKFGGPGRMKQSCLLRQCTAPVLPHTAVCLLCGEAGKEDTVEGEEEKFGLSLMECTICNEIVHPGCLKMGKAEGVINAEIPNCWECPRCTQEGRTSKDSGEGPGRRRADNGEEGASLGSGWKLTEEPPLPPPPPRRKGPLPAGPPPEDVPGPPKRKEREAGNEPPTPRKKVKGGRERHLKKVGGDACLLRGSDPGGPGLLPPRVLNPSQAFSSCHPGLPPENWEKPKPPLASAEGPAVPSPSPQREKLERFKRMCQLLERVPDTSSSSSDSDSDSDSSGTSLSEDEAPGEARNGRRPARGSSGEKENRGGRRAVRPGSGGPLLSWPLGPAPPPRPPQLERHVVRPPPRSPEPDTLPLAAGSDHPLPRAAWLRVFQHLGPRELCICMRVCRTWSRWCYDKRLWPRMDLSRRKSLTPPMLSGVVRRQPRALDLSWTGVSKKQLMWLLNRLQGLQELVLSGCSWLSVSALGSAPLPALRLLDLRWIEDVKDSQLRELLLPPPDTKPGQTESRGRLQGVAELRLAGLELTDASLRLLLRHAPQLSALDLSHCAHVGDPSVHLLTAPTSPLRETLVHLNLAGCHRLTDHCLPLFRRCPRLRRLDLRSCRQLSPEACARLAAAGPPGPFRCPEEKLLLKDS

SEQ ID NO: 30998 - protein, 586 aa, Homo sapiens
  Payload ID: 6080
  Gene Symbol: FBXL19
  Gene Name: F-box and leucine-rich repeat protein 19
  ENSP ID: ENSP00000397913
  MOD_RES (1)..(1): Any amino acid
XRMKQSCLLRQCTAPVLPHTAVCLLCGEAGKEDTVEGEEEKFGLSLMECTICNEIVHPGCLKMGKAEGVINAEIPNCWECPRCTQEGRTSKDSGEGPGRRRADNGEEGASLGSGWKLTEEPPLPPPPPRRKGPLPAGPPPEDVPGPPKRKEREAGNEPPTPRKKVKGGRERHLKKKPKPPLASAEGPAVPSPSPQREKLERFKRMCQLLERVPDTSSSSSDSDSDSDSSGTSLSEDEAPGEARNGRRPARGSSGEKENRGGRRAVRPGSGGPLLSWPLGPAPPPRPPQLERHVVRPPPRSPEPDTLPLAAGSDHPLPRAAWLRVFQHLGPRELCICMRVCRTWSRWCYDKRLWPRMDLSRRKSLTPPMLSGVVRRQPRALDLSWTGVSKKQLMWLLNRLQGLQELVLSGCSWLSVSALGSAPLPALRLLDLRWIEDVKDSQLRELLLPPPDTKPGQTESRGRLQGVAELRLAGLELTDASLRLLLRHAPQLSALDLSHCAHVGDPSVHLLTAPTSPLRETLVHLNLAGCHRLTDHCLPLFRRCPRLRRLDLRSCRQLSPEACARLAAAGPPGPFRCPEEKLLLKDS

SEQ ID NO: 30999 - protein, 558 aa, Homo sapiens
  Payload ID: 6080
  Gene Symbol: FBXL19
  Gene Name: F-box and leucine-rich repeat protein 19
  ENSP ID: ENSP00000454344
MSSSSRGPGAGARRRRTRCRRCRACVRTECGDCHFCRDMKKFGGPGRMKQSCLLRQCTAPVLPHTAVCLLCGEAGKEDTVEGEEEKFGLSLMECTICNEIVHPGCLKMGKAEGVINAEIPNCWECPRCTQEGRTSKVKGGRERHLKKKPKPPLASAEGPAVPSPSPQREKLERFKRMCQLLERVPDTSSSSSDSDSDSDSSGTSLSEDEAPGEARNGRRPARGSSGEKENRGGRRAVRPGSGGPLLSWPLGPAPPPRPPQLERHVVRPPPRSPEPDTLPLAAGSDHPLPRAAWLRVFQHLGPRELCICMRVCRTWSRWCYDKRLWPRMDLSRRKSLTPPMLSGVVRRQPRALDLSWTGVSKKQLMWLLNRLQGLQELVLSGCSWLSVSALGSAPLPALRLLDLRWIEDVKDSQLRELLLPPPDTKPGQTESRGRLQGVAELRLAGLELTDASLRLLLRHAPQLSALDLSHCAHVGDPSVHLLTAPTSPLRETLVHLNLAGCHRLTDHCLPLFRRCPRLRRLDLRSCRQLSPEACARLAAAGPPGPFRCPEEKLLLKDS

SEQ ID NO: 31000 - protein, 138 aa, Homo sapiens
  Payload ID: 6080
  Gene Symbol: FBXL19
  Gene Name: F-box and leucine-rich repeat protein 19
  ENSP ID: ENSP00000455337
  MOD_RES (1)..(1): Any amino acid
XLQELVLSGCSWLSVSALGSAPLPALRLLDLRWIEDVKDSQLRELLLPPPDTKPGQTESRGRLQGVAELRLAGLELTDASLRLLLRHAPQLSALDLSHCAHVGDPSVHLLTAPTSPLRETLVHLNLAGFSSFPLTLTP

SEQ ID NO: 31001 - protein, 674 aa, Homo sapiens; identical to SEQ ID NO: 30996
  Payload ID: 6080
  Gene Symbol: FBXL19
  Gene Name: F-box and leucine-rich repeat protein 19
  ENSP ID: ENSP00000455529

SEQ ID NO: 31002 - protein, 59 aa, Homo sapiens
  Payload ID: 6080
  Gene Symbol: FBXL19
  Gene Name: F-box and leucine-rich repeat protein 19
  ENSP ID: ENSP00000455871
MSSSSRGPGAGARRRRTRCRRCRACVRTECGDCHFCRDMKKFGGPGRMKQSCLLRQCTA

SEQ ID NO: 31003 - protein, 122 aa, Homo sapiens
  Payload ID: 6080
  Gene Symbol: FBXL19
  Gene Name: F-box and leucine-rich repeat protein 19
  ENSP ID: ENSP00000457199
  MOD_RES (1)..(1): Any amino acid
XAPLPALRLLDLRWIEDVKDSQLRELLLPPPDTKPAERPGPEPLRPRRGPQCSPPHGPHVPTPRDPGAPQSCWLPPPNGPLPPAVPPLPSSTPPRPALLPPALTRSLCPAGSCRAPWPLPLP

SEQ ID NO: 31004 - protein, 382 aa, Homo sapiens
  Payload ID: 6080
  Gene Symbol: FBXL19
  Gene Name: F-box and leucine-rich repeat protein 19
  ENSP ID: ENSP00000458033
MCQLLERVPDTSSSSSDSDSDSDSSGTSLSEDEAPGEARNGRRPARGSSGEKENRGGRRAVRPGSGGPLLSWPLGPAPPPRPPQLERHVVRPPPRSPEPDTLPLAAGSDHPLPRAAWLRVFQHLGPRELCICMRVCRTWSRWCYDKRLWPRMDLSRRKSLTPPMLSGVVRRQPRALDLSWTGVSKKQLMWLLNRLQGLQELVLSGCSWLSVSALGSAPLPALRLLDLRWIEDVKDSQLRELLLPPPDTKPGQTESRGRLQGVAELRLAGLELTDASLRLLLRHAPQLSALDLSHCAHVGDPSVHLLTAPTSPLRETLVHLNLAGCHRLTDHCLPLFRRCPRLRRLDLRSCRQLSPEACARLAAAGPPGPFRCPEEKLLLKDS

SEQ ID NO: 31005 - protein, 80 aa, Homo sapiens
  Payload ID: 6081
  Gene Symbol: FBXL2
  Gene Name: F-box and leucine-rich repeat protein 2
  ENSP ID: ENSP00000405084
MVFSNNDEGLINKKLPKELLLRMLFSLLLNFTWSNPECTKYVHSIGLDSFCNVHSMGFLKDCCLYFLLSVVPAALYTRAS

SEQ ID NO: 31006 - protein, 36 aa, Homo sapiens
  Payload ID: 6081
  Gene Symbol: FBXL2
  Gene Name: F-box and leucine-rich repeat protein 2
  ENSP ID: ENSP00000406737
MVFSNNDEGLINKKLPKELLLRVEWWKISRSDAVDS

SEQ ID NO: 31007 - protein, 129 aa, Homo sapiens
  Payload ID: 6081
  Gene Symbol: FBXL2
  Gene Name: F-box and leucine-rich repeat protein 2
  ENSP ID: ENSP00000408895
MVFSNNDEGLINKKLPKELLLRIFSFLDIVTLCRCAQISKAWNILALDGSNWQRIDLFNFQTDVEGRVVENISKRCGGFLRKLSLRGCIGVGDSSLKTFAQNCRNIEHLNLNGCTKITDSASALFQHVL

SEQ ID NO: 31008 - protein, 62 aa, Homo sapiens
  Payload ID: 6081
  Gene Symbol: FBXL2
  Gene Name: F-box and leucine-rich repeat protein 2
  ENSP ID: ENSP00000411273
MVFSNNDEGLINKKLPKELLLRMLFSLLLNFTWSNPECTKYVHSIGLDSFCNVDLCTELPKH

SEQ ID NO: 31009 - protein, 63 aa, Homo sapiens
  Payload ID: 6081
  Gene Symbol: FBXL2
  Gene Name: F-box and leucine-rich repeat protein 2
  ENSP ID: ENSP00000411484
MVFSNNDEGLINKKLPKELLLRMLFSLLLNFTWSNPECTKYVHSIGLDSFCNVEQGQDNNNKQ

SEQ ID NO: 31010 - protein, 89 aa, Homo sapiens
  Payload ID: 6081
  Gene Symbol: FBXL2
  Gene Name: F-box and leucine-rich repeat protein 2
  ENSP ID: ENSP00000416332
MVFSNNDEGLINKKLPKELLLRMLFSLLLNFTWSNPECTKYVHSIGLDSFCNVNIFLLGYSNFVPMCTDFQGLEHLSPGWKQLAKNRSF

SEQ ID NO: 31011 - protein, 423 aa, Homo sapiens
  Payload ID: 6081
  Gene Symbol: FBXL2
  Gene Name: F-box and leucine-rich repeat protein 2
  Uniprot ID: Q9UKC9
  ENSP ID: ENSP00000417601
MVFSNNDEGLINKKLPKELLLRIFSFLDIVTLCRCAQISKAWNILALDGSNWQRIDLFNFQTDVEGRVVENISKRCGGFLRKLSLRGCIGVGDSSLKTFAQNCRNIEHLNLNGCTKITDSTCYSLSRFCSKLKHLDLTSCVSITNSSLKGISEGCRNLEYLNLSWCDQITKDGIEALVRGCRGLKALLLRGCTQLEDEALKHIQNYCHELVSLNLQSCSRITDEGVVQICRGCHRLQALCLSGCSNLTDASLTALGLNCPRLQILEAARCSHLTDAGFTLLARNCHELEKMDLEECILITDSTLIQLSIHCPKLQALSLSHCELITDDGILHLSNSTCGHERLRVLELDNCLLITDVALEHLENCRGLERLELYDCQQVTRAGIKRMRAQLPHVKVHAYFAPVTPPTAVAGSGQRLCRCCVIL

SEQ ID NO: 31012 - protein, 355 aa, Homo sapiens
  Payload ID: 6081
  Gene Symbol: FBXL2
  Gene Name: F-box and leucine-rich repeat protein 2
  Uniprot ID: Q9UKC9
  ENSP ID: ENSP00000426163
MVFSNNDEGLINKKLPKELLLRIFSFLDIVTLCRCAQISKAWNILALDGSNWQRIDLFNFQTDVEGRVVENISKRCGGFLRKLSLRGCIGVGDSSLKTFAQNCRNIEHLNLNGCTKITDSTCYSLSRFCSKLKHIQNYCHELVSLNLQSCSRITDEGVVQICRGCHRLQALCLSGCSNLTDASLTALGLNCPRLQILEAARCSHLTDAGFTLLARNCHELEKMDLEECILITDSTLIQLSIHCPKLQALSLSHCELITDDGILHLSNSTCGHERLRVLELDNCLLITDVALEHLENCRGLERLELYDCQQVTRAGIKRMRAQLPHVKVHAYFAPVTPPTAVAGSGQRLCRCCVIL

SEQ ID NO: 31013 - protein, 355 aa, Homo sapiens; identical to SEQ ID NO: 31012
  Payload ID: 6081
  Gene Symbol: FBXL2
  Gene Name: F-box and leucine-rich repeat protein 2
  Uniprot ID: Q9UKC9
  ENSP ID: ENSP00000441228

SEQ ID NO: 31014 - protein, 436 aa, Homo sapiens
  Payload ID: 6082
  Gene Symbol: FBXL20
  Gene Name: F-box and leucine-rich repeat protein 20
  Uniprot ID: Q96IG2
  ENSP ID: ENSP00000264658
MRRDVNGVTKSRFEMFSNSDEAVINKKLPKELLLRIFSFLDVVTLCRCAQVSRAWNVLALDGSNWQRIDLFDFQRDIEGRVVENISKRCGGFLRKLSLRGCLGVGDNALRTFAQNCRNIEVLNLNGCTKTTDATCTSLSKFCSKLRHLDLASCTSITNMSLKALSEGCPLLEQLNISWCDQVTKDGIQALVRGCGGLKALFLKGCTQLEDEALKYIGAHCPELVTLNLQTCLQITDEGLITICRGCHKLQSLCASGCSNITDAILNALGQNCPRLRILEVARCSQLTDVGFTTLARNCHELEKMDLEECVQITDSTLIQLSIHCPRLQVLSLSHCELITDDGIRHLGNGACAHDQLEVIELDNCPLITDASLEHLKSCHSLERIELYDCQQITRAGIKRLRTHLPNIKVHAYFAPVTPPPSVGGSRQRFCRCCIIL

SEQ ID NO: 31015 - protein, 404 aa, Homo sapiens
  Payload ID: 6082
  Gene Symbol: FBXL20
  Gene Name: F-box and leucine-rich repeat protein 20
  Uniprot ID: Q96IG2
  ENSP ID: ENSP00000377832
MRRDVNGVTKSRFEMFSNSDEAVINKKLPKELLLRIFSFLDVVTLCRCAQVSRAWNVLALDGSNWQRIDLFDFQRDIEGRVVENISKRCGGFLRKLSLRGCLGVGDNALRTFAQNCRNIEVLNLNGCTKTTDAEGCPLLEQLNISWCDQVTKDGIQALVRGCGGLKALFLKGCTQLEDEALKYIGAHCPELVTLNLQTCLQITDEGLITICRGCHKLQSLCASGCSNITDAILNALGQNCPRLRILEVARCSQLTDVGFTTLARNCHELEKMDLEECVQITDSTLIQLSIHCPRLQVLSLSHCELITDDGIRHLGNGACAHDQLEVIELDNCPLITDASLEHLKSCHSLERIELYDCQQITRAGIKRLRTHLPNIKVHAYFAPVTPPPSVGGSRQRFCRCCIIL

SEQ ID NO: 31016 - protein, 436 aa, Homo sapiens; identical to SEQ ID NO: 31014
  Payload ID: 6082
  Gene Symbol: FBXL20
  Gene Name: F-box and leucine-rich repeat protein 20
  Uniprot ID: Q96IG2
  ENSP ID: ENSP00000462271

SEQ ID NO: 31017 - protein, 438 aa, Homo sapiens
  Payload ID: 6082
  Gene Symbol: FBXL20
  Gene Name: F-box and leucine-rich repeat protein 20
  ENSP ID: ENSP00000462878
MAPSRDRLLHFGFKATMFSNSDEAVINKKLPKELLLRIFSFLDVVTLCRCAQVSRAWNVLALDGSNWQRIDLFDFQRDIEGRVVENISKRCGGFLRKLSLRGCLGVGDNALRTFAQNCRNIEVLNLNGCTKTTDATCTSLSKFCSKLRHLDLASCTSITNMSLKALSEGCPLLEQLNISWCDQVTKDGIQALVRGCGGLKALFLKGCTQLEDEALKYIGAHCPELVTLNLQTCLQITDEGLITICRGCHKLQSLCASGCSNITDAILNALGQNCPRLRILEVARCSQLTDVGFTTLARNCHELEKMDLEECVQITDSTLIQLSIHCPRLQVLSLSHCELITDDGIRHLGNGACAHDQLEVIELDNCPLITDASLEHLKSCHSLERIELYDCQQITRAGIKRLRTHLPNIKVHAYFAPVTPPPSVGGSRQRFCRCCIIL

SEQ ID NO: 31018 - protein, 115 aa, Homo sapiens
  Payload ID: 6082
  Gene Symbol: FBXL20
  Gene Name: F-box and leucine-rich repeat protein 20
  ENSP ID: ENSP00000463132
TTLARNCHELEKMDLEECVQITDSTLIQLSIHCPRLQVLSLSHCELITDDGIRHLGNGACAHDQLEVIELDNCPLITDASLEHLKSCHSLERIELYDCQQITRAGIKRLRVKMAT

SEQ ID NO: 31019 - protein, 247 aa, Homo sapiens
  Payload ID: 6083
  Gene Symbol: FBXL22
  Gene Name: F-box and leucine-rich repeat protein 22
  Uniprot ID: Q6P050
  ENSP ID: ENSP00000353794
MWPLLTMHITQLNRECLLHLFSFLDKDSRKSLARTCSQLHDVFEDPALWSLLHFRSLTELQKDNFLLGPALRSLSICWHSSRVQVCSIEDWLKSAFQRSICSRHESLVNDFLLRVCDRLSAVRSPRRREAPAPSSGTPIAVGPKSPRWGGPDHSEFADLRSGVTGARAAARRGLGSLRAERPSETPPAPGVSWGPPPPGAPVVISVKQEEGKQGRTGRRSHRAAPPCGFARTRVCPPTFPGADAFPQ

SEQ ID NO: 31020 - protein, 130 aa, Homo sapiens
  Payload ID: 6083
  Gene Symbol: FBXL22
  Gene Name: F-box and leucine-rich repeat protein 22
  ENSP ID: ENSP00000453697
MWPLLTMHITQLNRECLLHLFSFLDKDSRKSLARTCSQLHDVFEDPALWSLLHFRSLTELQKDNFLLGPALRSLSICWHSSRVQVCSIEDWLKSAFQRSICSRHESLVNDFLLRVCDRVRGLNDTVAPGT

SEQ ID NO: 31021 - protein, 27 aa, Homo sapiens
  Payload ID: 6083
  Gene Symbol: FBXL22
  Gene Name: F-box and leucine-rich repeat protein 22
  ENSP ID: ENSP00000473666
HESLVNDFLLRVCDRVRGLNDTVAPGT

SEQ ID NO: 31022 - protein, 428 aa, Homo sapiens
  Payload ID: 6084
  Gene Symbol: FBXL3
  Gene Name: F-box and leucine-rich repeat protein 3
  Uniprot ID: Q9UKT7
  ENSP ID: ENSP00000347834
MKRGGRDSDRNSSEEGTAEKSKKLRTTNEHSQTCDWGNLLQDIILQVFKYLPLLDRAHASQVCRNWNQVFHMPDLWRCFEFELNQPATSYLKATHPELIKQIIKRHSNHLQYVSFKVDSSKESAEAACDILSQLVNCSLKTLGLISTARPSFMDLPKSHFISALTVVFVNSKSLSSLKIDDTPVDDPSLKVLVANNSDTLKLLKMSSCPHVSPAGILCVADQCHGLRELALNYHLLSDELLLALSSEKHVRLEHLRIDVVSENPGQTHFHTIQKSSWDAFIRHSPKVNLVMYFFLYEEEFDPFFRYEIPATHLYFGRSVSKDVLGRVGMTCPRLVELVVCANGLRPLDEELIRIAERCKNLSAIGLGECEVSCSAFVEFVKMCGGRLSQLSIMEEVLIPDQKYSLEQIHWEVSKHLGRVWFPDMMPTW

SEQ ID NO: 31023 - protein, 241 aa, Homo sapiens
  Payload ID: 6084
  Gene Symbol: FBXL3
  Gene Name: F-box and leucine-rich repeat protein 3
  ENSP ID: ENSP00000412183
MKRGGRDSDRNSSEEGTAEKSKKLRTTNEHSQTCDWGNLLQDIILQVFKYLPLLDRAHASQVCRNWNQVDSSKESAEAACDILSQLVNCSLKTLGLISTARPSFMDLPKSHFISALTVVFVNSKSLSSLKIDDTPVDDPSLKVLVANNSDTLKLLKMSSCPHVSPAGILCVADQCHGLRELALNYHLLSDELLLALSSEKHVRLEHLRIDVVSENPGQTHFHTIQKSSWDAFIRHSPKVNL

SEQ ID NO: 31024 - protein, 621 aa, Homo sapiens
  Payload ID: 6085
  Gene Symbol: FBXL4
  Gene Name: F-box and leucine-rich repeat protein 4
  Uniprot ID: Q9UKA2
  ENSP ID: ENSP00000229971
MSPVFPMLTVLTMFYYICLRRRARTATRGEMMNTHRAIESNSQTSPLNAEVVQYAKEVVDFSSHYGSENSMSYTMWNLAGVPNVFPSSGDFTQTAVFRTYGTWWDQCPSASLPFKRTPPNFQSQDYVELTFEQQVYPTAVHVLETYHPGAVIRILACSANPYSPNPPAEVRWEILWSERPTKVNASQARQFKPCIKQINFPTNLIRLEVNSSLLEYYTELDAVVLHGVKDKPVLSLKTSLIDMNDIEDDAYAEKDGCGMDSLNKKFSSAVLGEGPNNGYFDKLPYELIQLILNHLTLPDLCRLAQTCKLLSQHCCDPLQYIHLNLQPYWAKLDDTSLEFLQSRCTLVQWLNLSWTGNRGFISVAGFSRFLKVCGSELVRLELSCSHFLNETCLEVISEMCPNLQALNLSSCDKLPPQAFNHIAKLCSLKRLVLYRTKVEQTALLSILNFCSELQHLSLGSCVMIEDYDVIASMIGAKCKKLRTLDLWRCKNITENGIAELASGCPLLEELDLGWCPTLQSSTGCFTRLAHQLPNLQKLFLTANRSVCDTDIDELACNCTRLQQLDILGTRMVSPASLRKLLESCKDLSLLDVSFCSQIDNRAVLELNASFPKVFIKKSFTQ

SEQ ID NO: 31025 - protein, 621 aa, Homo sapiens; identical to SEQ ID NO: 31024
  Payload ID: 6085
  Gene Symbol: FBXL4
  Gene Name: F-box and leucine-rich repeat protein 4
  Uniprot ID: Q9UKA2
  ENSP ID: ENSP00000358247

SEQ ID NO: 31026 - protein, 691 aa, Homo sapiens
  Payload ID: 6086
  Gene Symbol: FBXL5
  Gene Name: F-box and leucine-rich repeat protein 5
  Uniprot ID: Q9UKA1
  ENSP ID: ENSP00000344866
MAPFPEEVDVFTAPHWRMKQLVGLYCDKLSKTNFSNNNDFRALLQSLYATFKEFKMHEQIENEYIIGLLQQRSQTIYNVHSDNKLSEMLSLFEKGLKNVKNEYEQLNYAKQLKERLEAFTRDFLPHMKEEEEVFQPMLMEYFTYEELKDIKKKVIAQHCSQKDTAELLRGLSLWNHAEERQKFFKYSVDEKSDKEAEVSEHSTGITHLPPEVMLSIFSYLNPQELCRCSQVSMKWSQLTKTGSLWKHLYPVHWARGDWYSGPATELDTEPDDEWVKNRKDESRAFHEWDEDADIDESEESAEESIAISIAQMEKRLLHGLIHNVLPYVGTSVKTLVLAYSSAVSSKMVRQILELCPNLEHLDLTQTDISDSAFDSWSWLGCCQSLRHLDLSGCEKITDVALEKISRALGILTSHQSGFLKTSTSKITSTAWKNKDITMQSTKQYACLHDLTNKGIGEEIDNEHPWTKPVSSENFTSPYVWMLDAEDLADIEDTVEWRHRNVESLCVMETASNFSCSTSGCFSKDIVGLRTSVCWQQHCASPAFAYCGHSFCCTGTALRTMSSLPESSAMCRKAARTRLPRGKDLIYFGSEKSDQETGRVLLFLSLSGCYQITDHGLRVLTLGGGLPYLEHLNLSGCLTITGAGLQDLVSACPSLNDEYFYYCDNINGPHADTASGCQNLQCGFRACCRSGE

SEQ ID NO: 31027 - protein, 674 aa, Homo sapiens
  Payload ID: 6086
  Gene Symbol: FBXL5
  Gene Name: F-box and leucine-rich repeat protein 5
  Uniprot ID: Q9UKA1
  ENSP ID: ENSP00000408679
MAPFPEEVDVFTAPHWRMKQLVGLYCDKSLYATFKEFKMHEQIENEYIIGLLQQRSQTIYNVHSDNKLSEMLSLFEKGLKNVKNEYEQLNYAKQLKERLEAFTRDFLPHMKEEEEVFQPMLMEYFTYEELKDIKKKVIAQHCSQKDTAELLRGLSLWNHAEERQKFFKYSVDEKSDKEAEVSEHSTGITHLPPEVMLSIFSYLNPQELCRCSQVSMKWSQLTKTGSLWKHLYPVHWARGDWYSGPATELDTEPDDEWVKNRKDESRAFHEWDEDADIDESEESAEESIAISIAQMEKRLLHGLIHNVLPYVGTSVKTLVLAYSSAVSSKMVRQILELCPNLEHLDLTQTDISDSAFDSWSWLGCCQSLRHLDLSGCEKITDVALEKISRALGILTSHQSGFLKTSTSKITSTAWKNKDITMQSTKQYACLHDLTNKGIGEEIDNEHPWTKPVSSENFTSPYVWMLDAEDLADIEDTVEWRHRNVESLCVMETASNFSCSTSGCFSKDIVGLRTSVCWQQHCASPAFAYCGHSFCCTGTALRTMSSLPESSAMCRKAARTRLPRGKDLIYFGSEKSDQETGRVLLFLSLSGCYQITDHGLRVLTLGGGLPYLEHLNLSGCLTITGAGLQDLVSACPSLNDEYFYYCDNINGPHADTASGCQNLQCGFRACCRSGE

SEQ ID NO: 31028 - protein, 125 aa, Homo sapiens
  Payload ID: 6086
  Gene Symbol: FBXL5
  Gene Name: F-box and leucine-rich repeat protein 5
  ENSP ID: ENSP00000421070
MHEQIENEYIIGLLQQRSQTIYNVHSDNKLSEMLSLFEKGLKNVKNEYEQLNYAKQLKERLEAFTRDFLPHMKEEEEVFQPMLMEYFTYEELKDIKKKVIAQHCSQKDTAELLRGLSLWNHAEER

SEQ ID NO: 31029 - protein, 95 aa, Homo sapiens
  Payload ID: 6086
  Gene Symbol: FBXL5
  Gene Name: F-box and leucine-rich repeat protein 5
  ENSP ID: ENSP00000422049
MGKRQTFSWLSKTNFSNNNDFRALLQSLYATFKEFKMHEQIENEYIIGLLQQRSQTIYNVHSDNKLSEMLSLFEKGLKNVKNEYEQLNYAKQLKE

SEQ ID NO: 31030 - protein, 78 aa, Homo sapiens
  Payload ID: 6086
  Gene Symbol: FBXL5
  Gene Name: F-box and leucine-rich repeat protein 5
  ENSP ID: ENSP00000423961
MHEQIENEYIIGLLQQRSQTIYNVHSDNKLSEMLSLFEKGLKNVKNEYEQLNYAKQLKERLEAFTRDFLPHMKEEEEV

SEQ ID NO: 31031 - protein, 56 aa, Homo sapiens
  Payload ID: 6086
  Gene Symbol: FBXL5
  Gene Name: F-box and leucine-rich repeat protein 5
  ENSP ID: ENSP00000424423
MHEQIENEYIIGLLQQRSQTIYNVHSDNKLSEMLSLFEKGLKNVKNEYEQLNYAKQ

SEQ ID NO: 31032 - protein, 110 aa, Homo sapiens
  Payload ID: 6086
  Gene Symbol: FBXL5
  Gene Name: F-box and leucine-rich repeat protein 5
  ENSP ID: ENSP00000425027
MAPFPEEVDVFTAPHWRMKQLVGLYCDKLSKTNFSNNNDFRALLQSLYATFKEFKMHEQIENEYIIGLLQQRSQTIYNVHSDNKLSEMLSLFEKGLKNVKPTTVDWKPYQ

SEQ ID NO: 31033 - protein, 612 aa, Homo sapiens
  Payload ID: 6086
  Gene Symbol: FBXL5
  Gene Name: F-box and leucine-rich repeat protein 5
  ENSP ID: ENSP00000425472
  MOD_RES (1)..(1): Any amino acid
XATFKEFKMHEQIENEYIIGLLQQRSQTIYNVHSDNKLSEMLSLFEKGLKNVKVFQPMLMEYFTYEELKDIKKKVIAQHCSQKDTAELLRGLSLWNHAEERQKFFKYSVDEKSDKEAEVSEHSTGITHLPPEVMLSIFSYLNPQELCRCSQVSMKWSQLTKTGSLWKHLYPVHWARGDWYSGPATELDTEPDDEWVKNRKDESRAFHEWDEDADIDESEESAEESIAISIAQMEKRLLHGLIHNVLPYVGTSVKTLVLAYSSAVSSKMVRQILELCPNLEHLDLTQTDISDSAFDSWSWLGCCQSLRHLDLSGCEKITDVALEKISRALGILTSHQSGFLKTSTSKITSTAWKNKDITMQSTKQYACLHDLTNKGIGEEIDNEHPWTKPVSSENFTSPYVWMLDAEDLADIEDTVEWRHRNVESLCVMETASNFSCSTSGCFSKDIVGLRTSVCWQQHCASPAFAYCGHSFCCTGTALRTMSSLPESSAMCRKAARTRLPRGKDLIYFGSEKSDQETGRVLLFLSLSGCYQITDHGLRVLTLGGGLPYLEHLNLSGCLTITGAGLQDLVSACPSLNDEYFYYCDNINGPHADTASGCQNLQCGFRACCRSGE

SEQ ID NO: 31034 - protein, 129 aa, Homo sapiens
  Payload ID: 6086
  Gene Symbol: FBXL5
  Gene Name: F-box and leucine-rich repeat protein 5
  ENSP ID: ENSP00000425541
MHEQIENEYIIGLLQQRSQTIYNVHSDNKLSEMLSLFEKGLKNVKNEYEQLNYAKQLKERLEAFTRDFLPHMKEEEEVFQPMLMEYFTYEELKDIKKKVIAQHCSQKDTAELLRGLSLWNHAEERQKFF

SEQ ID NO: 31035 - protein, 183 aa, Homo sapiens
  Payload ID: 6086
  Gene Symbol: FBXL5
  Gene Name: F-box and leucine-rich repeat protein 5
  ENSP ID: ENSP00000426993
DFRALLQSLYATFKEFKMHEQIENEYIIGLLQQRSQTIYNVHSDNKLSEMLSLFEKGLKNVKNEYEQLNYAKQLKERLEAFTRDFLPHMKEEEEVFQPMLMEYFTYEELKDIKKKVIAQHCSQKDTAELLRGLSLWNHAEERQKFFKYSVDEKSDKEVSEHSTGITHLPPEVMLSIFSYLNPQ

SEQ ID NO: 31036 - protein, 539 aa, Homo sapiens
  Payload ID: 6087
  Gene Symbol: FBXL6
  Gene Name: F-box and leucine-rich repeat protein 6
  Uniprot ID: Q8N531
  ENSP ID: ENSP00000330098
MAAPASRQVRRRARAAPRPRSAEDWWWDRLAPRGSGYHLLQSDSMLLVLSEPGPARPRAQRRASRRTPRQPPRGPSAAAKPKAGLRSEAAAAPAPAPAPTPTPEEGPDAGWGDRIPLEILVQIFGLLVAADGPMPFLGRAARVCRRWQEAASQPALWHTVTLSSPLVGRPAKGGVKAEKKLLASLEWLMPNRFSQLQRLTLIHWKSQVHPVLKLVGECCPRLTFLKLSGCHGVTADALVMLAKACCQLHSLDLQHSMVESTAVVSFLEEAGSRMRKLWLTYSSQTTAILGALLGSCCPQLQVLEVSTGINRNSIPLQLPVEALQKGCPQLQVLRLLNLMWLPKPPGRGVAPGPGFPSLEELCLASSTCNFVSNEVLGRLLHGSPNLRLLDLRGCARITPAGLQDLPCRELEQLHLGLYGTSDRLTLAKEGSPFLTQKWCHTLRELDLSGQGFSEKDLEQALAAFLSTPGGSHPALCSLNLRGTRVTPSTVSSVISGCPGLLYLNLESCRCLPRGLKRAYRGLEEVQWCLEQLLTSPSPS

SEQ ID NO: 31037 - protein, 533 aa, Homo sapiens
  Payload ID: 6087
  Gene Symbol: FBXL6
  Gene Name: F-box and leucine-rich repeat protein 6
  Uniprot ID: Q8N531
  ENSP ID: ENSP00000403873
MAAPASRQVRRRARAAPRPRSAEDWWWDRLAPRGSGYHLLQSDSMLLVLSEPGPARPRAQRRASRRTPRQPPRGPSAAAKPKAGLRSEAAAAPAPAPAPTPTPEEGPDAGWGDRIPLEILVQIFGLLVAADGPMPFLGRAARVCRRWQEAASQPALWHTVTLSSPLVGRPAKGGVKAEKKLLASLEWLMPNRFSQLQRLTLIHWKSQLVGECCPRLTFLKLSGCHGVTADALVMLAKACCQLHSLDLQHSMVESTAVVSFLEEAGSRMRKLWLTYSSQTTAILGALLGSCCPQLQVLEVSTGINRNSIPLQLPVEALQKGCPQLQVLRLLNLMWLPKPPGRGVAPGPGFPSLEELCLASSTCNFVSNEVLGRLLHGSPNLRLLDLRGCARITPAGLQDLPCRELEQLHLGLYGTSDRLTLAKEGSPFLTQKWCHTLRELDLSGQGFSEKDLEQALAAFLSTPGGSHPALCSLNLRGTRVTPSTVSSVISGCPGLLYLNLESCRCLPRGLKRAYRGLEEVQWCLEQLLTSPSPS

SEQ ID NO: 31038 - protein, 449 aa, Homo sapiens
  Payload ID: 6088
  Gene Symbol: FBXL7
  Gene Name: F-box and leucine-rich repeat protein 7
  ENSP ID: ENSP00000329632
DSDLSMRTLSTPSPALICPPNLPGFQNGRGSSTSSSSITGETVAMVHSPPPTRLTHPLIRLASRPQKEQASIDRLPDHSMVQIFSFLPTNQLCRCARVCRRWYNLAWDPRLWRTIRLTGETINVDRALKVLTRRLCQDTPNVCLMLETVTVSGCRRLTDRGLYTIAQCCPELRRLEVSGCYNISNEAVFDVVSLCPNLEHLDVSGCSKVTCISLTREASIKLSPLHGKQISIRYLDMTDCFVLEDEGLHTIAAHCTQLTHLYLRRCVRLTDEGLRYLVIYCASIKELSVSDCRFVSDFGLREIAKLESRLRYLSIAHCGRVTDVGIRYVAKYCSKLRYLNARGCEGITDHGVEYLAKNCTKLKSLDIGKCPLVSDTGLECLALNCFNLKRLSLKSCESITGQGLQIVAANCFDLQTLNVQDCEVSVEALRFVKRHCKRCVIEHTNPAFF

SEQ ID NO: 31039 - protein, 491 aa, Homo sapiens
  Payload ID: 6088
  Gene Symbol: FBXL7
  Gene Name: F-box and leucine-rich repeat protein 7
  Uniprot ID: Q9UJT9
  ENSP ID: ENSP00000423630
MGANNGKQYGSEGKGSSSISSDVSSSTDHTPTKAQKNVATSEDSDLSMRTLSTPSPALICPPNLPGFQNGRGSSTSSSSITGETVAMVHSPPPTRLTHPLIRLASRPQKEQASIDRLPDHSMVQIFSFLPTNQLCRCARVCRRWYNLAWDPRLWRTIRLTGETINVDRALKVLTRRLCQDTPNVCLMLETVTVSGCRRLTDRGLYTIAQCCPELRRLEVSGCYNISNEAVFDVVSLCPNLEHLDVSGCSKVTCISLTREASIKLSPLHGKQISIRYLDMTDCFVLEDEGLHTIAAHCTQLTHLYLRRCVRLTDEGLRYLVIYCASIKELSVSDCRFVSDFGLREIAKLESRLRYLSIAHCGRVTDVGIRYVAKYCSKLRYLNARGCEGITDHGVEYLAKNCTKLKSLDIGKCPLVSDTGLECLALNCFNLKRLSLKSCESITGQGLQIVAANCFDLQTLNVQDCEVSVEALRFVKRHCKRCVIEHTNPAFF

SEQ ID NO: 31040 - protein, 444 aa, Homo sapiens
  Payload ID: 6088
  Gene Symbol: FBXL7
  Gene Name: F-box and leucine-rich repeat protein 7
  Uniprot ID: Q9UJT9
  ENSP ID: ENSP00000425184
MRTLSTPSPALICPPNLPGFQNGRGSSTSSSSITGETVAMVHSPPPTRLTHPLIRLASRPQKEQASIDRLPDHSMVQIFSFLPTNQLCRCARVCRRWYNLAWDPRLWRTIRLTGETINVDRALKVLTRRLCQDTPNVCLMLETVTVSGCRRLTDRGLYTIAQCCPELRRLEVSGCYNISNEAVFDVVSLCPNLEHLDVSGCSKVTCISLTREASIKLSPLHGKQISIRYLDMTDCFVLEDEGLHTIAAHCTQLTHLYLRRCVRLTDEGLRYLVIYCASIKELSVSDCRFVSDFGLREIAKLESRLRYLSIAHCGRVTDVGIRYVAKYCSKLRYLNARGCEGITDHGVEYLAKNCTKLKSLDIGKCPLVSDTGLECLALNCFNLKRLSLKSCESITGQGLQIVAANCFDLQTLNVQDCEVSVEALRFVKRHCKRCVIEHTNPAFF

SEQ ID NO: 31041 - protein, 374 aa, Homo sapiens
  Payload ID: 6089
  Gene Symbol: FBXL8
  Gene Name: F-box and leucine-rich repeat protein 8
  Uniprot ID: Q96CD0
  ENSP ID: ENSP00000258200
MAEPGEGLPEEVLALIFRHLSLRDRAAAARVCRAWAAAATCSAVWHDTKISCECELEGMLPPYLSACLDHIHNLRLEFEPSRKPSRRAAIELLMVLAGRAPGLRGLRLECRGEKPLFDAGRDVLEAVHAVCGAASQLRHLDLRRLSFTLDDALVLQAARSCPELHSLFLDNSTLVGSVGPGSVLELLEACPRLRALGLHLASLSHAILEALAAPDRAPFALLALRCACPEDARASPLPNEAWVALRRRHPGLAVELELEPALPAESVTRVLQPAVPVAALRLNLSGDTVGPVRFAAHHYAATLCALEVRAAASAELNAALEELAARCAALREVHCFCVVSHSVLDAFRAHCPRLRTYTLKLTREPHPWRPTLVA

SEQ ID NO: 31042 - protein, 62 aa, Homo sapiens
  Payload ID: 6089
  Gene Symbol: FBXL8
  Gene Name: F-box and leucine-rich repeat protein 8
  ENSP ID: ENSP00000427895
MAEPGEGLPEEVLALIFRHLSLRDRAAAARVCRAWAAAATCSAVWHDTKIRFHPVADATEIF

SEQ ID NO: 31043 - protein, 128 aa, Homo sapiens
  Payload ID: 6089
  Gene Symbol: FBXL8
  Gene Name: F-box and leucine-rich repeat protein 8
  ENSP ID: ENSP00000428379
MAEPGEGLPEEVLALIFRHLSLRDRAAAARVCRAWAAAATCSAVWHDTKISCECELEGMLPPYLSACLDHIHNLRLEFEPSRKPSRRAAIELLMVLAGRAPGLRGLRLECRGEKPLFDAGRDVLEAVH

SEQ ID NO: 31044 - protein, 67 aa, Homo sapiens
  Payload ID: 6089
  Gene Symbol: FBXL8
  Gene Name: F-box and leucine-rich repeat protein 8
  ENSP ID: ENSP00000429684
MAEPGEGLPEEVLALIFRHLSLRDRAAAARVCRAWAAAATCSAVWHDTKISQPSPWLRCASTSQATP

SEQ ID NO: 31045 - protein, 163 aa, Homo sapiens
  Payload ID: 6089
  Gene Symbol: FBXL8
  Gene Name: F-box and leucine-rich repeat protein 8
  ENSP ID: ENSP00000430027
MAEPGEGLPEEVLALIFRHLSLRDRAAAARVCRAWAAAATCSAVWHDTKISCECELEGMLPPYLSACLDHIHNLRLEFEPSRKPSRRAAIELLMVLAGRAPGLRGLRLECRGEKPLFDAGRDVLEAVHAVCGAASQLRHLDLRRLSFTLDDALVLQAARSCPE

SEQ ID NO: 31046 - protein, 374 aa, Homo sapiens; identical to SEQ ID NO: 31041
  Payload ID: 6089
  Gene Symbol: FBXL8
  Gene Name: F-box and leucine-rich repeat protein 8
  Uniprot ID: Q96CD0
  ENSP ID: ENSP00000430490

SEQ ID NO: 31047 - protein, 136 aa, Homo sapiens
  Payload ID: 6089
  Gene Symbol: FBXL8
  Gene Name: F-box and leucine-rich repeat protein 8
  ENSP ID: ENSP00000430745
MAEPGEGLPEEVLALIFRHLSLRDRAAAARVCRAWAAAATCSAVWHDTKIRRPTRSVLDTLPPSLASTPLRTLQLRGPGAGRGRARARAGPQGTCPAHTRSRTGDFSCRTKKEIEGPRGVGLEPKSPTHLTPPHPT

SEQ ID NO: 31048 - protein, 51 aa, Homo sapiens
  Payload ID: 6089
  Gene Symbol: FBXL8
  Gene Name: F-box and leucine-rich repeat protein 8
  ENSP ID: ENSP00000464169
MAEPGEGLPEEVLALIFRHLSLRDRAAAARVCRAWAAAATCSAVWHDTKIR

SEQ ID NO: 31049 - protein, 999 aa, Homo sapiens
  Payload ID: 6090
  Gene Symbol: FBXW10
  Gene Name: F-box and WD repeat domain containing 10
  Uniprot ID: Q5XX13
  ENSP ID: ENSP00000306937
MENLESRLKNAPYFRCEKGTDSIPLCRKCETCVLAWKIFSTKEWFCRINDISQRRFLVGILKQLNSLYLLHYFQNILQTTQGKDFIYNRSRINLSKKEGKVVKSSLNQMLDKTVEQKMKEILYWFANSTQWTKANYTLLLLQMCNPKLLLTAANVIRVLFLREENNISGLNQDITDVCFSPEKDHSSKSATSQVYWTAKTQHTSLPLSKAPENEHLLGAASNPEEPWRNSLRCISEMNRLFSGKGDITKPGYDPCNLLVDLDDIRDLSSGFSKYRDFIRYLPIHLSKYILRMLDRHTLNKCASVSQHWAAMAQQVKMDLSAHGFIQNQITFLQGSYTRGIDPNYANKVSIPVPKMVDDGKSMRVKHPKWKLRTKNEYNLWTAYQNEETQQVLIEERNVFCGTYNVRILSDTWDQNRVIHYSGGDLIAVSSNRKIHLLDIIQVKAIPVEFRGHAGSVRALFLCEEENFLLSGSYDLSIRYWDLKSGVCTRIFGGHQGTITCMDLCKNRLVSGGRDCQVKVWDVDTGKCLKTFRHKDPILATRINDTYIVSSCERGLVKVWHIAMAQLVKTLSGHEGAVKCLFFDQWHLLSGSTDGLVMAWSMVGKYERCLMAFKHPKMVVNTESNVLMFQFEHIKWQYAVEKTKQKKNKEKEEEKEENSLMEILSKCNIQVHSPRESVSSKQTVIQELLPGKPPKSRVLLKPAKFSSAVLIEELQSQGKSKSPRRDADDVEKAQKQGQLETPGKLPSHPKKKSWKIPMSPDQFLLTVSALQHAHNSGEFAYPCRPQTEITDVWGPSISYPRKVLNFKGKSIQRAVDRLRLSNPPIDVKRTSIPLEIQKLQPNLKISLHSPRVQSTIPQPMIIRSRFSGSLKGGDQVTSSIERAVCSTGPLTSMQVIKPNRMLAPQVGTATLSLKKERPRIYTALDPFRVNTEFVLLTVKEEKEHQEAKMKEYQARESTGVVDPGKVSKAAWIRKIKGLPIDNFTKQGKTAAPELGQNVFI

SEQ ID NO: 31050 - protein, 1061 aa, Homo sapiens
  Payload ID: 6090
  Gene Symbol: FBXW10
  Gene Name: F-box and WD repeat domain containing 10
  Uniprot ID: Q5XX13
  ENSP ID: ENSP00000310382
MENLESRLKNAPYFRCEKGTDSIPLCRKCETCVLAWKIFSTKEWFCRINDISQRRFLVGILKQLNSLYLLHYFQNILQTTQGKDFIYNRSRINLSKKEGKVVKSSLNQMLDKTVEQKMKEILYWFANSTQWTKANYTLLLLQMCNPKLLLTAANVIRVLFLREENNISGLNQDITDVCFSPEKDHSSKSATSQVYWTAKTQHTSLPLSKAPENEHLLGAASNPEEPWRNSLRCISEMNRLFSGKGDITKPGYDPCNLLVDLDDIRDLSSGFSKYRDFIRYLPIHLSKYILSMLGCMRGFPRHLPSWPSSGVSGSIFFFPGMLDRHTLNKCASVSQHWAAMAQQVKMDLSAHGFIQNQITFLQGSYTRGIDPNYANKVSIPVPKMVDDGKSMRVKHPKWKLRTKNEYNLWTAYQNEETQQVLIEERNVFCGTYNVRILSDTWDQNRVIHYSGGDLIAVSSNRKIHLLDIIQVKAIPVEFRGHAGSVRALFLCEEENFLLSGSYDLSIRYWDLKSGVCTRIFGGHQGTITCMDLCKNRLVSGGRDCQVKVWDVDTGKCLKTFRHKDPILATRINDTYIVSSCERGLVKVWHIAMAQLVKTLSGHEGAVKCLFFDQWHLLSGSTDGLVMAWSMVGKYERCLMAFKHPKEVLDVSLLFLRVISACADGKIRIYNFLNGNCMKVLKANGRGDPVLSFFIQGNRMVVNTESNVLMFQFEHIKWQYAVEKTKQKKNKEKEEEKEENSLMEILSKCNIQVHSPRESVSSKQTVIQELLPGKPPKSRVLLKPAKFSSDDVEKAQKQGQLETPGKLPSHPKKKSWKIPMSPDQFLLTVSALQHAHNSGEFAYPCRPQTEITDVWGPSISYPRKVLNFKGKSIQRAVDRLRLSNPPIDVKRTSIPLEIQKLQPNLKISLHSPRVQSTIPQPMIIRSRFSGSLKGGDQVTSSIERAVCSTGPLTSMQVIKPNRMLAPQVGTATLSLKKERPRIYTALDPFRVNTEFVLLTVKEEKEHQEAKMKEYQARESTGVVDPGKVSKAAWIRKIKGLPIDNFTKQGKTAAPELGQNVFI

SEQ ID NO: 31051 - protein, 1052 aa, Homo sapiens
  Payload ID: 6090
  Gene Symbol: FBXW10
  Gene Name: F-box and WD repeat domain containing 10
  Uniprot ID: Q5XX13
  ENSP ID: ENSP00000379025
MENLESRLKNAPYFRCEKGTDSIPLCRKCETCVLAWKIFSTKEWFCRINDISQRRFLVGILKQLNSLYLLHYFQNILQTTQGKDFIYNRSRINLSKKEGKVVKSSLNQMLDKTVEQKMKEILYWFANSTQWTKANYTLLLLQMCNPKLLLTAANVIRVLFLREENNISGLNQDITDVCFSPEKDHSSKSATSQVYWTAKTQHTSLPLSKAPENEHLLGAASNPEEPWRNSLRCISEMNRLFSGKGDITKPGYDPCNLLVDLDDIRDLSSGFSKYRDFIRYLPIHLSKYILRMLDRHTLNKCASVSQHWAAMAQQVKMDLSAHGFIQNQITFLQGSYTRGIDPNYANKVSIPVPKMVDDGKSMRVKHPKWKLRTKNEYNLWTAYQNEETQQVLIEERNVFCGTYNVRILSDTWDQNRVIHYSGGDLIAVSSNRKIHLLDIIQVKAIPVEFRGHAGSVRALFLCEEENFLLSGSYDLSIRYWDLKSGVCTRIFGGHQGTITCMDLCKNRLVSGGRDCQVKVWDVDTGKCLKTFRHKDPILATRINDTYIVSSCERGLVKVWHIAMAQLVKTLSGHEGAVKCLFFDQWHLLSGSTDGLVMAWSMVGKYERCLMAFKHPKEVLDVSLLFLRVISACADGKIRIYNFLNGNCMKVLKANGRGDPVLSFFIQGNRMVVNTESNVLMFQFEHIKWQYAVEKTKQKKNKEKEEEKEENSLMEILSKCNIQVHSPRESVSSKQTVIQELLPGKPPKSRVLLKPAKFSSAVLIEELQSQGKSKSPRRDADDVEKAQKQGQLETPGKLPSHPKKKSWKIPMSPDQFLLTVSALQHAHNSGEFAYPCRPQTEITDVWGPSISYPRKVLNFKGKSIQRAVDRLRLSNPPIDVKRTSIPLEIQKLQPNLKISLHSPRVQSTIPQPMIIRSRFSGSLKGGDQVTSSIERAVCSTGPLTSMQVIKPNRMLAPQVGTATLSLKKERPRIYTALDPFRVNTEFVLLTVKEEKEHQEAKMKEYQARESTGVVDPGKVSKAAWIRKIKGLPIDNFTKQGKTAAPELGQNVFI

SEQ ID NO: 31052 - protein, 196 aa, Homo sapiens
  Payload ID: 6090
  Gene Symbol: FBXW10
  Gene Name: F-box and WD repeat domain containing 10
  ENSP ID: ENSP00000463552
MENLESRLKNAPYFRCEKGTDSIPLCRKCETCVLAWKIFSTKEWFCRINDISQRRFLVGILKQLNSLYLLHYFQNILQTTQGKDFIYNRSRINLSKKEGKVVKSSLNQMLDKTVEQKMKEILYWFANSTQWTKANYTLLLLQMCNPKLLLTAANVIRVLFLREENNISGKQGHRQRLEGPRRPEGKASEICKELQL

SEQ ID NO: 31053 - protein, 542 aa, Homo sapiens
  Payload ID: 6091
  Gene Symbol: FBXW11
  Gene Name: F-box and WD repeat domain containing 11
  Uniprot ID: Q9UKB1
  ENSP ID: ENSP00000265094
MEPDSVIEDKTIELMCSVPRSLWLGCANLVESMCALSCLQSMPSVRCLQISNGTSSVIVSRKRPSEGNYQKEKDLCIKYFDQWSESDQVEFVEHLISRMCHYQHGHINSYLKPMLQRDFITALPEQGLDHIAENILSYLDARSLCAAELVCKEWQRVISEGMLWKKLIERMVRTDPLWKGLSERRGWDQYLFKNRPTDGPPNSFYRSLYPKIIQDIETIESNWRCGRHNLQRIQCRSENSKGVYCLQYDDEKIISGLRDNSIKIWDKTSLECLKVLTGHTGSVLCLQYDERVIVTGSSDSTVRVWDVNTGEVLNTLIHHNEAVLHLRFSNGLMVTCSKDRSIAVWDMASATDITLRRVLVGHRAAVNVVDFDDKYIVSASGDRTIKVWSTSTCEFVRTLNGHKRGIACLQYRDRLVVSGSSDNTIRLWDIECGACLRVLEGHEELVRCIRFDNKRIVSGAYDGKIKVWDLQAALDPRAPASTLCLRTLVEHSGRVFRLQFDEFQIISSSHDDTILIWDFLNVPPSAQNETRSPSRTYTYISR

SEQ ID NO: 31054 - protein, 529 aa, Homo sapiens
  Payload ID: 6091
  Gene Symbol: FBXW11
  Gene Name: F-box and WD repeat domain containing 11
  Uniprot ID: Q9UKB1
  ENSP ID: ENSP00000296933
MEPDSVIEDKTIELMNTSVMEDQNEDESPKKNTLWQISNGTSSVIVSRKRPSEGNYQKEKDLCIKYFDQWSESDQVEFVEHLISRMCHYQHGHINSYLKPMLQRDFITALPEQGLDHIAENILSYLDARSLCAAELVCKEWQRVISEGMLWKKLIERMVRTDPLWKGLSERRGWDQYLFKNRPTDGPPNSFYRSLYPKIIQDIETIESNWRCGRHNLQRIQCRSENSKGVYCLQYDDEKIISGLRDNSIKIWDKTSLECLKVLTGHTGSVLCLQYDERVIVTGSSDSTVRVWDVNTGEVLNTLIHHNEAVLHLRFSNGLMVTCSKDRSIAVWDMASATDITLRRVLVGHRAAVNVVDFDDKYIVSASGDRTIKVWSTSTCEFVRTLNGHKRGIACLQYRDRLVVSGSSDNTIRLWDIECGACLRVLEGHEELVRCIRFDNKRIVSGAYDGKIKVWDLQAALDPRAPASTLCLRTLVEHSGRVFRLQFDEFQIISSSHDDTILIWDFLNVPPSAQNETRSPSRTYTYISR

SEQ ID NO: 31055 - protein, 508 aa, Homo sapiens
  Payload ID: 6091
  Gene Symbol: FBXW11
  Gene Name: F-box and WD repeat domain containing 11
  Uniprot ID: Q9UKB1
  ENSP ID: ENSP00000377391
MEPDSVIEDKTIELMISNGTSSVIVSRKRPSEGNYQKEKDLCIKYFDQWSESDQVEFVEHLISRMCHYQHGHINSYLKPMLQRDFITALPEQGLDHIAENILSYLDARSLCAAELVCKEWQRVISEGMLWKKLIERMVRTDPLWKGLSERRGWDQYLFKNRPTDGPPNSFYRSLYPKIIQDIETIESNWRCGRHNLQRIQCRSENSKGVYCLQYDDEKIISGLRDNSIKIWDKTSLECLKVLTGHTGSVLCLQYDERVIVTGSSDSTVRVWDVNTGEVLNTLIHHNEAVLHLRFSNGLMVTCSKDRSIAVWDMASATDITLRRVLVGHRAAVNVVDFDDKYIVSASGDRTIKVWSTSTCEFVRTLNGHKRGIACLQYRDRLVVSGSSDNTIRLWDIECGACLRVLEGHEELVRCIRFDNKRIVSGAYDGKIKVWDLQAALDPRAPASTLCLRTLVEHSGRVFRLQFDEFQIISSSHDDTILIWDFLNVPPSAQNETRSPSRTYTYISR

SEQ ID NO: 31056 - protein, 47 aa, Homo sapiens
  Payload ID: 6091
  Gene Symbol: FBXW11
  Gene Name: F-box and WD repeat domain containing 11
  ENSP ID: ENSP00000427777
MEPDSVIEDKTIELMLPKCMFGILLKKAGYSKRKESWKMLDCCLFSD

SEQ ID NO: 31057 - protein, 196 aa, Homo sapiens
  Payload ID: 6091
  Gene Symbol: FBXW11
  Gene Name: F-box and WD repeat domain containing 11
  ENSP ID: ENSP00000428753
MEPDSVIEDKTIELMCSVPRSLWLGCANLVESMCALSCLQSMPSVRCLQNTSVMEDQNEDESPKKNTLWQISNGTSSVIVSRKRPSEGNYQKEKDLCIKYFDQWSESDQVEFVEHLISRMCHYQHGHINSYLKPMLQRDFITALPEQGLDHIAENILSYLDARSLCAAELVCKEWQRVISEGMLWKKLIERMVRTD

SEQ ID NO: 31058 - protein, 74 aa, Homo sapiens
  Payload ID: 6091
  Gene Symbol: FBXW11
  Gene Name: F-box and WD repeat domain containing 11
  ENSP ID: ENSP00000429818
MIMRPPHPCGTNTSVMEDQNEDESPKKNTLWQISNGTSSVIVSRKRPSEGNYQKEKDLCIKYFDQWSESDQVEF

SEQ ID NO: 31059 - protein, 47 aa, Homo sapiens; identical to SEQ ID NO: 31056
  Payload ID: 6091
  Gene Symbol: FBXW11
  Gene Name: F-box and WD repeat domain containing 11
  ENSP ID: ENSP00000430104

SEQ ID NO: 31060 - protein, 47 aa, Homo sapiens; identical to SEQ ID NO: 31056
  Payload ID: 6091
  Gene Symbol: FBXW11
  Gene Name: F-box and WD repeat domain containing 11
  ENSP ID: ENSP00000431100

SEQ ID NO: 31061 - protein, 464 aa, Homo sapiens
  Payload ID: 6092
  Gene Symbol: FBXW12
  Gene Name: F-box and WD repeat domain containing 12
  Uniprot ID: Q6X9E4
  ENSP ID: ENSP00000296438
MEIRLPDLALKRIFSFLDLFGLLQVSQVNKHWNRIADSDYLWRSLSLQRWDCSNFTNQHLGTHTWKQFFLHQRRKELRLALAQPHNFIYKVTKNIAFETELAYLSGNRLTVDEQEKSIICSVSPKQELCAWDVQEGTMIWSSPVQEFHFSNLVTLPQMHLAITMDRKKTIKVWNCQDRDALAVLPMPQPCYCMEAYLTKDGPFLMVGDAAGDIYTFTLPGLRDVSKVTAFQYGIVLLHCSPDKKWVFACGTYSRTLPQVFLTESLLRPSEGSVPLSTFLPHKLCASACWTPKVKNRITLMSQSSTGKKTEFITFDLTTKKTGGQTVIQAYEIASFQVAAHLKCPIWMGASDGYMIVFTSGPYLLLFSITGFLLQRFEDHQAAINNFWVDPCYVLTTSENSVHVYMWEEGGRHPYLRSCCHLENTWHDHTTDSCISSVMCDNASIVLRVRKVSDSSILVMYSLNT

SEQ ID NO: 31062 - protein, 445 aa, Homo sapiens
  Payload ID: 6092
  Gene Symbol: FBXW12
  Gene Name: F-box and WD repeat domain containing 12
  Uniprot ID: Q6X9E4
  ENSP ID: ENSP00000406139
MSPTHQIQDPKHWNRIADSDYLWRSLSLQRWDCSNFTNQHLGTHTWKQFFLHQRRKELRLALAQPHNFIYKVTKNIAFETELAYLSGNRLTVDEQEKSIICSVSPKQELCAWDVQEGTMIWSSPVQEFHFSNLVTLPQMHLAITMDRKKTIKVWNCQDRDALAVLPMPQPCYCMEAYLTKDGPFLMVGDAAGDIYTFTLPGLRDVSKVTAFQYGIVLLHCSPDKKWVFACGTYSRTLPQVFLTESLLRPSEGSVPLSTFLPHKLCASACWTPKVKNRITLMSQSSTGKKTEFITFDLTTKKTGGQTVIQAYEIASFQVAAHLKCPIWMGASDGYMIVFTSGPYLLLFSITGFLLQRFEDHQAAINNFWVDPCYVLTTSENSVHVYMWEEGGRHPYLRSCCHLENTWHDHTTDSCISSVMCDNASIVLRVRKVSDSSILVMYSLNT

SEQ ID NO: 31063 - protein, 307 aa, Homo sapiens
  Payload ID: 6092
  Gene Symbol: FBXW12
  Gene Name: F-box and WD repeat domain containing 12
  ENSP ID: ENSP00000413866
MHLAITMDRKKTIKVWNCQDRDALAVLPMPQPCYCMEAYLTKDGPFLMVGDAAGDIYTFTLPGLRDVSKVTAFQYGIVLLHCSPDKKWVFACGTYSRTLPQVFLTESLLRPSEGSVPLSTFLPHKLCASACWTPKVKNRITLMSQSSTGKKTEFITFDLTTKKTGGQTVIQAYEIASFQVAAHLKCPIWMGASDGYMIVFTSGPYLLLFSITGFLLQRFEDHQAAINNFWVDPCYVLTTSENSVHVYMWEEGGRHPYLRSCCHLENTWHDHTTDSCISSVMCDNASIVLRVRKVSDSSILVMYSLNT

SEQ ID NO: 31064 - protein, 394 aa, Homo sapiens
  Payload ID: 6092
  Gene Symbol: FBXW12
  Gene Name: F-box and WD repeat domain containing 12
  Uniprot ID: Q6X9E4
  ENSP ID: ENSP00000414683
MEIRLPDLALKRIFSFLDLFGLLQVSQVNKHWNRIADSDYLWRSLSLQRWDCSNFTNQHLGTHTWKQFFLHQRRKELRLALAQPHNFIYKVTKNIAFETELAYLSGNRLTVDEQEKSIICSVSPKQELCAWDVQEVGDAAGDIYTFTLPGLRDVSKVTAFQYGIVLLHCSPDKKWVFACGTYSRTLPQVFLTESLLRPSEGSVPLSTFLPHKLCASACWTPKVKNRITLMSQSSTGKKTEFITFDLTTKKTGGQTVIQAYEIASFQVAAHLKCPIWMGASDGYMIVFTSGPYLLLFSITGFLLQRFEDHQAAINNFWVDPCYVLTTSENSVHVYMWEEGGRHPYLRSCCHLENTWHDHTTDSCISSVMCDNASIVLRVRKVSDSSILVMYSLNT

SEQ ID NO: 31065 - protein, 208 aa, Homo sapiens
  Payload ID: 6093
  Gene Symbol: FBXW2
  Gene Name: F-box and WD repeat domain containing 2
  ENSP ID: ENSP00000398662
MKQLEDHEAFETSSLIGHSARVYALYYKDGLLCTGSDDLSAKLWDVSTGQCVYGIQTHTCAAVKFDEQKLVTGSFDNTVACWEWSSGARTQHFRGHTGAVFSVDYNDELDILVSGSADFTVKVWALSAGTCLNTLTGHTEWVTKVVLQKCKVKSLLHSPGDYILLSADKYEIKIWPIGREINCKCLKTLSVSEDRSICLQPRLHFDGK

SEQ ID NO: 31066 - protein, 454 aa, Homo sapiens
  Payload ID: 6093
  Gene Symbol: FBXW2
  Gene Name: F-box and WD repeat domain containing 2
  Uniprot ID: Q9UKT8
  ENSP ID: ENSP00000476369
MERKDFETWLDNISVTFLSLTDLQKNETLDHLISLSGAVQLRHLSNNLETLLKRDFLKLLPLELSFYLLKWLDPQTLLTCCLVSKQWNKVISACTEVWQTACKNLGWQIDDSVQDALHWKKVYLKAILRMKQLEDHEAFETSSLIGHSARVYALYYKDGLLCTGSDDLSAKLWDVSTGQCVYGIQTHTCAAVKFDEQKLVTGSFDNTVACWEWSSGARTQHFRGHTGAVFSVDYNDELDILVSGSADFTVKVWALSAGTCLNTLTGHTEWVTKVVLQKCKVKSLLHSPGDYILLSADKYEIKIWPIGREINCKCLKTLSVSEDRSICLQPRLHFDGKYIVCSSALGLYQWDFASYDILRVIKTPEIANLALLGFGDIFALLFDNRYLYIMDLRTESLISRWPLPEYRKSKRGSSFLAGEASWLNGLDGHNDTGLVFATSMPDHSIHLVLWKEHG

SEQ ID NO: 31067 - protein, 412 aa, Homo sapiens
  Payload ID: 6094
  Gene Symbol: FBXW4
  Gene Name: F-box and WD repeat domain containing 4
  Uniprot ID: P57775
  ENSP ID: ENSP00000359149
MAAAAGEEEEEEEAARESAARPAAGPALWRLPEELLLLICSYLDMRALGRLAQVCRWLRRFTSCDLLWRRIARASLNSGFTRLGTDLMTSVPVKERVKVSQNWRLGRCREGILLKWRCSQMPWMQLEDDSLYISQANFILAYQFRPDGASLNRRPLGVFAGHDEDVCHFVLANSHIVSAGGDGKIGIHKIHSTFTVKYSAHEQEVNCVDCKGGIIVSGSRDRTAKVWPLASGRLGQCLHTIQTEDRVWSIAISPLLSSFVTGTACCGHFSPLRIWDLNSGQLMTHLGSDFPPGAGVLDVMYESPFTLLSCGYDTYVRYWDLRTSVRKCVMEWEEPHDSTLYCLQTDGNHLLATGSSYYGVVRLWDRRQRACLHAFPLTSTPLSSPVYCLRLTTKHLYAALSYNLHVLDFQNP

SEQ ID NO: 31068 - protein, 566 aa, Homo sapiens
  Payload ID: 6095
  Gene Symbol: FBXW5
  Gene Name: F-box and WD repeat domain containing 5
  Uniprot ID: Q969U6
  ENSP ID: ENSP00000313034
MDEGGTPLLPDSLVYQIFLSLGPADVLAAGLVCRQWQAVSRDEFLWREQFYRYYQVARDVPRHPAAMSWYEEFQRLYDTVPCVEVQTLREHTDQVLHLSFSHSGYQFASCSKDCTVKIWSNDLTISLLHSADMRPYNWSYTQFSQFNKDDSLLLASGVFLGPHNSSSGEIAVISLDSFALLSRVRNKPYDVFGCWLTETSLISGNLHRIGDITSCSVLWLNNAFQDVESENVNVVKRLFKIQNLNASTVRTVMVADCSRFDSPDLLLEAGDPATSPCRIFDLGSDNEEVVAGPAPAHAKEGLRHFLDRVLEGRAQPQLSERMLETKVAELLAQGHTKPPERSATGAKSKYLIFTTGCLTYSPHQIGIKQILPHQMTTAGPVLGEGRGSDAFFDALDHVIDIHGHIIGMGLSPDNRYLYVNSRAWPNGAVVADPMQPPPIAEEIDLLVFDLKTMREVRRALRAHRAYTPNDECFFIFLDVSRDFVASGAEDRHGYIWDRHYNICLARLRHEDVVNSVVFSPQEQELLLTASDDATIKAWRSPRTMRVLQAPRPRPRTFFSWLASQRR

SEQ ID NO: 31069 - protein, 129 aa, Homo sapiens
  Payload ID: 6095
  Gene Symbol: FBXW5
  Gene Name: F-box and WD repeat domain containing 5
  ENSP ID: ENSP00000394011
MDEGGTPLLPDSLVYQIFLSLGPADVLAAGLVCRQWQAVSRDEFLWREQFYRYYQVARDVPRHPAAMSWYEEFQRLYDTVPCVEVQTLREHTDQVLHLSFSHSGYQFASCSKDCTVKIWSNDLTISLLH

SEQ ID NO: 31070 - protein, 200 aa, Homo sapiens
  Payload ID: 6095
  Gene Symbol: FBXW5
  Gene Name: F-box and WD repeat domain containing 5
  ENSP ID: ENSP00000404829
MDEGGTPLLPDSLVYQIFLSLGPADVLAAGLVCRQWQAVSRDEFLWREQFYRYYQVARDVPRHPAAMSWYEEFQRLYDTVPCVEVQTLREHTDQVLHLSFSHSGYQFASCSKDCTVKAITTAAPAEQIWSNDLTISLLHSADMRPYNWSYTQFSQFNKDDSLLLASGVFLGPHNSSSGEIAVISLDSFALLSRVRNKPYD

SEQ ID NO: 31071 - protein, 193 aa, Homo sapiens
  Payload ID: 6095
  Gene Symbol: FBXW5
  Gene Name: F-box and WD repeat domain containing 5
  ENSP ID: ENSP00000485109
  MOD_RES (1)..(1): Any amino acid
XNKPYDVFGCWLTETSLISGNLHRIGDITSCSVLWLNNAFQDVESENVNVVKRLFKIQNLNASTVRTVMVADCSRFDSPDLLLEAGDPATSPCRIFDLGSDNEEVVAGPAPAHAKEGLRHFLDRVLEGRAQPQLSERMLETKVAELLAQGHTKPPERSATGAKSKYLIFTTGCLTYSPHQIGTPLPPCCPPRS

SEQ ID NO: 31072 - protein, 117 aa, Homo sapiens
  Payload ID: 6095
  Gene Symbol: FBXW5
  Gene Name: F-box and WD repeat domain containing 5
  ENSP ID: ENSP00000485322
MDEGGTPLLPDSLVYQIFLSLGPADVLAAGLVCRQWQAVSRDEFLWREQFYRYYQVARDVPRHPAAMSWYEEFQRLYDTVPCVEVQTLREHTDQVLHLSFSHSGYQFASCSKDCTVK

SEQ ID NO: 31073 - protein, 627 aa, Homo sapiens
  Payload ID: 6096
  Gene Symbol: FBXW7
  Gene Name: F-box and WD repeat domain containing 7, E3 ubiquitin protein ligase
  Uniprot ID: Q969H0
  ENSP ID: ENSP00000263981
MCVPRSGLILSCICLYCGVLLPVLLPNLPFLTCLSMSTLESVTYLPEKGLYCQRLPSSRTHGGTESLKGKNTENMGFYGTLKMIFYKMKRKLDHGSEVRSFSLGKKPCKVSEYTSTTGLVPCSATPTTFGDLRAANGQGQQRRRITSVQPPTGLQEWLKMFQSWSGPEKLLALDELIDSCEPTQVKHMMQVIEPQFQRDFISLLPKELALYVLSFLEPKDLLQAAQTCRYWRILAEDNLLWREKCKEEGIDEPLHIKRRKVIKPGFIHSPWKSAYIRQHRIDTNWRRGELKSPKVLKGHDDHVITCLQFCGNRIVSGSDDNTLKVWSAVTGKCLRTLVGHTGGVWSSQMRDNIIISGSTDRTLKVWNAETGECIHTLYGHTSTVRCMHLHEKRVVSGSRDATLRVWDIETGQCLHVLMGHVAAVRCVQYDGRRVVSGAYDFMVKVWDPETETCLHTLQGHTNRVYSLQFDGIHVVSGSLDTSIRVWDVETGNCIHTLTGHQSLTSGMELKDNILVSGNADSTVKIWDIKTGQCLQTLQGPNKHQSAVTCLQFNKNFVITSSDDGTVKLWDLKTGEFIRNLVTLESGGSGGVVWRIRASNTKLVCAVGSRNGTEETKLLVLDFDVDMK

SEQ ID NO: 31074 - protein, 707 aa, Homo sapiens
  Payload ID: 6096
  Gene Symbol: FBXW7
  Gene Name: F-box and WD repeat domain containing 7, E3 ubiquitin protein ligase
  Uniprot ID: Q969H0
  ENSP ID: ENSP00000281708
MNQELLSVGSKRRRTGGSLRGNPSSSQVDEEQMNRVVEEEQQQQLRQQEEEHTARNGEVVGVEPRPGGQNDSQQGQLEENNNRFISVDEDSSGNQEEQEEDEEHAGEQDEEDEEEEEMDQESDDFDQSDDSSREDEHTHTNSVTNSSSIVDLPVHQLSSPFYTKTTKMKRKLDHGSEVRSFSLGKKPCKVSEYTSTTGLVPCSATPTTFGDLRAANGQGQQRRRITSVQPPTGLQEWLKMFQSWSGPEKLLALDELIDSCEPTQVKHMMQVIEPQFQRDFISLLPKELALYVLSFLEPKDLLQAAQTCRYWRILAEDNLLWREKCKEEGIDEPLHIKRRKVIKPGFIHSPWKSAYIRQHRIDTNWRRGELKSPKVLKGHDDHVITCLQFCGNRIVSGSDDNTLKVWSAVTGKCLRTLVGHTGGVWSSQMRDNIIISGSTDRTLKVWNAETGECIHTLYGHTSTVRCMHLHEKRVVSGSRDATLRVWDIETGQCLHVLMGHVAAVRCVQYDGRRVVSGAYDFMVKVWDPETETCLHTLQGHTNRVYSLQFDGIHVVSGSLDTSIRVWDVETGNCIHTLTGHQSLTSGMELKDNILVSGNADSTVKIWDIKTGQCLQTLQGPNKHQSAVTCLQFNKNFVITSSDDGTVKLWDLKTGEFIRNLVTLESGGSGGVVWRIRASNTKLVCAVGSRNGTEETKLLVLDFDVDMK

SEQ ID NO: 31075 - protein, 589 aa, Homo sapiens
  Payload ID: 6096
  Gene Symbol: FBXW7
  Gene Name: F-box and WD repeat domain containing 7, E3 ubiquitin protein ligase
  Uniprot ID: Q969H0
  ENSP ID: ENSP00000296555
MSKPGKPTLNHGLVPVDLKSAKEPLPHQTVMKIFSISIIAQGLPFCRRRMKRKLDHGSEVRSFSLGKKPCKVSEYTSTTGLVPCSATPTTFGDLRAANGQGQQRRRITSVQPPTGLQEWLKMFQSWSGPEKLLALDELIDSCEPTQVKHMMQVIEPQFQRDFISLLPKELALYVLSFLEPKDLLQAAQTCRYWRILAEDNLLWREKCKEEGIDEPLHIKRRKVIKPGFIHSPWKSAYIRQHRIDTNWRRGELKSPKVLKGHDDHVITCLQFCGNRIVSGSDDNTLKVWSAVTGKCLRTLVGHTGGVWSSQMRDNIIISGSTDRTLKVWNAETGECIHTLYGHTSTVRCMHLHEKRVVSGSRDATLRVWDIETGQCLHVLMGHVAAVRCVQYDGRRVVSGAYDFMVKVWDPETETCLHTLQGHTNRVYSLQFDGIHVVSGSLDTSIRVWDVETGNCIHTLTGHQSLTSGMELKDNILVSGNADSTVKIWDIKTGQCLQTLQGPNKHQSAVTCLQFNKNFVITSSDDGTVKLWDLKTGEFIRNLVTLESGGSGGVVWRIRASNTKLVCAVGSRNGTEETKLLVLDFDVDMK

SEQ ID NO: 31076 - protein, 531 aa, Homo sapiens
  Payload ID: 6096
  Gene Symbol: FBXW7
  Gene Name: F-box and WD repeat domain containing 7, E3 ubiquitin protein ligase
  ENSP ID: ENSP00000377528
MLFFKCISLLLIWLIPGQSTTGLVPCSATPTTFGDLRAANGQGQQRRRITSVQPPTGLQEWLKMFQSWSGPEKLLALDELIDSCEPTQVKHMMQVIEPQFQRDFISLLPKELALYVLSFLEPKDLLQAAQTCRYWRILAEDNLLWREKCKEEGIDEPLHIKRRKVIKPGFIHSPWKSAYIRQHRIDTNWRRGELKSPKVLKGHDDHVITCLQFCGNRIVSGSDDNTLKVWSAVTGKCLRTLVGHTGGVWSSQMRDNIIISGSTDRTLKVWNAETGECIHTLYGHTSTVRCMHLHEKRVVSGSRDATLRVWDIETGQCLHVLMGHVAAVRCVQYDGRRVVSGAYDFMVKVWDPETETCLHTLQGHTNRVYSLQFDGIHVVSGSLDTSIRVWDVETGNCIHTLTGHQSLTSGMELKDNILVSGNADSTVKIWDIKTGQCLQTLQGPNKHQSAVTCLQFNKNFVITSSDDGTVKLWDLKTGEFIRNLVTLESGGSGGVVWRIRASNTKLVCAVGSRNGTEETKLLVLDFDVDMK

SEQ ID NO: 31077 - protein, 158 aa, Homo sapiens
  Payload ID: 6096
  Gene Symbol: FBXW7
  Gene Name: F-box and WD repeat domain containing 7, E3 ubiquitin protein ligase
  ENSP ID: ENSP00000474538
MNQELLSVGSKRRRTGGSLRGNPSSSQVDEEQMNRVVEEEQQQQLRQQEEEHTARNGEVVGVEPRPGGQNDSQQGQLEENNNRFISVDEDSSGNQEEQEEDEEHAGEQDEEDEEEEEMDQESDDFDQSDDSSREDEHTHTNSVTNSSSIVDLPVHQLS

SEQ ID NO: 31078 - protein, 707 aa, Homo sapiens; identical to SEQ ID NO: 31074
  Payload ID: 6096
  Gene Symbol: FBXW7
  Gene Name: F-box and WD repeat domain containing 7, E3 ubiquitin protein ligase
  Uniprot ID: Q969H0
  ENSP ID: ENSP00000474725

SEQ ID NO: 31079 - protein, 176 aa, Homo sapiens
  Payload ID: 6096
  Gene Symbol: FBXW7
  Gene Name: F-box and WD repeat domain containing 7, E3 ubiquitin protein ligase
  ENSP ID: ENSP00000474751
MNQELLSVGSKRRRTGGSLRGNPSSSQVDEEQMNRVVEEEQQQQLRQQEEEHTARNGEVVGVEPRPGGQNDSQQGQLEENNNRFISVDEDSSGNQEEQEEDEEHAGEQDEEDEEEEEMDQESDDFDQSDDSSREDEHTHTNSVTNSSSIVDLPVHQLSSPFYTKTTKVSIFNILLT

SEQ ID NO: 31080 - protein, 707 aa, Homo sapiens; identical to SEQ ID NO: 31074
  Payload ID: 6096
  Gene Symbol: FBXW7
  Gene Name: F-box and WD repeat domain containing 7, E3 ubiquitin protein ligase
  Uniprot ID: Q969H0
  ENSP ID: ENSP00000474971

SEQ ID NO: 31081 - protein, 598 aa, Homo sapiens
  Payload ID: 6097
  Gene Symbol: FBXW8
  Gene Name: F-box and WD repeat domain containing 8
  Uniprot ID: Q8N3Y1
  ENSP ID: ENSP00000310686
MDDYSLDEFRRRWQEELAQAQAPKKRRRPEAAERRARRPEVGSGRGEQASGDPALAQRLLEGAGRPPAARATRAEGQDVASRSRSPLAREGAGGGEQLVDQLIRDLNEMNDVPFFDIQLPYELAINIFQYLDRKELGRCAQVSKTWKVIAEDEVLWYRLCQQEGHLPDSSISDYSCWKLIFQECRAKEHMLRTNWKNRKGAVSELEHVPDTVLCDVHSHDGVVIAGYTSGDVRVWDTRTWDYVAPFLESEDEEDEPGMQPNVSFVRINSSLAVAAYEDGFLNIWDLRTGKYPVHRFEHDARIQALALSQDDATVATASAFDVVMLSPNEEGYWQIAAEFEVPKLVQYLEIVPETRRYPVAVAAAGDLMYLLKAEDSARTLLYAHGPPVTCLDVSANQVAFGVQGLGWVYEGSKILVYSLEAGRRLLKLGNVLRDFTCVNLSDSPPNLMVSGNMDGRVRIHDLRSGNIALSLSAHQLRVSAVQMDDWKIVSGGEEGLVSVWDYRMNQKLWEVYSGHPVQHISFSSHSLITANVPYQTVMRNADLDSFTTHRRHRGLIRAYEFAVDQLAFQSPLPVCRSSCDAMATHYYDLALAFPYNHV

SEQ ID NO: 31082 - protein, 532 aa, Homo sapiens
  Payload ID: 6097
  Gene Symbol: FBXW8
  Gene Name: F-box and WD repeat domain containing 8
  Uniprot ID: Q8N3Y1
  ENSP ID: ENSP00000389144
MDDYSLDEFRRRWQEELAQAQAPKKRRRPEAAERRARRPENEMNDVPFFDIQLPYELAINIFQYLDRKELGRCAQVSKTWKVIAEDEVLWYRLCQQEGHLPDSSISDYSCWKLIFQECRAKEHMLRTNWKNRKGAVSELEHVPDTVLCDVHSHDGVVIAGYTSGDVRVWDTRTWDYVAPFLESEDEEDEPGMQPNVSFVRINSSLAVAAYEDGFLNIWDLRTGKYPVHRFEHDARIQALALSQDDATVATASAFDVVMLSPNEEGYWQIAAEFEVPKLVQYLEIVPETRRYPVAVAAAGDLMYLLKAEDSARTLLYAHGPPVTCLDVSANQVAFGVQGLGWVYEGSKILVYSLEAGRRLLKLGNVLRDFTCVNLSDSPPNLMVSGNMDGRVRIHDLRSGNIALSLSAHQLRVSAVQMDDWKIVSGGEEGLVSVWDYRMNQKLWEVYSGHPVQHISFSSHSLITANVPYQTVMRNADLDSFTTHRRHRGLIRAYEFAVDQLAFQSPLPVCRSSCDAMATHYYDLALAFPYNHV

SEQ ID NO: 31083 - protein, 458 aa, Homo sapiens
  Payload ID: 6098
  Gene Symbol: FBXW9
  Gene Name: F-box and WD repeat domain containing 9
  Uniprot ID: Q5XUX1
  ENSP ID: ENSP00000376945
MELPLGRCDDSRTWDDDSDPESETDPDAQAKAYVARVLSPPKSGLAFSRPSQLSTPAASPSASEPRAASRVSAVSEPGLLSLPPELLLEICSYLDARLVLHVLSRVCHALRDLVSDHVTWRLRALRRVRAPYPVVEEKNFDWPAACIALEQHLSRWAEDGRWVEYFCLAEGHVASVDSVLLLQGGSLCLSGSRDRNVNLWDLRQLGTESNQVLIKTLGTKRNSTHEGWVWSLAAQDHRVCSGSWDSTVKLWDMAADGQQFGEIKASSAVLCLSYLPDILVTGTYDKKVTIYDPRAGPALLKHQQLHSRPVLTLLADDRHIISGSEDHTLVVVDRRANSVLQRLQLDSYLLCMSYQEPQLWAGDNQGLLHVFANRNGCFQLIRSFDVGHSFPITGIQYSVGALYTTSTDKTIRVHVPTDPPRTICTRRHDNGLNRVCAEGNLVVAGSGDLSLEVWRLQA

SEQ ID NO: 31084 - protein, 478 aa, Homo sapiens
  Payload ID: 6098
  Gene Symbol: FBXW9
  Gene Name: F-box and WD repeat domain containing 9
  Uniprot ID: Q5XUX1
  ENSP ID: ENSP00000465387
MELPLGRCDDSRTWDDDSDPESETDPDAQAKAYVARVLSPPKSGLAFSRPSQLSTPAASPSASEPRAASRVSAVSEPGLLSLPPELLLEICSYLDARLVLHVLSRVCHALRDLVSDHVTWRLRALRRKNFDWPAACIALEQHLSRWAEDGRWVEYFCLAEGHVASVDSVLLLQGGSLCLSGSRDRNVNLWDLRQLGTESNQVLIKTLGTKRNSTHEGWVWSLAAQDHRVCSGSWDSTVKLWDMAADGQQFGEIKASSAVLCLSYLPDILVTGTYDKKVTIYDPRDRMETRDALMGWGGPSRGSDIPPHRPITHEAGPALLKHQQLHSRPVLTLLADDRHIISGSEDHTLVVVDRRANSVLQRLQLDSYLLCMSYQEPQLWAGDNQGLLHVFANRNGCFQLIRSFDVGHSFPITGIQYSVGALYTTSTDKTIRVHVPTDPPRTICTRRHDNGLNRVCAEGNLVVAGSGDLSLEVWRLQA

SEQ ID NO: 31085 - protein, 172 aa, Homo sapiens
  Payload ID: 6098
  Gene Symbol: FBXW9
  Gene Name: F-box and WD repeat domain containing 9
  ENSP ID: ENSP00000465854
MELPLGRCDDSRTWDDDSDPESETDPDAQAKAYVARVLSPPKSGLAFSRPSQLSTPAASPSASEPRAASRVSAVSEPGLLSLPPELLLEICSYLDARLVLHVLSRVCHALRDLVSDHVTWRLRALRRVRAPYPVVEGWVTLSVGLPRSQRQLVGPAAAGDGVQPGSDQDLRH

SEQ ID NO: 31086 - protein, 573 aa, Homo sapiens
  Payload ID: 6099
  Gene Symbol: FBXO10
  Gene Name: F-box protein 10
  ENSP ID: ENSP00000276960
MEAGGLPLELWRMILAYLHLPDLGRCSLVCRAWYELILSLDSTRWRQLCLGCTECRHPNWPNQPDVEPESWREAFKQHYLASKTWTKNALDLESSICFSLFRRRRERRTLSVGPGREFDSLGSALAMASLYDRIVLFPGVYEEQGEIILKVPVEIVGQGKLGEVALLASIDQHCSTTRLCNLVFTPAWFSPIMYKTTSGHVQFDNCNFENGHIQVHGPGTCQVKFCTFKNTHIFLHNVPLCVLENCEFVGSENNSVTVEGHPSADKNWAYKYLLGLIKSSPTFLPTEDSDFLMSLDLESRDQAWSPKTCDIVIEGSQSPTSPASSSPKPGSKAGSQEAEVGSDGERVAQTPDSSDGGLSPSGEDEDEDQLMYRLSYQVQGPRPVLGGSFLGPPLPGASIQLPSCLVLNSLQQELQKDKEAMALANSVQGCLIRKCLFRDGKGGVFVCSHGRAKMEGNIFRNLTYAVRCIHNSKIIMLRNDIYRCRASGIFLRLEGGGLIAGNNIYHNAEAGVDIRKKSNPLILCNQIHHGLRSGIVVLGNGKGIIRNNQIFSNKEAGIYILYHGNPVVRKCHP

SEQ ID NO: 31087 - protein, 956 aa, Homo sapiens
  Payload ID: 6099
  Gene Symbol: FBXO10
  Gene Name: F-box protein 10
  Uniprot ID: Q9UK96
  ENSP ID: ENSP00000403802
MEAGGLPLELWRMILAYLHLPDLGRCSLVCRAWYELILSLDSTRWRQLCLGCTECRHPNWPNQPDVEPESWREAFKQHYLASKTWTKNALDLESSICFSLFRRRRERRTLSVGPGREFDSLGSALAMASLYDRIVLFPGVYEEQGEIILKVPVEIVGQGKLGEVALLASIDQHCSTTRLCNLVFTPAWFSPIMYKTTSGHVQFDNCNFENGHIQVHGPGTCQVKFCTFKNTHIFLHNVPLCVLENCEFVGSENNSVTVEGHPSADKNWAYKYLLGLIKSSPTFLPTEDSDFLMSLDLESRDQAWSPKTCDIVIEGSQSPTSPASSSPKPGSKAGSQEAEVGSDGERVAQTPDSSDGGLSPSGEDEDEDQLMYRLSYQVQGPRPVLGGSFLGPPLPGASIQLPSCLVLNSLQQELQKDKEAMALANSVQGCLIRKCLFRDGKGGVFVCSHGRAKMEGNIFRNLTYAVRCIHNSKIIMLRNDIYRCRASGIFLRLEGGGLIAGNNIYHNAEAGVDIRKKSNPLILCNQIHHGLRSGIVVLGNGKGIIRNNQIFSNKEAGIYILYHGNPVVSGNHIFKGRAAGIAVNENGKGLITENVIRENQWGGVDIRRGGIPVLRSNLICFGYSDGVVVGDEGKGLIEGNTIYANKGCGVWMMSSSLPHVTSNHVSYNGLYGVAVFSQKDGSSELPRGHRAQENFSEDGDAILWETELEKEDDPLRRPITIALVESNSINHNGASGLYVQSSEALHVITNVIHANGDRGITVAQSSQPTRVANNSISCNRQSGVKVEAQCKVELRGNGIYDNRGHGIITKGDSTIVIENDIIGNRGSGLQLLPRSDTKVIKNRIHSFRAYGIAVRGRAKALVQENIIFQGKTSKTIFQQISNNRECIMQNNKFLVFKKKSDTWRLVNPPARPHLENSLRRPSAAHNGQKVTAMATRITARVEGGYHSNRSVFCTIL

SEQ ID NO: 31088 - protein, 71 aa, Homo sapiens
  Payload ID: 6099
  Gene Symbol: FBXO10
  Gene Name: F-box protein 10
  ENSP ID: ENSP00000440061
MEAGGLPLELWRMILAYLHLPDLGRCSLVCRAWYELILSLDSTRWRQLCLGCTECRHPNWPNQPDVEPESW

SEQ ID NO: 31089 - protein, 591 aa, Homo sapiens
  Payload ID: 6100
  Gene Symbol: FBXO11
  Gene Name: F-box protein 11
  ENSP ID: ENSP00000323822
MMMCLQIWLQKNQVLVHKIVHTNFVEKLFCRKEQRVPQRTVWRAPQLQLQKTLVIVQNVQECLESQDLSAAPAEQYLQEKLPDEVVLKIFSYLLEQDLCRAACVCKRFSELANDPILWKRLYMEVFEYTRPMMHPEPGKFYQINPEEYEHPNPWKESFQQLYKGAHVKPGFAEHFYSNPARYKGRENMLYYDTIEDALGGVQEAHFDGLIFVHSGIYTDEWIYIESPITMIGAAPGKVADKVIIENTRDSTFVFMEGSEDAYVGYMTIRFNPDDKSAQHHNAHHCLEITVNCSPIIDHCIIRSTCTVGSAVCVSGQGACPTIKHCNISDCENVGLYITDHAQGIYEDNEISNNALAGIWVKNHGNPIIRRNHIHHGRDVGVFTFDHGMGYFESCNIHRNRIAGFEVKAYANPTVVRCEIHHGQTGGIYVHEKGRGQFIENKIYANNFAGVWITSNSDPTIRGNSIFNGNQGGVYIFGDGRGLIEGNDIYGNALAGIQIRTNSCPIVRHNKIHDGQHGGIYVHEKGQGVIEENEVYSNTLAGVWVTTGSTPVLRRNRIHSGKQVGVYFYDNGHGVLEDNDIYNHMYSGVQIR

SEQ ID NO: 31090 - protein, 927 aa, Homo sapiens
  Payload ID: 6100
  Gene Symbol: FBXO11
  Gene Name: F-box protein 11
  Uniprot ID: Q86XK2
  ENSP ID: ENSP00000384823
MNSVRAANRRPRRVSRPRPVQQQQQQPPQQPPPQPPQQQPPQQQPPPPPQQQQQQQPPPPPPPPPPLPQERNNVGERDDDVPADMVAEESGPGAQNSPYQLRRKTLLPKRTACPTKNSMEGASTSTTENFGHRAKRARVSGKSQDLSAAPAEQYLQEKLPDEVVLKIFSYLLEQDLCRAACVCKRFSELANDPILWKRLYMEVFEYTRPMMHPEPGKFYQINPEEYEHPNPWKESFQQLYKGAHVKPGFAEHFYSNPARYKGRENMLYYDTIEDALGGVQEAHFDGLIFVHSGIYTDEWIYIESPITMIGAAPGKVADKVIIENTRDSTFVFMEGSEDAYVGYMTIRFNPDDKSAQHHNAHHCLEITVNCSPIIDHCIIRSTCTVGSAVCVSGQGACPTIKHCNISDCENVGLYITDHAQGIYEDNEISNNALAGIWVKNHGNPIIRRNHIHHGRDVGVFTFDHGMGYFESCNIHRNRIAGFEVKAYANPTVVRCEIHHGQTGGIYVHEKGRGQFIENKIYANNFAGVWITSNSDPTIRGNSIFNGNQGGVYIFGDGRGLIEGNDIYGNALAGIQIRTNSCPIVRHNKIHDGQHGGIYVHEKGQGVIEENEVYSNTLAGVWVTTGSTPVLRRNRIHSGKQVGVYFYDNGHGVLEDNDIYNHMYSGVQIRTGSNPKIRRNKIWGGQNGGILVYNSGLGCIEDNEIFDNAMAGVWIKTDSNPTLRRNKIHDGRDGGICIFNGGRGLLEENDIFRNAQAGVLISTNSHPILRKNRIFDGFAAGIEITNHATATLEGNQIFNNRFGGLFLASGVNVTMKDNKIMNNQDAIEKAVSRGQCLYKISSYTSYPMHDFYRCHTCNTTDRNAICVNCIKKCHQGHDVEFIRHDRFFCDCGAGTLSNPCTLAGEPTHDTDTLYDSAPPIESNTLQHN

SEQ ID NO: 31091 - protein, 57 aa, Homo sapiens
  Payload ID: 6100
  Gene Symbol: FBXO11
  Gene Name: F-box protein 11
  ENSP ID: ENSP00000385127
MHDFYRCHTCNTTDRNAICVNCIKKCHQGHDVEFIRHDRFFCDCGAGTLSNPCTLAG

SEQ ID NO: 31092 - protein, 843 aa, Homo sapiens
  Payload ID: 6100
  Gene Symbol: FBXO11
  Gene Name: F-box protein 11
  Uniprot ID: Q86XK2
  ENSP ID: ENSP00000385398
MVAEESGPGAQNSPYQLRRKTLLPKRTACPTKNSMEGASTSTTENFGHRAKRARVSGKSQDLSAAPAEQYLQEKLPDEVVLKIFSYLLEQDLCRAACVCKRFSELANDPILWKRLYMEVFEYTRPMMHPEPGKFYQINPEEYEHPNPWKESFQQLYKGAHVKPGFAEHFYSNPARYKGRENMLYYDTIEDALGGVQEAHFDGLIFVHSGIYTDEWIYIESPITMIGAAPGKVADKVIIENTRDSTFVFMEGSEDAYVGYMTIRFNPDDKSAQHHNAHHCLEITVNCSPIIDHCIIRSTCTVGSAVCVSGQGACPTIKHCNISDCENVGLYITDHAQGIYEDNEISNNALAGIWVKNHGNPIIRRNHIHHGRDVGVFTFDHGMGYFESCNIHRNRIAGFEVKAYANPTVVRCEIHHGQTGGIYVHEKGRGQFIENKIYANNFAGVWITSNSDPTIRGNSIFNGNQGGVYIFGDGRGLIEGNDIYGNALAGIQIRTNSCPIVRHNKIHDGQHGGIYVHEKGQGVIEENEVYSNTLAGVWVTTGSTPVLRRNRIHSGKQVGVYFYDNGHGVLEDNDIYNHMYSGVQIRTGSNPKIRRNKIWGGQNGGILVYNSGLGCIEDNEIFDNAMAGVWIKTDSNPTLRRNKIHDGRDGGICIFNGGRGLLEENDIFRNAQAGVLISTNSHPILRKNRIFDGFAAGIEITNHATATLEGNQIFNNRFGGLFLASGVNVTMKDNKIMNNQDAIEKAVSRGQCLYKISSYTSYPMHDFYRCHTCNTTDRNAICVNCIKKCHQGHDVEFIRHDRFFCDCGAGTLSNPCTLAGEPTHDTDTLYDSAPPIESNTLQHN

SEQ ID NO: 31093 - protein, 140 aa, Homo sapiens
  Payload ID: 6100
  Gene Symbol: FBXO11
  Gene Name: F-box protein 11
  ENSP ID: ENSP00000392272
MVAEESGPGAQNSPYQLRRKTLLPKRTACPTKNSMEGASTSTTENFGHRAKRARVSGKSQDLSAAPAEQYLQEKLPDEVVLKIFSYLLEQDLCRAACVCKRFSELANDPILWKRLYMEVFEYTRPMMHPEPGKFYQINPE

SEQ ID NO: 31094 - protein, 81 aa, Homo sapiens
  Payload ID: 6100
  Gene Symbol: FBXO11
  Gene Name: F-box protein 11
  ENSP ID: ENSP00000402692
MHDFYRCHTCNTTDRNAICVNCIKKCHQGHDVEFIRHDRFFCDCGAGTLSNPCTLAGEPTHDTDTLYDSAPPIESNTLQHN

SEQ ID NO: 31095 - protein, 562 aa, Homo sapiens
  Payload ID: 6100
  Gene Symbol: FBXO11
  Gene Name: F-box protein 11
  ENSP ID: ENSP00000428118
  MOD_RES (1)..(1): Any amino acid
XMMHPEPGKFYQINPEEYEHPNPWKESFQQLYKGAHVKPGFAEHFYSNPARYKGRENMLYYDTIEDALGGVQEAHFDGLIFVHSGIYTDEWIYIESPITMIGAAPGKVADKVIIENTRDSTFVFMEGSEDAYVGYMTIRFNPDDKSAQHHNAHHCLEITVNCSPIIDHCIIRSTCTVGSAVCVSGQGACPTIKHCNISDCENVGLYITDHAQGIYEDNEISNNALAGIWVKNHGNPIIRRNHIHHGRDVGVFTFDHGMGYFESCNIHRNRIAGFEVKAYANPTVVRCEIHHGQTGGIYVHEKGRGQFIENKIYANNFAGVWITSNSDPTIRGNSIFNGNQGGVYIFGDGRGLIEGNDIYGNALAGIQIRTNSCPIVRHNKIHDGQHGGIYVHEKGQGVIEENEVYSNTLAGVWVTTGSTPVLRRNRIHSGKQVGVYFYDNGHGVLEDNDIYNHMYSGVQIRTGSNPKIRRNKIWGGQNGGILVYNSGLGCIEDNEIFDNAMAGVWIKTDSNPTLRRNKIHDGRDGGICIFNGGRGIVVNFALVKNPVFHYSSISLMINDIAN

SEQ ID NO: 31096 - protein, 510 aa, Homo sapiens
  Payload ID: 6101
  Gene Symbol: FBXO15
  Gene Name: F-box protein 15
  Uniprot ID: Q8NCQ5
  ENSP ID: ENSP00000393154
MATGRGRILQQHWLGLQTLRGPSRGGGAARGRARAFGCRKGPGVKLSAGSAALRCHAGGGQHWESSFSCCSGFLDGMPSEILLKIFSYLDAVSLLCTGCVSRRFYHLANDNFIWIGIYSTAFSPARSNWKFNSVEKIAMSMSFLSVQDKEAGYWKKEYITKQIASVKAALADILKPVNPYTGLPVKTKEALRIFGLGWAIILKEKGGKEYIMEHVDLSINDTSVTVIWYGKKWPCLASLSTLDLCGMTPVFTDWYKTPTKHRLRWHSLIAKYNLSHLTISTMIGCDRLIRIFCLHPGLLVGVWKKEEELAFVMANLHFHHLVERSTLGSATIPYELPPHSPFLDDSPEYGLHGYQLHVDLHSGGVFYLCGTFRNLFTKRGNIENGHVKLIVIHLKNNREHLPLIGKVGLSWKTDIFDGCIKSCSMMDVTLLDEHGKPFWCFSSPVCLRSPATPSDSSSFLGQTYNVDYVDAEGRVHVELVWIRETEEYLIVNLVLYLSIAKINHWFGTEY

SEQ ID NO: 31097 - protein, 102 aa, Homo sapiens
  Payload ID: 6101
  Gene Symbol: FBXO15
  Gene Name: F-box protein 15
  ENSP ID: ENSP00000462117
  MOD_RES (1)..(1): Any amino acid
XPYELPPHSPFLDDSPEYGLHGYQLHVDLHSGGVFYLCGTFRNLFTKRGNIENGHVKLIVIHLKNNREHLPLIGKVGLSWKTDIFDGCIKFPGVPEIACHTL

SEQ ID NO: 31098 - protein, 15 aa, Homo sapiens
  Payload ID: 6101
  Gene Symbol: FBXO15
  Gene Name: F-box protein 15
  ENSP ID: ENSP00000462143
  MOD_RES (1)..(1): Any amino acid
XSSAFQKHLQREEVK

SEQ ID NO: 31099 - protein, 36 aa, Homo sapiens
  Payload ID: 6101
  Gene Symbol: FBXO15
  Gene Name: F-box protein 15
  ENSP ID: ENSP00000462151
  MOD_RES (1)..(1): Any amino acid
XMPSEILLKIFSYLDAVSLLCTGCVSRRFYHLANDK

SEQ ID NO: 31100 - protein, 55 aa, Homo sapiens
  Payload ID: 6101
  Gene Symbol: FBXO15
  Gene Name: F-box protein 15
  ENSP ID: ENSP00000462361
MATGRGRILQQHWLGLQTLRGPSRGGGAARGRARAFGCRSCSSAFQKHLQREEVK

SEQ ID NO: 31101 - protein, 122 aa, Homo sapiens
  Payload ID: 6101
  Gene Symbol: FBXO15
  Gene Name: F-box protein 15
  ENSP ID: ENSP00000463247
  MOD_RES (1)..(1): Any amino acid
XLRWHSLIAKYNLSHLTISTMIGCDRLIRIFCLHPGLLVGVWKKEEELAFVMANLHFHHLVERSTLGSATIPYELPPHSPFLDDSPEYGLHGYQLHVDLHSGGVFYLCGTFRNLFTKRGEID

SEQ ID NO: 31102 - protein, 78 aa, Homo sapiens
  Payload ID: 6101
  Gene Symbol: FBXO15
  Gene Name: F-box protein 15
  ENSP ID: ENSP00000463378
TGSASRRCAGPAGAVARPGGAPGPLGAGDCRACGWGPLAGSPSLRGPALFTVYFIRPAWRKARGRLQREKAYSESVYF

SEQ ID NO: 31103 - protein, 136 aa, Homo sapiens
  Payload ID: 6101
  Gene Symbol: FBXO15
  Gene Name: F-box protein 15
  ENSP ID: ENSP00000463529
MATGRGRILQQHWLGLQTLRGPSRGGGAARGRARAFGCRMPSEILLKIFSYLDAVSLLCTGCVSRRFYHLANDNFIWIGIYSTAFSPARSNWKFNSVEKIAMSMSFLSVQDKEAGYWKKEYITKQIASVKAALADI

SEQ ID NO: 31104 - protein, 39 aa, Homo sapiens
  Payload ID: 6101
  Gene Symbol: FBXO15
  Gene Name: F-box protein 15
  ENSP ID: ENSP00000464177
MATGRGRILQQHWLGLQTLRGPSRGGGAARGRARAFGCR

SEQ ID NO: 31105 - protein, 316 aa, Homo sapiens
  Payload ID: 6102
  Gene Symbol: FBXO16
  Gene Name: F-box protein 16
  ENSP ID: ENSP00000341416
MMAFAPPKNTDGPKMQTKMSTWTPLNHQLLNDRFDKWTDSQRRRILTGLLERCSLSQQKFCCRKLQEKIPAEALDFTTKLPRVLSLYIFSFLDPRSLCRCAQVCWHWKNLAELDQLWMLKCLRFNWYINFSPTPFEQGIWKKHYIQMVKELHITKPKTPPKDGFVIADVQLVTSNSPEEKQSPLSAFRSSSSLRKKNNSGEKALPPWRSSDKHPTDIIRFNYLDNRDPMETVQQGRRKRNQMTPDFSRQSHDKKNKLQDRTRLRKAQSMMSLSASSPLKVPAHLAWPPPESVGLPDTATTAEILMQHPHRHPGPQA

SEQ ID NO: 31106 - protein, 292 aa, Homo sapiens
  Payload ID: 6102
  Gene Symbol: FBXO16
  Gene Name: F-box protein 16
  Uniprot ID: Q8IX29
  ENSP ID: ENSP00000369604
MMAFAPPKNTDGPKMQTKMSTWTPLNHQLLNDRVFEERRALLGKWFDKWTDSQRRRILTGLLERCSLSQQKFCCRKLQEKIPAEALDFTTKLPRVLSLYIFSFLDPRSLCRCAQVCWHWKNLAELDQLWMLKCLRFNWYINFSPTPFEQGIWKKHYIQMVKELHITKPKTPPKDGFVIADVQLVTSNSPEEKQSPLSAFRSSSSLRKKNNSGEKALPPWRSSDKHPTDIIRFNYLDNRDPMETVQQGRRKRNQMTPDFSRQSHDKKNKLQDRTRLRKAQSMMSRRNPFPLCP

SEQ ID NO: 31107 - protein, 69 aa, Homo sapiens
  Payload ID: 6102
  Gene Symbol: FBXO16
  Gene Name: F-box protein 16
  ENSP ID: ENSP00000428683
MMAFAPPKNTDGPKMQTKMSTWTPLNHQLLNDRVFEERRALLGKWMGCCSGWFQIPGLKRFSCLCLPKC

SEQ ID NO: 31108 - protein, 349 aa, Homo sapiens
  Payload ID: 6102
  Gene Symbol: FBXO16
  Gene Name: F-box protein 16
  ENSP ID: ENSP00000428902
MMAFAPPKNTDGPKMQTKMSTWTPLNHQLLNDRVFEERRALLGKWFDKWTDSQRRRILTGLLERCSLSQQKFCCRKLQEKIPAEALDFTTKLPRVLSLYIFSFLDPRSLCRCAQVCWHWKNLAELDQLWMLKCLRFNWYINFSPTPFEQGIWKKHYIQMVKELHITKPKTPPKDGFVIADVQLVTSNSPEEKQSPLSAFRSSSSLRKKNNSGEKALPPWRSSDKHPTDIIRFNYLDNRDPMETVQQGRRKRNQMTPDFSRQSHDKKNKLQDRTRLRKAQSMVMGRGFSVPFASAGEERQQHGECPVPTPWKAVPPGSPGVGTQCLGGALGCPTLGATARRGRSPAFHHL

SEQ ID NO: 31109 - protein, 184 aa, Homo sapiens
  Payload ID: 6102
  Gene Symbol: FBXO16
  Gene Name: F-box protein 16
  ENSP ID: ENSP00000429390
MMAFAPPKNTDGPKMQTKMSTWTPLNHQLLNDRVFEERRALLGKWFDKWTDSQRRRILTGLLERCSLSQQKFCCRKLQEKIPAEALDFTTKLPRVLSLYIFSFLDPRSLCRCAQTPPKDGFVIADVQLVTSNSPEEKQSPLSAFRSSSSLRKKNNSGEKALPPWRSSDKHPTDIIRFNYLDNRD

SEQ ID NO: 31110 - protein, 280 aa, Homo sapiens
  Payload ID: 6102
  Gene Symbol: FBXO16
  Gene Name: F-box protein 16
  Uniprot ID: Q8IX29
  ENSP ID: ENSP00000429687
MMAFAPPKNTDGPKMQTKMSTWTPLNHQLLNDRFDKWTDSQRRRILTGLLERCSLSQQKFCCRKLQEKIPAEALDFTTKLPRVLSLYIFSFLDPRSLCRCAQVCWHWKNLAELDQLWMLKCLRFNWYINFSPTPFEQGIWKKHYIQMVKELHITKPKTPPKDGFVIADVQLVTSNSPEEKQSPLSAFRSSSSLRKKNNSGEKALPPWRSSDKHPTDIIRFNYLDNRDPMETVQQGRRKRNQMTPDFSRQSHDKKNKLQDRTRLRKAQSMMSRRNPFPLCP

SEQ ID NO: 31111 - protein, 94 aa, Homo sapiens
  Payload ID: 6102
  Gene Symbol: FBXO16
  Gene Name: F-box protein 16
  ENSP ID: ENSP00000431064
  MOD_RES (1)..(1): Any amino acid
XIQMVKELHITKPKTPPKDGFVIADVQLVTSNSPEEKQSPLSAFRSSSSLRKKNNSGEKALPPWRSSDKHPTDIIRFNYLDNRDPMETVQQGCP

SEQ ID NO: 31112 - protein, 278 aa, Homo sapiens
  Payload ID: 6103
  Gene Symbol: FBXO17
  Gene Name: F-box protein 17
  Uniprot ID: Q96EF6
  ENSP ID: ENSP00000292852
MGARLSRRRLPADPSLALDALPPELLVQVLSHVPPRSLVTRCRPVCRAWRDIVDGPTVWLLQLARDRSAEGRALYAVAQRCLPSNEDKEEFPLCALARYCLRAPFGRNLIFNSCGEQGFRGWEVEHGGNGWAIEKNLTPVPGAPSQTCFVTSFEWCSKRQLVDLVMEGVWQELLDSAQIEICVADWWGARENCGCVYQLRVRLLDVYEKEVVKFSASPDPVLQWTERGCRQVSHVFTNFGKGIRYVSFEQYGRDVSSWVGHYGALVTHSSVRVRIRLS

SEQ ID NO: 31113 - protein, 109 aa, Homo sapiens
  Payload ID: 6103
  Gene Symbol: FBXO17
  Gene Name: F-box protein 17
  ENSP ID: ENSP00000469852
IVDGPTVWLLQLARDRSAEGRALYAVAQRCLPSNEDKEEFPLCALARYCLRAPFGRNLIFNSCGEQGFRGWEVEHGGNGWAIEKNLTPVPGAPSQTCFVTSFEEEVSPY

SEQ ID NO: 31114 - protein, 177 aa, Homo sapiens
  Payload ID: 6103
  Gene Symbol: FBXO17
  Gene Name: F-box protein 17
  ENSP ID: ENSP00000470101
MGARLSRRRLPADPSLALDALPPELLVQVLSHVPPRSLVTRCRPVCRAWRDIVDGPTVWLLQLARDRSAEGRALYAVAQRCLPSNEDKEEFPLCALARYCLRAPFGRNLIFNSCGEQGFRGWEVEHGGNGWAIEKNLTPVPGAPSQTCFVTSFETVCPAPCHLSFPDGAPRGSLWTW

SEQ ID NO: 31115 - protein, 278 aa, Homo sapiens; identical to SEQ ID NO: 31112
  Payload ID: 6103
  Gene Symbol: FBXO17
  Gene Name: F-box protein 17
  Uniprot ID: Q96EF6
  ENSP ID: ENSP00000470361

SEQ ID NO: 31116 - protein, 94 aa, Homo sapiens
  Payload ID: 6103
  Gene Symbol: FBXO17
  Gene Name: F-box protein 17
  ENSP ID: ENSP00000470390
  MOD_RES (1)..(1): Any amino acid
XAPSQTCFVTSFEWCSKRQLVDLVMEGVWQELLDSAQIEICVADWWGARENCGCVYQLRVRLLDVYEKEVVKFSASPDPVLQWTERGCRQVGPD

SEQ ID NO: 31117 - protein, 278 aa, Homo sapiens; identical to SEQ ID NO: 31112
  Payload ID: 6103
  Gene Symbol: FBXO17
  Gene Name: F-box protein 17
  ENSP ID: ENSP00000488997

SEQ ID NO: 31118 - protein, 94 aa, Homo sapiens; identical to SEQ ID NO: 31116
  Payload ID: 6103
  Gene Symbol: FBXO17
  Gene Name: F-box protein 17
  ENSP ID: ENSP00000489012
  MOD_RES (1)..(1): Any amino acid

SEQ ID NO: 31119 - protein, 177 aa, Homo sapiens; identical to SEQ ID NO: 31114
  Payload ID: 6103
  Gene Symbol: FBXO17
  Gene Name: F-box protein 17
  ENSP ID: ENSP00000489074

SEQ ID NO: 31120 - protein, 109 aa, Homo sapiens; identical to SEQ ID NO: 31113
  Payload ID: 6103
  Gene Symbol: FBXO17
  Gene Name: F-box protein 17
  ENSP ID: ENSP00000489291

SEQ ID NO: 31121 - protein, 278 aa, Homo sapiens; identical to SEQ ID NO: 31112
  Payload ID: 6103
  Gene Symbol: FBXO17
  Gene Name: F-box protein 17
  ENSP ID: ENSP00000489327

SEQ ID NO: 31122 - protein, 296 aa, Homo sapiens
  Payload ID: 6104
  Gene Symbol: FBXO2
  Gene Name: F-box protein 2
  Uniprot ID: Q9UK22
  ENSP ID: ENSP00000346240
MDGDGDPESVGQPEEASPEEQPEEASAEEERPEDQQEEEAAAAAAYLDELPEPLLLRVLAALPAAELVQACRLVCLRWKELVDGAPLWLLKCQQEGLVPEGGVEEERDHWQQFYFLSKRRRNLLRNPCGEEDLEGWCDVEHGGDGWRVEELPGDSGVEFTHDESVKKYFASSFEWCRKAQVIDLQAEGYWEELLDTTQPAIVVKDWYSGRSDAGCLYELTVKLLSEHENVLAEFSSGQVAVPQDSDGGGWMEISHTFTDYGPGVRFVRFEHGGQDSVYWKGWFGARVTNSSVWVEP

SEQ ID NO: 31123 - protein, 120 aa, Homo sapiens
  Payload ID: 6104
  Gene Symbol: FBXO2
  Gene Name: F-box protein 2
  ENSP ID: ENSP00000473649
MDALPPGVTGAVQGAWDTSGTLIKESVGQPEEASPEEQPEEASAEEERPEDQQEEEAAAAAAYLDELPEPLLLRVLAALPAAELVQACRLVCLRWKELVDGAPLWLLKCQQEGLVPEGGV

SEQ ID NO: 31124 - protein, 628 aa, Homo sapiens
  Payload ID: 6105
  Gene Symbol: FBXO21
  Gene Name: F-box protein 21
  Uniprot ID: O94952
  ENSP ID: ENSP00000328187
MAAAAVDSAMEVVPALAEEAAPEVAGLSCLVNLPGEVLEYILCCGSLTAADIGRVSSTCRRLRELCQSSGKVWKEQFRVRWPSLMKHYSPTDYVNWLEEYKVRQKAGLEARKIVASFSKRFFSEHVPCNGFSDIENLEGPEIFFEDELVCILNMEGRKALTWKYYAKKILYYLRQQKILNNLKAFLQQPDDYESYLEGAVYIDQYCNPLSDISLKDIQAQIDSIVELVCKTLRGINSRHPSLAFKAGESSMIMEIELQSQVLDAMNYVLYDQLKFKGNRMDYYNALNLYMHQVLIRRTGIPISMSLLYLTIARQLGVPLEPVNFPSHFLLRWCQGAEGATLDIFDYIYIDAFGKGKQLTVKECEYLIGQHVTAALYGVVNVKKVLQRMVGNLLSLGKREGIDQSYQLLRDSLDLYLAMYPDQVQLLLLQARLYFHLGIWPEKSFCLVLKVLDILQHIQTLDPGQHGAVGYLVQHTLEHIERKKEEVGVEVKLRSDEKHRDVCYSIGLIMKHKRYGYNCVIYGWDPTCMMGHEWIRNMNVHSLPHGHHQPFYNVLVEDGSCRYAAQENLEYNVEPQEISHPDVGRYFSEFTGTHYIPNAELEIRYPEDLEFVYETVQNIYSAKKENIDE

SEQ ID NO: 31125 - protein, 537 aa, Homo sapiens
  Payload ID: 6105
  Gene Symbol: FBXO21
  Gene Name: F-box protein 21
  ENSP ID: ENSP00000414468
MKHYSPTDYVNWLEEYKVRQKAGLEARKIVASFSKRFFSEHVPCNGFSDIENLEGPEIFFEDELVCILNMEGRKALTWKYYAKKILYYLRQQKILNNLKAFLQQPDDYESYLEGAVYIDQYCNPLSDISLKDIQAQIDSIVELVCKTLRGINSRHPSLAFKAGESSMIMEIELQSQVLDAMNYVLYDQLKFKGNRMDYYNALNLYMHQVLIRRTGIPISMSLLYLTIARQLGVPLEPVNFPSHFLLRWCQGAEGATLDIFDYIYIDAFGKGKQLTVKECEYLIGQHVTAALYGVVNVKKVLQRMVGNLLSLGKREGIDQSYQLLRDSLDLYLAMYPDQVQLLLLQARLYFHLGIWPEKVLDILQHIQTLDPGQHGAVGYLVQHTLEHIERKKEEVGVEVKLRSDEKHRDVCYSIGLIMKHKRYGYNCVIYGWDPTCMMGHEWIRNMNVHSLPHGHHQPFYNVLVEDGSCRYAAQENLEYNVEPQEISHPDVGRYFSEFTGTHYIPNAELEIRYPEDLEFVYETVQNIYSAKKENIDE

SEQ ID NO: 31126 - protein, 225 aa, Homo sapiens
  Payload ID: 6105
  Gene Symbol: FBXO21
  Gene Name: F-box protein 21
  ENSP ID: ENSP00000446973
IDAFGKGKQLTVKECEYLIGQHVTAALYGVVNVKKVLQRMVGNLLSLGKREGIDQSYQLLRDSLDLYLAMYPDQVQLLLLQARLYFHLGIWPEKSFCLVLKVLDILQHIQTLDPGQHGAVGYLVQHTLEHIERKKEEVGVEVKLRSDEKHRDVCYSIGLIMKHKRYGYNCVIYGWDPTCMMGHEWIRNMNVHSLPHGHHQPFYNVLVEDGSCRYAAQGAALARGQ

SEQ ID NO: 31127 - protein, 505 aa, Homo sapiens
  Payload ID: 6105
  Gene Symbol: FBXO21
  Gene Name: F-box protein 21
  ENSP ID: ENSP00000449264
  MOD_RES (1)..(1): Any amino acid
XTCRRLRELCQSSGKVWKEQFRVRWPSLMKHYSPTDYVNWLEEYKVRQKAGLEARKIVASFSKRFFSEHVPCNGFSDIENLEGPEIFFEDELVCILNMEGRKALTWKYYAKKILYYLRQQKILNNLKAFLQQPDDYESYLEGAVYIDQYCNPLSDISLKDIQAQIDSIVELVCKTLRGINSRHPSLAFKAGESSMIMEIELQSQVLDAMNYVLYDQLKFKGNRMDYYNALNLYMHQVLIRRTGIPISMSLLYLTIARQLGVPLEPVNFPSHFLLRWCQGAEGEGIDQSYQLLRDSLDLYLAMYPDQVQLLLLQARLYFHLGIWPEKVLDILQHIQTLDPGQHGAVGYLVQHTLEHIERKKEEVGVEVKLRSDEKHRDVCYSIGLIMKHKRYGYNCVIYGWDPTCMMGHEWIRNMNVHSLPHGHHQPFYNVLVEDGSCRYAAQENLEYNVEPQEISHPDVGRYFSEFTGTHYIPNAELEIRYPEDLEFVYETVQNIYSAKKENIDE

SEQ ID NO: 31128 - protein, 621 aa, Homo sapiens
  Payload ID: 6105
  Gene Symbol: FBXO21
  Gene Name: F-box protein 21
  Uniprot ID: O94952
  ENSP ID: ENSP00000483508
MAAAAVDSAMEVVPALAEEAAPEVAGLSCLVNLPGEVLEYILCCGSLTAADIGRVSSTCRRLRELCQSSGKVWKEQFRVRWPSLMKHYSPTDYVNWLEEYKVRQKAGLEARKIVASFSKRFFSEHVPCNGFSDIENLEGPEIFFEDELVCILNMEGRKALTWKYYAKKILYYLRQQKILNNLKAFLQQPDDYESYLEGAVYIDQYCNPLSDISLKDIQAQIDSIVELVCKTLRGINSRHPSLAFKAGESSMIMEIELQSQVLDAMNYVLYDQLKFKGNRMDYYNALNLYMHQVLIRRTGIPISMSLLYLTIARQLGVPLEPVNFPSHFLLRWCQGAEGATLDIFDYIYIDAFGKGKQLTVKECEYLIGQHVTAALYGVVNVKKVLQRMVGNLLSLGKREGIDQSYQLLRDSLDLYLAMYPDQVQLLLLQARLYFHLGIWPEKVLDILQHIQTLDPGQHGAVGYLVQHTLEHIERKKEEVGVEVKLRSDEKHRDVCYSIGLIMKHKRYGYNCVIYGWDPTCMMGHEWIRNMNVHSLPHGHHQPFYNVLVEDGSCRYAAQENLEYNVEPQEISHPDVGRYFSEFTGTHYIPNAELEIRYPEDLEFVYETVQNIYSAKKENIDE

SEQ ID NO: 31129 - protein, 403 aa, Homo sapiens
  Payload ID: 6106
  Gene Symbol: FBXO22
  Gene Name: F-box protein 22
  Uniprot ID: Q8NEZ5
  ENSP ID: ENSP00000307833
MEPVGCCGECRGSSVDPRSTFVLSNLAEVVERVLTFLPAKALLRVACVCRLWRECVRRVLRTHRSVTWISAGLAEAGHLEGHCLVRVVAEELENVRILPHTVLYMADSETFISLEECRGHKRARKRTSMETALALEKLFPKQCQVLGIVTPGIVVTPMGSGSNRPQEIEIGESGFALLFPQIEGIKIQPFHFIKDPKNLTLERHQLTEVGLLDNPELRVVLVFGYNCCKVGASNYLQQVVSTFSDMNIILAGGQVDNLSSLTSEKNPLDIDASGVVGLSFSGHRIQSATVLLNEDVSDEKTAEAAMQRLKAANIPEHNTIGFMFACVGRGFQYYRAKGNVEADAFRKFFPSVPLFGFFGNGEIGCDRIVTGNFILRKCNEVKDDDLFHSYTTIMALIHLGSSK

SEQ ID NO: 31130 - protein, 276 aa, Homo sapiens
  Payload ID: 6106
  Gene Symbol: FBXO22
  Gene Name: F-box protein 22
  Uniprot ID: Q8NEZ5
  ENSP ID: ENSP00000396442
MEPVGCCGECRGSSVDPRSTFVLSNLAEVVERVLTFLPAKALLRVACVCRLWRECVRRVLRTHRSVTWISAGLAEAGHLEGHCLVRVVAEELENVRILPHTVLYMADSETFISLEECRGHKRARKRTSMETALALEKLFPKQCQVLGIVTPGIVVTPMGSGSNRPQEIEIGESGFALLFPQIEGIKIQPFHFIKDPKNLTLERHQLTEVGLLDNPELRVVLVFGYNCCKVGASNYLQQVVSTFSDMNIILAGGQVDNLSSLTSEKYVLCASDFVCE

SEQ ID NO: 31131 - protein, 93 aa, Homo sapiens
  Payload ID: 6106
  Gene Symbol: FBXO22
  Gene Name: F-box protein 22
  ENSP ID: ENSP00000456198
MEPVGCCGECRGSSVDPRSTFVLSNLAEVVERVLTFLPAKALLRVACVCRLWRECVRRVLRTHRSVTWISAGLAEAGHLEGHCLVRVVAEELE

SEQ ID NO: 31132 - protein, 241 aa, Homo sapiens
  Payload ID: 6106
  Gene Symbol: FBXO22
  Gene Name: F-box protein 22
  ENSP ID: ENSP00000457177
CGECRGSSVDPRSTFVLSNLAEVVERVLTFLPAKALLRVACVCRLWRECVRRVLRTHRSVTWISAGLAEAGHLEGHCLVRVVAEELENVRILPHTVLYMADSETFISLEECRGHKRARKRTSMETALALEKLFPKQCQVLGIVTPGIVGLLDNPELRVVLVFGYNCCKVGASNYLQQVVSTFSDMNIILAGGQVDNLSSLTSEKNPLDIDASGVVGLSFSGHRIQSATVLLNEDVSDEKTA

SEQ ID NO: 31133 - protein, 78 aa, Homo sapiens
  Payload ID: 6106
  Gene Symbol: FBXO22
  Gene Name: F-box protein 22
  ENSP ID: ENSP00000457297
AAMQRLKAANIPEHNTIGFMFACVGRGFQYYRAKGNVEADAFRKFFPSVPLFGFFGNGEIGCDRIVTGNFILRKCNEV

SEQ ID NO: 31134 - protein, 46 aa, Homo sapiens
  Payload ID: 6106
  Gene Symbol: FBXO22
  Gene Name: F-box protein 22
  Uniprot ID: Q8NEZ5
  ENSP ID: ENSP00000457531
MEPVGCCGECRGSSVDPRSTFVLSNLAEVVERVLTFLPAKALLRVA

SEQ ID NO: 31135 - protein, 160 aa, Homo sapiens
  Payload ID: 6106
  Gene Symbol: FBXO22
  Gene Name: F-box protein 22
  ENSP ID: ENSP00000457569
MADSETFISLEECRGHKRARKRTSMETALALEKLFPKQCQVLGIVTPGIVVTPMGSGSNRPQEIEIGESGFALLFPQIEGIKIQPFHFIKDPKNLTLERHQLTEVGLLDNPELRVVLVFGYNCCKVGASNYLQQVVSTFSDMNIILAGGQVDNLSSLTSE

SEQ ID NO: 31136 - protein, 153 aa, Homo sapiens
  Payload ID: 6106
  Gene Symbol: FBXO22
  Gene Name: F-box protein 22
  ENSP ID: ENSP00000458022
  MOD_RES (1)..(1): Any amino acid
XECRGHKRARKRTSMETALALEKLFPKQCQVLGIVTPGIVVTPMGSGSNRPQEIEIGESGFALLFPQIEGIKIQPFHFIKDPKNLTLERHQLTEVGLLDNPELRVVLVFGYNCCKVGASNYLQQVVSTFSDMNIILAGGQVDNLSSLTSEKSK

SEQ ID NO: 31137 - protein, 580 aa, Homo sapiens
  Payload ID: 6107
  Gene Symbol: FBXO24
  Gene Name: F-box protein 24
  Uniprot ID: O75426
  ENSP ID: ENSP00000241071
MGEKAVPLLRRRRVKRSCPSCGSELGVEEKRGKGNPISIQLFPPELVEHIISFLPVRDLVALGQTCRYFHEVCDGEGVWRRICRRLSPRLQDQGSGVRPWKRAAILNYTKGLYFQAFGGRRRCLSKSVAPLLAHGYRRFLPTKDHVFILDYVGTLFFLKNALVSTLGQMQWKRACRYVVLCRGAKDFASDPRCDTVYRKYLYVLATREPQEVVGTTSSRACDCVEVYLQSSGQRVFKMTFHHSMTFKQIVLVGQETQRALLLLTEEGKIYSLVVNETQLDQPRSYTVQLALRKVSHYLPHLRVACMTSNQSSTLYVTDQGGVYFEVHTPGVYRDLFGTLQAFDPLDQQMPLALSLPAKILFCALGYNHLGLVDEFGRIFMQGNNRYGQLGTGDKMDRGEPTQVCYLQRPITLWCGLNHSLVLSQSSEFSKELLGCGCGAGGRLPGWPKGSASFVKLQVKVPLCACALCATRECLYILSSHDIEQHAPYRHLPASRVVGTPEPSLGARAPQDPGGMAQACEEYLSQIHSCQTLQDRTEKMKEIVGWMPLMAAQKDFFWEALDMLQRAEGGGGGVGPPAPET

SEQ ID NO: 31138 - protein, 618 aa, Homo sapiens
  Payload ID: 6107
  Gene Symbol: FBXO24
  Gene Name: F-box protein 24
  Uniprot ID: O75426
  ENSP ID: ENSP00000416558
MVWESQQERGGQGPRRQEGRSREGAIRMVRGSQRRKLQKFTRLCGREEGLRVKRSCPSCGSELGVEEKRGKGNPISIQLFPPELVEHIISFLPVRDLVALGQTCRYFHEVCDGEGVWRRICRRLSPRLQDQGSGVRPWKRAAILNYTKGLYFQAFGGRRRCLSKSVAPLLAHGYRRFLPTKDHVFILDYVGTLFFLKNALVSTLGQMQWKRACRYVVLCRGAKDFASDPRCDTVYRKYLYVLATREPQEVVGTTSSRACDCVEVYLQSSGQRVFKMTFHHSMTFKQIVLVGQETQRALLLLTEEGKIYSLVVNETQLDQPRSYTVQLALRKVSHYLPHLRVACMTSNQSSTLYVTDQGGVYFEVHTPGVYRDLFGTLQAFDPLDQQMPLALSLPAKILFCALGYNHLGLVDEFGRIFMQGNNRYGQLGTGDKMDRGEPTQVCYLQRPITLWCGLNHSLVLSQSSEFSKELLGCGCGAGGRLPGWPKGSASFVKLQVKVPLCACALCATRECLYILSSHDIEQHAPYRHLPASRVVGTPEPSLGARAPQDPGGMAQACEEYLSQIHSCQTLQDRTEKMKEIVGWMPLMAAQKDFFWEALDMLQRAEGGGGGVGPPAPET

SEQ ID NO: 31139 - protein, 187 aa, Homo sapiens
  Payload ID: 6107
  Gene Symbol: FBXO24
  Gene Name: F-box protein 24
  ENSP ID: ENSP00000417179
MNAEPLAGRERSSPLQWRVKRSCPSCGSELGVEEKRGKGNPISIQLFPPELVEHIISFLPVRDLVALGQTCRYFHEVCDGEGVWRRICRRLSPRLQDQGSGVRPWKRAAILNYTKGLYFQAFGGRRRCLSKSVAPLLAHGYRRFLPTKDHVFILDYVGTLFFLKNALVSTLGQMQWKRACRYVVLCR

SEQ ID NO: 31140 - protein, 37 aa, Homo sapiens
  Payload ID: 6107
  Gene Symbol: FBXO24
  Gene Name: F-box protein 24
  ENSP ID: ENSP00000418814
MGEKAVPLLRRRRTRRACISRHLEAAADVSARAWPPC

SEQ ID NO: 31141 - protein, 130 aa, Homo sapiens
  Payload ID: 6107
  Gene Symbol: FBXO24
  Gene Name: F-box protein 24
  ENSP ID: ENSP00000419587
MEGRCCRAGEISGEVSTGSPQKREEDVCQCRPECSQVKRSCPSCGSELGVEEKRGKGNPISIQLFPPELVEHIISFLPVRDLVALGQTCRYFHEVCDGEGVWRRICRRLSPRLQDQGSGVRPWKRAAILN

SEQ ID NO: 31142 - protein, 318 aa, Homo sapiens
  Payload ID: 6107
  Gene Symbol: FBXO24
  Gene Name: F-box protein 24
  Uniprot ID: O75426
  ENSP ID: ENSP00000419602
MGEKAVPLLRRRRVKRSCPSCGSELGVEEKRGKGNPISIQLFPPELVEHIISFLPVRDLVALGQTCRYFHEVCDGEGVWRRICRRLSPRLQDQDTKGLYFQAFGGRRRCLSKSVAPLLAHGYRRFLPTKDHVFILDYVGTLFFLKNALVSTLGQMQWKRACRYVVLCRGAKDFASDPRCDTVYRKYLYVLATREPQEVVGTTSSRACDCVEVYLQSSGQRVFKMTFHHSMTFKQIVLVGQETQRALLLLTEEGKIYSLVVNETQLDQPRSYTVQLALRKVSHYLPHLRVACMTSNQSSTLYVTDPILCSWLQPPWPGG

SEQ ID NO: 31143 - protein, 568 aa, Homo sapiens
  Payload ID: 6107
  Gene Symbol: FBXO24
  Gene Name: F-box protein 24
  Uniprot ID: O75426
  ENSP ID: ENSP00000420239
MVKRSCPSCGSELGVEEKRGKGNPISIQLFPPELVEHIISFLPVRDLVALGQTCRYFHEVCDGEGVWRRICRRLSPRLQDQGSGVRPWKRAAILNYTKGLYFQAFGGRRRCLSKSVAPLLAHGYRRFLPTKDHVFILDYVGTLFFLKNALVSTLGQMQWKRACRYVVLCRGAKDFASDPRCDTVYRKYLYVLATREPQEVVGTTSSRACDCVEVYLQSSGQRVFKMTFHHSMTFKQIVLVGQETQRALLLLTEEGKIYSLVVNETQLDQPRSYTVQLALRKVSHYLPHLRVACMTSNQSSTLYVTDQGGVYFEVHTPGVYRDLFGTLQAFDPLDQQMPLALSLPAKILFCALGYNHLGLVDEFGRIFMQGNNRYGQLGTGDKMDRGEPTQVCYLQRPITLWCGLNHSLVLSQSSEFSKELLGCGCGAGGRLPGWPKGSASFVKLQVKVPLCACALCATRECLYILSSHDIEQHAPYRHLPASRVVGTPEPSLGARAPQDPGGMAQACEEYLSQIHSCQTLQDRTEKMKEIVGWMPLMAAQKDFFWEALDMLQRAEGGGGGVGPPAPET

SEQ ID NO: 31144 - protein, 291 aa, Homo sapiens
  Payload ID: 6108
  Gene Symbol: FBXO25
  Gene Name: F-box protein 25
  Uniprot ID: Q8TCJ0
  ENSP ID: ENSP00000276326
MEKYSIMKSMNMHRKKGKRTILEMTQILKRHGYCTLGEAFNRLDFSSAIQDIRRFNYVVKLLQLIAKSQLTSLSGVAQKNYFNILDKIVQKVLDDHHNPRLIKDLLQDLSSTLCILIRGVGKSVLVGNINIWICRLETILAWQQQLQDLQMTKQVNNGLTLSDLPLHMLNNILYRFSDGWDIITLGQVTPTLYMLSEDRQLWKKLCQYHFAEKQFCRHLILSEKGHIEWKLMYFALQKHYPAKEQYGDTLHFCRHCSILFWKDSGHPCTAADPDSCFTPVSPQHFIDLFKF

SEQ ID NO: 31145 - protein, 291 aa, Homo sapiens; identical to SEQ ID NO: 31144
  Payload ID: 6108
  Gene Symbol: FBXO25
  Gene Name: F-box protein 25
  Uniprot ID: Q8TCJ0
  ENSP ID: ENSP00000341345

SEQ ID NO: 31146 - protein, 358 aa, Homo sapiens
  Payload ID: 6108
  Gene Symbol: FBXO25
  Gene Name: F-box protein 25
  Uniprot ID: Q8TCJ0
  ENSP ID: ENSP00000342077
MPFLGQDWRSPGWSWIKTEDGWKRCESCSQKLERENNRCNISHSIILNSEDGEIFNNEEHEYASKKRKKDHFRNDTNTQSFYREKWIYVHKESTKERHGYCTLGEAFNRLDFSSAIQDIRRFNYVVKLLQLIAKSQLTSLSGVAQKNYFNILDKIVQKVLDDHHNPRLIKDLLQDLSSTLCILIRGVGKSVLVGNINIWICRLETILAWQQQLQDLQMTKQVNNGLTLSDLPLHMLNNILYRFSDGWDIITLGQVTPTLYMLSEDRQLWKKLCQYHFAEKQFCRHLILSEKGHIEWKLMYFALQKHYPAKEQYGDTLHFCRHCSILFWKDSGHPCTAADPDSCFTPVSPQHFIDLFKF

SEQ ID NO: 31147 - protein, 367 aa, Homo sapiens
  Payload ID: 6108
  Gene Symbol: FBXO25
  Gene Name: F-box protein 25
  Uniprot ID: Q8TCJ0
  ENSP ID: ENSP00000372274
MPFLGQDWRSPGWSWIKTEDGWKRCESCSQKLERENNRCNISHSIILNSEDGEIFNNEEHEYASKKRKKDHFRNDTNTQSFYREKWIYVHKESTKERHGYCTLGEAFNRLDFSSAIQDIRRFNYVVKLLQLIAKSQLTSLSGVAQKNYFNILDKIVQKVLDDHHNPRLIKDLLQDLSSTLCILIRGVGKSVLVGNINIWICRLETILAWQQQLQDLQMTKQVNNGLTLSDLPLHMLNNILYRFSDGWDIITLGQVTPTLYMLSEDRQLWKKLCQYHFAEKQFCRHLILSEKGHIEWKLMYFALQKHYPAKEQYGDTLHFCRHCSILFWKDYHLALLFKDSGHPCTAADPDSCFTPVSPQHFIDLFKF

SEQ ID NO: 31148 - protein, 124 aa, Homo sapiens
  Payload ID: 6108
  Gene Symbol: FBXO25
  Gene Name: F-box protein 25
  ENSP ID: ENSP00000428872
MPFLGQDWRSPGWSWIKTEDGWKRCESCSQKLERENNRCNISHSIILNSEDGEIFNNEEHEYASKKRKKDHFRNDTNTQSFYREKWIYVHKESTKERHGYCTLGEAFNRLDFSSAIQDIRRFNY

SEQ ID NO: 31149 - protein, 29 aa, Homo sapiens
  Payload ID: 6108
  Gene Symbol: FBXO25
  Gene Name: F-box protein 25
  ENSP ID: ENSP00000430191
DSGHPCTAADPDSCFTPVSPQHFIDLFKF

SEQ ID NO: 31150 - protein, 283 aa, Homo sapiens
  Payload ID: 6109
  Gene Symbol: FBXO27
  Gene Name: F-box protein 27
  Uniprot ID: Q8NI29
  ENSP ID: ENSP00000292853
MGASVSRGRAARVPAPEPEPEEALDLSQLPPELLLVVLSHVPPRTLLGRCRQVCRGWRALVDGQALWLLILARDHGATGRALLHLARSCQSPARNARPCPLGRFCARRPIGRNLIRNPCGQEGLRKWMVQHGGDGWVVEENRTTVPGAPSQTCFVTSFSWCCKKQVLDLEEEGLWPELLDSGRIEICVSDWWGARHDSGCMYRLLVQLLDANQTVLDKFSAVPDPIPQWNNNACLHVTHVFSNIKMGVRFVSFEHRGQDTQFWAGHYGARVTNSSVIVRVRLS

SEQ ID NO: 31151 - protein, 283 aa, Homo sapiens; identical to SEQ ID NO: 31150
  Payload ID: 6109
  Gene Symbol: FBXO27
  Gene Name: F-box protein 27
  Uniprot ID: Q8NI29
  ENSP ID: ENSP00000437662

SEQ ID NO: 31152 - protein, 282 aa, Homo sapiens
  Payload ID: 6109
  Gene Symbol: FBXO27
  Gene Name: F-box protein 27
  ENSP ID: ENSP00000470015
MGASVSRGRAARVPAPEPEPEEALDLSQLPPELLLVVLSHVPPRTLLGRCRQVCRGWRALVDGQALWLLILARDHGATGRALLHLARSCQSPARNARPCPLGRFCARRPIGRNLIRNPCGQGLRKWMVQHGGDGWVVEENRTTVPGAPSQTCFVTSFSWCCKKQVLDLEEEGLWPELLDSGRIEICVSDWWGARHDSGCMYRLLVQLLDANQTVLDKFSAVPDPIPQWNNNACLHVTHVFSNIKMGVRFVSFEHRGQDTQFWAGHYGARVTNSSVIVRVRLS

SEQ ID NO: 31153 - protein, 100 aa, Homo sapiens
  Payload ID: 6109
  Gene Symbol: FBXO27
  Gene Name: F-box protein 27
  ENSP ID: ENSP00000471267
  MOD_RES (1)..(1): Any amino acid
XQLLDANQTVLDKFSAVPDPIPQWNNNACLHRHSFTMLPGLVLNSCAQAILSPQPPTVLGLQAQATASSPCVFLSAPIPALRLTRWNLTLSPRLECNGTI

SEQ ID NO: 31154 - protein, 133 aa, Homo sapiens
  Payload ID: 6109
  Gene Symbol: FBXO27
  Gene Name: F-box protein 27
  ENSP ID: ENSP00000471772
MGASVSRGRAARVPAPEPEPEEALDLSQLPPELLLVVLSHVPPRTLLGRCRQVCRGWRALVDGQALWLLILARDHGATGRALLHLARSCQSPARNARPCPLGRFCARRPIGRNLIRNPCGQEGLRKWMVQHGG

SEQ ID NO: 31155 - protein, 368 aa, Homo sapiens
  Payload ID: 6110
  Gene Symbol: FBXO28
  Gene Name: F-box protein 28
  Uniprot ID: Q9NVF7
  ENSP ID: ENSP00000355827
MAAAAEERMAEEGGGGQGDGGSSLASGSTQRQPPPPAPQHPQPGSQALPAPALAPDQLPQNNTLVALPIVAIENILSFMSYDEISQLRLVCKRMDLVCQRMLNQGFLKVERYHNLCQKQVKAQLPRRESERRNHSLARHADILAAVETRLSLLNMTFMKYVDSNLCCFIPGKVIDEIYRVLRYVNSTRAPQRAHEVLQELRDISSMAMEYFDEKIVPILKRKLPGSDVSGRLMGSPPVPGPSAALTTMQLFSKQNPSRQEVTKLQQQVKTNGAGVTVLRREISELRTKVQEQQKQLQDQDQKLLEQTQIIGEQNARLAELERKLREVMESAVGNSSGSGQNEESPRKRKKATEAIDSLRKSKRLRNRK

SEQ ID NO: 31156 - protein, 179 aa, Homo sapiens
  Payload ID: 6110
  Gene Symbol: FBXO28
  Gene Name: F-box protein 28
  Uniprot ID: Q9NVF7
  ENSP ID: ENSP00000416888
MAAAAEERMAEEGGGGQGDGGSSLASGSTQRQPPPPAPQHPQPGSQALPAPALAPDQLPQNNTLVALPIVAIENILSFMSYDEISQLRLVCKRMDLVCQRMLNQGFLKVERYHNLCQKQVKAQLPRRESERRNHSLARHADILAAVETRLSLLNMTFMKYVDSNLCCFIPGKFQDRLQP

SEQ ID NO: 31157 - protein, 126 aa, Homo sapiens
  Payload ID: 6110
  Gene Symbol: FBXO28
  Gene Name: F-box protein 28
  ENSP ID: ENSP00000430632
MAAAAEERMAEEGGGGQGDGGSSLASGSTQRQPPPPAPQHPQPGSQALPAPALAPDQLPQNNTLVALPIVAIENILSFMSYDEISQLRLVCKRMDLVCQRMLNQGFLKVERYHNLCQKQVKAQLPR

SEQ ID NO: 31158 - protein, 471 aa, Homo sapiens
  Payload ID: 6111
  Gene Symbol: FBXO3
  Gene Name: F-box protein 3
  Uniprot ID: Q9UK99
  ENSP ID: ENSP00000265651
MAAMETETAPLTLESLPTDPLLLILSFLDYRDLINCCYVSRRLSQLSSHDPLWRRHCKKYWLISEEEKTQKNQCWKSLFIDTYSDVGRYIDHYAAIKKAWDDLKKYLEPRCPRMVLSLKEGAREEDLDAVEAQIGCKLPDDYRCSYRIHNGQKLVVPGLLGSMALSNHYRSEDLLDVDTAAGGFQQRQGLKYCLPLTFCIHTGLSQYIAVEAAEGRNKNEVFYQCPDQMARNPAAIDMFIIGATFTDWFTSYVKNVVSGGFPIIRDQIFRYVHDPECVATTGDITVSVSTSFLPELSSVHPPHYFFTYRIRIEMSKDALPEKACQLDSRYWRITNAKGDVEEVQGPGVVGEFPIISPGRVYEYTSCTTFSTTSGYMEGYYTFHFLYFKDKIFNVAIPRFHMACPTFRVSIARLEMGPDEYEEMEEEEEEEEEEDEDDDSADMDESDEDDEEERRRRVFDVPIRRRRCSRLF

SEQ ID NO: 31159 - protein, 415 aa, Homo sapiens
  Payload ID: 6111
  Gene Symbol: FBXO3
  Gene Name: F-box protein 3
  Uniprot ID: Q9UK99
  ENSP ID: ENSP00000408836
MAAMETETAPLTLESLPTDPLLLILSFLDYRDLINCCYVSRRLSQLSSHDPLWRRHCKKYWLISEEEKTQKNQCWKSLFIDTYSDVGRYIDHYAAIKKAWDDLKKYLEPRCPRMVLSLKEGAREEDLDAVEAQIGCKLPDDYRCSYRIHNGQKLVVPGLLGSMALSNHYRSEDLLDVDTAAGGFQQRQGLKYCLPLTFCIHTGLSQYIAVEAAEGRNKNEVFYQCPDQMARNPAAIDMFIIGATFTDWFTSYVKNVVSGGFPIIRDQIFRYVHDPECVATTGDITVSVSTSFLPELSSVHPPHYFFTYRIRIEMSKDALPEKACQLDSRYWRITNAKGDVEEVQGPGVVGEFPIISPGRVYEYTSCTTFSTTSGYMEGYYTFHFLYFKDKIFNVAIPRFHMACPTFRVSIARLVS

SEQ ID NO: 31160 - protein, 129 aa, Homo sapiens
  Payload ID: 6111
  Gene Symbol: FBXO3
  Gene Name: F-box protein 3
  ENSP ID: ENSP00000431502
MAAMETETAPLTLESLPTDPLLLILSFLDYRDLINCCYVSRRLSQLSSHDPLWRRHCKKYWLISEEEKTQKNQCWKSLFIDTYSDVGRYIDHYAAIKKAWDDLKKYLEPRCPRMVLSLKGVGIKMMLAL

SEQ ID NO: 31161 - protein, 430 aa, Homo sapiens
  Payload ID: 6111
  Gene Symbol: FBXO3
  Gene Name: F-box protein 3
  ENSP ID: ENSP00000431745
MAAMETETAPLTLESLPTDPLLLILSFLDYRDLINCCYVSRRLSQLSSHDPLWRRHCKKYWLISEEEKTQKNQCWKSLFIDTYSDVGRYIDHYAAIKKAWDDLKKYLEPRCPRMVLSLKEGAREEDLDAVEAQIGCKLPDDYRCSYRIHNGQKLVVPGLLGSMALSNHYRSEDLLDVDTAAGGFQQRQGLKYCLPLTFCIHTGLSQYIAVEAAEGRNKNEVFYQCPDQMARNPAAIDMFIIGATFTDWFTSYVKNVVSGGFPIIRDQIFRYVHDPECVATTGDITVSVSTSFLPELSSVHPPHYFFTYRIRIEMSKDALPEKACQLDSRYWRITNAKGDVEEVQGPGVVGEFPIISPGRVYEYTSCTTFSTTSGYMEGYYTFHFLYFKDKIFNVAIPRFHMACPTFRVSIARLGYLMTSVTVTPTLETIT

SEQ ID NO: 31162 - protein, 410 aa, Homo sapiens
  Payload ID: 6111
  Gene Symbol: FBXO3
  Gene Name: F-box protein 3
  Uniprot ID: Q9UK99
  ENSP ID: ENSP00000433781
MAAMETETAPLTLESLPTDPLLLILSFLDYRDLINRRLSQLSSHDPLWRRHCKKYWLISEEEKTQKNQCWKSLFIDTYSDVGRYIDHYAAIKKAWDDLKKYLEPRCPRMVLSLKEGAREEDLDAVEAQIGCKLPDDYRCSYRIHNGQKLVVPGLLGSMALSNHYRSEDLLDVDTAAGGFQQRQGLKYCLPLTFCIHTGLSQYIAVEAAEGRNKNEVFYQCPDQMARNPAAIDMFIIGATFTDWFTSYVKNVVSGGFPIIRDQIFRYVHDPECVATTGDITVSVSTSFLPELSSVHPPHYFFTYRIRIEMSKDALPEKACQLDSRYWRITNAKGDVEEVQGPGVVGEFPIISPGRVYEYTSCTTFSTTSGYMEGYYTFHFLYFKDKIFNVAIPRFHMACPTFRVSIARLVS

SEQ ID NO: 31163 - protein, 158 aa, Homo sapiens
  Payload ID: 6111
  Gene Symbol: FBXO3
  Gene Name: F-box protein 3
  ENSP ID: ENSP00000434001
MSKDALPEKACQLDSRYWRITNAKGDVEEVQGPGVVGEFPIISPGRVYEYTSCTTFSTTSGYMEGYYTFHFLYFKDKIFNVAIPRFHMACPTFRVSIARLEMGPDEYEEMEEEEEEEEEEDEDDDSADMDESDEDDEEERRRRVFDVPIRRRRCSRLF

SEQ ID NO: 31164 - protein, 172 aa, Homo sapiens
  Payload ID: 6111
  Gene Symbol: FBXO3
  Gene Name: F-box protein 3
  ENSP ID: ENSP00000434099
MAAMETETAPLTLESLPTDPLLLILSFLDYRDLINCCYVSRRLSQLSSHDPLWRRHCKKYWLISEEEKTQKNQCWKSLFIDTYSDVGRYIDHYAAIKKAWDDLKKYLEPRCPRMVLSLKEGAREEDLDAVEAQIGCKLPDDYRCSYRIHNGQKLVVPGTKWLEIQLLLTCLL

SEQ ID NO: 31165 - protein, 158 aa, Homo sapiens; identical to SEQ ID NO: 31163
  Payload ID: 6111
  Gene Symbol: FBXO3
  Gene Name: F-box protein 3
  ENSP ID: ENSP00000435165

SEQ ID NO: 31166 - protein, 358 aa, Homo sapiens
  Payload ID: 6111
  Gene Symbol: FBXO3
  Gene Name: F-box protein 3
  ENSP ID: ENSP00000435680
MVLSLKEGAREEDLDAVEAQIGCKLPDDYRCSYRIHNGQKLVVPGLLGSMALSNHYRSEDLLDVDTAAGGFQQRQGLKYCLPLTFCIHTGLSQYIAVEAAEGRNKNEVFYQCPDQMARNPAAIDMFIIGATFTDWFTSYVKNVVSGGFPIIRDQIFRYVHDPECVATTGDITVSVSTSFLPELSSVHPPHYFFTYRIRIEMSKDALPEKACQLDSRYWRITNAKGDVEEVQGPGVVGEFPIISPGRVYEYTSCTTFSTTSGYMEGYYTFHFLYFKDKIFNVAIPRFHMACPTFRVSIARLEMGPDEYEEMEEEEEEEEEEDEDDDSADMDESDEDDEEERRRRVFDVPIRRRRCSRLF

SEQ ID NO: 31167 - protein, 745 aa, Homo sapiens
  Payload ID: 6112
  Gene Symbol: FBXO30
  Gene Name: F-box protein 30
  Uniprot ID: Q8TB52
  ENSP ID: ENSP00000237281
MEEELQHSHCVNCVSRRCMTRPEPGISCDLIGCPLVCGAVFHSCKADEHRLLCPFERVPCLNSDFGCPFTMARNKVAEHLEMCPASVVCCTMEWNRWPVSYADRKSYENLSRDVDEVAQLDMALALQDQRMLLESLKVATMMSKATDKVSKPREQISVKSSVPEIPHANGLVSVDEESYGALYQATVETTRSLAAALDILNTATRDIGMLNTSVPNDMDEQQNARESLEDQNLKDQDHLYEEEIGAVGGIDYNDTNQNAQSEQNGSSDLLCDLNTSSYDTSALCNGFPLENICTQVIDQNQNLHGDSKQSNLTNGDCVASSDGTSKPSSSLAVAAQLREIIPSSALPNGTVQHILMPDDEGEGELCWKKVDLGDVKNVDVLSFSHAPSFNFLSNSCWSKPKEDKAVDTSDLEVAEDPMGLQGIDLITAALLFCLGDSPGGRGISDSRMADIYHIDVGTQTFSLPSAILATSTMVGEIASASACDHANPQLSNPSPFQTLGLDLVLECVARYQPKQRSMFTFVCGQLFRRKEFSSHFKNVHGDIHAGLNGWMEQRCPLAYYGCTYSQRRFCPSIQGAKIIHDRHLRSFGVQPCVSTVLVEPARNCVLGLHNDHLSSLPFEVLQHIAGFLDGFSLCQLSCVSKLMRDVCGSLLQSRGMVILQWGKRKYPEGNSSWQIKEKVWRFSTAFCSVNEWKFADILSMADHLKKCSYNVVEKREEAIPLPCMCVTRELTKEGRSLRSVLKPVL

SEQ ID NO: 31168 - protein, 539 aa, Homo sapiens
  Payload ID: 6113
  Gene Symbol: FBXO31
  Gene Name: F-box protein 31
  Uniprot ID: Q5XUX0
  ENSP ID: ENSP00000310841
MAVCARLCGVGPSRGCRRRQQRRGPAETAAADSEPDTDPEEERIEASAGVGGGLCAGPSPPPPRCSLLELPPELLVEIFASLPGTDLPSLAQVCTKFRRILHTDTIWRRRCREEYGVCENLRKLEITGVSCRDVYAKLLHRYRHILGLWQPDIGPYGGLLNVVVDGLFIIGWMYLPPHDPHVDDPMRFKPLFRIHLMERKAATVECMYGHKGPHHGHIQIVKKDEFSTKCNQTDHHRMSGGRQEEFRTWLREEWGRTLEDIFHEHMQELILMKFIYTSQYDNCLTYRRIYLPPSRPDDLIKPGLFKGTYGSHGLEIVMLSFHGRRARGTKITGDPNIPAGQQTVEIDLRHRIQLPDLENQRNFNELSRIVLEVRERVRQEQQEGGHEAGEGRGRQGPRESQPSPAQPRAEAPSKGPDGTPGEDGGEPGDAVAAAEQPAQCGQGQPFVLPVGVSSRNEDYPRTCRMCFYGTGLIAGHGFTSPERTPGVFILFDEDRFGFVWLELKSFSLYSRVQATFRNADAPSPQAFDEMLKNIQSLTS

SEQ ID NO: 31169 - protein, 139 aa, Homo sapiens
  Payload ID: 6113
  Gene Symbol: FBXO31
  Gene Name: F-box protein 31
  ENSP ID: ENSP00000455772
MAVCARLCGVGPSRGCRRRQQRRGPAETAAADSEPDTDPEEERIEASAGVGGGLCAGPSPPPPRCSLLELPPELLVEIFASLPGTDLPSLAQVCTKRARVVAGRAPGSPSQALPSPGQRRPARAQMGHLVRMVASLGMP

SEQ ID NO: 31170 - protein, 145 aa, Homo sapiens
  Payload ID: 6113
  Gene Symbol: FBXO31
  Gene Name: F-box protein 31
  ENSP ID: ENSP00000457578
MYLPPHDPHVDDPMRFKPLFRIHLMERKAATVECMYGHKGPHHGHIQIVKKDEFSTKCNQTDHHRMSGGRQEEFRTWLREEWGRTLEDIFHEHMQELILMKFIYTSQYDNCLTYRRIYLPPSRPDDLIKPGLFKGTYGSHGLEIV

SEQ ID NO: 31171 - protein, 367 aa, Homo sapiens
  Payload ID: 6113
  Gene Symbol: FBXO31
  Gene Name: F-box protein 31
  ENSP ID: ENSP00000479703
MYLPPHDPHVDDPMRFKPLFRIHLMERKAATVECMYGHKGPHHGHIQIVKKDEFSTKCNQTDHHRMSGGRQEEFRTWLREEWGRTLEDIFHEHMQELILMKFIYTSQYDNCLTYRRIYLPPSRPDDLIKPGLFKGTYGSHGLEIVMLSFHGRRARGTKITGDPNIPAGQQTVEIDLRHRIQLPDLENQRNFNELSRIVLEVRERVRQEQQEGGHEAGEGRGRQGPRESQPSPAQPRAEAPSKGPDGTPGEDGGEPGDAVAAAEQPAQCGQGQPFVLPVGVSSRNEDYPRTCRMCFYGTGLIAGHGFTSPERTPGVFILFDEDRFGFVWLELKSFSLYSRVQATFRNADAPSPQAFDEMLKNIQSLTS

SEQ ID NO: 31172 - protein, 262 aa, Homo sapiens
  Payload ID: 6114
  Gene Symbol: FBXO32
  Gene Name: F-box protein 32
  Uniprot ID: Q969P5
  ENSP ID: ENSP00000390790
MPFLGQDWRSPGQNWVKTADGWKRFLDEKSGSFVSDLSSYCNKEVYNKENLFNSLNYDVAAKKRKKDMLNSKTKTQYFHQEKWIYVHKGSTKERHGYCTLGEAFNRLDFSTAILDSRRFNYVVRPAFKGLTFTDLPLCLQLNIMQRLSDGRDLVSLGQAAPDLHVLSEDRLLWKKLCQYHFSERQIRKRLILSDKGQLDWKKMYFKLVRCYPRKEQYGDTLQLCKHCHILSWKGTDHPCTANNPESCSVSLSPQDFINLFKF

SEQ ID NO: 31173 - protein, 355 aa, Homo sapiens
  Payload ID: 6114
  Gene Symbol: FBXO32
  Gene Name: F-box protein 32
  Uniprot ID: Q969P5
  ENSP ID: ENSP00000428205
MPFLGQDWRSPGQNWVKTADGWKRFLDEKSGSFVSDLSSYCNKEVYNKENLFNSLNYDVAAKKRKKDMLNSKTKTQYFHQEKWIYVHKGSTKERHGYCTLGEAFNRLDFSTAILDSRRFNYVVRLLELIAKSQLTSLSGIAQKNFMNILEKVVLKVLEDQQNIRLIRELLQTLYTSLCTLVQRVGKSVLVGNINMWVYRMETILHWQQQLNNIQITRPAFKGLTFTDLPLCLQLNIMQRLSDGRDLVSLGQAAPDLHVLSEDRLLWKKLCQYHFSERQIRKRLILSDKGQLDWKKMYFKLVRCYPRKEQYGDTLQLCKHCHILSWKGTDHPCTANNPESCSVSLSPQDFINLFKF

SEQ ID NO: 31174 - protein, 555 aa, Homo sapiens
  Payload ID: 6115
  Gene Symbol: FBXO33
  Gene Name: F-box protein 33
  Uniprot ID: Q7Z6M2
  ENSP ID: ENSP00000298097
MLLFLSVPQPRPPGARTRAGAARVARWRRLRLQQLRRLRGLLRVLRGRPGAGSRRRGRMALCGQAAGAASLPSELIVHIFSFLPAPDRLRASASCSHWRECLFYPALWPQLRICLRVSPAEQPRLEFLMRKCGWFVRELRVEFAAENYLSGGGPGDGGGADTGTGGEEVEALQLSARWLEVLRTYLELVLCVLVSIRNNRNLQKFSLFGDISVLQQQGSLSNTYLSKVDPDGKKIKQIQQLFEEILSNSRQLKWLSCGFMLEIVTPTSLSSLSNAVANTMEHLSLLDNNIPGNSTLITAVELERFVNLHSLALDFCDFTAEMARVLTDSNHVPLQRLSLLVHNVSVMHKSLDNMPNDEHWKALSRKSTSFRVYIMAFDIKSEDMLKILKPSIPLERIHFDSYITCVSGAIVDLISRQYDKFLTHFILMNDVIDTSGFPDLSDNRNEDPLVLLAWRCTKLSLLAIHGYTVWAHNLIAIARLRGSDLKVLEVTEESIDFDQGELADQDVDPVHNLIEQVSLGLGQPWHAVMDIESLSVFTEPNRHFYREMQSFSEDI

SEQ ID NO: 31175 - protein, 2 aa, Homo sapiens
  Payload ID: 6115
  Gene Symbol: FBXO33
  Gene Name: F-box protein 33
  ENSP ID: ENSP00000450974
MR

SEQ ID NO: 31176 - protein, 89 aa, Homo sapiens
  Payload ID: 6115
  Gene Symbol: FBXO33
  Gene Name: F-box protein 33
  ENSP ID: ENSP00000451277
MRKCGWFVRELRVEFAAENYLSGGGPGDGGGADTGTGGEEVEALQLSARWLEVLRTYLELVLCVLVSIRNNRLHGVGTQPHCHCSSSGL

SEQ ID NO: 31177 - protein, 711 aa, Homo sapiens
  Payload ID: 6116
  Gene Symbol: FBXO34
  Gene Name: F-box protein 34
  Uniprot ID: Q9NWN3
  ENSP ID: ENSP00000313159
MHLKPYWKLQKKEHPPEVSRETQRTPMNHQKAVNDETCKASHITSSVFPSASLGKASSRKPFGILSPNVLCSMSGKSPVESSLNVKTKKNAPSATIHQGEEEGPLDIWAVVKPGNTKEKIAFFASHQCSNRIGSMKIKSSWDIDGRATKRRKKSGDLKKAKVQVERMREVNSRCYQPEPFACGIEHCSVHYVSDSGDGVYAGRPLSVIQMVAFLEQRASALLASCSKNCTNSPAIVRFSGQSRGVPAVSESYSAPGACEEPTERGNLEVGEPQSEPVRVLDMVAKLESECLKRQGQREPGSLSRNNSFRRNVGRVLLANSTQADEGKTKKGVLEAPDTQVNPVGSVSVDCGPSRADRCSPKEDQAWDGASQDCPPLPAGVSFHIDSAELEPGSQTAVKNSNRYDVEMTDELVGLPFSSHTYSQASELPTDAVDCMSRELVSLTSRNPDQRKESLCISITVSKVDKDQPSILNSCEDPVPGMLFFLPPGQHLSDYSQLNESTTKESSEASQLEDAAGGDSASEEKSGSAEPFVLPASSVESTLPVLEASSWKKQVSHDFLETRFKIQQLLEPQQYMAFLPHHIMVKIFRLLPTKSLVALKCTCCYFKFIIEYYNIRPADSRWVRDPRYREDPCKQCKKKYVKGDVSLCRWHPKPYCQALPYGPGYWMCCHRSQKGFPGCKLGLHDNHWVPACHSFNRAIHKKAKGTEAEEEY

SEQ ID NO: 31178 - protein, 711 aa, Homo sapiens; identical to SEQ ID NO: 31177
  Payload ID: 6116
  Gene Symbol: FBXO34
  Gene Name: F-box protein 34
  Uniprot ID: Q9NWN3
  ENSP ID: ENSP00000394117

SEQ ID NO: 31179 - protein, 577 aa, Homo sapiens
  Payload ID: 6116
  Gene Symbol: FBXO34
  Gene Name: F-box protein 34
  ENSP ID: ENSP00000450877
MKIKSSWDIDGRATKRRKKSGDLKKAKVQVERMREVNSRCYQPEPFACGIEHCSVHYVSDSGDGVYAGRPLSVIQMVAFLEQRASALLASCSKNCTNSPAIVRFSGQSRGVPAVSESYSAPGACEEPTERGNLEVGEPQSEPVRVLDMVAKLESECLKRQGQREPGSLSRNNSFRRNVGRVLLANSTQADEGKTKKGVLEAPDTQVNPVGSVSVDCGPSRADRCSPKEDQAWDGASQDCPPLPAGVSFHIDSAELEPGSQTAVKNSNRYDVEMTDELVGLPFSSHTYSQASELPTDAVDCMSRELVSLTSRNPDQRKESLCISITVSKVDKDQPSILNSCEDPVPGMLFFLPPGQHLSDYSQLNESTTKESSEASQLEDAAGGDSASEEKSGSAEPFVLPASSVESTLPVLEASSWKKQVSHDFLETRFKIQQLLEPQQYMAFLPHHIMVKIFRLLPTKSLVALKCTCCYFKFIIEYYNIRPADSRWVRDPRYREDPCKQCKKKYVKGDVSLCRWHPKPYCQALPYGPGYWMCCHRSQKGFPGCKLGLHDNHWVPACHSFNRAIHKKAKGTEAEEEY

SEQ ID NO: 31180 - protein, 188 aa, Homo sapiens
  Payload ID: 6117
  Gene Symbol: FBXO36
  Gene Name: F-box protein 36
  Uniprot ID: Q8NEA4
  ENSP ID: ENSP00000283946
MASWLPETLFETVGQGPPPSKDYYQLLVTRSQVIFRWWKISLRSEYRSTKPGEAKETHEDFLENSHLQGQTALIFGARILDYVINLCKGKFDFLERLSDDLLLTIISYLDLEDIARLCQTSHRFAKLCMSDKLWEQIVQSTCDTITPDVRALAEDTGWRQLFFTNKLQLQRQLRKRKQKYGNLREKQP

SEQ ID NO: 31181 - protein, 157 aa, Homo sapiens
  Payload ID: 6117
  Gene Symbol: FBXO36
  Gene Name: F-box protein 36
  Uniprot ID: Q8NEA4
  ENSP ID: ENSP00000362756
MVIFRWWKISLRSEYRSTKPGEAKETHEDFLENSHLQGQTALIFGARILDYVINLCKGKFDFLERLSDDLLLTIISYLDLEDIARLCQTSHRFAKLCMSDKLWEQIVQSTCDTITPDVRALAEDTGWRQLFFTNKLQLQRQLRKRKQKYGNLREKQP

SEQ ID NO: 31182 - protein, 168 aa, Homo sapiens
  Payload ID: 6117
  Gene Symbol: FBXO36
  Gene Name: F-box protein 36
  ENSP ID: ENSP00000386673
MASWLPETLFETVGQGPPPSKDYYQLLVTRSQVIFRWWKISLRSEYRSTKPGEAKETHEDFLENSHLQGKFDFLERLSDDLLLTIISYLDLEDIARLCQTSHRFAKLCMSDKLWEQIVQSTCDTITPDVRALAEDTGWRQLFFTNKLQLQRQLRKRKQKYGNLREKQP

SEQ ID NO: 31183 - protein, 943 aa, Homo sapiens
  Payload ID: 6118
  Gene Symbol: FBXO38
  Gene Name: F-box protein 38
  Uniprot ID: Q6PIJ6
  ENSP ID: ENSP00000296701
MGPRKKSVKTCIMNNEIPEEMTADETKDYMNQLSHEVLCHIFRYLPLQDIMCMECLSRKLKEAVTLYLRVVRVVDLCAGRWWEYMPSGFTDASFLTLLKKMPDVEQLYGLHPRYLERRRVRGHEAFSIPGVLEALQACPNLVGVETSHLELVESIWTYMPHVHILGKFRNRNGAFPIPPENKLKIPIGAKIQTLHLVGVNVPEIPCIPMLRHLYMKWVRLTKPQPFKDFLCISLRTFVMRNCAGPTNSLKYVPLVTGLASARNLEHLEMVRVPFLGGLIQHVVEDSWRSGGFRNLHTIVLGACKNALEVDLGYLIITAARRLHEVRIQPSLTKDGVFSALKMAELEFPQFETLHLGYVDEFLLQSRMANADLVKYGLADVVENPGIITDIGMKAVNEVFSCIKYLAIYNCPHLHNPYNWISDHSRWTRLVDINLVRCHALKLDSFGQFIELLPSLEFISLDQMFREPPKGCARVGLSAGTGIGVSSALVSNQNSNNDDNNAQNNNANIHDNNHHHPDDSDEENDFRQDLQPGEQQFAADALNEMEDIVQEDGEVVAESGNNTPAHSQAIIPVDVDEEQAGPSGLQRVVKPTSITVHDSESDDEEDSLELQEVWIPKNGTRRYSEREEKTGESVQSRELSEVAKTKPRHAMKRKRTADKSTSTSDPVIEDDHVQVLVLKSKNLVGVTMTNCGITDLVLKDCPKMMFIHATRCRVLKHLKVENAPIVNRFDYAQCKKLNMDQVLDQILRMPPERNRIIYLRPMQQVDTLTLEQKLFSGPYPYHICIIHEFSNPPNVRNKVRIRSWMDTIANINQELIKYEFFPEATRSEEDLKKYPKYPWGREIYTLEGVVDGAPYSMISDFPWLRSLRAAEPNSFARYDFEDDEESTIYAPRRKGQLSADICMETIGEEISEMRQMKKGVFQRVVAIFIHYCDVNGEPVEDDYI

SEQ ID NO: 31184 - protein, 1188 aa, Homo sapiens
  Payload ID: 6118
  Gene Symbol: FBXO38
  Gene Name: F-box protein 38
  Uniprot ID: Q6PIJ6
  ENSP ID: ENSP00000342023
MGPRKKSVKTCIMNNEIPEEMTADETKDYMNQLSHEVLCHIFRYLPLQDIMCMECLSRKLKEAVTLYLRVVRVVDLCAGRWWEYMPSGFTDASFLTLLKKMPDVEQLYGLHPRYLERRRVRGHEAFSIPGVLEALQACPNLVGVETSHLELVESIWTYMPHVHILGKFRNRNGAFPIPPENKLKIPIGAKIQTLHLVGVNVPEIPCIPMLRHLYMKWVRLTKPQPFKDFLCISLRTFVMRNCAGPTNSLKYVPLVTGLASARNLEHLEMVRVPFLGGLIQHVVEDSWRSGGFRNLHTIVLGACKNALEVDLGYLIITAARRLHEVRIQPSLTKDGVFSALKMAELEFPQFETLHLGYVDEFLLQSRMANADLVKYGLADVVENPGIITDIGMKAVNEVFSCIKYLAIYNCPHLHNPYNWISDHSRWTRLVDINLVRCHALKLDSFGQFIELLPSLEFISLDQMFREPPKGCARVGLSAGTGIGVSSALVSNQNSNNDDNNAQNNNANIHDNNHHHPDDSDEENDFRQDLQPGEQQFAADALNEMEDIVQEDGEVVAESGNNTPAHSQAIIPVDVDEEQAGPSGLQRVVKPTSITVHDSESDDEEDSLELQEVWIPKNGTRRYSEREEKTGESVQSRELSVSGKGKTPLRKRYNSHQMGQSKQFPLEESSCEKGCQVTSEQIKADMKAARDIPEKKKNKDVYPSCSSTTASTVGNSSSHNTASQSPDFVRTVNSGGSSEPSPTEVDVSRQCACSPGGSEDSEAMEEGDAESSVCPRCCCHRPQESQRRTSRCSDEERPSTSRACVVNGPDGTRSAFSFRTLPQGGSSGPAHDERTNGSGSGATGEDRRGSSQPESCDVQSNEDYPRRPLTRARSRLSHVLLVSESEVAKTKPRHAMKRKRTADKSTSTSDPVIEDDHVQVLVLKSKNLVGVTMTNCGITDLVLKDCPKMMFIHATRCRVLKHLKVENAPIVNRFDYAQCKKLNMDQVLDQILRMPPERNRIIYLRPMQQVDTLTLEQKLFSGPYPYHICIIHEFSNPPNVRNKVRIRSWMDTIANINQELIKYEFFPEATRSEEDLKKYPKYPWGREIYTLEGVVDGAPYSMISDFPWLRSLRAAEPNSFARYDFEDDEESTIYAPRRKGQLSADICMETIGEEISEMRQMKKGVFQRVVAIFIHYCDVNGEPVEDDYI

SEQ ID NO: 31185 - protein, 1113 aa, Homo sapiens
  Payload ID: 6118
  Gene Symbol: FBXO38
  Gene Name: F-box protein 38
  Uniprot ID: Q6PIJ6
  ENSP ID: ENSP00000377895
MGPRKKSVKTCIMNNEIPEEMTADETKDYMNQLSHEVLCHIFRYLPLQDIMCMECLSRKLKEAVTLYLRVVRVVDLCAGRWWEYMPSGFTDASFLTLLKKMPDVEQLYGLHPRYLERRRVRGHEAFSIPGVLEALQACPNLVGVETSHLELVESIWTYMPHVHILGKFRNRNGAFPIPPENKLKIPIGAKIQTLHLVGVNVPEIPCIPMLRHLYMKWVRLTKPQPFKDFLCISLRTFVMRNCAGPTNSLKYVPLVTGLASARNLEHLEMVRVPFLGGLIQHVVEDSWRSGGFRNLHTIVLGACKNALEVDLGYLIITAARRLHEVRIQPSLTKDGVFSALKMAELEFPQFETLHLGYVDEFLLQSRMANADLVKYGLADVVENPGIITDIGMKAVNEVFSCIKYLAIYNCPHLHNPYNWISDHSRWTRLVDINLVRCHALKLDSFGQFIELLPSLEFISLDQMFREPPKGCARVGLSAGTGIGVSSALVSNQNSNNDDNNAQNNNANIHDNNHHHPDDSDEENDFRQDLQPGEQQFAADALNEMEDIVQEDGEVVAESGNNTPAHSQAIIPVDVDEEQAGPSGLQRVVKPTSITVHDSESDDEEDSLELQEVWIPKNGTRRYSEREEKTGESVQSRELSVSGKGKTPLRKRYNSHQMGQSKQFPLEESSCEKGCQVTSEQIKADMKAARDIPEKKKNKDVYPSCSSTTASTVGNSSSHNTASQSPDFVRTVNSGGSSEPSPTEVDVSRQCACSPGGSEDSEAMEEGDAESSVCPRCCCHRPQESQRRTSRCSDEERPSTSRACVVNGPDEVAKTKPRHAMKRKRTADKSTSTSDPVIEDDHVQVLVLKSKNLVGVTMTNCGITDLVLKDCPKMMFIHATRCRVLKHLKVENAPIVNRFDYAQCKKLNMDQVLDQILRMPPERNRIIYLRPMQQVDTLTLEQKLFSGPYPYHICIIHEFSNPPNVRNKVRIRSWMDTIANINQELIKYEFFPEATRSEEDLKKYPKYPWGREIYTLEGVVDGAPYSMISDFPWLRSLRAAEPNSFARYDFEDDEESTIYAPRRKGQLSADICMETIGEEISEMRQMKKGVFQRVVAIFIHYCDVNGEPVEDDYI

SEQ ID NO: 31186 - protein, 943 aa, Homo sapiens; identical to SEQ ID NO: 31183
  Payload ID: 6118
  Gene Symbol: FBXO38
  Gene Name: F-box protein 38
  Uniprot ID: Q6PIJ6
  ENSP ID: ENSP00000426410

SEQ ID NO: 31187 - protein, 442 aa, Homo sapiens
  Payload ID: 6119
  Gene Symbol: FBXO39
  Gene Name: F-box protein 39
  Uniprot ID: Q8N4B4
  ENSP ID: ENSP00000321386
MDEESELIQPQDQSCWAFLPDLCLCRVFWWLGDRDRSRAALVCRKWNQMMYSAELWRYRTITFSGRPSRVHASEVESAVWYVKKFGRYLEHLEVKFMNPYNAVLTKKFQVTMRGLLSCLSKSNNRLKSLSIQYLELDRLVWRNSIRSSFISSLSFFLKKMGKRLDYLNLKGARLTVEQGCQILDSLSYMRNENVISELNIEDYFSHHLAVYNSPQFKKTMSTFHNLVSLNLNYNCISDELLENLCENASTLRTINIKCHVHDPHGQVIWGMSWAKLARQATNLKVNFFFERIMKYERLARILLQEIPIRSISLRSCYFSDPDCSMRPTLIDLLPTFRHTLQKLTCEFNNNHESLDEELHLLIISCRKLFYFKIWAFLDVSFVERILKSQKERQCALRVFKARIYTNRYETNEEDKTLQEIYRKYRKLIESELSYFVIVYSVM

SEQ ID NO: 31188 - protein, 36 aa, Homo sapiens
  Payload ID: 6119
  Gene Symbol: FBXO39
  Gene Name: F-box protein 39
  ENSP ID: ENSP00000458890
KIWAFLDVSFVERILKSQKERQCALRVFKGMIQGKE

SEQ ID NO: 31189 - protein, 50 aa, Homo sapiens
  Payload ID: 6119
  Gene Symbol: FBXO39
  Gene Name: F-box protein 39
  ENSP ID: ENSP00000459284
  MOD_RES (1)..(1): Any amino acid
XLDEELHLLIISCRKLFYFKIWAFLDVSFVERILKSQKERQCALRVFKGS

SEQ ID NO: 31190 - protein, 387 aa, Homo sapiens
  Payload ID: 6120
  Gene Symbol: FBXO4
  Gene Name: F-box protein 4
  Uniprot ID: Q9UKT5
  ENSP ID: ENSP00000281623
MAGSEPRSGTNSPPPPFSDWGRLEAAILSGWKTFWQSVSKERVARTTSREEVDEAASTLTRLPIDVQLYILSFLSPHDLCQLGSTNHYWNETVRDPILWRYFLLRDLPSWSSVDWKSLPDLEILKKPISEVTDGAFFDYMAVYRMCCPYTRRASKSSRPMYGAVTSFLHSLIIQNEPRFAMFGPGLEELNTSLVLSLMSSEELCPTAGLPQRQIDGIGSGVNFQLNNQHKFNILILYSTTRKERDRAREEHTSAVNKMFSRHNEGDDQQGSRYSVIPQIQKVCEVVDGFIYVANAEAHKRHEWQDEFSHIMAMTDPAFGSSGRPLLVLSCISQGDVKRMPCFYLAHELHLNLLNHPWLVQDTEAETLTGFLNGIEWILEEVESKRAR

SEQ ID NO: 31191 - protein, 307 aa, Homo sapiens
  Payload ID: 6120
  Gene Symbol: FBXO4
  Gene Name: F-box protein 4
  Uniprot ID: Q9UKT5
  ENSP ID: ENSP00000296812
MAGSEPRSGTNSPPPPFSDWGRLEAAILSGWKTFWQSVSKERVARTTSREEVDEAASTLTRLPIDVQLYILSFLSPHDLCQLGSTNHYWNETVRDPILWRYFLLRDLPSWSSVDWKSLPDLEILKKPISEVTDGAFFDYMAVYRMCCPYTRRASKSSRPMYGAVTSFLHSLIIQNEPRFAMFGPGLEELNTSLVLSLMSSEELCPTAGLPQRQIDGIGSGVNFQLNNQHKFNILILYSTTRKERDRAREEHTSAVNKMFSRHNEGDDQQGSRYSVIPQIQKVCEVVDGFIYVANAEAHKSKYSYVHF

SEQ ID NO: 31192 - protein, 305 aa, Homo sapiens
  Payload ID: 6120
  Gene Symbol: FBXO4
  Gene Name: F-box protein 4
  ENSP ID: ENSP00000421749
MAGSEPRSGTNSPPPPFSDWGRLEAAILSGWKTFWQSVSKERVARTTSREEVDEAASTLTRLPIDVQLYILSFLSPHDLCQLGSTNHYWNETVRDPILWRYFLLRDLPSWSSVDWKSLPDLEILKKPISEVTDGAFFDYMAVYRMCCPYTRRASKSSRPMYGAVTSFLHSLIIQNEPRFAMFGPGLEELNTSLVLSLMSSEELCPTAGLPQRQIDGIGSGVNFQLNNQHKFNILILYSTTRKERDRAREEHTSAVNKMFSRHNEGDDQQGSRYSVIPQIQKVCEVVDGFIYVANAEAHKSPGYRG

SEQ ID NO: 31193 - protein, 64 aa, Homo sapiens
  Payload ID: 6120
  Gene Symbol: FBXO4
  Gene Name: F-box protein 4
  ENSP ID: ENSP00000424750
MAGSEPRSGTNSPPPPFSDWGRLEAAILSGWKTFWQSVSKERVARTTSREEVDEAASTLTRLPL

SEQ ID NO: 31194 - protein, 154 aa, Homo sapiens
  Payload ID: 6120
  Gene Symbol: FBXO4
  Gene Name: F-box protein 4
  ENSP ID: ENSP00000424991
MAGSEPRSGTNSPPPPFSDWGRLEAAILSGWKTFWQSVSKERVARTTSREEVDEAASTLTRLPIDVQLYILSFLSPHDLCQLGSTNHYWNETVRDPILWRYFLLRDLPSWSSVDWKSLPDLEILKKPISEVTDGAFFDYMAVRDGVSPCYPGWS

SEQ ID NO: 31195 - protein, 709 aa, Homo sapiens
  Payload ID: 6121
  Gene Symbol: FBXO40
  Gene Name: F-box protein 40
  Uniprot ID: Q9UH90
  ENSP ID: ENSP00000337510
MGKARRSPPGHHRHCEGCFNRHCHIPVEPNTSCLVISCHLLCGATFHMCKEAEHQLLCPLEQVPCLNSEYGCPLSMSRHKLAKHLQVCPASVVCCSMEWNRWPNVDSETTLHENIMKETPSEECLDTALALQDQKVLFRSLKMVELFPETREATEEEPTMNGETSVEEMGGAVGGVDIGLVPHGLSATNGEMAELSQEEREVLAKTKEGMDLVKFGQWENIFSKEHAASALTNSSASCESKNKNDSEKEQISSGHNMVEGEGAPKKKEPQENQKQQDVRTAMETTGLAPWQDGVLERLKTAVDAKDYNMYLVHNGRMLIHFGQMPACTPKERDFVYGKLEAQEVKTVYTFKVPVSYCGKRARLGDAMLSCKPSEHKAVDTSDLGITVEDLPKSDLIKTTLQCALERELKGHVISESRSIDGLFMDFATQTYNFEPEQFSSGTVLADLTAATPGGLHVELHSECVTRRHNKSSSAFTFTCNKFFRRDEFPLHFKNVHTDIQSCLNGWFQHRCPLAYLGCTFVQNHFRPPGQKAKVIYSQELKTFAIKPEVAPELSEGRKNNHLLGHGGKSQNSLTSLPLEILKYIAGFLDSVSLAQLSQVSVLMRNICATLLQERGMVLLQWKKKRYSHGGTSWRVHREIWQFSSLFSKIKSWEFNEVTSMSEHLKSCPFNIVEHKTDPILLTSMCQPREQARESLVSTFRIRPRGRYVS

SEQ ID NO: 31196 - protein, 875 aa, Homo sapiens
  Payload ID: 6122
  Gene Symbol: FBXO41
  Gene Name: F-box protein 41
  Uniprot ID: Q8TF61
  ENSP ID: ENSP00000295133
MASLDLPYRCPRCGEHKRFRSLSSLRAHLEYSHTYETLYILSKTNSICDGAAAAAAAAAAASGFPLAPEPAALLAVPGARREVFESTSFQGKEQAAGPSPAAPHLLHHHHHHAPLAHFPGDLVPASLPCEELAEPGLVPAAAARYALREIEIPLGELFARKSVASSACSTPPPGPGPGPCPGPASASPASPSPADVAYEEGLARLKIRALEKLEVDRRLERLSEEVEQKIAGQVGRLQAELERKAAELETARQESARLGREKEELEERASELSRQVDVSVELLASLKQDLVHKEQELSRKQQEVVQIDQFLKETAAREASAKLRLQQFIEELLERADRAERQLQVISSSCGSTPSASLGRGGGGGGAGPNARGPGRMREHHVGPAVPNTYAVSRHGSSPSTGASSRVPAASQSSGCYDSDSLELPRPEEGAPEDSGPGGLGTRAQAANGGSERSQPPRSSGLRRQAIQNWQRRPRRHSTEGEEGDVSDVGSRTTESEAEGPLDAPRPGPAMAGPLSSCRLSARPEGGSGRGRRAERVSPSRSNEVISPEILKMRAALFCIFTYLDTRTLLHAAEVCRDWRFVARHPAVWTRVLLENARVCSKFLAMLAQWCTQAHSLTLQNLKPRQRGKKESKEEYARSTRGCLEAGLESLLKAAGGNLLILRISHCPNILTDRSLWLASCYCRALQAVTYRSATDPVGHEVIWALGAGCREIVSLQVAPLHPCQQPTRFSNRCLQMIGRCWPHLRALGVGGAGCGVQGLASLARNCMRLQVLELDHVSEITQEVAAEVCREGLKGLEMLVLTATPVTPKALLHFNSICRNLKSIVVQIGIADYFKEPSSPEAQKLFEDMVTKLQALRRRPGFSKILHIKVEGGC

SEQ ID NO: 31197 - protein, 875 aa, Homo sapiens; identical to SEQ ID NO: 31196
  Payload ID: 6122
  Gene Symbol: FBXO41
  Gene Name: F-box protein 41
  Uniprot ID: Q8TF61
  ENSP ID: ENSP00000428646

SEQ ID NO: 31198 - protein, 875 aa, Homo sapiens; identical to SEQ ID NO: 31196
  Payload ID: 6122
  Gene Symbol: FBXO41
  Gene Name: F-box protein 41
  Uniprot ID: Q8TF61
  ENSP ID: ENSP00000430968

SEQ ID NO: 31199 - protein, 717 aa, Homo sapiens
  Payload ID: 6123
  Gene Symbol: FBXO42
  Gene Name: F-box protein 42
  Uniprot ID: Q6P3S6
  ENSP ID: ENSP00000364742
MASSSDSEDDSFMAVDQEETVLEGTMDQDEEPHPVLEAEETRHNRSMSELPEEVLEYILSFLSPYQEHKTAALVCKQWYRLIKGVAHQCYHGFMKAVQEGNIQWESRTYPYPGTPITQRFSHSACYYDANQSMYVFGGCTQSSCNAAFNDLWRLDLNSKEWIRPLASGSYPSPKAGATLVVYKDLLVLFGGWTRPSPYPLHQPERFFDEIHTYSPSKNWWNCIVTTHGPPPMAGHSSCVIDDKMIVFGGSLGSRQMSNDVWVLDLEQWAWSKPNISGPSPHPRGGQSQIVIDDATILILGGCGGPNALFKDAWLLHMHSGPWAWQPLKVENEEHGAPELWCHPACRVGQCVVVFSQAPSGRAPLSPSLNSRPSPISATPPALVPETREYRSQSPVRSMDEAPCVNGRWGTLRPRAQRQTPSGSREGSLSPARGDGSPILNGGSLSPGTAAVGGSSLDSPVQAISPSTPSAPEGYDLKIGLSLAPRRGSLPDQKDLRLGSIDLNWDLKPASSSNPMDGMDNRTVGGSMRHPPEQTNGVHTPPHVASALAGAVSPGALRRSLEAIKAMSSKGPSASAALSPPLGSSPGSPGSQSLSSGETVPIPRPGPAQGDGHSLPPIARRLGHHPPQSLNVGKPLYQSMNCKPMQMYVLDIKDTKEKGRVKWKVFNSSSVVGPPETSLHTVVQGRGELIIFGGLMDKKQNVKYYPKTNALYFVRAKR

SEQ ID NO: 31200 - protein, 298 aa, Homo sapiens
  Payload ID: 6123
  Gene Symbol: FBXO42
  Gene Name: F-box protein 42
  ENSP ID: ENSP00000412416
MSSPPQIVIDDATILILGGCGGPNALFKDAWLLHMHSGPWAWQPLKVENEEHGAPELWCHPACRVGQCVVVFSQAPSGRAPLSPSLNSRPSPISATPPALVPETREYRSQSPVRSMDEAPCVNGRWGTLRPRAQRQTPSGSREGSLSPARGDGSPILNGGSLSPGTAAVGGSSLDSPVQAISPSTPSAPEGYDLKIGLSLAPRRGSLPDQKDLRLGSIDLNWDLKPASSSNPMDGMDNRTVGGSMRHPPEQTNGVHTPPHVASALAGAVSPGALRRSLEAIKAMSSKGPSASAALSPP

SEQ ID NO: 31201 - protein, 298 aa, Homo sapiens; identical to SEQ ID NO: 31200
  Payload ID: 6123
  Gene Symbol: FBXO42
  Gene Name: F-box protein 42
  ENSP ID: ENSP00000415663

SEQ ID NO: 31202 - protein, 708 aa, Homo sapiens
  Payload ID: 6124
  Gene Symbol: FBXO43
  Gene Name: F-box protein 43
  Uniprot ID: Q4G163
  ENSP ID: ENSP00000403293
MSFKDKDERISCLEAYVTLTSKSSRFTDETEILKMSQRHSGQAGTEAGNGADSPPIVNSKYSTFRDFCSTSSFQDSGYNELKSCSFDNIDKEYLGKKEKGPTLLYEHPETSGLGLTHPLESPTQKKKCILPRKEKDKTPELCETPKISGKKCLPRRRLNVSFALLKGDFESQNSSLESSISQVINLEKNIPSSASGFSRANNFSPLVTSTLKTEEVTSCSQKLRLNFSQQKTSTIDDSKDDCSLFEVECISPIQGNNFKDSITHDFSDSSLCINDENACPELLGSSVSGTTCGTDEDIFVTPISNLVANIRFNASQILSPSPEVRGSISTPEDSGFNSLSLEKSEDSLSDQEGSFQELLQKHKGTPKVGDTIRKTRHLGRSRRLSTLREQSSQSETEEEKQIVHPDSEKRAAAASAISEGQLSSDESGDLTFSLKNLSKTPALQLVHELFMKSKRKRLQENSGHEFLEQGDGEKIAVLQCILAGLIGKKMGIEKLDILTELKYRNLKHILAMVLESLTAESLCSVWKVSRNWREIVVQDKNANRRRKFYITQLKTDSEGAVLNVEDAATRLQLLNRSALRSVQAQARIPGSQREQGSTLSPWGEVLTPLASSSVTHLSSKQEEYVKVAKTLFTDEALKPCPRCQSPAKYQPYKKRGLCSRTACGFDFCVLCLCAYHGSEECSRGAAKPRNRKDALPGSAQSKRNLKRL

SEQ ID NO: 31203 - protein, 36 aa, Homo sapiens
  Payload ID: 6124
  Gene Symbol: FBXO43
  Gene Name: F-box protein 43
  ENSP ID: ENSP00000429759
MSFKDKDERISCLEAYVTLTSKSSRFTDGKSFHFNK

SEQ ID NO: 31204 - protein, 224 aa, Homo sapiens
  Payload ID: 6125
  Gene Symbol: FBXO44
  Gene Name: F-box protein 44
  Uniprot ID: Q9H4M3
  ENSP ID: ENSP00000251546
MAVGNINELPENILLELFTHVPARQLLLNCRLVCSLWRDLIDLVTLWKRKCLREGFITEDWDQPVADWKIFYFLRSLHRNLLHNPCAEEGFEFWSLDVNGGDEWKVEDLSRDQRKEFPNDQVRSQARLRVQVPAVRSAPVVRARASGDLPARPGDHPAEERCQVEGGLPHILQLPARRPLHLVSARRRGHSLLGRLVRPEGHQQQHHHRAPAALTPPEPPSAEP

SEQ ID NO: 31205 - protein, 255 aa, Homo sapiens
  Payload ID: 6125
  Gene Symbol: FBXO44
  Gene Name: F-box protein 44
  Uniprot ID: Q9H4M3
  ENSP ID: ENSP00000251547
MAVGNINELPENILLELFTHVPARQLLLNCRLVCSLWRDLIDLVTLWKRKCLREGFITEDWDQPVADWKIFYFLRSLHRNLLHNPCAEEGFEFWSLDVNGGDEWKVEDLSRDQRKEFPNDQVKKYFVTSYYTCLKSQVVDLKAEGYWEELMDTTRPDIEVKDWFAARPDCGSKYQLCVQLLSSAHAPLGTFQPDPATIQQKSDAKWREVSHTFSNYPPGVRYIWFQHGGVDTHYWAGWYGPRVTNSSITIGPPLP

SEQ ID NO: 31206 - protein, 224 aa, Homo sapiens; identical to SEQ ID NO: 31204
  Payload ID: 6125
  Gene Symbol: FBXO44
  Gene Name: F-box protein 44
  Uniprot ID: Q9H4M3
  ENSP ID: ENSP00000365951

SEQ ID NO: 31207 - protein, 224 aa, Homo sapiens; identical to SEQ ID NO: 31204
  Payload ID: 6125
  Gene Symbol: FBXO44
  Gene Name: F-box protein 44
  Uniprot ID: Q9H4M3
  ENSP ID: ENSP00000365953

SEQ ID NO: 31208 - protein, 256 aa, Homo sapiens
  Payload ID: 6125
  Gene Symbol: FBXO44
  Gene Name: F-box protein 44
  ENSP ID: ENSP00000365959
MAVGNINELPENILLELFTHVPARQLLLNCRLVCSLWRDLIDLVTLWKRKCLREGFITEDWDQPVADWKIFYFLRSLHRNLLHNPCAEEGFEFWSLDVNGGDEWKVEDLSRDQRKEFPNDQHLPQVPGGGPQGRRVLGGADGYHTAGHRGQGLVRSQARLRVQVPAVRSAPVVRARASGDLPARPGDHPAEERCQVEGGLPHILQLPARRPLHLVSARRRGHSLLGRLVRPEGHQQQHHHRAPAALTPPEPPSAEP

SEQ ID NO: 31209 - protein, 255 aa, Homo sapiens; identical to SEQ ID NO: 31205
  Payload ID: 6125
  Gene Symbol: FBXO44
  Gene Name: F-box protein 44
  Uniprot ID: Q9H4M3
  ENSP ID: ENSP00000365961

SEQ ID NO: 31210 - protein, 165 aa, Homo sapiens
  Payload ID: 6125
  Gene Symbol: FBXO44
  Gene Name: F-box protein 44
  ENSP ID: ENSP00000389820
MAVGNINELPENILLELFTHVPARQLLLNCRLVCSLWRDLIDLVTLWKRKCLREGFITEDWDQPVADWKIFYFLRSLHRNLLHNPCAEEGFEFWSLDVNGGDEWKVEDLSRDQRKEFPNDQVRSQARLRVQVPAVRSAPVVRARASGDLPARPGDHPAEERCQVE

SEQ ID NO: 31211 - protein, 148 aa, Homo sapiens
  Payload ID: 6125
  Gene Symbol: FBXO44
  Gene Name: F-box protein 44
  ENSP ID: ENSP00000473420
  MOD_RES (1)..(1): Any amino acid
XHRNLLHNPCAEEGFEFWSLDVNGGDEWKVEDLSRDQRKEFPNDQVRSQARLRVQVPAVRSAPVVRARASGDLPARPGDHPAEERCQVEGGLPHILQLPARRPLHLVSARRRGHSLLGRLVRPEGHQQQHHHRAPAALTPPEPPSAEP

SEQ ID NO: 31212 - protein, 132 aa, Homo sapiens
  Payload ID: 6125
  Gene Symbol: FBXO44
  Gene Name: F-box protein 44
  ENSP ID: ENSP00000473653
QVPGGGPQGRRVLGGADGYHTAGHRGQGLVRSQARLRVQVPAVRSAPVVRARASGDLPARPGDHPAEERCQVEGGLPHILQLPARRPLHLVSARRRGHSLLGRLVRPEGHQQQHHHRAPAALTPPEPPSAEP

SEQ ID NO: 31213 - protein, 286 aa, Homo sapiens
  Payload ID: 6126
  Gene Symbol: FBXO45
  Gene Name: F-box protein 45
  Uniprot ID: P0C2W1
  ENSP ID: ENSP00000310332
MAAPAPGAGAASGGAGCSGGGAGAGAGSGSGAAGAGGRLPSRVLELVFSYLELSELRSCALVCKHWYRCLHGDENSEVWRSLCARSLAEEALRTDILCNLPSYKAKIRAFQHAFSTNDCSRNVYIKKNGFTLHRNPIAQSTDGARTKIGFSEGRHAWEVWWEGPLGTVAVIGIATKRAPMQCQGYVALLGSDDQSWGWNLVDNNLLHNGEVNGSFPQCNNAPKYQIGERIRVILDMEDKTLAFERGYEFLGVAFRGLPKVCLYPAVSAVYGNTEVTLVYLGKPLDG

SEQ ID NO: 31214 - protein, 107 aa, Homo sapiens
  Payload ID: 6126
  Gene Symbol: FBXO45
  Gene Name: F-box protein 45
  ENSP ID: ENSP00000389868
MQCQGYVALLGSDDQSWGWNLVDNNLLHNGEVNGSFPQCNNAPKYQIGERIRVILDMEDKTLAFERGYEFLGVAFRGLPKVCLYPAVSAVYGNTEVTLVYLGKPLDG

SEQ ID NO: 31215 - protein, 603 aa, Homo sapiens
  Payload ID: 6127
  Gene Symbol: FBXO46
  Gene Name: F-box protein 46
  Uniprot ID: Q6PJ61
  ENSP ID: ENSP00000410007
MDRGSLLPFQLWCPRPFGTYSQNQPRPPSAALKPSACPEPGGGAEPDHGPAHSENTPPALATEVPASQPAPLLSAAAAGDEGRVLLDTWYVIKPGNTKEKVAFFVAHQCGGGSRASSMKVKGHWGSDSSKAKRRRRCLDPTKAPPDPGGREGPPAAEEGPASAGEDVDLLSVAEMVALVEQRAALALQSYPRPTTPAPVVFVSAEQGGPAKGVGSERRSGGGDCSRVAEAVAHFEAQRDSPPTKGLRKEERPGPGPGEVRIAFRISNGREPRAPDSGLPSGGGGRPGCAYPGSPGPGARAKDKITCDLYQLISPSRDALPSNVEFLLARADEASEGDSPAPARPEDTPPAPPPPPARDCGASGFHVDVVVTGVVDECIFFGKDGTKNVKEETVCLTVSPEEPPPPGQLFFLQNRGPDGPPEPPPADSPATAPGPDDAEGTADTSLCRLYRHVSHDFLEIRFKIQRLLEPRQYMLLLPEHVLVKIFSFLPTRALAALKCTCHHFKGIIEAFGVRATDSRWSRDPLYRDDPCKQCRKRYEKGDVSLCRWHPKPYHHDLPYGRSYWMCCRRADRETPGCRLGLHDNNWVLPCNGPGGGRAGREEGR

SEQ ID NO: 31216 - protein, 13 aa, Homo sapiens
  Payload ID: 6127
  Gene Symbol: FBXO46
  Gene Name: F-box protein 46
  ENSP ID: ENSP00000465591
MDRGSLLPFQLWC

SEQ ID NO: 31217 - protein, 184 aa, Homo sapiens
  Payload ID: 6127
  Gene Symbol: FBXO46
  Gene Name: F-box protein 46
  ENSP ID: ENSP00000468336
MDRGSLLPFQLWCPRPFGTYSQNQPRPPSAALKPSACPEPGGGAEPDHGPAHSENTPPALATEVPASQPAPLLSAAAAGDEGRVLLDTWYVIKPGNTKEKVAFFVAHQCGGGSRASSMKVKGHWGSDSSKAKRRRRCLDPTKAPPDPGGREGPPAAEEGPASAGEDVDLLSVAEMVALVEQRAA

SEQ ID NO: 31218 - protein, 452 aa, Homo sapiens
  Payload ID: 6128
  Gene Symbol: FBXO47
  Gene Name: F-box protein 47
  Uniprot ID: Q5MNV8
  ENSP ID: ENSP00000367319
MASRINTNFTLIPNQKLRRSNRQTSCYSKTLGSGFQPISTFGNFKALPLEIFQIILKYLSVKDISMLSMVSKTVSQHIINYISTSSGSKRLLLQDFHNLELPDRRQDSAILEHYRSLGLLFKRCTLLLPTKERLKYIHKILTEVSCFKFNGCAAPMQCLGLTCYGMFLQTLTAGWDELECHRVYNFLCELTNLCRKIQMAVCSKPGSAQKLELRIRLFCRNVLLDHWTHRSDSAFWLTRILKPWPMVNQARLLYIIFGPISPQDGQVVWQEMIEEPTDEFSLKGLADAIKLLYDASTKEWTADDVISLVDELSVVPREWLLENNARLLMLSGNNICFSFMASKAVNGRTIELARLVVFLALVCEKELYCMDWTVKMMQKVCKVFSTPVERKNFLQNVANAFACVIMEMLQSIMSGDRDEDDRSFLNLFHLVHAQANFHKEVLYLTMNTPLST

SEQ ID NO: 31219 - protein, 155 aa, Homo sapiens
  Payload ID: 6129
  Gene Symbol: FBXO48
  Gene Name: F-box protein 48
  Uniprot ID: Q5FWF7
  ENSP ID: ENSP00000367193
MHKNSKRNNNLRVSHTEANSVDAEKEKNESQNNFFELLPAEITFKIFSQLDIRSLCRASLTCRSWNDTIRNSDSLWKPHCMTVRAVCRREIDDDLESGYSWRVILLRNYQKSKVKHEWLSGRYSNICSPISLPEKIMYPMDADTWGEILEAELER

SEQ ID NO: 31220 - protein, 447 aa, Homo sapiens
  Payload ID: 6130
  Gene Symbol: FBXO5
  Gene Name: F-box protein 5
  Uniprot ID: Q9UKT4
  ENSP ID: ENSP00000229758
MSRRPCSCALRPPRCSCSASPSAVTAAGRPRPSDSCKEESSTLSVKMKCDFNCNHVHSGLKLVKPDDIGRLVSYTPAYLEGSCKDCIKDYERLSCIGSPIVSPRIVQLETESKRLHNKENQHVQQTLNSTNEIEALETSRLYEDSGYSSFSLQSGLSEHEEGSLLEENFGDSLQSCLLQIQSPDQYPNKNLLPVLHFEKVVCSTLKKNAKRNPKVDREMLKEIIARGNFRLQNIIGRKMGLECVDILSELFRRGLRHVLATILAQLSDMDLINVSKVSTTWKKILEDDKGAFQLYSKAIQRVTENNNKFSPHASTREYVMFRTPLASVQKSAAQTSLKKDAQTKLSNQGDQKGSTYSRHNEFSEVAKTLKKNESLKACIRCNSPAKYDCYLQRATCKREGCGFDYCTKCLCNYHTTKDCSDGKLLKASCKIGPLPGTKKSKKNLRRL

SEQ ID NO: 31221 - protein, 401 aa, Homo sapiens
  Payload ID: 6130
  Gene Symbol: FBXO5
  Gene Name: F-box protein 5
  Uniprot ID: Q9UKT4
  ENSP ID: ENSP00000356210
MKCDFNCNHVHSGLKLVKPDDIGRLVSYTPAYLEGSCKDCIKDYERLSCIGSPIVSPRIVQLETESKRLHNKENQHVQQTLNSTNEIEALETSRLYEDSGYSSFSLQSGLSEHEEGSLLEENFGDSLQSCLLQIQSPDQYPNKNLLPVLHFEKVVCSTLKKNAKRNPKVDREMLKEIIARGNFRLQNIIGRKMGLECVDILSELFRRGLRHVLATILAQLSDMDLINVSKVSTTWKKILEDDKGAFQLYSKAIQRVTENNNKFSPHASTREYVMFRTPLASVQKSAAQTSLKKDAQTKLSNQGDQKGSTYSRHNEFSEVAKTLKKNESLKACIRCNSPAKYDCYLQRATCKREGCGFDYCTKCLCNYHTTKDCSDGKLLKASCKIGPLPGTKKSKKNLRRL

SEQ ID NO: 31222 - protein, 293 aa, Homo sapiens
  Payload ID: 6131
  Gene Symbol: FBXO6
  Gene Name: F-box protein 6
  Uniprot ID: Q9NRD1
  ENSP ID: ENSP00000365944
MDAPHSKAALDSINELPENILLELFTHVPARQLLLNCRLVCSLWRDLIDLMTLWKRKCLREGFITKDWDQPVADWKIFYFLRSLHRNLLRNPCAEEDMFAWQIDFNGGDRWKVESLPGAHGTDFPDPKVKKYFVTSYEMCLKSQLVDLVAEGYWEELLDTFRPDIVVKDWFAARADCGCTYQLKVQLASADYFVLASFEPPPVTIQQWNNATWTEVSYTFSDYPRGVRYILFQHGGRDTQYWAGWYGPRVTNSSIVVSPKMTRNQASSEAQPGQKHGQEEAAQSPYRAVVQIF

SEQ ID NO: 31223 - protein, 249 aa, Homo sapiens
  Payload ID: 6131
  Gene Symbol: FBXO6
  Gene Name: F-box protein 6
  ENSP ID: ENSP00000388781
  MOD_RES (1)..(1): Any amino acid
XNELPENILLELFTHVPARQLLLNCRLVCSLWRDLIDLMTLWKRKCLREGFITKDWDQPVADWKIFYFLRSLHRNLLRNPCAEEDMFAWQIDFNGGDRWKVESLPGAHGTDFPDPKVKKYFVTSYEFAARADCGCTYQLKVQLASADYFVLASFEPPPVTIQQWNNATWTEVSYTFSDYPRGVRYILFQHGGRDTQYWAGWYGPRVTNSSIVVSPKMTRNQASSEAQPGQKHGQEEAAQSPYRAVVQIF

SEQ ID NO: 31224 - protein, 522 aa, Homo sapiens
  Payload ID: 6132
  Gene Symbol: FBXO7
  Gene Name: F-box protein 7
  Uniprot ID: Q9Y3I1
  ENSP ID: ENSP00000266087
MRLRVRLLKRTWPLEVPETEPTLGHLRSHLRQSLLCTWGYSSNTRFTITLNYKDPLTGDEETLASYGIVSGDLICLILQDDIPAPNIPSSTDSEHSSLQNNEQPSLATSSNQTSMQDEQPSDSFQGQAAQSGVWNDDSMLGPSQNFEAESIQDNAHMAEGTGFYPSEPMLCSESVEGQVPHSLETLYQSADCSDANDALIVLIHLLMLESGYIPQGTEAKALSMPEKWKLSGVYKLQYMHPLCEGSSATLTCVPLGNLIVVNATLKINNEIRSVKRLQLLPESFICKEKLGENVANIYKDLQKLSRLFKDQLVYPLLAFTRQALNLPDVFGLVVLPLELKLRIFRLLDVRSVLSLSAVCRDLFTASNDPLLWRFLYLRDFRDNTVRVQDTDWKELYRKRHIQRKESPKGRFVMLLPSSTHTIPFYPNPLHPRPFPSSRLPPGIIGGEYDQRPTLPYVGDPISSLIPGPGETPSQFPPLRPRFDPVGPLPGPNPILPGRGGPNDRFPFRPSRGRPTDGRLSFM

SEQ ID NO: 31225 - protein, 408 aa, Homo sapiens
  Payload ID: 6132
  Gene Symbol: FBXO7
  Gene Name: F-box protein 7
  Uniprot ID: Q9Y3I1
  ENSP ID: ENSP00000380571
MQDEQPSDSFQGQAAQSGVWNDDSMLGPSQNFEAESIQDNAHMAEGTGFYPSEPMLCSESVEGQVPHSLETLYQSADCSDANDALIVLIHLLMLESGYIPQGTEAKALSMPEKWKLSGVYKLQYMHPLCEGSSATLTCVPLGNLIVVNATLKINNEIRSVKRLQLLPESFICKEKLGENVANIYKDLQKLSRLFKDQLVYPLLAFTRQALNLPDVFGLVVLPLELKLRIFRLLDVRSVLSLSAVCRDLFTASNDPLLWRFLYLRDFRDNTVRVQDTDWKELYRKRHIQRKESPKGRFVMLLPSSTHTIPFYPNPLHPRPFPSSRLPPGIIGGEYDQRPTLPYVGDPISSLIPGPGETPSQFPPLRPRFDPVGPLPGPNPILPGRGGPNDRFPFRPSRGRPTDGRLSFM

SEQ ID NO: 31226 - protein, 443 aa, Homo sapiens
  Payload ID: 6132
  Gene Symbol: FBXO7
  Gene Name: F-box protein 7
  Uniprot ID: Q9Y3I1
  ENSP ID: ENSP00000388547
MARPPGGSGPLLDSEHSSLQNNEQPSLATSSNQTSMQDEQPSDSFQGQAAQSGVWNDDSMLGPSQNFEAESIQDNAHMAEGTGFYPSEPMLCSESVEGQVPHSLETLYQSADCSDANDALIVLIHLLMLESGYIPQGTEAKALSMPEKWKLSGVYKLQYMHPLCEGSSATLTCVPLGNLIVVNATLKINNEIRSVKRLQLLPESFICKEKLGENVANIYKDLQKLSRLFKDQLVYPLLAFTRQALNLPDVFGLVVLPLELKLRIFRLLDVRSVLSLSAVCRDLFTASNDPLLWRFLYLRDFRDNTVRVQDTDWKELYRKRHIQRKESPKGRFVMLLPSSTHTIPFYPNPLHPRPFPSSRLPPGIIGGEYDQRPTLPYVGDPISSLIPGPGETPSQFPPLRPRFDPVGPLPGPNPILPGRGGPNDRFPFRPSRGRPTDGRLSFM

SEQ ID NO: 31227 - protein, 49 aa, Homo sapiens
  Payload ID: 6132
  Gene Symbol: FBXO7
  Gene Name: F-box protein 7
  ENSP ID: ENSP00000395823
MRLRVRLLKRTWPLEVPETEPTLGHLRSHLRQSLLCTWGYRFRAFFTPE

SEQ ID NO: 31228 - protein, 54 aa, Homo sapiens
  Payload ID: 6132
  Gene Symbol: FBXO7
  Gene Name: F-box protein 7
  ENSP ID: ENSP00000404388
MQDEQPSDSFQGQAAQSGVWNDDSMLGPSQNFEAESIQDNAHMAEGTGFYPSEP

SEQ ID NO: 31229 - protein, 41 aa, Homo sapiens
  Payload ID: 6132
  Gene Symbol: FBXO7
  Gene Name: F-box protein 7
  ENSP ID: ENSP00000406155
MRLRVRLLKRTWPLEVPETEPTLGHLRSHLRQSLLCTWGYS

SEQ ID NO: 31230 - protein, 319 aa, Homo sapiens
  Payload ID: 6133
  Gene Symbol: FBXO8
  Gene Name: F-box protein 8
  Uniprot ID: Q9NRD0
  ENSP ID: ENSP00000377280
MGQGLWRVVRNQQLQQEGYSEQGYLTREQSRRMAASNISNTNHRKQVQGGIDIYHLLKARKSKEQEGFINLEMLPPELSFTILSYLNATDLCLASCVWQDLANDELLWQGLCKSTWGHCSIYNKNPPLGFSFRKLYMQLDEGSLTFNANPDEGVNYFMSKGILDDSPKEIAKFIFCTRTLNWKKLRIYLDERRDVLDDLVTLHNFRNQFLPNALREFFRHIHAPEERGEYLETLITKFSHRFCACNPDLMRELGLSPDAVYVLCYSLILLSIDLTSPHVKNKMSKREFIRNTRRAAQNISEDFVGHLYDNIYLIGHVAA

SEQ ID NO: 31231 - protein, 278 aa, Homo sapiens
  Payload ID: 6133
  Gene Symbol: FBXO8
  Gene Name: F-box protein 8
  Uniprot ID: Q9NRD0
  ENSP ID: ENSP00000422905
MGQGLWRVVRNQQLQQEGYSEQGYLTREQSRRMAASNISNTNHRKQVQGGIDIYHLLKDLANDELLWQGLCKSTWGHCSIYNKNPPLGFSFRKLYMQLDEGSLTFNANPDEGVNYFMSKGILDDSPKEIAKFIFCTRTLNWKKLRIYLDERRDVLDDLVTLHNFRNQFLPNALREFFRHIHAPEERGEYLETLITKFSHRFCACNPDLMRELGLSPDAVYVLCYSLILLSIDLTSPHVKNKMSKREFIRNTRRAAQNISEDFVGHLYDNIYLIGHVAA

SEQ ID NO: 31232 - protein, 169 aa, Homo sapiens
  Payload ID: 6133
  Gene Symbol: FBXO8
  Gene Name: F-box protein 8
  ENSP ID: ENSP00000427313
MGQGLWRVVRNQQLQQEGYSEQGYLTREQSRRMAASNISNTNHRKQVQGGIDIYHLLKARKSKEQEGFINLEMLPPELSFTILSYLNATDLCLASCVWQDLANDELLWQGLCKSTWGHCSIYNKNPPLGFSFRKLYMQLDEGSLTFNANPDEPQGTRFSKGHRSCHGYG

SEQ ID NO: 31233 - protein, 184 aa, Homo sapiens
  Payload ID: 6133
  Gene Symbol: FBXO8
  Gene Name: F-box protein 8
  ENSP ID: ENSP00000427506
MGQGLWRVVRNQQLQQEGYSEQGYLTREQSRRMAASNISNTNHRKQVQGGIDIYHLLKARKSKEQEGFINLEMLPPELSFTILSYLNATDLCLASCVWQDLANDELLWQGLCKSTWGHCSIYNKNPPLGFSFRKLYMQLDEGSLTFNANPDEGVNYFMSKGILDDSPKEIAKFIFCTRTLNWKK

SEQ ID NO: 31234 - protein, 232 aa, Homo sapiens
  Payload ID: 6133
  Gene Symbol: FBXO8
  Gene Name: F-box protein 8
  ENSP ID: ENSP00000482582
MQLTFAWLHVFGRTLRMMNFSGKGCANPWGHCSIYNKNPPLGFSFRKLYMQLDEGSLTFNANPDEGVNYFMSKGILDDSPKEIAKFIFCTRTLNWKKLRIYLDERRDVLDDLVTLHNFRNQFLPNALREFFRHIHAPEERGEYLETLITKFSHRFCACNPDLMRELGLSPDAVYVLCYSLILLSIDLTSPHVKNKMSKREFIRNTRRAAQNISEDFVGHLYDNIYLIGHVAA

SEQ ID NO: 31235 - protein, 278 aa, Homo sapiens; identical to SEQ ID NO: 31231
  Payload ID: 6133
  Gene Symbol: FBXO8
  Gene Name: F-box protein 8
  Uniprot ID: Q9NRD0
  ENSP ID: ENSP00000484517

SEQ ID NO: 31236 - protein, 447 aa, Homo sapiens
  Payload ID: 6134
  Gene Symbol: FBXO9
  Gene Name: F-box protein 9
  Uniprot ID: Q9UK97
  ENSP ID: ENSP00000244426
MPDIIWVFPPQAEAEEDCHSDTVRADDDEENESPAETDLQAQLQMFRAQWMFELAPGVSSSNLENRPCRAARGSLQKTSADTKGKQEQAKEEKARELFLKAVEEEQNGALYEAIKFYRRAMQLVPDIEFKITYTRSPDGDGVGNSYIEDNDDDSKMADLLSYFQQQLTFQESVLKLCQPELESSQIHISVLPMEVLMYIFRWVVSSDLDLRSLEQLSLVCRGFYICARDPEIWRLACLKVWGRSCIKLVPYTSWREMFLERPRVRFDGVYISKTTYIRQGEQSLDGFYRAWHQVEYYRYIRFFPDGHVMMLTTPEEPQSIVPRLRTRNTRTDAILLGHYRLSQDTDNQTKVFAVITKKKEEKPLDYKYRYFRRVPVQEADQSFHVGLQLCSSGHQRFNKLIWIHHSCHITYKSTGETAVSAFEIDKMYTPLFFARVRSYTAFSERPL

SEQ ID NO: 31237 - protein, 437 aa, Homo sapiens
  Payload ID: 6134
  Gene Symbol: FBXO9
  Gene Name: F-box protein 9
  Uniprot ID: Q9UK97
  ENSP ID: ENSP00000326968
MAEAEEDCHSDTVRADDDEENESPAETDLQAQLQMFRAQWMFELAPGVSSSNLENRPCRAARGSLQKTSADTKGKQEQAKEEKARELFLKAVEEEQNGALYEAIKFYRRAMQLVPDIEFKITYTRSPDGDGVGNSYIEDNDDDSKMADLLSYFQQQLTFQESVLKLCQPELESSQIHISVLPMEVLMYIFRWVVSSDLDLRSLEQLSLVCRGFYICARDPEIWRLACLKVWGRSCIKLVPYTSWREMFLERPRVRFDGVYISKTTYIRQGEQSLDGFYRAWHQVEYYRYIRFFPDGHVMMLTTPEEPQSIVPRLRTRNTRTDAILLGHYRLSQDTDNQTKVFAVITKKKEEKPLDYKYRYFRRVPVQEADQSFHVGLQLCSSGHQRFNKLIWIHHSCHITYKSTGETAVSAFEIDKMYTPLFFARVRSYTAFSERPL

SEQ ID NO: 31238 - protein, 403 aa, Homo sapiens
  Payload ID: 6134
  Gene Symbol: FBXO9
  Gene Name: F-box protein 9
  Uniprot ID: Q9UK97
  ENSP ID: ENSP00000359977
MFRAQWMFELAPGVSSSNLENRPCRAARGSLQKTSADTKGKQEQAKEEKARELFLKAVEEEQNGALYEAIKFYRRAMQLVPDIEFKITYTRSPDGDGVGNSYIEDNDDDSKMADLLSYFQQQLTFQESVLKLCQPELESSQIHISVLPMEVLMYIFRWVVSSDLDLRSLEQLSLVCRGFYICARDPEIWRLACLKVWGRSCIKLVPYTSWREMFLERPRVRFDGVYISKTTYIRQGEQSLDGFYRAWHQVEYYRYIRFFPDGHVMMLTTPEEPQSIVPRLRTRNTRTDAILLGHYRLSQDTDNQTKVFAVITKKKEEKPLDYKYRYFRRVPVQEADQSFHVGLQLCSSGHQRFNKLIWIHHSCHITYKSTGETAVSAFEIDKMYTPLFFARVRSYTAFSERPL

SEQ ID NO: 31239 - protein, 48 aa, Homo sapiens
  Payload ID: 6134
  Gene Symbol: FBXO9
  Gene Name: F-box protein 9
  ENSP ID: ENSP00000417154
MFRAQWMFELAPGVSSSNLENRPCRAARGSLQKTSADTKGKQEQAKEE

SEQ ID NO: 31240 - protein, 191 aa, Homo sapiens
  Payload ID: 6134
  Gene Symbol: FBXO9
  Gene Name: F-box protein 9
  ENSP ID: ENSP00000417349
  MOD_RES (1)..(1): Any amino acid
XFPDGHVMMLTTPEEPQSIVPRLRTRNTRTDAILLGHYRLSQDTDNQTKVFAVITKKKEETGQSFICESYHLVATCCWRLHFPLMGSWSLGSSSLRDRESCFDCDCRFPEKPLDYKYRYFRRVPVQEADQSFHVGLQLCSSGHQRFNKLIWIHHSCHITYKSTGETAVSAFEIDKMYTPLFFARVRSYTAF

SEQ ID NO: 31241 - protein, 145 aa, Homo sapiens
  Payload ID: 6134
  Gene Symbol: FBXO9
  Gene Name: F-box protein 9
  ENSP ID: ENSP00000418858
MFRAQWMFELAPGVSSSNLENRPCRAARGSLQKTSADTKGKQEQAKEEKARELFLKAVEEEQNGALYEAIKFYRRAMQLVPDIEFKITYTRSPDGDGVGNSYIEDNDDDSKMADLLSYFQQQLTFQESVLKLCQPELESSQIHIS

SEQ ID NO: 31242 - protein, 118 aa, Homo sapiens
  Payload ID: 6134
  Gene Symbol: FBXO9
  Gene Name: F-box protein 9
  ENSP ID: ENSP00000420536
MFRAQWMFELAPGVSSSNLENRPCRAARGSLQKTSADTKGKQEQAKEEKARELFLKAVEEEQNGALYEAIKFYRRAMQLVPDIEFKITYTRSPDGDGVGNSYIEDNDDDSKMADLLSY

SEQ ID NO: 31243 - protein, 150 aa, Homo sapiens
  Payload ID: 6134
  Gene Symbol: FBXO9
  Gene Name: F-box protein 9
  ENSP ID: ENSP00000477487
VEYYRYIRFFPDGHVMMLTTPEEPQSIVPRLRTRNTRTDAILLGHYRLSQDTDNQTKVFAVITKKKEEKPLDYKYRYFRRVPVQEADQSFHVGLQLCSSGHQRFNKLIWIHHSCHITYKSTGETAVSAFEIDKMYTPLFFARIYEQISVT

SEQ ID NO: 31244 - protein, 1043 aa, Homo sapiens
  Payload ID: 6135
  Gene Symbol: FBXO18
  Gene Name: F-box protein, helicase, 18
  Uniprot ID: Q8NFZ0
  ENSP ID: ENSP00000355415
MRRFKRKHLTAIDCQHLARSHLAVTQPFGQRWTNRDPNHGLYPKPRTKRGSRGQGSQRCIPEFFLAGKQPCTNDMAKSNSVGQDSCQDSEGDMIFPAESSCALPQEGSAGPGSPGSAPPSRKRSWSSEEESNQATGTSRWDGVSKKAPRHHLSVPCTRPREARQEAEDSTSRLSAESGETDQDAGDVGPDPIPDSYYGLLGTLPCQEALSHICSLPSEVLRHVFAFLPVEDLYWNLSLVCHLWREIISDPLFIPWKKLYHRYLMNEEQAVSKVDGILSNCGIEKESDLCVLNLIRYTATTKCSPSVDPERVLWSLRDHPLLPEAEACVRQHLPDLYAAAGGVNIWALVAAVVLLSSSVNDIQRLLFCLRRPSSTVTMPDVTETLYCIAVLLYAMREKGINISNRIHYNIFYCLYLQENSCTQATKVKEEPSVWPGKKTIQLTHEQQLILNHKMEPLQVVKIMAFAGTGKTSTLVKYAEKWSQSRFLYVTFNKSIAKQAERVFPSNVICKTFHSMAYGHIGRKYQSKKKLNLFKLTPFMVNSVLAEGKGGFIRAKLVCKTLENFFASADEELTIDHVPIWCKNSQGQRVMVEQSEKLNGVLEASRLWDNMRKLGECTEEAHQMTHDGYLKLWQLSKPSLASFDAIFVDEAQDCTPAIMNIVLSQPCGKIFVGDPHQQIYTFRGAVNALFTVPHTHVFYLTQSFRFGVEIAYVGATILDVCKRVRKKTLVGGNHQSGIRGDAKGQVALLSRTNANVFDEAVRVTEGEFPSRIHLIGGIKSFGLDRIIDIWILLQPEEERRKQNLVIKDKFIRRWVHKEGFSGFKRYVTAAEDKELEAKIAVVEKYNIRIPELVQRIEKCHIEDLDFAEYILGTVHKAKGLEFDTVHVLDDFVKVPCARHNLPQLPHFRVESFSEDEWNLLYVAVTRAKKRLIMTKSLENILTLAGEYFLQAELTSNVLKTGVVRCCVGQCNNAIPVDTVLTMKKLPITYSNRKENKGGYLCHSCAEQRIGPLAFLTASPEQVRAMERTVENIVLPRHEALLFLVF

SEQ ID NO: 31245 - protein, 1094 aa, Homo sapiens
  Payload ID: 6135
  Gene Symbol: FBXO18
  Gene Name: F-box protein, helicase, 18
  Uniprot ID: Q8NFZ0
  ENSP ID: ENSP00000369335
MSYEVTSGCHWTCQVPESCDNGLHCAGPLGHLHRRCQRTSAHLLVFTEHAEMRRFKRKHLTAIDCQHLARSHLAVTQPFGQRWTNRDPNHGLYPKPRTKRGSRGQGSQRCIPEFFLAGKQPCTNDMAKSNSVGQDSCQDSEGDMIFPAESSCALPQEGSAGPGSPGSAPPSRKRSWSSEEESNQATGTSRWDGVSKKAPRHHLSVPCTRPREARQEAEDSTSRLSAESGETDQDAGDVGPDPIPDSYYGLLGTLPCQEALSHICSLPSEVLRHVFAFLPVEDLYWNLSLVCHLWREIISDPLFIPWKKLYHRYLMNEEQAVSKVDGILSNCGIEKESDLCVLNLIRYTATTKCSPSVDPERVLWSLRDHPLLPEAEACVRQHLPDLYAAAGGVNIWALVAAVVLLSSSVNDIQRLLFCLRRPSSTVTMPDVTETLYCIAVLLYAMREKGINISNRIHYNIFYCLYLQENSCTQATKVKEEPSVWPGKKTIQLTHEQQLILNHKMEPLQVVKIMAFAGTGKTSTLVKYAEKWSQSRFLYVTFNKSIAKQAERVFPSNVICKTFHSMAYGHIGRKYQSKKKLNLFKLTPFMVNSVLAEGKGGFIRAKLVCKTLENFFASADEELTIDHVPIWCKNSQGQRVMVEQSEKLNGVLEASRLWDNMRKLGECTEEAHQMTHDGYLKLWQLSKPSLASFDAIFVDEAQDCTPAIMNIVLSQPCGKIFVGDPHQQIYTFRGAVNALFTVPHTHVFYLTQSFRFGVEIAYVGATILDVCKRVRKKTLVGGNHQSGIRGDAKGQVALLSRTNANVFDEAVRVTEGEFPSRIHLIGGIKSFGLDRIIDIWILLQPEEERRKQNLVIKDKFIRRWVHKEGFSGFKRYVTAAEDKELEAKIAVVEKYNIRIPELVQRIEKCHIEDLDFAEYILGTVHKAKGLEFDTVHVLDDFVKVPCARHNLPQLPHFRVESFSEDEWNLLYVAVTRAKKRLIMTKSLENILTLAGEYFLQAELTSNVLKTGVVRCCVGQCNNAIPVDTVLTMKKLPITYSNRKENKGGYLCHSCAEQRIGPLAFLTASPEQVRAMERTVENIVLPRHEALLFLVF

SEQ ID NO: 31246 - protein, 986 aa, Homo sapiens
  Payload ID: 6135
  Gene Symbol: FBXO18
  Gene Name: F-box protein, helicase, 18
  ENSP ID: ENSP00000380439
MAKSNSVGQDSCQDSEGDMIFPAESSCALPQEGSAGPGSPGSAPPSRKRSWSSEEESNQATGTSRWDGVSKKAPRHHLSVPCTRPREARQEAEDSTSRLSAESGETDQDAGDVGPDPIPDSYYGLLGTLPCQEALSHICSLPSEVLRHVFAFLPVEDLYWNLSLVCHLWREIISDPLFIPWKKLYHRYLMNEEQAVSKVDGILSNCGIEKESDLCVLNLIRYTATTKCSPSVDPERVLWSLRDHPLLPEAEACVRQHLPDLYAAAGGVNIWALVAAVVLLSSSVNDIQRLLFCLRRPSSTVTMPDVTETLYCIAVLLYAMREKGINISNRIHYNIFYCLYLQENSCTQATKVKEEPSVWPGKKTIQLTHEQQLILNHKMEPLQVVKIMAFAGTGKTSTLVKYAEKWSQSRFLYVTFNKSIAKQAERVFPSNVICKTFHSMAYGHIGRKYQSKKKLNLFKLTPFMVNSVLAEGKGGFIRAKLVCKTLENFFASADEELTIDHVPIWCKNSQGQRVMVEQSEKLNGVLEASRLWDNMRKLGECTEEAHQMTHDGYLKLWQLSKPSLASFDAIFVDEAQDCTPAIMNIVLSQPCGKIFVGDPHQQIYTFRGAVNALFTVPHTHVFYLTQSFRFGVEIAYVGATILDVCKRVRKKTLVGGNHQSGIRGDAKGQVALLSRTNANVFDEAVRVTEGEFPSRIHLIGGIKSFGLDRIIDIWILLQPEEERRKQNLVIKDKFIRRWVHKEGFSGFKRYVTAAEDKELEAKIAVVEKYNIRIPELVQRIEKCHIEDLDFAEMESHHVGQAGLELPTSEYILGTVHKAKGLEFDTVHVLDDFVKVPCARHNLPQLPHFRVESFSEDEWNLLYVAVTRAKKRLIMTKSLENILTLAGEYFLQAELTSNVLKTGVVRCCVGQCNNAIPVDTVLTMKKLPITYSNRKENKGGYLCHSCAEQRIGPLAFLTASPEQVRAMERTVENIVLPRHEALLFLVF

SEQ ID NO: 31247 - protein, 283 aa, Homo sapiens; identical to SEQ ID NO: 31150
  Payload ID: 6136
  Gene Symbol:
  Gene Name: FBXO27
  ENSP ID: ENSP00000489017

SEQ ID NO: 31248 - protein, 133 aa, Homo sapiens; identical to SEQ ID NO: 31154
  Payload ID: 6136
  Gene Symbol:
  Gene Name: FBXO27
  ENSP ID: ENSP00000489321

SEQ ID NO: 31249 - protein, 100 aa, Homo sapiens; identical to SEQ ID NO: 31153
  Payload ID: 6136
  Gene Symbol:
  Gene Name: FBXO27
  ENSP ID: ENSP00000489413
  MOD_RES (1)..(1): Any amino acid

SEQ ID NO: 31250 - protein, 283 aa, Homo sapiens; identical to SEQ ID NO: 31150
  Payload ID: 6136
  Gene Symbol:
  Gene Name: FBXO27
  ENSP ID: ENSP00000489487

SEQ ID NO: 31251 - protein, 282 aa, Homo sapiens; identical to SEQ ID NO: 31152
  Payload ID: 6136
  Gene Symbol:
  Gene Name: FBXO27
  ENSP ID: ENSP00000489600

SEQ ID NO: 31252 - protein, 178 aa, Homo sapiens
  Payload ID: 6137
  Gene Symbol: FCAR
  Gene Name: Fc fragment of IgA receptor
  Uniprot ID: P24071
  ENSP ID: ENSP00000338058
MDPKQTTLLCLGLYGKPFLSADRGLVLMPGENISLTCSSAHIPFDRFSLAKEGELSLPQHQSGEHPANFSLGPVDLNVSGIYRCYGWYNRSPYLWSFPSNALELVVTDSIHQDYTTQNLIRMAVAGLVLVALLAILVENWHSHTALNKEASADVAEPSWSQQMCQPGLTFARTPSVCK

SEQ ID NO: 31253 - protein, 191 aa, Homo sapiens
  Payload ID: 6137
  Gene Symbol: FCAR
  Gene Name: Fc fragment of IgA receptor
  Uniprot ID: P24071
  ENSP ID: ENSP00000338257
MDPKQTTLLCLVLCLGQRIQAQEGDFPMPFISAKSSPVIPLDGSVKIQCQAIREAYLTQLMIIKNSTYREIGRRLKFWNETDPEFVIDHMDANKAGRYQCQYRIGHYRFRYSDTLELVVTDSIHQDYTTQNLIRMAVAGLVLVALLAILVENWHSHTALNKEASADVAEPSWSQQMCQPGLTFARTPSVCK

SEQ ID NO: 31254 - protein, 287 aa, Homo sapiens
  Payload ID: 6137
  Gene Symbol: FCAR
  Gene Name: Fc fragment of IgA receptor
  Uniprot ID: P24071
  ENSP ID: ENSP00000347714
MDPKQTTLLCLVLCLGQRIQAQEGDFPMPFISAKSSPVIPLDGSVKIQCQAIREAYLTQLMIIKNSTYREIGRRLKFWNETDPEFVIDHMDANKAGRYQCQYRIGHYRFRYSDTLELVVTGLYGKPFLSADRGLVLMPGENISLTCSSAHIPFDRFSLAKEGELSLPQHQSGEHPANFSLGPVDLNVSGIYRCYGWYNRSPYLWSFPSNALELVVTDSIHQDYTTQNLIRMAVAGLVLVALLAILVENWHSHTALNKEASADVAEPSWSQQMCQPGLTFARTPSVCK

SEQ ID NO: 31255 - protein, 275 aa, Homo sapiens
  Payload ID: 6137
  Gene Symbol: FCAR
  Gene Name: Fc fragment of IgA receptor
  Uniprot ID: P24071
  ENSP ID: ENSP00000352218
MDPKQTTLLCLGDFPMPFISAKSSPVIPLDGSVKIQCQAIREAYLTQLMIIKNSTYREIGRRLKFWNETDPEFVIDHMDANKAGRYQCQYRIGHYRFRYSDTLELVVTGLYGKPFLSADRGLVLMPGENISLTCSSAHIPFDRFSLAKEGELSLPQHQSGEHPANFSLGPVDLNVSGIYRCYGWYNRSPYLWSFPSNALELVVTDSIHQDYTTQNLIRMAVAGLVLVALLAILVENWHSHTALNKEASADVAEPSWSQQMCQPGLTFARTPSVCK

SEQ ID NO: 31256 - protein, 209 aa, Homo sapiens
  Payload ID: 6137
  Gene Symbol: FCAR
  Gene Name: Fc fragment of IgA receptor
  Uniprot ID: P24071
  ENSP ID: ENSP00000375603
MDPKQTTLLCLGDFPMPFISAKSSPVIPLDGSVKIQCQAIREAYLTQLMIIKNSTYREIGRRLKFWNETDPEFVIDHMDANKAGRYQCQYRIGHYRFRYSDTLELVVTGLYGKPFLSADRGLVLMPGENISLTCSSAHIPFDRFSLAKEGELSLPQHQSGEHPANFSLGPVDLNVSGIYRLHPPRLHDAELDPHGRGRTGPRGSLGHTG

SEQ ID NO: 31257 - protein, 253 aa, Homo sapiens
  Payload ID: 6137
  Gene Symbol: FCAR
  Gene Name: Fc fragment of IgA receptor
  Uniprot ID: P24071
  ENSP ID: ENSP00000375604
MDPKQTTLLCLGDFPMPFISAKSSPVIPLDGSVKIQCQAIREAYLTQLMIIKNSTYREIGRRLKFWNETDPEFVIDHMDANKAGRYQCQYRIGHYRFRYSDTLELVVTGLYGKPFLSADRGLVLMPGENISLTCSSAHIPFDRFSLAKEGELSLPQHQSGEHPANFSLGPVDLNVSGIYRCYDSIHQDYTTQNLIRMAVAGLVLVALLAILVENWHSHTALNKEASADVAEPSWSQQMCQPGLTFARTPSVCK

SEQ ID NO: 31258 - protein, 265 aa, Homo sapiens
  Payload ID: 6137
  Gene Symbol: FCAR
  Gene Name: Fc fragment of IgA receptor
  Uniprot ID: P24071
  ENSP ID: ENSP00000375605
MDPKQTTLLCLVLCLGQRIQAQEGDFPMPFISAKSSPVIPLDGSVKIQCQAIREAYLTQLMIIKNSTYREIGRRLKFWNETDPEFVIDHMDANKAGRYQCQYRIGHYRFRYSDTLELVVTGLYGKPFLSADRGLVLMPGENISLTCSSAHIPFDRFSLAKEGELSLPQHQSGEHPANFSLGPVDLNVSGIYRCYDSIHQDYTTQNLIRMAVAGLVLVALLAILVENWHSHTALNKEASADVAEPSWSQQMCQPGLTFARTPSVCK

SEQ ID NO: 31259 - protein, 179 aa, Homo sapiens
  Payload ID: 6137
  Gene Symbol: FCAR
  Gene Name: Fc fragment of IgA receptor
  Uniprot ID: P24071
  ENSP ID: ENSP00000375606
MDPKQTTLLCLGDFPMPFISAKSSPVIPLDGSVKIQCQAIREAYLTQLMIIKNSTYREIGRRLKFWNETDPEFVIDHMDANKAGRYQCQYRIGHYRFRYSDTLELVVTDSIHQDYTTQNLIRMAVAGLVLVALLAILVENWHSHTALNKEASADVAEPSWSQQMCQPGLTFARTPSVCK

SEQ ID NO: 31260 - protein, 239 aa, Homo sapiens
  Payload ID: 6137
  Gene Symbol: FCAR
  Gene Name: Fc fragment of IgA receptor
  Uniprot ID: P24071
  ENSP ID: ENSP00000473814
MDPKQTTLLCLVLCLGQRIQAQEGDFPMPFISAKSSPVIPLDGSVKIQCQAIREAYLTQLMIIKNSTYREIGRRLKFWNETDPEFVIDHMDANKAGRYQCQYRIGHYRFRYSDTLELVVTGLYGKPFLSADRGLVLMPGENISLTCSSAHIPFDRFSLAKEGELSLPQHQSGEHPANFSLGPVDLNVSGIYRCYGWYNRSPYLWSFPSNALELVVTGRYRPVQPCVWVGCPGPCHRAGI

SEQ ID NO: 31261 - protein, 227 aa, Homo sapiens
  Payload ID: 6137
  Gene Symbol: FCAR
  Gene Name: Fc fragment of IgA receptor
  Uniprot ID: P24071
  ENSP ID: ENSP00000474512
MDPKQTTLLCLGDFPMPFISAKSSPVIPLDGSVKIQCQAIREAYLTQLMIIKNSTYREIGRRLKFWNETDPEFVIDHMDANKAGRYQCQYRIGHYRFRYSDTLELVVTGLYGKPFLSADRGLVLMPGENISLTCSSAHIPFDRFSLAKEGELSLPQHQSGEHPANFSLGPVDLNVSGIYRCYGWYNRSPYLWSFPSNALELVVTGRYRPVQPCVWVGCPGPCHRAGI

SEQ ID NO: 31262 - protein, 227 aa, Homo sapiens; identical to SEQ ID NO: 31261
  Payload ID: 6137
  Gene Symbol: FCAR
  Gene Name: Fc fragment of IgA receptor
  Uniprot ID: P24071
  ENSP ID: ENSP00000477584

SEQ ID NO: 31263 - protein, 209 aa, Homo sapiens; identical to SEQ ID NO: 31256
  Payload ID: 6137
  Gene Symbol: FCAR
  Gene Name: Fc fragment of IgA receptor
  Uniprot ID: P24071
  ENSP ID: ENSP00000477610

SEQ ID NO: 31264 - protein, 209 aa, Homo sapiens; identical to SEQ ID NO: 31256
  Payload ID: 6137
  Gene Symbol: FCAR
  Gene Name: Fc fragment of IgA receptor
  Uniprot ID: P24071
  ENSP ID: ENSP00000477643

SEQ ID NO: 31265 - protein, 275 aa, Homo sapiens; identical to SEQ ID NO: 31255
  Payload ID: 6137
  Gene Symbol: FCAR
  Gene Name: Fc fragment of IgA receptor
  Uniprot ID: P24071
  ENSP ID: ENSP00000477656

SEQ ID NO: 31266 - protein, 178 aa, Homo sapiens; identical to SEQ ID NO: 31252
  Payload ID: 6137
  Gene Symbol: FCAR
  Gene Name: Fc fragment of IgA receptor
  Uniprot ID: P24071
  ENSP ID: ENSP00000477673

SEQ ID NO: 31267 - protein, 265 aa, Homo sapiens; identical to SEQ ID NO: 31258
  Payload ID: 6137
  Gene Symbol: FCAR
  Gene Name: Fc fragment of IgA receptor
  Uniprot ID: P24071
  ENSP ID: ENSP00000477966

SEQ ID NO: 31268 - protein, 287 aa, Homo sapiens
  Payload ID: 6137
  Gene Symbol: FCAR
  Gene Name: Fc fragment of IgA receptor
  ENSP ID: ENSP00000477977
MDPKQTTLLCLVLCLGQRIQAQEGDFPMPFISAKSSPVIPLDGSVKIQCQAIREAYLTQLMIIKNSTYREIGRRLKFWNETDPEFVIDHMDANKAGRYQCQYRIGHYRFRYSNTLELVVTGLYGKPFLSADRGLVLMPGENISLTCSSAHIPFDRFSLAKEGELSLPQHQSGEHPANFSLGPVDLNVSGIYRCYGWYNRSPYLWSFPSNALELVVTDSIHQDYTTQNLIRMAVAGLVLVALLAILVENWHSHTALNKEASADVAEPSWSQQMCQPGLTFARTPSVCK

SEQ ID NO: 31269 - protein, 253 aa, Homo sapiens; identical to SEQ ID NO: 31257
  Payload ID: 6137
  Gene Symbol: FCAR
  Gene Name: Fc fragment of IgA receptor
  Uniprot ID: P24071
  ENSP ID: ENSP00000478075

SEQ ID NO: 31270 - protein, 265 aa, Homo sapiens; identical to SEQ ID NO: 31258
  Payload ID: 6137
  Gene Symbol: FCAR
  Gene Name: Fc fragment of IgA receptor
  Uniprot ID: P24071
  ENSP ID: ENSP00000478163

SEQ ID NO: 31271 - protein, 191 aa, Homo sapiens; identical to SEQ ID NO: 31253
  Payload ID: 6137
  Gene Symbol: FCAR
  Gene Name: Fc fragment of IgA receptor
  Uniprot ID: P24071
  ENSP ID: ENSP00000478233

SEQ ID NO: 31272 - protein, 178 aa, Homo sapiens; identical to SEQ ID NO: 31252
  Payload ID: 6137
  Gene Symbol: FCAR
  Gene Name: Fc fragment of IgA receptor
  Uniprot ID: P24071
  ENSP ID: ENSP00000478315

SEQ ID NO: 31273 - protein, 253 aa, Homo sapiens
  Payload ID: 6137
  Gene Symbol: FCAR
  Gene Name: Fc fragment of IgA receptor
  ENSP ID: ENSP00000478434
MDPKQTTLLCLGDFPMPFISAKSSPVIPLDGSVKIQCQAIREAYLTQLMIIKNSTYREIGRRLKFWNETDPEFVIDHMDANKAGRYQCQYRIGHYRFRYSNTLELVVTGLYGKPFLSADRGLVLMPGENISLTCSSAHIPFDRFSLAKEGELSLPQHQSGEHPANFSLGPVDLNVSGIYRCYDSIHQDYTTQNLIRMAVAGLVLVALLAILVENWHSHTALNKEASADVAEPSWSQQMCQPGLTFARTPSVCK

SEQ ID NO: 31274 - protein, 117 aa, Homo sapiens
  Payload ID: 6137
  Gene Symbol: FCAR
  Gene Name: Fc fragment of IgA receptor
  ENSP ID: ENSP00000478442
MDPKQTTLLCLGDFPMPFISAKSSPVIPLDGSVKIQCQAIREAYLTQLMIIKNSTYREIGRRLKFWNETDPEFVIDHMDANKAGRYQCQYRIGHYRFRYSNTLELVVTDSIHQDYTT

SEQ ID NO: 31275 - protein, 209 aa, Homo sapiens; identical to SEQ ID NO: 31256
  Payload ID: 6137
  Gene Symbol: FCAR
  Gene Name: Fc fragment of IgA receptor
  Uniprot ID: P24071
  ENSP ID: ENSP00000478454

SEQ ID NO: 31276 - protein, 287 aa, Homo sapiens; identical to SEQ ID NO: 31254
  Payload ID: 6137
  Gene Symbol: FCAR
  Gene Name: Fc fragment of IgA receptor
  Uniprot ID: P24071
  ENSP ID: ENSP00000478465

SEQ ID NO: 31277 - protein, 142 aa, Homo sapiens
  Payload ID: 6137
  Gene Symbol: FCAR
  Gene Name: Fc fragment of IgA receptor
  ENSP ID: ENSP00000478574
MDPKQTTLLCLVLCLGQRIQAQEGLYGKPFLSADRGLVLMPGENISLTCSSAHIPFDRFSLAKEGELSLPQHQSGEHPANFSLGPVDLNVSGIYRCYGWYNRSPYLWSFPSNALELVVTGRYRPVQPCVWVGCPGPCHRAGI

SEQ ID NO: 31278 - protein, 227 aa, Homo sapiens; identical to SEQ ID NO: 31261
  Payload ID: 6137
  Gene Symbol: FCAR
  Gene Name: Fc fragment of IgA receptor
  Uniprot ID: P24071
  ENSP ID: ENSP00000478634

SEQ ID NO: 31279 - protein, 227 aa, Homo sapiens; identical to SEQ ID NO: 31261
  Payload ID: 6137
  Gene Symbol: FCAR
  Gene Name: Fc fragment of IgA receptor
  Uniprot ID: P24071
  ENSP ID: ENSP00000479039

SEQ ID NO: 31280 - protein, 253 aa, Homo sapiens; identical to SEQ ID NO: 31257
  Payload ID: 6137
  Gene Symbol: FCAR
  Gene Name: Fc fragment of IgA receptor
  Uniprot ID: P24071
  ENSP ID: ENSP00000479099

SEQ ID NO: 31281 - protein, 239 aa, Homo sapiens; identical to SEQ ID NO: 31260
  Payload ID: 6137
  Gene Symbol: FCAR
  Gene Name: Fc fragment of IgA receptor
  Uniprot ID: P24071
  ENSP ID: ENSP00000479230

SEQ ID NO: 31282 - protein, 191 aa, Homo sapiens; identical to SEQ ID NO: 31253
  Payload ID: 6137
  Gene Symbol: FCAR
  Gene Name: Fc fragment of IgA receptor
  Uniprot ID: P24071
  ENSP ID: ENSP00000479239

SEQ ID NO: 31283 - protein, 209 aa, Homo sapiens; identical to SEQ ID NO: 31256
  Payload ID: 6137
  Gene Symbol: FCAR
  Gene Name: Fc fragment of IgA receptor
  Uniprot ID: P24071
  ENSP ID: ENSP00000479360

SEQ ID NO: 31284 - protein, 239 aa, Homo sapiens; identical to SEQ ID NO: 31260
  Payload ID: 6137
  Gene Symbol: FCAR
  Gene Name: Fc fragment of IgA receptor
  Uniprot ID: P24071
  ENSP ID: ENSP00000479688

SEQ ID NO: 31285 - protein, 287 aa, Homo sapiens; identical to SEQ ID NO: 31254
  Payload ID: 6137
  Gene Symbol: FCAR
  Gene Name: Fc fragment of IgA receptor
  Uniprot ID: P24071
  ENSP ID: ENSP00000479738

SEQ ID NO: 31286 - protein, 209 aa, Homo sapiens; identical to SEQ ID NO: 31256
  Payload ID: 6137
  Gene Symbol: FCAR
  Gene Name: Fc fragment of IgA receptor
  Uniprot ID: P24071
  ENSP ID: ENSP00000479792

SEQ ID NO: 31287 - protein, 265 aa, Homo sapiens; identical to SEQ ID NO: 31258
  Payload ID: 6137
  Gene Symbol: FCAR
  Gene Name: Fc fragment of IgA receptor
  Uniprot ID: P24071
  ENSP ID: ENSP00000479831

SEQ ID NO: 31288 - protein, 239 aa, Homo sapiens; identical to SEQ ID NO: 31260
  Payload ID: 6137
  Gene Symbol: FCAR
  Gene Name: Fc fragment of IgA receptor
  Uniprot ID: P24071
  ENSP ID: ENSP00000479880

SEQ ID NO: 31289 - protein, 179 aa, Homo sapiens; identical to SEQ ID NO: 31259
  Payload ID: 6137
  Gene Symbol: FCAR
  Gene Name: Fc fragment of IgA receptor
  Uniprot ID: P24071
  ENSP ID: ENSP00000479924

SEQ ID NO: 31290 - protein, 227 aa, Homo sapiens; identical to SEQ ID NO: 31261
  Payload ID: 6137
  Gene Symbol: FCAR
  Gene Name: Fc fragment of IgA receptor
  Uniprot ID: P24071
  ENSP ID: ENSP00000480013

SEQ ID NO: 31291 - protein, 227 aa, Homo sapiens; identical to SEQ ID NO: 31261
  Payload ID: 6137
  Gene Symbol: FCAR
  Gene Name: Fc fragment of IgA receptor
  Uniprot ID: P24071
  ENSP ID: ENSP00000480323

SEQ ID NO: 31292 - protein, 178 aa, Homo sapiens; identical to SEQ ID NO: 31252
  Payload ID: 6137
  Gene Symbol: FCAR
  Gene Name: Fc fragment of IgA receptor
  Uniprot ID: P24071
  ENSP ID: ENSP00000480406

SEQ ID NO: 31293 - protein, 253 aa, Homo sapiens; identical to SEQ ID NO: 31257
  Payload ID: 6137
  Gene Symbol: FCAR
  Gene Name: Fc fragment of IgA receptor
  Uniprot ID: P24071
  ENSP ID: ENSP00000480444

SEQ ID NO: 31294 - protein, 227 aa, Homo sapiens; identical to SEQ ID NO: 31261
  Payload ID: 6137
  Gene Symbol: FCAR
  Gene Name: Fc fragment of IgA receptor
  Uniprot ID: P24071
  ENSP ID: ENSP00000480461

SEQ ID NO: 31295 - protein, 275 aa, Homo sapiens; identical to SEQ ID NO: 31255
  Payload ID: 6137
  Gene Symbol: FCAR
  Gene Name: Fc fragment of IgA receptor
  Uniprot ID: P24071
  ENSP ID: ENSP00000480496

SEQ ID NO: 31296 - protein, 191 aa, Homo sapiens; identical to SEQ ID NO: 31253
  Payload ID: 6137
  Gene Symbol: FCAR
  Gene Name: Fc fragment of IgA receptor
  Uniprot ID: P24071
  ENSP ID: ENSP00000480498

SEQ ID NO: 31297 - protein, 265 aa, Homo sapiens; identical to SEQ ID NO: 31258
  Payload ID: 6137
  Gene Symbol: FCAR
  Gene Name: Fc fragment of IgA receptor
  Uniprot ID: P24071
  ENSP ID: ENSP00000480748

SEQ ID NO: 31298 - protein, 191 aa, Homo sapiens; identical to SEQ ID NO: 31253
  Payload ID: 6137
  Gene Symbol: FCAR
  Gene Name: Fc fragment of IgA receptor
  Uniprot ID: P24071
  ENSP ID: ENSP00000480965

SEQ ID NO: 31299 - protein, 179 aa, Homo sapiens; identical to SEQ ID NO: 31259
  Payload ID: 6137
  Gene Symbol: FCAR
  Gene Name: Fc fragment of IgA receptor
  Uniprot ID: P24071
  ENSP ID: ENSP00000480970

SEQ ID NO: 31300 - protein, 191 aa, Homo sapiens; identical to SEQ ID NO: 31253
  Payload ID: 6137
  Gene Symbol: FCAR
  Gene Name: Fc fragment of IgA receptor
  Uniprot ID: P24071
  ENSP ID: ENSP00000481129

SEQ ID NO: 31301 - protein, 287 aa, Homo sapiens; identical to SEQ ID NO: 31254
  Payload ID: 6137
  Gene Symbol: FCAR
  Gene Name: Fc fragment of IgA receptor
  Uniprot ID: P24071
  ENSP ID: ENSP00000481195

SEQ ID NO: 31302 - protein, 253 aa, Homo sapiens; identical to SEQ ID NO: 31257
  Payload ID: 6137
  Gene Symbol: FCAR
  Gene Name: Fc fragment of IgA receptor
  Uniprot ID: P24071
  ENSP ID: ENSP00000481230

SEQ ID NO: 31303 - protein, 275 aa, Homo sapiens; identical to SEQ ID NO: 31255
  Payload ID: 6137
  Gene Symbol: FCAR
  Gene Name: Fc fragment of IgA receptor
  Uniprot ID: P24071
  ENSP ID: ENSP00000481345

SEQ ID NO: 31304 - protein, 227 aa, Homo sapiens; identical to SEQ ID NO: 31261
  Payload ID: 6137
  Gene Symbol: FCAR
  Gene Name: Fc fragment of IgA receptor
  Uniprot ID: P24071
  ENSP ID: ENSP00000481366

SEQ ID NO: 31305 - protein, 275 aa, Homo sapiens
  Payload ID: 6137
  Gene Symbol: FCAR
  Gene Name: Fc fragment of IgA receptor
  ENSP ID: ENSP00000481387
MDPKQTTLLCLGDFPMPFISAKSSPVIPLDGSVKIQCQAIREAYLTQLMIIKNSTYREIGRRLKFWNETDPEFVIDHMDANKAGRYQCQYRIGHYRFRYSNTLELVVTGLYGKPFLSADRGLVLMPGENISLTCSSAHIPFDRFSLAKEGELSLPQHQSGEHPANFSLGPVDLNVSGIYRCYGWYNRSPYLWSFPSNALELVVTDSIHQDYTTQNLIRMAVAGLVLVALLAILVENWHSHTALNKEASADVAEPSWSQQMCQPGLTFARTPSVCK

SEQ ID NO: 31306 - protein, 275 aa, Homo sapiens; identical to SEQ ID NO: 31255
  Payload ID: 6137
  Gene Symbol: FCAR
  Gene Name: Fc fragment of IgA receptor
  Uniprot ID: P24071
  ENSP ID: ENSP00000481394

SEQ ID NO: 31307 - protein, 287 aa, Homo sapiens; identical to SEQ ID NO: 31254
  Payload ID: 6137
  Gene Symbol: FCAR
  Gene Name: Fc fragment of IgA receptor
  Uniprot ID: P24071
  ENSP ID: ENSP00000481502

SEQ ID NO: 31308 - protein, 239 aa, Homo sapiens; identical to SEQ ID NO: 31260
  Payload ID: 6137
  Gene Symbol: FCAR
  Gene Name: Fc fragment of IgA receptor
  Uniprot ID: P24071
  ENSP ID: ENSP00000481560

SEQ ID NO: 31309 - protein, 275 aa, Homo sapiens; identical to SEQ ID NO: 31255
  Payload ID: 6137
  Gene Symbol: FCAR
  Gene Name: Fc fragment of IgA receptor
  Uniprot ID: P24071
  ENSP ID: ENSP00000481668

SEQ ID NO: 31310 - protein, 275 aa, Homo sapiens; identical to SEQ ID NO: 31255
  Payload ID: 6137
  Gene Symbol: FCAR
  Gene Name: Fc fragment of IgA receptor
  Uniprot ID: P24071
  ENSP ID: ENSP00000481676

SEQ ID NO: 31311 - protein, 142 aa, Homo sapiens; identical to SEQ ID NO: 31277
  Payload ID: 6137
  Gene Symbol: FCAR
  Gene Name: Fc fragment of IgA receptor
  ENSP ID: ENSP00000481767

SEQ ID NO: 31312 - protein, 239 aa, Homo sapiens
  Payload ID: 6137
  Gene Symbol: FCAR
  Gene Name: Fc fragment of IgA receptor
  ENSP ID: ENSP00000481983
MDPKQTTLLCLVLCLGQRIQAQEGDFPMPFISAKSSPVIPLDGSVKIQCQAIREAYLTQLMIIKNSTYREIGRRLKFWNETDPEFVIDHMDANKAGRYQCQYRIGHYRFRYSNTLELVVTGLYGKPFLSADRGLVLMPGENISLTCSSAHIPFDRFSLAKEGELSLPQHQSGEHPANFSLGPVDLNVSGIYRCYGWYNRSPYLWSFPSNALELVVTGRYRPVQPCVWVGCPGPCHRAGI

SEQ ID NO: 31313 - protein, 265 aa, Homo sapiens; identical to SEQ ID NO: 31258
  Payload ID: 6137
  Gene Symbol: FCAR
  Gene Name: Fc fragment of IgA receptor
  Uniprot ID: P24071
  ENSP ID: ENSP00000481985

SEQ ID NO: 31314 - protein, 253 aa, Homo sapiens; identical to SEQ ID NO: 31257
  Payload ID: 6137
  Gene Symbol: FCAR
  Gene Name: Fc fragment of IgA receptor
  Uniprot ID: P24071
  ENSP ID: ENSP00000482022

SEQ ID NO: 31315 - protein, 191 aa, Homo sapiens; identical to SEQ ID NO: 31253
  Payload ID: 6137
  Gene Symbol: FCAR
  Gene Name: Fc fragment of IgA receptor
  Uniprot ID: P24071
  ENSP ID: ENSP00000482025

SEQ ID NO: 31316 - protein, 191 aa, Homo sapiens; identical to SEQ ID NO: 31253
  Payload ID: 6137
  Gene Symbol: FCAR
  Gene Name: Fc fragment of IgA receptor
  Uniprot ID: P24071
  ENSP ID: ENSP00000482056

SEQ ID NO: 31317 - protein, 239 aa, Homo sapiens; identical to SEQ ID NO: 31260
  Payload ID: 6137
  Gene Symbol: FCAR
  Gene Name: Fc fragment of IgA receptor
  Uniprot ID: P24071
  ENSP ID: ENSP00000482108

SEQ ID NO: 31318 - protein, 265 aa, Homo sapiens; identical to SEQ ID NO: 31258
  Payload ID: 6137
  Gene Symbol: FCAR
  Gene Name: Fc fragment of IgA receptor
  Uniprot ID: P24071
  ENSP ID: ENSP00000482273

SEQ ID NO: 31319 - protein, 287 aa, Homo sapiens; identical to SEQ ID NO: 31254
  Payload ID: 6137
  Gene Symbol: FCAR
  Gene Name: Fc fragment of IgA receptor
  Uniprot ID: P24071
  ENSP ID: ENSP00000482334

SEQ ID NO: 31320 - protein, 179 aa, Homo sapiens; identical to SEQ ID NO: 31259
  Payload ID: 6137
  Gene Symbol: FCAR
  Gene Name: Fc fragment of IgA receptor
  Uniprot ID: P24071
  ENSP ID: ENSP00000482451

SEQ ID NO: 31321 - protein, 178 aa, Homo sapiens; identical to SEQ ID NO: 31252
  Payload ID: 6137
  Gene Symbol: FCAR
  Gene Name: Fc fragment of IgA receptor
  Uniprot ID: P24071
  ENSP ID: ENSP00000482518

SEQ ID NO: 31322 - protein, 227 aa, Homo sapiens
  Payload ID: 6137
  Gene Symbol: FCAR
  Gene Name: Fc fragment of IgA receptor
  ENSP ID: ENSP00000482539
MDPKQTTLLCLGDFPMPFISAKSSPVIPLDGSVKIQCQAIREAYLTQLMIIKNSTYREIGRRLKFWNETDPEFVIDHMDANKAGRYQCQYRIGHYRFRYSNTLELVVTGLYGKPFLSADRGLVLMPGENISLTCSSAHIPFDRFSLAKEGELSLPQHQSGEHPANFSLGPVDLNVSGIYRCYGWYNRSPYLWSFPSNALELVVTGRYRPVQPCVWVGCPGPCHRAGI

SEQ ID NO: 31323 - protein, 287 aa, Homo sapiens; identical to SEQ ID NO: 31254
  Payload ID: 6137
  Gene Symbol: FCAR
  Gene Name: Fc fragment of IgA receptor
  Uniprot ID: P24071
  ENSP ID: ENSP00000482623

SEQ ID NO: 31324 - protein, 179 aa, Homo sapiens; identical to SEQ ID NO: 31259
  Payload ID: 6137
  Gene Symbol: FCAR
  Gene Name: Fc fragment of IgA receptor
  Uniprot ID: P24071
  ENSP ID: ENSP00000482670

SEQ ID NO: 31325 - protein, 179 aa, Homo sapiens; identical to SEQ ID NO: 31259
  Payload ID: 6137
  Gene Symbol: FCAR
  Gene Name: Fc fragment of IgA receptor
  Uniprot ID: P24071
  ENSP ID: ENSP00000482741

SEQ ID NO: 31326 - protein, 287 aa, Homo sapiens; identical to SEQ ID NO: 31254
  Payload ID: 6137
  Gene Symbol: FCAR
  Gene Name: Fc fragment of IgA receptor
  Uniprot ID: P24071
  ENSP ID: ENSP00000482807

SEQ ID NO: 31327 - protein, 275 aa, Homo sapiens; identical to SEQ ID NO: 31255
  Payload ID: 6137
  Gene Symbol: FCAR
  Gene Name: Fc fragment of IgA receptor
  Uniprot ID: P24071
  ENSP ID: ENSP00000482976

SEQ ID NO: 31328 - protein, 287 aa, Homo sapiens; identical to SEQ ID NO: 31254
  Payload ID: 6137
  Gene Symbol: FCAR
  Gene Name: Fc fragment of IgA receptor
  Uniprot ID: P24071
  ENSP ID: ENSP00000483099

SEQ ID NO: 31329 - protein, 209 aa, Homo sapiens; identical to SEQ ID NO: 31256
  Payload ID: 6137
  Gene Symbol: FCAR
  Gene Name: Fc fragment of IgA receptor
  Uniprot ID: P24071
  ENSP ID: ENSP00000483121

SEQ ID NO: 31330 - protein, 265 aa, Homo sapiens; identical to SEQ ID NO: 31258
  Payload ID: 6137
  Gene Symbol: FCAR
  Gene Name: Fc fragment of IgA receptor
  Uniprot ID: P24071
  ENSP ID: ENSP00000483250

SEQ ID NO: 31331 - protein, 253 aa, Homo sapiens; identical to SEQ ID NO: 31257
  Payload ID: 6137
  Gene Symbol: FCAR
  Gene Name: Fc fragment of IgA receptor
  Uniprot ID: P24071
  ENSP ID: ENSP00000483258

SEQ ID NO: 31332 - protein, 178 aa, Homo sapiens; identical to SEQ ID NO: 31252
  Payload ID: 6137
  Gene Symbol: FCAR
  Gene Name: Fc fragment of IgA receptor
  Uniprot ID: P24071
  ENSP ID: ENSP00000483327

SEQ ID NO: 31333 - protein, 191 aa, Homo sapiens; identical to SEQ ID NO: 31253
  Payload ID: 6137
  Gene Symbol: FCAR
  Gene Name: Fc fragment of IgA receptor
  Uniprot ID: P24071
  ENSP ID: ENSP00000483402

SEQ ID NO: 31334 - protein, 239 aa, Homo sapiens; identical to SEQ ID NO: 31260
  Payload ID: 6137
  Gene Symbol: FCAR
  Gene Name: Fc fragment of IgA receptor
  Uniprot ID: P24071
  ENSP ID: ENSP00000483437

SEQ ID NO: 31335 - protein, 179 aa, Homo sapiens; identical to SEQ ID NO: 31259
  Payload ID: 6137
  Gene Symbol: FCAR
  Gene Name: Fc fragment of IgA receptor
  Uniprot ID: P24071
  ENSP ID: ENSP00000483472

SEQ ID NO: 31336 - protein, 209 aa, Homo sapiens; identical to SEQ ID NO: 31256
  Payload ID: 6137
  Gene Symbol: FCAR
  Gene Name: Fc fragment of IgA receptor
  Uniprot ID: P24071
  ENSP ID: ENSP00000483503

SEQ ID NO: 31337 - protein, 239 aa, Homo sapiens; identical to SEQ ID NO: 31260
  Payload ID: 6137
  Gene Symbol: FCAR
  Gene Name: Fc fragment of IgA receptor
  Uniprot ID: P24071
  ENSP ID: ENSP00000483841

SEQ ID NO: 31338 - protein, 191 aa, Homo sapiens
  Payload ID: 6137
  Gene Symbol: FCAR
  Gene Name: Fc fragment of IgA receptor
  ENSP ID: ENSP00000484050
MDPKQTTLLCLVLCLGQRIQAQEGDFPMPFISAKSSPVIPLDGSVKIQCQAIREAYLTQLMIIKNSTYREIGRRLKFWNETDPEFVIDHMDANKAGRYQCQYRIGHYRFRYSNTLELVVTDSIHQDYTTQNLIRMAVAGLVLVALLAILVENWHSHTALNKEASADVAEPSWSQQMCQPGLTFARTPSVCK

SEQ ID NO: 31339 - protein, 227 aa, Homo sapiens; identical to SEQ ID NO: 31261
  Payload ID: 6137
  Gene Symbol: FCAR
  Gene Name: Fc fragment of IgA receptor
  Uniprot ID: P24071
  ENSP ID: ENSP00000484136

SEQ ID NO: 31340 - protein, 178 aa, Homo sapiens; identical to SEQ ID NO: 31252
  Payload ID: 6137
  Gene Symbol: FCAR
  Gene Name: Fc fragment of IgA receptor
  Uniprot ID: P24071
  ENSP ID: ENSP00000484141

SEQ ID NO: 31341 - protein, 178 aa, Homo sapiens; identical to SEQ ID NO: 31252
  Payload ID: 6137
  Gene Symbol: FCAR
  Gene Name: Fc fragment of IgA receptor
  Uniprot ID: P24071
  ENSP ID: ENSP00000484272

SEQ ID NO: 31342 - protein, 265 aa, Homo sapiens; identical to SEQ ID NO: 31258
  Payload ID: 6137
  Gene Symbol: FCAR
  Gene Name: Fc fragment of IgA receptor
  Uniprot ID: P24071
  ENSP ID: ENSP00000484276

SEQ ID NO: 31343 - protein, 253 aa, Homo sapiens; identical to SEQ ID NO: 31257
  Payload ID: 6137
  Gene Symbol: FCAR
  Gene Name: Fc fragment of IgA receptor
  Uniprot ID: P24071
  ENSP ID: ENSP00000484483

SEQ ID NO: 31344 - protein, 117 aa, Homo sapiens
  Payload ID: 6137
  Gene Symbol: FCAR
  Gene Name: Fc fragment of IgA receptor
  ENSP ID: ENSP00000484589
MDPKQTTLLCLGDFPMPFISAKSSPVIPLDGSVKIQCQAIREAYLTQLMIIKNSTYREIGRRLKFWNETDPEFVIDHMDANKAGRYQCQYRIGHYRFRYSDTLELVVTDSIHQDYTT

SEQ ID NO: 31345 - protein, 265 aa, Homo sapiens
  Payload ID: 6137
  Gene Symbol: FCAR
  Gene Name: Fc fragment of IgA receptor
  ENSP ID: ENSP00000484613
MDPKQTTLLCLVLCLGQRIQAQEGDFPMPFISAKSSPVIPLDGSVKIQCQAIREAYLTQLMIIKNSTYREIGRRLKFWNETDPEFVIDHMDANKAGRYQCQYRIGHYRFRYSNTLELVVTGLYGKPFLSADRGLVLMPGENISLTCSSAHIPFDRFSLAKEGELSLPQHQSGEHPANFSLGPVDLNVSGIYRCYDSIHQDYTTQNLIRMAVAGLVLVALLAILVENWHSHTALNKEASADVAEPSWSQQMCQPGLTFARTPSVCK

SEQ ID NO: 31346 - protein, 179 aa, Homo sapiens; identical to SEQ ID NO: 31259
  Payload ID: 6137
  Gene Symbol: FCAR
  Gene Name: Fc fragment of IgA receptor
  Uniprot ID: P24071
  ENSP ID: ENSP00000484662

SEQ ID NO: 31347 - protein, 178 aa, Homo sapiens; identical to SEQ ID NO: 31252
  Payload ID: 6137
  Gene Symbol: FCAR
  Gene Name: Fc fragment of IgA receptor
  Uniprot ID: P24071
  ENSP ID: ENSP00000484741

SEQ ID NO: 31348 - protein, 275 aa, Homo sapiens; identical to SEQ ID NO: 31255
  Payload ID: 6137
  Gene Symbol: FCAR
  Gene Name: Fc fragment of IgA receptor
  Uniprot ID: P24071
  ENSP ID: ENSP00000484816

SEQ ID NO: 31349 - protein, 239 aa, Homo sapiens; identical to SEQ ID NO: 31260
  Payload ID: 6137
  Gene Symbol: FCAR
  Gene Name: Fc fragment of IgA receptor
  Uniprot ID: P24071
  ENSP ID: ENSP00000484868

SEQ ID NO: 31350 - protein, 178 aa, Homo sapiens; identical to SEQ ID NO: 31252
  Payload ID: 6137
  Gene Symbol: FCAR
  Gene Name: Fc fragment of IgA receptor
  Uniprot ID: P24071
  ENSP ID: ENSP00000484906

SEQ ID NO: 31351 - protein, 253 aa, Homo sapiens; identical to SEQ ID NO: 31257
  Payload ID: 6137
  Gene Symbol: FCAR
  Gene Name: Fc fragment of IgA receptor
  Uniprot ID: P24071
  ENSP ID: ENSP00000484917

SEQ ID NO: 31352 - protein, 224 aa, Homo sapiens
  Payload ID: 6138
  Gene Symbol: FCER1A
  Gene Name: Fc fragment of IgE, high affinity I, receptor for
  alpha polypeptide
  ENSP ID: ENSP00000357096
MAPAMESPTLLCVALLFFAPDGVLAVSSTKWFHNGSLSEETNSSLNIVNAKFEDSGEYKCQHQQVNESEPVYLEVFSDWLLLQASAEVVMEGQPLFLRCHGWRNWDVYKVIYYKDGEALKYWYENHNISITNATVEDSGTYYCTGKVWQLDYESEPLNITVIKAPREKYWLQFFIPLLVVILFAVDTGLFISTQQQVTFLLKIKRTRKGFRLLNPHPKPNPKNN

SEQ ID NO: 31353 - protein, 257 aa, Homo sapiens
  Payload ID: 6138
  Gene Symbol: FCER1A
  Gene Name: Fc fragment of IgE, high affinity I, receptor for
  alpha polypeptide
  Uniprot ID: P12319
  ENSP ID: ENSP00000357097
MAPAMESPTLLCVALLFFAPDGVLAVPQKPKVSLNPPWNRIFKGENVTLTCNGNNFFEVSSTKWFHNGSLSEETNSSLNIVNAKFEDSGEYKCQHQQVNESEPVYLEVFSDWLLLQASAEVVMEGQPLFLRCHGWRNWDVYKVIYYKDGEALKYWYENHNISITNATVEDSGTYYCTGKVWQLDYESEPLNITVIKAPREKYWLQFFIPLLVVILFAVDTGLFISTQQQVTFLLKIKRTRKGFRLLNPHPKPNPKNN

SEQ ID NO: 31354 - protein, 86 aa, Homo sapiens
  Payload ID: 6139
  Gene Symbol: FCER1G
  Gene Name: Fc fragment of IgE, high affinity I, receptor for
  gamma polypeptide
  Uniprot ID: P30273
  ENSP ID: ENSP00000289902
MIPAVVLLLLLLVEQAAALGEPQLCYILDAILFLYGIVLTLLYCRLKIQVRKAAITSYEKSDGVYTGLSTRNQETYETLKHEKPPQ

SEQ ID NO: 31355 - protein, 112 aa, Homo sapiens
  Payload ID: 6139
  Gene Symbol: FCER1G
  Gene Name: Fc fragment of IgE, high affinity I, receptor for
  gamma polypeptide
  ENSP ID: ENSP00000356971
MIPAVVLLLLLLVEQAAALGEPQLCYILDAILFLYGIVLTLLYCRLKIQVRKAAITSYEKSDGVYTMESPSITRLECSGMIWAHCNLCLLGSRDSRASPSRVAKTTGTTMPS

SEQ ID NO: 31356 - protein, 321 aa, Homo sapiens
  Payload ID: 6140
  Gene Symbol: FCER2
  Gene Name: Fc fragment of IgE, low affinity II, receptor for (CD23)
  Uniprot ID: P06734
  ENSP ID: ENSP00000264072
MEEGQYSEIEELPRRRCCRRGTQIVLLGLVTAALWAGLLTLLLLWHWDTTQSLKQLEERAARNVSQVSKNLESHHGDQMAQKSQSTQISQELEELRAEQQRLKSQDLELSWNLNGLQADLSSFKSQELNERNEASDLLERLREEVTKLRMELQVSSGFVCNTCPEKWINFQRKCYYFGKGTKQWVHARYACDDMEGQLVSIHSPEEQDFLTKHASHTGSWIGLRNLDLKGEFIWVDGSHVDYSNWAPGEPTSRSQGEDCVMMRGSGRWNDAFCDRKLGAWVCDRLATCTPPASEGSAESMGPDSRPDPDGRLPTPSAPLHS

SEQ ID NO: 31357 - protein, 320 aa, Homo sapiens
  Payload ID: 6140
  Gene Symbol: FCER2
  Gene Name: Fc fragment of IgE, low affinity II, receptor for (CD23)
  ENSP ID: ENSP00000353178
MNPPSQEIEELPRRRCCRRGTQIVLLGLVTAALWAGLLTLLLLWHWDTTQSLKQLEERAARNVSQVSKNLESHHGDQMAQKSQSTQISQELEELRAEQQRLKSQDLELSWNLNGLQADLSSFKSQELNERNEASDLLERLREEVTKLRMELQVSSGFVCNTCPEKWINFQRKCYYFGKGTKQWVHARYACDDMEGQLVSIHSPEEQDFLTKHASHTGSWIGLRNLDLKGEFIWVDGSHVDYSNWAPGEPTSRSQGEDCVMMRGSGRWNDAFCDRKLGAWVCDRLATCTPPASEGSAESMGPDSRPDPDGRLPTPSAPLHS

SEQ ID NO: 31358 - protein, 321 aa, Homo sapiens; identical to SEQ ID NO: 31356
  Payload ID: 6140
  Gene Symbol: FCER2
  Gene Name: Fc fragment of IgE, low affinity II, receptor for (CD23)
  Uniprot ID: P06734
  ENSP ID: ENSP00000471974

SEQ ID NO: 31359 - protein, 159 aa, Homo sapiens
  Payload ID: 6140
  Gene Symbol: FCER2
  Gene Name: Fc fragment of IgE, low affinity II, receptor for (CD23)
  ENSP ID: ENSP00000472067
MEEGQYSEIEELPRRRCCRRGTQIVLLGLVTAALWAGLLTLLLLWHWDTTQSLKQLEERAARNVSQVSKNLESHHGDQMAQKSQSTQISQELEELRAEQQRLKSQELNERNEASDLLERLREEVTKLRMELQVSSGFVCNTCPEKWINFQRKCYYFGKG

SEQ ID NO: 31360 - protein, 1642 aa, Homo sapiens
  Payload ID: 6141
  Gene Symbol: FCGBP
  Gene Name: Fc fragment of IgG binding protein
  ENSP ID: ENSP00000479036
CPPHSHYEACSYGCPLSCGDLPVPEGCESACREGCVCDAGFVLSGDTCVPVGQCGCLHDDRYYPLGQTFYPGPGCDSLCRCREGGEVSCEPSSCGPHETCRPSGGSLGCVAVGSTTCQASGDPHYTTFDGHRFDFMGTCVYVLAQTCGTRPGLHRFAVLQENVAWGNGRVSVTRVITVQVANFTLRLEQRQWKVTVNGVDMKLPVVLANGQIRASQHGSDVVIETDFGLRVAYDLVYYVRVTVPGNYYQLMCGLCGNYNGDPKDDFQKPNGSQAGNANEFGNSWEEVVSDSPCLPPPTCPPGSEGCIPSEECPPELEKKYQKEEFCGLLSSPTGPLSSCHKLVDPQGPLKDCIFDLCLGGGNLSILCSNIHAYVSACQVAGGHVEPWRNETFCPMECPQNSHYELCADTCSLGCSALSAPLQCPDGCAEGCQCDSGFLYNGQACVPIQQCGCYHNGAYYEPEQTVLIDNCRQQCTCHAGKVVVCQEHSCKPGQVCQPSGGILSCVTKDPCHGVTCRPQETCKEQGGQGVCLPNYEATCWLWGDPHYHSFDGRKFDFQGTCNYVLATTGCPGVSTQGLTPFTVTTKNQNRGNPAVSYVRVVTVAALGTNISIHKDEIGKVRVNGVLTALPVSVADGRISVTQGASKALLVADFGLQVSYDWNWRVDVTLPSSYHGAVCGLCGNMDRNPNNDQVFPNGTLAPSIPIWGGSWRAPGWDPLCWDECRGSCPTCPEDRLEQYEGPGFCGPLAPGTGGPFTTCHAHVPPESFFKGCVLDVCMGGGDRDILCKALASYVAACQAAGVVIEDWRAQVGCEITCPENSHYEVCGPPCPASCPSPAPLTTPAVCEGPCVEGCQCDAGFVLSADRCVPLNNGCGCWANGTYHEAGSEFWADGTCSQWCRCGPGGGSLVCTPASCGLGEVCGLLPSGQHGCQPVSTAECQAWGDPHYVTLDGHRFDFQGTCEYLLSAPCHGPPLGAENFTVTVANEHRGSQAVSYTRSVTLQIYNHSLTLSARWPRKLQVDGVFVTLPFQLDSLLHAHLSGADVVVTTTSGLSLAFDGDSFVRLRVPAAYAGSLCGLCGNYNQDPADDLKAVGGKPAGWQVGGAQGCGECVSKPCPSPCTPEQQESFGGPDACGVISATDGPLAPCHGLVPPAQYFQGCLLDACQVQGHPGGLCPAVATYVAACQAAGAQLREWRRPDFCPFQCPAHSHYELCGDSCPGSCPSLSAPEGCESACREGCVCDAGFVLSGDTCVPVGQCGCLHDDRYYPLGQTFYPGPGCDSLCRCREGGEVSCEPSSCGPHETCRPSGGSLGCVAVGSTTCQASGDPHYTTFDGHRFDFMGTCVYVLAQTCGTRPGLHRFAVLQENVAWGNGRVSVTRVITVQVANFTLRLEQRQWKVTVNGVDMKLPVVLANGQIRASQHGSDVVIETDFGLRVAYDLVYYVRVTVPGNYYQLMCGLCGNYNGDPKDDFQKPNGSQAGNANEFGNSWEEVVPDSPCLPPPTCPPGSAGCIPSDKCPPELEKKYQKEEFCGLLSSPTGPLSSCHKLVDPQGPLKDCIFDLCLGGGNLSILCSNIHAYVSACQAAGGHVEPWRNETFCPMECPQNSHYELCADTCSLGCSALSAPLQCPDGCAEGCQCDSGFLYNG

SEQ ID NO: 31361 - protein, 4204 aa, Homo sapiens
  Payload ID: 6141
  Gene Symbol: FCGBP
  Gene Name: Fc fragment of IgG binding protein
  ENSP ID: ENSP00000481056
MGALWSWWILWAGATLLWGLTQEASVDLKNTGREEFLTAFLQNYQLAYSKAYPRLLISSLSESPASVSILSQADNTSKKVTVRPGESVMVNISAKAEMIGSKIFQHAVVIHSDYAISVQALNAKPDTAELTLLRPIQALGTEYFVLTPPGTSARNVKEFAVVAGAAGASVSVTLKGSVTFNGKFYPAGDVLRVTLQPYNVAQLQSSVDLSGSKVTASSPVAVLSGHSCAQKHTTCNHVVEQLLPTSAWGTHYVVPTLASQSRYDLAFVVASQATKLTYNHGGITGSRGLQAGDVVEFEVRPSWPLYLSANVGIQVLLFGTGAIRNEVTYDPYLVLIPDVAAYCPAYVVKSVPGCEGVALVVAQTKAISGLTIDGHAVGAKLTWEAVPGSEFSYAEVELGTADMIHTAEATTNLGLLTFGLAKAIGYATAADCGRTVLSPVEPSCEGMQCAAGQRCQVVGGKAGCVAESTAVCRAQGDPHYTTFDGRRYDMMGTCSYTMVELCSEDDTLPAFSVEAKNEHRGSRRVSYVGLVTVRAYSHSVSLTRGEVGFVLVDNQRSRLPVSLSEGRLRVYQSGPRAVVELVFGLVVTYDWDCQLALSLPARFQDQVCGLCGNYNGDPADDFLTPDGALAPDAVEFASSWKLDDGDYLCEDGCQNNCPACTPGQAQHYEGDRLCGMLTKLDGPFAVCHDTLDPRPFLEQCVYDLCVVGGERLSLCRGLSAYAQACLELGISVGDWRSPANCPLSCPANSRYELCGPACPTSCNGAAAPSNCSGRPCVEGCVCLPGFVASGGACVPASSCGCTFQGLQLAPGQEVWADELCQRRCTCNGATHQVTCRDKQSCPAGERCSVQNGLLGCYPDRFGTCQGSGDPHYVSFDGRRFDFMGTCTYLLVGSCGQNAALPAFRVLVENEHRGSQTVSYTRAVRVEARGVKVAVRREYPGQVLVDDVLQYLPFQAADGQVQVFRQGRDAVVRTDFGLTVTYDWNARVTAKVPSSYAEALCGLCGNFNGDPADDLALRGGGQAANALAFGNSWQEETRPGCGATEPGDCPKLDSLVAQQLQSKNECGILADPKGPFRECHSKLDPQGAVRDCVYDRCLLPGQSGPLCDALATYAAACQAAGATVHPWRSEELCPLSCPPHSHYEACSYGCPLSCGDLPVPEGCESACREGCVCDAGFVLSGDTCVPVGQCGCLHDDRYYPLGQTFYPGPGCDSLCRCREGGEVSCEPSSCGPHETCRPSGGSLGCVAVGSTTCQASGDPHYTTFDGHRFDFMGTCVYVLAQTCGTRPGLHRFAVLQENVAWGNGRVSVTRVITVQVANFTLRLEQRQWKVTVNGVDMKLPVVLANGQIRASQHGSDVVIETDFGLRVAYDLVYYVRVTVPGNYYQLMCGLCGNYNGDPKDDFQKPNGSQAGNANEFGNSWEEVVSDSPCLPPPTCPPGSEGCIPSEECPPELEKKYQKEEFCGLLSSPTGPLSSCHKLVDPQGPLKDCIFDLCLGGGNLSILCSNIHAYVSACQVAGGHVEPWRNETFCPMECPQNSHYELCADTCSLGCSALSAPLQCPDGCAEGCQCDSGFLYNGQACVPIQQCGCYHNGAYYEPEQTVLIDNCRQQCTCHAGKVVVCQEHSCKPGQVCQPSGGILSCVTKDPCHGVTCRPQETCKEQGGQGVCLPNYEATCWLWGDPHYHSFDGRKFDFQGTCNYVLATTGCPGVSTQGLTPFTVTTKNQNRGNPAVSYVRVVTVAALGTNISIHKDEIGKVRVNGVLTALPVSVADGRISVTQGASKALLVADFGLQVSYDWNWRVDVTLPSSYHGAVCGLCGNMDRNPNNDQVFPNGTLAPSIPIWGGSWRAPGWDPLCWDECRGSCPTCPEDRLEQYEGPGFCGPLAPGTGGPFTTCHAHVPPESFFKGCVLDVCMGGGDRDILCKALASYVAACQAAGVVIEDWRAQVGCEITCPENSHYEVCGPPCPASCPSPAPLTTPAVCEGPCVEGCQCDAGFVLSADRCVPLNNGCGCWANGTYHEAGSEFWADGTCSQWCRCGPGGGSLVCTPASCGLGEVCGLLPSGQHGCQPVSTAECQAWGDPHYVTLDGHRFDFQGTCEYLLSAPCHGPPLGAENFTVTVANEHRGSQAVSYTRSVTLQIYNHSLTLSARWPRKLQVDGVFVTLPFQLDSLLHAHLSGADVVVTTTSGLSLAFDGDSFVRLRVPAAYAGSLCGLCGNYNQDPADDLKAVGGKPAGWQVGGAQGCGECVSKPCPSPCTPEQQESFGGPDACGVISATDGPLAPCHGLVPPAQYFQGCLLDACQVQGHPGGLCPAVATYVAACQAAGAQLREWRRPDFCPFQCPAHSHYELCGDSCPGSCPSLSAPEGCESACREGCVCDAGFVLSGDTCVPVGQCGCLHDDRYYPLGQTFYPGPGCDSLCRCREGGEVSCEPSSCGPHETCRPSGGSLGCVAVGSTTCQASGDPHYTTFDGHRFDFMGTCVYVLAQTCGTRPGLHRFAVLQENVAWGNGRVSVTRVITVQVANFTLRLEQRQWKVTVNGVDMKLPVVLANGQIRASQHGSDVVIETDFGLRVAYDLVYYVRVTVPGNYYQLMCGLCGNYNGDPKDDFQKPNGSQAGNANEFGNSWEEVVPDSPCLPPPTCPPGSAGCIPSDKCPPELEKKYQKEEFCGLLSSPTGPLSSCHKLVDPQGPLKDCIFDLCLGGGNLSILCSNIHAYVSACQAAGGHVEPWRNETFCPMECPQNSHYELCADTCSLGCSALSAPLQCPDGCAEGCQCDSGFLYNGQACVPIQQCGCYHNGVYYEPEQTVLIDNCRQQCTCHVGKVVVCQEHSCKPGQVCQPSGGILSCVTKDPCHGVTCRPQETCKEQGGQGVCLPNYEATCWLWGDPHYHSFDGRKFDFQGTCNYVLATTGCPGVSTQGLTPFTVTTKNQNRGNPAVSYVRVVTVAALGTNISIHKDEIGKVRVNGVLTALPVSVADGRISVAQGASKALLVADFGLQVSYDWNWRVDVTLPSSYHGAVCGLCGNMDRNPNNDQVFPNGTLAPSIPIWGGSWRAPGWDPLCWDECRGSCPTCPEDRLEQYEGPGFCGPLSSGTGGPFTTCHAHVPPESFFKGCVLDVCMGGGDRDILCKALASYVAACQAAGVVIEDWRAQVGCEITCPENSHYEVCGPPCPASCPSPAPLTTPAVCEGPCVEGCQCDAGFVLSADRCVPLNNGCGCWANGTYHEAGSEFWADGTCSQWCRCGPGGGSLVCTPASCGLGEVCGLLPSGQHGCQPVSTAECQAWGDPHYVTLDGHRFDFQGTCEYLLSAPCHGPPLGAENFTVTVANEHRGSQAVSYTRSVTLQIYNHSLTLSARWPRKLQVDGVFVALPFQLDSLLHAHLSGADVVVTTTSGLSLAFDGDSFVRLRVPAAYAASLCGLCGNYNQDPADDLKAVGGKPAGWQVGGAQGCGECVSKPCPSPCTPEQQESFGGPDACGVISATDGPLAPCHGLVPPAQYFQGCLLDACQVQGHPGGLCPAVATYVAACQAAGAQLGEWRRPDFCPLQCPAHSHYELCGDSCPVSCPSLSAPEGCESACREGCVCDAGFVLSGDTCVPVGQCGCLHDGRYYPLGEVFYPGPECERRCECGPGGHVTCQEGAACGPHEECRLEDGVQACHATGCGRCLANGGIHYITLDGRVYDLHGSCSYVLAQVCHPKPGDEDFSIVLEKNAAGDLQRLLVTVAGQVVSLAQGQQVTVDGEAVALPVAVGRVRVTAEGRNMVLQTTKGLRLLFDGDAHLLMSIPSPFRGRLCGLCGNFNGNWSDDFVLPNGSAASSVETFGAAWRAPGSSKGCGEGCGPQGCPVCLAEETAPYESNEACGQLRNPQGPFATCQAVLSPSEYFRQCVYDLCAQKGDKAFLCRSLAAYTAACQAAGVAVKPWRTDSFCPLHCPAHSHYSICTRTCQGSCAALSGLTGCTTRCFEGCECDDRFLLSQGVCIPVQDCGCTHNGRYLPVNSSLLTSDCSERCSCSSSSGLTCQAAGCPPGRVCEVKAEARNCWATRGLCVLSVGANLTTFDGARGATTSPGVYELSSRCPGLQNTIPWYRVVAEVQICHGKTEAVGQVHIFFQDGMVTLTPNKGVWVNGLRVDLPAEKLASVSVSRTPDGSLLVRQKAGVQVWLGANGKVAVIVSNDHAGKLCGACGNFDGDQTNDWHDSQEKPAMEKWRAQDFSPCYG

SEQ ID NO: 31362 - protein, 374 aa, Homo sapiens
  Payload ID: 6142
  Gene Symbol: FCGR1A
  Gene Name: Fc fragment of IgG, high affinity Ia, receptor (CD64)
  Uniprot ID: P12314
  ENSP ID: ENSP00000358165
MWFLTTLLLWVPVDGQVDTTKAVITLQPPWVSVFQEETVTLHCEVLHLPGSSSTQWFLNGTATQTSTPSYRITSASVNDSGEYRCQRGLSGRSDPIQLEIHRGWLLLQVSSRVFTEGEPLALRCHAWKDKLVYNVLYYRNGKAFKFFHWNSNLTILKTNISHNGTYHCSGMGKHRYTSAGISVTVKELFPAPVLNASVTSPLLEGNLVTLSCETKLLLQRPGLQLYFSFYMGSKTLRGRNTSSEYQILTARREDSGLYWCEAATEDGNVLKRSPELELQVLGLQLPTPVWFHVLFYLAVGIMFLVNTVLWVTIRKELKRKKKWDLEISLDSGHEKKVISSLQEDRHLEEELKCQEQKEEQLQEGVHRKEPQGAT

SEQ ID NO: 31363 - protein, 240 aa, Homo sapiens
  Payload ID: 6142
  Gene Symbol: FCGR1A
  Gene Name: Fc fragment of IgG, high affinity Ia, receptor (CD64)
  ENSP ID: ENSP00000394279
MWFLTTLLLWGWLLLQVSSRVFTEGEPLALRCHAWKDKLVYNVLYYRNGKAFKFFHWNSNLTILKTNISHNGTYHCSGMGKHRYTSAGISVTVKELFPAPVLNASVTSPLLEGNLVTLSCETKLLLQRPGLQLYFSFYMGSKTLRGRNTSSEYQILTARREDSGLYWCEAATEDGNVLKRSPELELQVLGLQLPTPVWFHVLFYLAVGIMFLVNTVLWVTIRKELKRKKKWDLEISLDSG

SEQ ID NO: 31364 - protein, 188 aa, Homo sapiens
  Payload ID: 6143
  Gene Symbol: FCGR1B
  Gene Name: Fc fragment of IgG, high affinity Ib, receptor (CD64)
  Uniprot ID: Q92637
  ENSP ID: ENSP00000358390
MWFLTTLLLWGWLLLQVSSRVFMEGEPLALRCHAWKDKLVYNVLYYRNGKAFKFFHWNSNLTILKTNISHNGTYHCSGMGKHRYTSAGISQYTVKGLQLPTPVWFHVLFYLAVGIMFLVNTVLWVTIRKELKRKKKWNLEISLDSGHEKKVISSLQEDRHLEEELKCQEQKEEQLQEGVHRKEPQGAT

SEQ ID NO: 31365 - protein, 280 aa, Homo sapiens
  Payload ID: 6143
  Gene Symbol: FCGR1B
  Gene Name: Fc fragment of IgG, high affinity Ib, receptor (CD64)
  ENSP ID: ENSP00000358391
MWFLTTLLLWVPVDGQVDTTKAVITLQPPWVSVFQEETITLHCEVLHLPGSSSTQWFLNGTATQTSTPSYRITSASVNDSGEYRCQRGLSGRSDPIQLEIHRGWLLLQVSSRVFMEGEPLALRCHAWKDKLVYNVLYYRNGKAFKFFHWNSNLTILKTNISHNGTYHCSGMGKHRYTSAGISQYTVKGLQLPTPVWFHVLFYLAVGIMFLVNTVLWVTIRKELKRKKKWNLEISLDSGHEKKVISSLQEDRHLEEELKCQEQKEEQLQEGVHRKEPQGAT

SEQ ID NO: 31366 - protein, 225 aa, Homo sapiens
  Payload ID: 6143
  Gene Symbol: FCGR1B
  Gene Name: Fc fragment of IgG, high affinity Ib, receptor (CD64)
  ENSP ID: ENSP00000478655
MWFLTTLLLWVPVDGQVVDTTKAVITLQPPWVSVFQEETITLHCEVLHLPGSSSTQWFLNGTATQTSTPSYRITSASVNDSGEYRCQRGLSGRSDPIQLEIHRGWLLLQVSSRVFMEGEPLALRCHAWKDKLVYNVLYYRNGKAFKFFHWNSNLTILKTNISHNGTYHCSGMGKHRYTSAGISQYTVKELFPAPVLNASVTSPLLEGNLVTLSCETKLLLQRPGL

SEQ ID NO: 31367 - protein, 224 aa, Homo sapiens
  Payload ID: 6143
  Gene Symbol: FCGR1B
  Gene Name: Fc fragment of IgG, high affinity Ib, receptor (CD64)
  ENSP ID: ENSP00000479641
MWFLTTLLLWVPVDGQVDTTKAVITLQPPWVSVFQEETITLHCEVLHLPGSSSTQWFLNGTATQTSTPSYRITSASVNDSGEYRCQRGLSGRSDPIQLEIHRGWLLLQVSSRVFMEGEPLALRCHAWKDKLVYNVLYYRNGKAFKFFHWNSNLTILKTNISHNGTYHCSGMGKHRYTSAGISQYTVKELFPAPVLNASVTSPLLEGNLVTLSCETKLLLQRPGL

SEQ ID NO: 31368 - protein, 249 aa, Homo sapiens
  Payload ID: 6143
  Gene Symbol: FCGR1B
  Gene Name: Fc fragment of IgG, high affinity Ib, receptor (CD64)
  ENSP ID: ENSP00000481411
MGKWPPWVSVFQEETITLHCEVLHLPGSSSTQWFLNGTATQTSTPSYRITSASVNDSGEYRCQRGLSGRSDPIQLEIHRGWLLLQVSSRVFMEGEPLALRCHAWKDKLVYNVLYYRNGKAFKFFHWNSNLTILKTNISHNGTYHCSGMGKHRYTSAGISQYTVKGLQLPTPVWFHVLFYLAVGIMFLVNTVLWVTIRKELKRKKKWNLEISLDSGHEKKVISSLQEDRHLEEELKCQEQKEEQLQEGVH

SEQ ID NO: 31369 - protein, 224 aa, Homo sapiens; identical to SEQ ID NO: 31367
  Payload ID: 6143
  Gene Symbol: FCGR1B
  Gene Name: Fc fragment of IgG, high affinity Ib, receptor (CD64)
  ENSP ID: ENSP00000485498

SEQ ID NO: 31370 - protein, 317 aa, Homo sapiens
  Payload ID: 6144
  Gene Symbol: FCGR2A
  Gene Name: Fc fragment of IgG, low affinity IIa, receptor (CD32)
  Uniprot ID: P12318
  ENSP ID: ENSP00000271450
MTMETQMSQNVCPRNLWLLQPLTVLLLLASADSQAAAPPKAVLKLEPPWINVLQEDSVTLTCQGARSPESDSIQWFHNGNLIPTHTQPSYRFKANNNDSGEYTCQTGQTSLSDPVHLTVLSEWLVLQTPHLEFQEGETIMLRCHSWKDKPLVKVTFFQNGKSQKFSHLDPTFSIPQANHSHSGDYHCTGNIGYTLFSSKPVTITVQVPSMGSSSPMGIIVAVVIATAVAAIVAAVVALIYCRKKRISANSTDPVKAAQFEPPGRQMIAIRKRQLEETNNDYETADGGYMTLNPRAPTDDDKNIYLTLPPNDHVNSNN

SEQ ID NO: 31371 - protein, 316 aa, Homo sapiens
  Payload ID: 6144
  Gene Symbol: FCGR2A
  Gene Name: Fc fragment of IgG, low affinity IIa, receptor (CD32)
  Uniprot ID: P12318
  ENSP ID: ENSP00000356949
MTMETQMSQNVCPRNLWLLQPLTVLLLLASADSQAAPPKAVLKLEPPWINVLQEDSVTLTCQGARSPESDSIQWFHNGNLIPTHTQPSYRFKANNNDSGEYTCQTGQTSLSDPVHLTVLSEWLVLQTPHLEFQEGETIMLRCHSWKDKPLVKVTFFQNGKSQKFSHLDPTFSIPQANHSHSGDYHCTGNIGYTLFSSKPVTITVQVPSMGSSSPMGIIVAVVIATAVAAIVAAVVALIYCRKKRISANSTDPVKAAQFEPPGRQMIAIRKRQLEETNNDYETADGGYMTLNPRAPTDDDKNIYLTLPPNDHVNSNN

SEQ ID NO: 31372 - protein, 136 aa, Homo sapiens
  Payload ID: 6144
  Gene Symbol: FCGR2A
  Gene Name: Fc fragment of IgG, low affinity IIa, receptor (CD32)
  ENSP ID: ENSP00000440148
MTMETQMSQNVCPRNLWLLQPLTVLLLLASADSQAAPPKAVLKLEPPWINVLQEDSVTLTCQGARSPESDSIQWFHNGNLIPTHTQPSYRFKANNNDSGEYTCQTGQTSLSDPVHLTVLSGQWRKAPGWTWEGQDG

SEQ ID NO: 31373 - protein, 137 aa, Homo sapiens
  Payload ID: 6144
  Gene Symbol: FCGR2A
  Gene Name: Fc fragment of IgG, low affinity IIa, receptor (CD32)
  ENSP ID: ENSP00000441156
MTMETQMSQNVCPRNLWLLQPLTVLLLLASADSQAAAPPKAVLKLEPPWINVLQEDSVTLTCQGARSPESDSIQWFHNGNLIPTHTQPSYRFKANNNDSGEYTCQTGQTSLSDPVHLTVLSGQWRKAPGWTWEGQDG

SEQ ID NO: 31374 - protein, 86 aa, Homo sapiens
  Payload ID: 6144
  Gene Symbol: FCGR2A
  Gene Name: Fc fragment of IgG, low affinity IIa, receptor (CD32)
  ENSP ID: ENSP00000476411
  MOD_RES (1)..(1): Any amino acid
XSTDPVKAAQFEPPGRQMIAIRKRQLEETNNDYETADGGYMTLNPRAPTDDDKNIYLTLPPNDHVNMQLPEGCDLLREVIPGRLET

SEQ ID NO: 31375 - protein, 190 aa, Homo sapiens
  Payload ID: 6144
  Gene Symbol: FCGR2A
  Gene Name: Fc fragment of IgG, low affinity IIa, receptor (CD32)
  ENSP ID: ENSP00000476495
AAPPKAVLKLEPPWINVLQEDSVTLTCQGARSPESDSIQWFHNGNLIPTHTQPSYRFKANNNDSGEYTCQTGQTSLSDPVHLTVLSEWLVLQTPHLEFQEGETIMLRCHSWKDKPLVKVTFFQNGKSQKFSHLDPTFSIPQANHSHSGDYHCTGNIGYTLFSSKPVTITVQAWAALHQWGSLWLWSLRLL

SEQ ID NO: 31376 - protein, 291 aa, Homo sapiens
  Payload ID: 6145
  Gene Symbol: FCGR2B
  Gene Name: Fc fragment of IgG, low affinity IIb, receptor (CD32)
  Uniprot ID: P31994
  ENSP ID: ENSP00000236937
MGILSFLPVLATESDWADCKSPQPWGHMLLWTAVLFLAPVAGTPAAPPKAVLKLEPQWINVLQEDSVTLTCRGTHSPESDSIQWFHNGNLIPTHTQPSYRFKANNNDSGEYTCQTGQTSLSDPVHLTVLSEWLVLQTPHLEFQEGETIVLRCHSWKDKPLVKVTFFQNGKSKKFSRSDPNFSIPQANHSHSGDYHCTGNIGYTLYSSKPVTITVQAPSSSPMGIIVAVVTGIAVAAIVAAVVALIYCRKKRISANPTNPDEADKVGAENTITYSLLMHPDALEEPDDQNRI

SEQ ID NO: 31377 - protein, 310 aa, Homo sapiens
  Payload ID: 6145
  Gene Symbol: FCGR2B
  Gene Name: Fc fragment of IgG, low affinity IIb, receptor (CD32)
  Uniprot ID: P31994
  ENSP ID: ENSP00000351497
MGILSFLPVLATESDWADCKSPQPWGHMLLWTAVLFLAPVAGTPAAPPKAVLKLEPQWINVLQEDSVTLTCRGTHSPESDSIQWFHNGNLIPTHTQPSYRFKANNNDSGEYTCQTGQTSLSDPVHLTVLSEWLVLQTPHLEFQEGETIVLRCHSWKDKPLVKVTFFQNGKSKKFSRSDPNFSIPQANHSHSGDYHCTGNIGYTLYSSKPVTITVQAPSSSPMGIIVAVVTGIAVAAIVAAVVALIYCRKKRISALPGYPECREMGETLPEKPANPTNPDEADKVGAENTITYSLLMHPDALEEPDDQNRI

SEQ ID NO: 31378 - protein, 303 aa, Homo sapiens
  Payload ID: 6145
  Gene Symbol: FCGR2B
  Gene Name: Fc fragment of IgG, low affinity IIb, receptor (CD32)
  Uniprot ID: P31994
  ENSP ID: ENSP00000356938
MGILSFLPVLATESDWADCKSPQPWGHMLLWTAVLFLAAPPKAVLKLEPQWINVLQEDSVTLTCRGTHSPESDSIQWFHNGNLIPTHTQPSYRFKANNNDSGEYTCQTGQTSLSDPVHLTVLSEWLVLQTPHLEFQEGETIVLRCHSWKDKPLVKVTFFQNGKSKKFSRSDPNFSIPQANHSHSGDYHCTGNIGYTLYSSKPVTITVQAPSSSPMGIIVAVVTGIAVAAIVAAVVALIYCRKKRISALPGYPECREMGETLPEKPANPTNPDEADKVGAENTITYSLLMHPDALEEPDDQNRI

SEQ ID NO: 31379 - protein, 310 aa, Homo sapiens; identical to SEQ ID NO: 31377
  Payload ID: 6145
  Gene Symbol: FCGR2B
  Gene Name: Fc fragment of IgG, low affinity IIb, receptor (CD32)
  Uniprot ID: P31994
  ENSP ID: ENSP00000404329

SEQ ID NO: 31380 - protein, 322 aa, Homo sapiens
  Payload ID: 6146
  Gene Symbol: FCGR2C
  Gene Name: Fc fragment of IgG, low affinity IIc, receptor for (CD32) (gene/pseudogene)
  ENSP ID: ENSP00000426627
MGILSFLPVLATESDWADCKSPQPWGHMLLWTAVLFLAPVAGTPAAPPKAVLKLEPWINVLQEDSVTLTCRGTHSPESDSIPWFHNGNLIPTHTQPSYRFKANNNDSGEYTCQTGQTSLSDPVHLTVLSEWLVLQTPHLEFQEGETIVLRCHSWKDKPLVKVTFFQNGKSKKFSRSDPNFSIPQANHSHSGDYHCTGNIGYTLYSSKPVTITVQAPSSSPMGIIVAVVTGIAVAAIVAAVVALIYCRKKRISANSTDPVKAAQFEPPGRQMIAIRKRQPEETNNDYETADGGYMTLNPRAPTDDDKNIYLTLPPNDHVNSNN

SEQ ID NO: 31381 - protein, 322 aa, Homo sapiens; identical to SEQ ID NO: 31380
  Payload ID: 6146
  Gene Symbol: FCGR2C
  Gene Name: Fc fragment of IgG, low affinity IIc, receptor for (CD32) (gene/pseudogene)
  ENSP ID: ENSP00000444663

SEQ ID NO: 31382 - protein, 266 aa, Homo sapiens
  Payload ID: 6146
  Gene Symbol: FCGR2C
  Gene Name: Fc fragment of IgG, low affinity IIc, receptor for (CD32) (gene/pseudogene)
  ENSP ID: ENSP00000480953
MGILSFLPVLATESDWADCKSPQPWGHMLLWTAVLFLAPVAGTPAAPPKAVLKLEPWINVLQEDSVTLTCRGTHSPESDSIPWFHNGNLIPTHTQPSYRFKANNNDSGEYTCQTGQTSLSDPVHLTVLSEWLVLQTPHLEFQEGETIVLRCHSWKDKPLVKVTFFQNGKSKKFSRSDPNFSIPQANHSHSGDYHCTGNIGYTLYSSKPVTITVQAPSSSPMGIIVAVVTGIAVAAIVAAVVALIYCRKKRISATWTSNDCHQKETT

SEQ ID NO: 31383 - protein, 254 aa, Homo sapiens
  Payload ID: 6147
  Gene Symbol: FCGR3A
  Gene Name: Fc fragment of IgG, low affinity IIIa, receptor (CD16a)
  Uniprot ID: P08637
  ENSP ID: ENSP00000356944
MWQLLLPTALLLLVSAGMRTEDLPKAVVFLEPQWYRVLEKDSVTLKCQGAYSPEDNSTQWFHNESLISSQASSYFIDAATVDDSGEYRCQTNLSTLSDPVQLEVHIGWLLLQAPRWVFKEEDPIHLRCHSWKNTALHKVTYLQNGKGRKYFHHNSDFYIPKATLKDSGSYFCRGLFGSKNVSSETVNITITQGLAVSTISSFFPPGYQVSFCLVMVLLFAVDTGLYFSVKTNIRSSTRDWKDHKFKWRKDPQDK

SEQ ID NO: 31384 - protein, 290 aa, Homo sapiens
  Payload ID: 6147
  Gene Symbol: FCGR3A
  Gene Name: Fc fragment of IgG, low affinity IIIa, receptor (CD16a)
  ENSP ID: ENSP00000356946
MGGGAGERLFTSSCLVGLVPLGLRISLVTCPLQCGIMWQLLLPTALLLLVSAGMRTEDLPKAVVFLEPQWYRVLEKDSVTLKCQGAYSPEDNSTQWFHNESLISSQASSYFIDAATVDDSGEYRCQTNLSTLSDPVQLEVHIGWLLLQAPRWVFKEEDPIHLRCHSWKNTALHKVTYLQNGKGRKYFHHNSDFYIPKATLKDSGSYFCRGLFGSKNVSSETVNITITQGLAVSTISSFFPPGYQVSFCLVMVLLFAVDTGLYFSVKTNIRSSTRDWKDHKFKWRKDPQDK

SEQ ID NO: 31385 - protein, 254 aa, Homo sapiens; identical to SEQ ID NO: 31383
  Payload ID: 6147
  Gene Symbol: FCGR3A
  Gene Name: Fc fragment of IgG, low affinity IIIa, receptor (CD16a)
  Uniprot ID: P08637
  ENSP ID: ENSP00000392047

SEQ ID NO: 31386 - protein, 105 aa, Homo sapiens
  Payload ID: 6147
  Gene Symbol: FCGR3A
  Gene Name: Fc fragment of IgG, low affinity IIIa, receptor (CD16a)
  ENSP ID: ENSP00000396567
MWQLLLPTALLLLVSAGMRTDLPKAVVFLEPQWYRVLEKDSVTLKCQGAYSPEDNSTQWFHNESLISSQASSYFIDAATVDDSGEYRCQTNLSTLSDPVQLEVHI

SEQ ID NO: 31387 - protein, 271 aa, Homo sapiens
  Payload ID: 6147
  Gene Symbol: FCGR3A
  Gene Name: Fc fragment of IgG, low affinity IIIa, receptor (CD16a)
  ENSP ID: ENSP00000410180
  MOD_RES (1)..(1): Any amino acid
XPLGLRISLVTCPLQCGIMWQLLLPTALLLLVSAGMRTDLPKAVVFLEPQWYRVLEKDSVTLKCQGAYSPEDNSTQWFHNESLISSQASSYFIDAATVDDSGEYRCQTNLSTLSDPVQLEVHIGWLLLQAPRWVFKEEDPIHLRCHSWKNTALHKVTYLQNGKGRKYFHHNSDFYIPKATLKDSGSYFCRGLFGSKNVSSETVNITITQGLAVSTISSFFPPGYQVSFCLVMVLLFAVDTGLYFSVKTNIRSSTRDWKDHKFKWRKDPQDK

SEQ ID NO: 31388 - protein, 254 aa, Homo sapiens; identical to SEQ ID NO: 31383
  Payload ID: 6147
  Gene Symbol: FCGR3A
  Gene Name: Fc fragment of IgG, low affinity IIIa, receptor (CD16a)
  Uniprot ID: P08637
  ENSP ID: ENSP00000416607

SEQ ID NO: 31389 - protein, 233 aa, Homo sapiens
  Payload ID: 6148
  Gene Symbol: FCGR3B
  Gene Name: Fc fragment of IgG, low affinity IIIb, receptor (CD16b)
  Uniprot ID: O75015
  ENSP ID: ENSP00000294800
MWQLLLPTALLLLVSAGMRTEDLPKAVVFLEPQWYSVLEKDSVTLKCQGAYSPEDNSTQWFHNENLISSQASSYFIDAATVNDSGEYRCQTNLSTLSDPVQLEVHIGWLLLQAPRWVFKEEDPIHLRCHSWKNTALHKVTYLQNGKDRKYFHHNSDFHIPKATLKDSGSYFCRGLVGSKNVSSETVNITITQGLAVSTISSFSPPGYQVSFCLVMVLLFAVDTGLYFSVKTNI

SEQ ID NO: 31390 - protein, 233 aa, Homo sapiens; identical to SEQ ID NO: 31389
  Payload ID: 6148
  Gene Symbol: FCGR3B
  Gene Name: Fc fragment of IgG, low affinity IIIb, receptor (CD16b)
  Uniprot ID: O75015
  ENSP ID: ENSP00000356941

SEQ ID NO: 31391 - protein, 254 aa, Homo sapiens
  Payload ID: 6148
  Gene Symbol: FCGR3B
  Gene Name: Fc fragment of IgG, low affinity IIIb, receptor (CD16b)
  ENSP ID: ENSP00000394204
  MOD_RES (1)..(1): Any amino acid
XVGLVPLGLRISLVTCPLQCGIMWQLLLPTALLLLVSAGMRTDLPKAVVFLEPQWYSVLEKDSVTLKCQGAYSPEDNSTQWFHNENLISSQASSYFIDAATVNDSGEYRCQTNLSTLSDPVQLEVHIGWLLLQAPRWVFKEEDPIHLRCHSWKNTALHKVTYLQNGKDRKYFHHNSDFHIPKATLKDSGSYFCRGLVGSKNVSSETVNITITQGLAVSTISSFSPPGYQVSFCLVMVLLFAVDTGLYFSVKTNI

SEQ ID NO: 31392 - protein, 269 aa, Homo sapiens
  Payload ID: 6148
  Gene Symbol: FCGR3B
  Gene Name: Fc fragment of IgG, low affinity IIIb, receptor (CD16b)
  ENSP ID: ENSP00000433642
MGGGTGERLFTPSCLVGLVPLGLRISLVTCPLQCGIMWQLLLPTALLLLVSAGMRTEDLPKAVVFLEPQWYSVLEKDSVTLKCQGAYSPEDNSTQWFHNENLISSQASSYFIDAATVNDSGEYRCQTNLSTLSDPVQLEVHIGWLLLQAPRWVFKEEDPIHLRCHSWKNTALHKVTYLQNGKDRKYFHHNSDFHIPKATLKDSGSYFCRGLVGSKNVSSETVNITITQGLAVSTISSFSPPGYQVSFCLVMVLLFAVDTGLYFSVKTNI

SEQ ID NO: 31393 - protein, 104 aa, Homo sapiens
  Payload ID: 6148
  Gene Symbol: FCGR3B
  Gene Name: Fc fragment of IgG, low affinity IIIb, receptor (CD16b)
  ENSP ID: ENSP00000437084
MRTEDLPKAVVFLEPQWYSVLEKDSVTLKCQGAYSPEDNSTQWFHNENLISSQASSYFIDAATVNDSGEYRCQTNLSTLSDPVQLEVHIGWLLLQAPRWVFKEE

SEQ ID NO: 31394 - protein, 130 aa, Homo sapiens
  Payload ID: 6148
  Gene Symbol: FCGR3B
  Gene Name: Fc fragment of IgG, low affinity IIIb, receptor (CD16b)
  ENSP ID: ENSP00000478466
MRTEDLPKAVVFLEPQWYSVLEKDSVTLKCQGAYSPEDNSTQWFHNENLISSQASSYFIDAATVNDSGEYRCQTNLSTLSDPVQLEVHIGLAVSTISSFSPPGYQVSFCLVMVLLFAVDTGLYFSVKTNI

SEQ ID NO: 31395 - protein, 216 aa, Homo sapiens
  Payload ID: 6148
  Gene Symbol: FCGR3B
  Gene Name: Fc fragment of IgG, low affinity IIIb, receptor (CD16b)
  ENSP ID: ENSP00000482838
MRTEDLPKAVVFLEPQWYSVLEKDSVTLKCQGAYSPEDNSTQWFHNENLISSQASSYFIDAATVNDSGEYRCQTNLSTLSDPVQLEVHIGWLLLQAPRWVFKEEDPIHLRCHSWKNTALHKVTYLQNGKDRKYFHHNSDFHIPKATLKDSGSYFCRGLVGSKNVSSETVNITITQGLAVSTISSFSPPGYQVSFCLVMVLLFAVDTGLYFSVKTNI

SEQ ID NO: 31396 - protein, 365 aa, Homo sapiens
  Payload ID: 6149
  Gene Symbol: FCGRT
  Gene Name: Fc fragment of IgG, receptor, transporter, alpha
  Uniprot ID: P55899
  ENSP ID: ENSP00000221466
MGVPRPQPWALGLLLFLLPGSLGAESHLSLLYHLTAVSSPAPGTPAFWVSGWLGPQQYLSYNSLRGEAEPCGAWVWENQVSWYWEKETTDLRIKEKLFLEAFKALGGKGPYTLQGLLGCELGPDNTSVPTAKFALNGEEFMNFDLKQGTWGGDWPEALAISQRWQQQDKAANKELTFLLFSCPHRLREHLERGRGNLEWKEPPSMRLKARPSSPGFSVLTCSAFSFYPPELQLRFLRNGLAAGTGQGDFGPNSDGSFHASSSLTVKSGDEHHYCCIVQHAGLAQPLRVELESPAKSSVLVVGIVIGVLLLTAAAVGGALLWRRMRSGLPAPWISLRGDDTGVLLPTPGEAQDADLKDVNVIPATA

SEQ ID NO: 31397 - protein, 365 aa, Homo sapiens; identical to SEQ ID NO: 31396
  Payload ID: 6149
  Gene Symbol: FCGRT
  Gene Name: Fc fragment of IgG, receptor, transporter, alpha
  Uniprot ID: P55899
  ENSP ID: ENSP00000410798

SEQ ID NO: 31398 - protein, 167 aa, Homo sapiens
  Payload ID: 6149
  Gene Symbol: FCGRT
  Gene Name: Fc fragment of IgG, receptor, transporter, alpha
  ENSP ID: ENSP00000469933
MGVPRPQPWALGLLLFLLPGSLGAESHLSLLYHLTAVSSPAPGTPAFWVSGWLGPQQYLSYNSLRGEAEPCGAWVWENQVSWYWEKETTDLRIKEKLFLEAFKALGGKGPYTLQGLLGCELGPDNTSVPTAKFALNGEEFMNFDLKQGTWGGDWPEALAISQRWQQQ

SEQ ID NO: 31399 - protein, 225 aa, Homo sapiens
  Payload ID: 6149
  Gene Symbol: FCGRT
  Gene Name: Fc fragment of IgG, receptor, transporter, alpha
  ENSP ID: ENSP00000469968
MGVPRPQPWALGLLLFLLPGSLGAESHLSLLYHLTAVSSPAPGTPAFWVSGWLGPQQYLSYNSLRGEAEPCGAWVWENQVSWYWEKETTDLRIKEKLFLEAFKALGGKGPYTLQGLLGCELGPDNTSVPTAKFALNGEEFMNFDLKQGTWGGDWPEALAISQRWQQQDKAANKELTFLLFSCPHRLREHLERGRGNLEWKDTVSHYVAQAGLELLGSSDSPALVS

SEQ ID NO: 31400 - protein, 273 aa, Homo sapiens
  Payload ID: 6149
  Gene Symbol: FCGRT
  Gene Name: Fc fragment of IgG, receptor, transporter, alpha
  ENSP ID: ENSP00000471118
MGVPRPQPWALGLLLFLLPGSLGAESHLSLLYHLTAVSSPAPGTPAFWVSGWLGPQQYLSYNSLRGEAEPCGAWVWENQVSWYWEKETTDLRIKEKLFLEAFKALGGKEPPSMRLKARPSSPGFSVLTCSAFSFYPPELQLRFLRNGLAAGTGQGDFGPNSDGSFHASSSLTVKSGDEHHYCCIVQHAGLAQPLRVELESPAKSSVLVVGIVIGVLLLTAAAVGGALLWRRMRSGLPAPWISLRGDDTGVLLPTPGEAQDADLKDVNVIPATA

SEQ ID NO: 31401 - protein, 153 aa, Homo sapiens
  Payload ID: 6149
  Gene Symbol: FCGRT
  Gene Name: Fc fragment of IgG, receptor, transporter, alpha
  ENSP ID: ENSP00000471232
WEKETTDLRIKEKLFLEAFKALGGKGPYTLQGLLGCELGPDNTSVPTAKFALNGEEFMNFDLKQGTWGGDWPEALAISQRWQQQDKAANKELTFLLFSCPHRLREHLERGRGNLEWKAPWISLRGDDTGVLLPTPGEAQDADLKDVNVIPATA

SEQ ID NO: 31402 - protein, 99 aa, Homo sapiens
  Payload ID: 6149
  Gene Symbol: FCGRT
  Gene Name: Fc fragment of IgG, receptor, transporter, alpha
  ENSP ID: ENSP00000471300
MGVPRPQPWALGLLLFLLPGSLGAESPAKSSVLVVGIVIGVLLLTAAAVGGALLWRRMRSGLPAPWISLRGDDTGVLLPTPGEAQDADLKDVNVIPATA

SEQ ID NO: 31403 - protein, 189 aa, Homo sapiens
  Payload ID: 6149
  Gene Symbol: FCGRT
  Gene Name: Fc fragment of IgG, receptor, transporter, alpha
  ENSP ID: ENSP00000472256
  MOD_RES (1)..(1): Any amino acid
XSSPAPGTPAFWVSGWLGPQQYLSYNSLRGEAEPCGAWVWENQVSWYWEKETTDLRIKEKLFLEAFKALGGKGPYTLQGLLGCELGPDNTSVPTAKFALNGEEFMNFDLKQGTWGGDWPEALAISQRWQQQDKAANKELTFLLFSCPHRLREHLERGRGNLEWKAPSPSTLRSCNFGSCGMGWPLAPAR

SEQ ID NO: 31404 - protein, 141 aa, Homo sapiens
  Payload ID: 6149
  Gene Symbol: FCGRT
  Gene Name: Fc fragment of IgG, receptor, transporter, alpha
  ENSP ID: ENSP00000472350
MGVPRPQPWALGLLLFLLPGSLGAESHLSLLYHLTAVSSPAPGTPAFWVSGWLGPQQYLSYNSLRGEAEPCGAWVWENQVSWYWEKETTDLRIKEKLFLEAFKALGGKGPYTLQGLLGCELGPDNTSVPTAKFALNGEEFM

SEQ ID NO: 31405 - protein, 211 aa, Homo sapiens
  Payload ID: 6149
  Gene Symbol: FCGRT
  Gene Name: Fc fragment of IgG, receptor, transporter, alpha
  ENSP ID: ENSP00000472604
GVPRPQPWALGLLLFLLPGSLGAESHLSLLYHLTAVSSPAPGTPAFWVSGWLGPQQYLSYNSLRGEAEPCGAWVWENQVSWYWEKETTDLRIKEKLFLEAFKALGGKGPYTLQGLLGCELGPDNTSVPTAKFALNGEEFMNFDLKQGTWGGDWPEALAISQRWQQQDKAANKELTFLLFSCPHRLREHLERGRGNLEWKEPKARQIFCAWI

SEQ ID NO: 31406 - protein, 38 aa, Homo sapiens
  Payload ID: 6149
  Gene Symbol: FCGRT
  Gene Name: Fc fragment of IgG, receptor, transporter, alpha
  ENSP ID: ENSP00000472794
MNFDLKQGTWGGDWPEALAISQRWQQQDKAANKELTFL

SEQ ID NO: 31407 - protein, 390 aa, Homo sapiens
  Payload ID: 6150
  Gene Symbol: FCMR
  Gene Name: Fc fragment of IgM receptor
  Uniprot ID: O60667
  ENSP ID: ENSP00000356058
MDFWLWPLYFLPVSGALRILPEVKVEGELGGSVTIKCPLPEMHVRIYLCREMAGSGTCGTVVSTTNFIKAEYKGRVTLKQYPRKNLFLVEVTQLTESDSGVYACGAGMNTDRGKTQKVTLNVHSEYEPSWEEQPMPETPKWFHLPYLFQMPAYASSSKFVTRVTTPAQRGKVPPVHHSSPTTQITHRPRVSRASSVAGDKPRTFLPSTTASKISALEGLLKPQTPSYNHHTRLHRQRALDYGSQSGREGQGFHILIPTILGLFLLALLGLVVKRAVERRKALSRRARRLAVRMRALESSQRPRGSPRPRSQNNIYSACPRRARGADAAGTGEAPVPGPGAPLPPAPLQVSESPWLHAPSLKTSCEYVSLYHQPAAMMEDSDSDDYINVPA

SEQ ID NO: 31408 - protein, 278 aa, Homo sapiens
  Payload ID: 6150
  Gene Symbol: FCMR
  Gene Name: Fc fragment of IgM receptor
  Uniprot ID: O60667
  ENSP ID: ENSP00000404136
MDFWLWPLYFLPEYEPSWEEQPMPETPKWFHLPYLFQMPAYASSSKFVTRVTTPAQRGKVPPVHHSSPTTQITHRPRVSRASSVAGDKPRTFLPSTTASKISALEGLLKPQTPSYNHHTRLHRQRALDYGSQSGREGQGFHILIPTILGLFLLALLGLVVKRAVERRKALSRRARRLAVRMRALESSQRPRGSPRPRSQNNIYSACPRRARGADAAGTGEAPVPGPGAPLPPAPLQVSESPWLHAPSLKTSCEYVSLYHQPAAMMEDSDSDDYINVPA

SEQ ID NO: 31409 - protein, 151 aa, Homo sapiens
  Payload ID: 6150
  Gene Symbol: FCMR
  Gene Name: Fc fragment of IgM receptor
  ENSP ID: ENSP00000432936
MDFWLWPLYFLPVSGALRILPEVKVEGELGGSVTIKCPLPEMHVRIYLCREMAGSGTCGTVVSTTNFIKAEYKGRVTLKQYPRKNLFLVEVTQLTESDSGVYACGAGMNTDRGKTQKVTLNVHSEYEPSWEEQPMPETPKWFHLPYLFQMP

SEQ ID NO: 31410 - protein, 141 aa, Homo sapiens
  Payload ID: 6150
  Gene Symbol: FCMR
  Gene Name: Fc fragment of IgM receptor
  ENSP ID: ENSP00000436316
MDFWLWPLYFLPEMESCCVAQDGLELVALSDPPGSASQSAGITVSGALRILPEVKVEGELGGSVTIKCPLPEMHVRIYLCREMAGSGTCGTVVSTTNFIKAEYKGRVTLKQYPRKNLFLVEVTQLTESDSGVYACGAGMNT

SEQ ID NO: 31411 - protein, 125 aa, Homo sapiens
  Payload ID: 6150
  Gene Symbol: FCMR
  Gene Name: Fc fragment of IgM receptor
  ENSP ID: ENSP00000436799
MDFWLWPLYFLPVSGALRILPEVKVEGELGGSVTIKCPLPEMHVRIYLCREMAGSGTCGTVVSTTNFIKAEYKGRVTLKQYPRKNLFLVENTSHHGKSSQCLRLQNGFICPICSRCLHMPVLPNS

SEQ ID NO: 31412 - protein, 147 aa, Homo sapiens
  Payload ID: 6150
  Gene Symbol: FCMR
  Gene Name: Fc fragment of IgM receptor
  ENSP ID: ENSP00000437331
MDFWLWPLYFLPVSGALRILPEVKVEGELGGSVTIKCPLPEMHVRIYLCREMAGSGTCGTVVSTTNFIKAEYKGRVTLKQYPRKNLFLVEVTQLTESDSGVYACGAGMNTDRGKTQKVTLNVHSEYEPSWEEQPMPETPKWFHLPYL

SEQ ID NO: 31413 - protein, 306 aa, Homo sapiens
  Payload ID: 6150
  Gene Symbol: FCMR
  Gene Name: Fc fragment of IgM receptor
  Uniprot ID: O60667
  ENSP ID: ENSP00000485739
MDFWLWPLYFLPVSGALRILPEVKVEGELGGSVTIKCPLPEMHVRIYLCREMAGSGTCGTVVSTTNFIKAEYKGRVTLKQYPRKNLFLVEVTQLTESDSGVYACGAGMNTDRGKTQKVTLNVHSEYEPSWEEQPMPETPKWFHLPYLFQMPAYASSSKFVTRVTTPAQRGKVPPVHHSSPTTQITHRPRVSRASSVAGDKPRTFLPSTTASKISALEGLLKPQTPSYNHHTRLHRQSPLQAGPPTGREDARPGELPEAPRVAATALPKQHLQRLPAARSWSGRCRHRGGPRSRPRSAVAPRPAAGV

SEQ ID NO: 31414 - protein, 577 aa, Homo sapiens
  Payload ID: 6151
  Gene Symbol: FCAMR
  Gene Name: Fc receptor, IgA, IgM, high affinity
  ENSP ID: ENSP00000316491
MDGEATVKPGEQKEVVRRGREVDYSRLIAGTLPQSHVTSRRAGWKMPLFLILCLLQGSSFALPQKRPHPRWLWEGSLPSRTHLRAMGTLRPSSPLCWREESSFAAPNSLKGSRLVSGEPGGAVTIQCHYAPSSVNRHQRKYWCRLGPPRWICQTIVSTNQYTHHRYRDRVALTDFPQRGLFVVRLSQLSPDDIGCYLCGIGSENNMLFLSMNLTISAGPASTLPTATPAAGELTMRSYGTASPVANRWTPGTTQTLGQGTAWDTVASTPGTSKTTASAEGRRTPGATRPAAPGTGSWAEGSVKAPAPIPESPPSKSRSMSNTTEGVWEGTRSSVTNRARASKDRREMTTTKADRPREDIEGVRIALDAAKKVLGTIGPPALVSETLAWEILPQATPVSKQQSQGSIGETTPAAGMWTLGTPAADVWILGTPAADVWTSMEAASGEGSAAGDLDAATGDRGPQATLSQTPAVGPWGPPGKESSVKRTFPEDESSSRTLAPVSTMLALFMLMALVLLQRKLWRRRTSQEAERVTLIQMTHFLEVNPQADQLPHVERKMLQDDSLPAGASLTAPERNPGP

SEQ ID NO: 31415 - protein, 50 aa, Homo sapiens
  Payload ID: 6151
  Gene Symbol: FCAMR
  Gene Name: Fc receptor, IgA, IgM, high affinity
  ENSP ID: ENSP00000317155
MDGEATVKPGEQKPPIKADNSLETFYLILLLPHCPTEPAFLPEAQRLLHR

SEQ ID NO: 31416 - protein, 265 aa, Homo sapiens
  Payload ID: 6151
  Gene Symbol: FCAMR
  Gene Name: Fc receptor, IgA, IgM, high affinity
  Uniprot ID: Q8WWV6
  ENSP ID: ENSP00000383746
MDGEATVKPGEQKEVVRRGREVDYSRLIAGTLPQSHVTSRRAGWKMPLFLILCLLQGSSFALPQKRPHPRWLWEGSLPSRTHLRAMGTLRPSSPLCWREESSFAAPNSLKGSRLVSGEPGGAVTIQCHYAPSSVNRHQRKYWCRLGPPRWICQTIVSTNQYTHHRYRDRVALTDFPQRGLFVVRLSQLSPDDIGCYLCGIGSENNMLFLSMNLTISAVLFQKMKAALGPWLLSLPCWPCLCLWLWFYCKGSSGEGGPLRRQKGSP

SEQ ID NO: 31417 - protein, 265 aa, Homo sapiens; identical to SEQ ID NO: 31416
  Payload ID: 6151
  Gene Symbol: FCAMR
  Gene Name: Fc receptor, IgA, IgM, high affinity
  Uniprot ID: Q8WWV6
  ENSP ID: ENSP00000392707

SEQ ID NO: 31418 - protein, 366 aa, Homo sapiens
  Payload ID: 6152
  Gene Symbol: FCRL1
  Gene Name: Fc receptor-like 1
  Uniprot ID: Q96LA6
  ENSP ID: ENSP00000351039
MLPRLLLLICAPLCEPAELFLIASPSHPTEGSPVTLTCKMPFLQSSDAQFQFCFFRDTRALGPGWSSSPKLQIAAMWKEDTGSYWCEAQTMASKVLRSRRSQINVHRVPVADVSLETQPPGGQVMEGDRLVLICSVAMGTGDITFLWYKGAVGLNLQSKTQRSLTAEYEIPSVRESDAEQYYCVAENGYGPSPSGLVSITVRIPVSRPILMLRAPRAQAAVEDVLELHCEALRGSPPILYWFYHEDITLGSRSAPSGGGASFNLSLTEEHSGNYSCEANNGLGAQRSEAVTLNFTGRRSARDPLRSLPSPLPQEFTYLNSPTPGQLQPIYENEPREQSVAVHGRQQHSSEQKAQKPWGHIWRTRFP

SEQ ID NO: 31419 - protein, 429 aa, Homo sapiens
  Payload ID: 6152
  Gene Symbol: FCRL1
  Gene Name: Fc receptor-like 1
  Uniprot ID: Q96LA6
  ENSP ID: ENSP00000357158
MLPRLLLLICAPLCEPAELFLIASPSHPTEGSPVTLTCKMPFLQSSDAQFQFCFFRDTRALGPGWSSSPKLQIAAMWKEDTGSYWCEAQTMASKVLRSRRSQINVHRVPVADVSLETQPPGGQVMEGDRLVLICSVAMGTGDITFLWYKGAVGLNLQSKTQRSLTAEYEIPSVRESDAEQYYCVAENGYGPSPSGLVSITVRIPVSRPILMLRAPRAQAAVEDVLELHCEALRGSPPILYWFYHEDITLGSRSAPSGGGASFNLSLTEEHSGNYSCEANNGLGAQRSEAVTLNFTVPTGARSNHLTSGVIEGLLSTLGPATVALLFCYGLKRKIGRRSARDPLRSLPSPLPQEFTYLNSPTPGQLQPIYENVNVVSGDEVYSLAYYNQPEQESVAAETLGTHMEDKVSLDIYSRLRKANITDVDYEDAM

SEQ ID NO: 31420 - protein, 428 aa, Homo sapiens
  Payload ID: 6152
  Gene Symbol: FCRL1
  Gene Name: Fc receptor-like 1
  Uniprot ID: Q96LA6
  ENSP ID: ENSP00000418130
MLPRLLLLICAPLCEPAELFLIASPSHPTEGSPVTLTCKMPFLQSSDAQFQFCFFRDTRALGPGWSSSPKLQIAAMWKEDTGSYWCEAQTMASKVLRSRRSQINVHRVPVADVSLETQPPGGQVMEGDRLVLICSVAMGTGDITFLWYKGAVGLNLQSKTQRSLTAEYEIPSVRESDAEQYYCVAENGYGPSPSGLVSITVRIPVSRPILMLRAPRAQAAVEDVLELHCEALRGSPPILYWFYHEDITLGSRSAPSGGGASFNLSLTEEHSGNYSCEANNGLGAQRSEAVTLNFTVPTGARSNHLTSGVIEGLLSTLGPATVALLFCYGLKRKIGRRSARDPLRSLPSPLPQEFTYLNSPTPGQLQPIYENVNVVSGDEVYSLAYYNQPEQESVAETLGTHMEDKVSLDIYSRLRKANITDVDYEDAM

SEQ ID NO: 31421 - protein, 508 aa, Homo sapiens
  Payload ID: 6153
  Gene Symbol: FCRL2
  Gene Name: Fc receptor-like 2
  Uniprot ID: Q96LA5
  ENSP ID: ENSP00000355157
MLLWSLLVIFDAVTEQADSLTLVAPSSVFEGDSIVLKCQGEQNWKIQKMAYHKDNKELSVFKKFSDFLIQSAVLSDSGNYFCSTKGQLFLWDKTSNIVKIKVQELFQRPVLTASSFQPIEGGPVSLKCETRLSPQRLDVQLQFCFFRENQVLGSGWSSSPELQISAVWSEDTGSYWCKAETVTHRIRKQSLQSQIHVQRIPISNVSLEIRAPGGQVTEGQKLILLCSVAGGTGNVTFSWYREATGTSMGKKTQRSLSAELEIPAVKESDAGKYYCRADNGHVPIQSKVVNIPVRIPVSRPVLTLRSPGAQAAVGDLLELHCEALRGSPPILYQFYHEDVTLGNSSAPSGGGASFNLSLTAEHSGNYSCEANNGLGAQCSEAVPVSISGPDGYRRDLMTAGVLWGLFGVLGFTGVALLLYALFHKISGESSATNEPRGASRPNPQEFTYSSPTPDMEELQPVYVNVGSVDVDVVYSQVWSMQQPESSANIRTLLENKDSQVIYSSVKKS

SEQ ID NO: 31422 - protein, 202 aa, Homo sapiens
  Payload ID: 6153
  Gene Symbol: FCRL2
  Gene Name: Fc receptor-like 2
  Uniprot ID: Q96LA5
  ENSP ID: ENSP00000357163
MLLWSLLVIFDAVTEQADSLTLVAPSSVFEGDSIVLKCQGEQNWKIQKMAYHKDNKELSVFKKFSDFLIQSAVLSDSGNYFCSTKGQLFLWDKTSNIVKIKVQGPDGYRRDLMTAGVLWGLFGVLGFTGVALLLYALFHKISGESSATNEPRGASRPNPQEFTYSSPTPDMEELQPVYVNANIRTLLENKDSQVIYSSVKKS

SEQ ID NO: 31423 - protein, 192 aa, Homo sapiens
  Payload ID: 6153
  Gene Symbol: FCRL2
  Gene Name: Fc receptor-like 2
  Uniprot ID: Q96LA5
  ENSP ID: ENSP00000417393
MWEWKICNSHGARPFAEPAGWEFVNLLRHHKSFLIAPLCLSVPVSRPVLTLRSPGAQAAVGDLLELHCEALRGSPPILYQFYHEDVTLGNSSAPSGGGASFNLSLTAEHSGNYSCEANNGLGAQCSEAVPVSISGPDGYRRDLMTAGVLWGLFGVLGFTGVALLLYALFHKISGCIYHLDSPYFAMTFPLLI

SEQ ID NO: 31424 - protein, 734 aa, Homo sapiens
  Payload ID: 6154
  Gene Symbol: FCRL3
  Gene Name: Fc receptor-like 3
  Uniprot ID: Q96P31
  ENSP ID: ENSP00000357167
MLLWLLLLILTPGREQSGVAPKAVLLLNPPWSTAFKGEKVALICSSISHSLAQGDTYWYHDEKLLKIKHDKIQITEPGNYQCKTRGSSLSDAVHVEFSPDWLILQALHPVFEGDNVILRCQGKDNKNTHQKVYYKDGKQLPNSYNLEKITVNSVSRDNSKYHCTAYRKFYILDIEVTSKPLNIQVQELFLHPVLRASSSTPIEGSPMTLTCETQLSPQRPDVQLQFSLFRDSQTLGLGWSRSPRLQIPAMWTEDSGSYWCEVETVTHSIKKRSLRSQIRVQRVPVSNVNLEIRPTGGQLIEGENMVLICSVAQGSGTVTFSWHKEGRVRSLGRKTQRSLLAELHVLTVKESDAGRYYCAADNVHSPILSTWIRVTVRIPVSHPVLTFRAPRAHTVVGDLLELHCESLRGSPPILYRFYHEDVTLGNSSAPSGGGASFNLSLTAEHSGNYSCDADNGLGAQHSHGVSLRVTVPVSRPVLTLRAPGAQAVVGDLLELHCESLRGSFPILYWFYHEDDTLGNISAHSGGGASFNLSLTTEHSGNYSCEADNGLGAQHSKVVTLNVTGTSRNRTGLTAAGITGLVLSILVLAAAAALLHYARARRKPGGLSATGTSSHSPSECQEPSSSRPSRIDPQEPTHSKPLAPMELEPMYSNVNPGDSNPIYSQIWSIQHTKENSANCPMMHQEHEELTVLYSELKKTHPDDSAGEASSRGRAHEEDDEENYENVPRVLLASDH

SEQ ID NO: 31425 - protein, 742 aa, Homo sapiens
  Payload ID: 6154
  Gene Symbol: FCRL3
  Gene Name: Fc receptor-like 3
  Uniprot ID: Q96P31
  ENSP ID: ENSP00000357169
MLLWLLLLILTPGREQSGVAPKAVLLLNPPWSTAFKGEKVALICSSISHSLAQGDTYWYHDEKLLKIKHDKIQITEPGNYQCKTRGSSLSDAVHVEFSPDWLILQALHPVFEGDNVILRCQGKDNKNTHQKVYYKDGKQLPNSYNLEKITVNSVSRDNSKYHCTAYRKFYILDIEVTSKPLNIQVQELFLHPVLRASSSTPIEGSPMTLTCETQLSPQRPDVQLQFSLFRDSQTLGLGWSRSPRLQIPAMWTEDSGSYWCEVETVTHSIKKRSLRSQIRVQRVPVSNVNLEIRPTGGQLIEGENMVLICSVAQGSGTVTFSWHKEGRVRSLGRKTQRSLLAELHVLTVKESDAGRYYCAADNVHSPILSTWIRVTVRIPVSHPVLTFRAPRAHTVVGDLLELHCESLRGSPPILYRFYHEDVTLGNSSAPSGGGASFNLSLTAEHSGNYSCDADNGLGAQHSHGVSLRVTVPVSRPVLTLRAPGAQAVVGDLLELHCESLRGSFPILYWFYHEDDTLGNISAHSGGGASFNLSLTTEHSGNYSCEADNGLGAQHSKVVTLNVTGTSRNRTGLTAAGITGLVLSILVLAAAAALLHYARARRKPGGLSATGTSSHSPSECQEPSSSRPSRIDPQEPTHSKPLAPMELEPMYSNVNPGDSNPIYSQIWSIQHTKENSANCPMMHQEHEELTVLYSELKKTHPDDSAGEASSRGRAHEEDDEENYENILNPRKNKVQDFPCLCNT

SEQ ID NO: 31426 - protein, 639 aa, Homo sapiens
  Payload ID: 6154
  Gene Symbol: FCRL3
  Gene Name: Fc receptor-like 3
  Uniprot ID: Q96P31
  ENSP ID: ENSP00000433430
MLLWLLLLILTPGREQSGVAPKAVLLLNPPWSTAFKGEKVALICSSISHSLAQGDTYWYHDEKLLKIKHDKIQITEPGNYQCKTRGSSLSDAVHVEFSPDWLILQALHPVFEGDNVILRCQGKDNKNTHQKVYYKDGKQLPNSYNLEKITVNSVSRDNSKYHCTAYRKFYILDIEVTSKPLNIQVQGVPVSNVNLEIRPTGGQLIEGENMVLICSVAQGSGTVTFSWHKEGRVRSLGRKTQRSLLAELHVLTVKESDAGRYYCAADNVHSPILSTWIRVTVRIPVSHPVLTFRAPRAHTVVGDLLELHCESLRGSPPILYRFYHEDVTLGNSSAPSGGGASFNLSLTAEHSGNYSCDADNGLGAQHSHGVSLRVTVPVSRPVLTLRAPGAQAVVGDLLELHCESLRGSFPILYWFYHEDDTLGNISAHSGGGASFNLSLTTEHSGNYSCEADNGLGAQHSKVVTLNVTGTSRNRTGLTAAGITGLVLSILVLAAAAALLHYARARRKPGGLSATGTSSHSPSECQEPSSSRPSRIDPQEPTHSKPLAPMELEPMYSNVNPGDSNPIYSQIWSIQHTKENSANCPMMHQEHEELTVLYSELKKTHPDDSAGEASSRGRAHEEDDEENYENVPRVLLASDH

SEQ ID NO: 31427 - protein, 734 aa, Homo sapiens; identical to SEQ ID NO: 31424
  Payload ID: 6154
  Gene Symbol: FCRL3
  Gene Name: Fc receptor-like 3
  Uniprot ID: Q96P31
  ENSP ID: ENSP00000434331

SEQ ID NO: 31428 - protein, 740 aa, Homo sapiens
  Payload ID: 6154
  Gene Symbol: FCRL3
  Gene Name: Fc receptor-like 3
  Uniprot ID: Q96P31
  ENSP ID: ENSP00000435487
MLLWLLLLILTPGREQSGVAPKAVLLLNPPWSTAFKGEKVALICSSISHSLAQGDTYWYHDEKLLKIKHDKIQITEPGNYQCKTRGSSLSDAVHVEFSPDWLILQALHPVFEGDNVILRCQGKDNKNTHQKVYYKDGKQLPNSYNLEKITVNSVSRDNSKYHCTAYRKFYILDIEVTSKPLNIQVQELFLHPVLRASSSTPIEGSPMTLTCETQLSPQRPDVQLQFSLFRDSQTLGLGWSRSPRLQIPAMWTEDSGSYWCEVETVTHSIKKRSLRSQIRVQRVPVSNVNLEIRPTGGQLIEGENMVLICSVAQGSGTVTFSWHKEGRVRSLGRKTQRSLLAELHVLTVKESDAGRYYCAADNVHSPILSTWIRVTVRTLLSPSVPVSHPVLTFRAPRAHTVVGDLLELHCESLRGSPPILYRFYHEDVTLGNSSAPSGGGASFNLSLTAEHSGNYSCDADNGLGAQHSHGVSLRVTVPVSRPVLTLRAPGAQAVVGDLLELHCESLRGSFPILYWFYHEDDTLGNISAHSGGGASFNLSLTTEHSGNYSCEADNGLGAQHSKVVTLNVTGTSRNRTGLTAAGITGLVLSILVLAAAAALLHYARARRKPGGLSATGTSSHSPSECQEPSSSRPSRIDPQEPTHSKPLAPMELEPMYSNVNPGDSNPIYSQIWSIQHTKENSANCPMMHQEHEELTVLYSELKKTHPDDSAGEASSRGRAHEEDDEENYENVPRVLLASDH

SEQ ID NO: 31429 - protein, 256 aa, Homo sapiens
  Payload ID: 6154
  Gene Symbol: FCRL3
  Gene Name: Fc receptor-like 3
  ENSP ID: ENSP00000473680
MLLWLLLLILTPGREQSGVAPKAVLLLNPPWSTAFKGEKVALICSSISHSLAQGDTYWYHDEKLLKIKHDKIQITEPGNYQCKTRGSSLSDAVHVEFSPDWLILQALHPVFEGDNVILRCQGKDNKNTHQKVYYKDGKQLPNSYNLEKITVNSVSRDNSKYHCTAYRKFYILDIEVTSKPLNIQVQELFLHPVLRASSSTPIEGSPMTLTCETQLSPQRPDVQLQFSLFRDSQTLGLGWSRSPRLQIPAMWTEDSG

SEQ ID NO: 31430 - protein, 515 aa, Homo sapiens
  Payload ID: 6155
  Gene Symbol: FCRL4
  Gene Name: Fc receptor-like 4
  Uniprot ID: Q96PJ5
  ENSP ID: ENSP00000271532
MLLWASLLAFAPVCGQSAAAHKPVISVHPPWTTFFKGERVTLTCNGFQFYATEKTTWYHRHYWGEKLTLTPGNTLEVRESGLYRCQARGSPRSNPVRLLFSSDSLILQAPYSVFEGDTLVLRCHRRRKEKLTAVKYTWNGNILSISNKSWDLLIPQASSNNNGNYRCIGYGDENDVFRSNFKIIKIQELFPHPELKATDSQPTEGNSVNLSCETQLPPERSDTPLHFNFFRDGEVILSDWSTYPELQLPTVWRENSGSYWCGAETVRGNIHKHSPSLQIHVQRIPVSGVLLETQPSGGQAVEGEMLVLVCSVAEGTGDTTFSWHREDMQESLGRKTQRSLRAELELPAIRQSHAGGYYCTADNSYGPVQSMVLNVTVRETPGNRDGLVAAGATGGLLSALLLAVALLFHCWRRRKSGVGFLGDETRLPPAPGPGESSHSICPAQVELQSLYVDVHPKKGDLVYSEIQTTQLGEEEEANTSRTLLEDKDVSVVYSEVKTQHPDNSAGKISSKDEES

SEQ ID NO: 31431 - protein, 977 aa, Homo sapiens
  Payload ID: 6156
  Gene Symbol: FCRL5
  Gene Name: Fc receptor-like 5
  Uniprot ID: Q96RD9
  ENSP ID: ENSP00000354691
MLLWVILLVLAPVSGQFARTPRPIIFLQPPWTTVFQGERVTLTCKGFRFYSPQKTKWYHRYLGKEILRETPDNILEVQESGEYRCQAQGSPLSSPVHLDFSSASLILQAPLSVFEGDSVVLRCRAKAEVTLNNTIYKNDNVLAFLNKRTDFHIPHACLKDNGAYRCTGYKESCCPVSSNTVKIQVQEPFTRPVLRASSFQPISGNPVTLTCETQLSLERSDVPLRFRFFRDDQTLGLGWSLSPNFQITAMWSKDSGFYWCKAATMPYSVISDSPRSWIQVQIPASHPVLTLSPEKALNFEGTKVTLHCETQEDSLRTLYRFYHEGVPLRHKSVRCERGASISFSLTTENSGNYYCTADNGLGAKPSKAVSLSVTVPVSHPVLNLSSPEDLIFEGAKVTLHCEAQRGSLPILYQFHHEGAALERRSANSAGGVAISFSLTAEHSGNYYCTADNGFGPQRSKAVSLSVTVPVSHPVLTLSSAEALTFEGATVTLHCEVQRGSPQILYQFYHEDMPLWSSSTPSVGRVSFSFSLTEGHSGNYYCTADNGFGPQRSEVVSLFVTVPVSRPILTLRVPRAQAVVGDLLELHCEAPRGSPPILYWFYHEDVTLGSSSAPSGGEASFNLSLTAEHSGNYSCEANNGLVAQHSDTISLSVIVPVSRPILTFRAPRAQAVVGDLLELHCEALRGSSPILYWFYHEDVTLGKISAPSGGGASFNLSLTTEHSGIYSCEADNGLEAQRSEMVTLKVAVPVSRPVLTLRAPGTHAAVGDLLELHCEALRGSPLILYRFFHEDVTLGNRSSPSGGASLNLSLTAEHSGNYSCEADNGLGAQRSETVTLYITGLTANRSGPFATGVAGGLLSIAGLAAGALLLYCWLSRKAGRKPASDPARSPSDSDSQEPTYHNVPAWEELQPVYTNANPRGENVVYSEVRIIQEKKKHAVASDPRHLRNKGSPIIYSEVKVASTPVSGSLFLASSAPHR

SEQ ID NO: 31432 - protein, 592 aa, Homo sapiens
  Payload ID: 6156
  Gene Symbol: FCRL5
  Gene Name: Fc receptor-like 5
  Uniprot ID: Q96RD9
  ENSP ID: ENSP00000357172
MLLWVILLVLAPVSGQFARTPRPIIFLQPPWTTVFQGERVTLTCKGFRFYSPQKTKWYHRYLGKEILRETPDNILEVQESGEYRCQAQGSPLSSPVHLDFSSASLILQAPLSVFEGDSVVLRCRAKAEVTLNNTIYKNDNVLAFLNKRTDFHIPHACLKDNGAYRCTGYKESCCPVSSNTVKIQVQEPFTRPVLRASSFQPISGNPVTLTCETQLSLERSDVPLRFRFFRDDQTLGLGWSLSPNFQITAMWSKDSGFYWCKAATMPYSVISDSPRSWIQVQIPASHPVLTLSPEKALNFEGTKVTLHCETQEDSLRTLYRFYHEGVPLRHKSVRCERGASISFSLTTENSGNYYCTADNGLGAKPSKAVSLSVTVPVSHPVLNLSSPEDLIFEGAKVTLHCEAQRGSLPILYQFHHEGAALERRSANSAGGVAISFSLTAEHSGNYYCTADNGFGPQRSKAVSLSVTVPVSHPVLTLSSAEALTFEGATVTLHCEVQRGSPQILYQFYHEDMPLWSSSTPSVGRVSFSFSLTEGHSGNYYCTADNGFGPQRSEVVSLFVTGKCWVLASHPPLAEFSLTHSFKNLFALSSFLP

SEQ ID NO: 31433 - protein, 759 aa, Homo sapiens
  Payload ID: 6156
  Gene Symbol: FCRL5
  Gene Name: Fc receptor-like 5
  Uniprot ID: Q96RD9
  ENSP ID: ENSP00000357173
MLLWVILLVLAPVSGQFARTPRPIIFLQPPWTTVFQGERVTLTCKGFRFYSPQKTKWYHRYLGKEILRETPDNILEVQESGEYRCQAQGSPLSSPVHLDFSSASLILQAPLSVFEGDSVVLRCRAKAEVTLNNTIYKNDNVLAFLNKRTDFHIPHACLKDNGAYRCTGYKESCCPVSSNTVKIQVQEPFTRPVLRASSFQPISGNPVTLTCETQLSLERSDVPLRFRFFRDDQTLGLGWSLSPNFQITAMWSKDSGFYWCKAATMPYSVISDSPRSWIQVQIPASHPVLTLSPEKALNFEGTKVTLHCETQEDSLRTLYRFYHEGVPLRHKSVRCERGASISFSLTTENSGNYYCTADNGLGAKPSKAVSLSVTVPVSHPVLNLSSPEDLIFEGAKVTLHCEAQRGSLPILYQFHHEGAALERRSANSAGGVAISFSLTAEHSGNYYCTADNGFGPQRSKAVSLSVTVPVSHPVLTLSSAEALTFEGATVTLHCEVQRGSPQILYQFYHEDMPLWSSSTPSVGRVSFSFSLTEGHSGNYYCTADNGFGPQRSEVVSLFVTVPVSRPILTLRVPRAQAVVGDLLELHCEAPRGSPPILYWFYHEDVTLGSSSAPSGGEASFNLSLTAEHSGNYSCEANNGLVAQHSDTISLSVIVPVSRPILTFRAPRAQAVVGDLLELHCEALRGSSPILYWFYHEDVTLGKISAPSGGGASFNLSLTTEHSGIYSCEADNGLEAQRSEMVTLKVAGEWALPTSSTSEN

SEQ ID NO: 31434 - protein, 413 aa, Homo sapiens
  Payload ID: 6157
  Gene Symbol: FCRL6
  Gene Name: Fc receptor-like 6
  Uniprot ID: Q6DN72
  ENSP ID: ENSP00000320625
MLPSLGPMLLWTAVLLFVPCVGKTVWLYLQAWPNPVFEGDALTLRCQGWKNTPLSQVKFYRDGKFLHFSKENQTLSMGAATVQSRGQYSCSGQVMYIPQTFTQTSETAMVQVQELFPPPVLSAIPSPEPREGSLVTLRCQTKLHPLRSALRLLFSFHKDGHTLQDRGPHPELCIPGAKEGDSGLYWCEVAPEGGQVQKQSPQLEVRVQAPVSRPVLTLHHGPADPAVGDMVQLLCEAQRGSPPILYSFYLDEKIVGNHSAPCGGTTSLLFPVKSEQDAGNYSCEAENSVSRERSEPKKLSLKGSQVLFTPASNWLVPWLPASLLGLMVIAAALLVYVRSWRKAGPLPSQIPPTAPGGEQCPLYANVHHQKGKDEGVVYSVVHRTSKRSEARSAEFTVGRKFYHLCGGEMPAAQ

SEQ ID NO: 31435 - protein, 397 aa, Homo sapiens
  Payload ID: 6157
  Gene Symbol: FCRL6
  Gene Name: Fc receptor-like 6
  Uniprot ID: Q6DN72
  ENSP ID: ENSP00000340949
MLLWTAVLLFVPCVGKTVWLYLQAWPNPVFEGDALTLRCQGWKNTPLSQVKFYRDGKFLHFSKENQTLSMGAATVQSRGQYSCSGQVMYIPQTFTQTSETAMVQVQELFPPPVLSAIPSPEPREGSLVTLRCQTKLHPLRSALRLLFSFHKDGHTLQDRGPHPELCIPGAKEGDSGLYWCEVAPEGGQVQKQSPQLEVRVQAPVSRPVLTLHHGPADPAVGDMVQLLCEAQRGSPPILYSFYLDEKIVGNHSAPCGGTTSLLFPVKSEQDAGNYSCEAENSVSRERSEPKKLSLKGSQVLFTPASNWLVPWLPASLLGLMVIAAALLVYVRSWRKAGPLPSQIPPTAPGGEQCPLYANVHHQKGKDEGVVYSVVHRTSKRSEGQFYHLCGGEMPAAQ

SEQ ID NO: 31436 - protein, 434 aa, Homo sapiens
  Payload ID: 6157
  Gene Symbol: FCRL6
  Gene Name: Fc receptor-like 6
  Uniprot ID: Q6DN72
  ENSP ID: ENSP00000357086
MLLWTAVLLFVPCVGKTVWLYLQAWPNPVFEGDALTLRCQGWKNTPLSQVKFYRDGKFLHFSKENQTLSMGAATVQSRGQYSCSGQVMYIPQTFTQTSETAMVQVQELFPPPVLSAIPSPEPREGSLVTLRCQTKLHPLRSALRLLFSFHKDGHTLQDRGPHPELCIPGAKEGDSGLYWCEVAPEGGQVQKQSPQLEVRVQAPVSRPVLTLHHGPADPAVGDMVQLLCEAQRGSPPILYSFYLDEKIVGNHSAPCGGTTSLLFPVKSEQDAGNYSCEAENSVSRERSEPKKLSLKGSQVLFTPASNWLVPWLPASLLGLMVIAAALLVYVRSWRKAGPLPSQIPPTAPGGEQCPLYANVHHQKGKDEGVVYSVVHRTSKRSEARSAEFTVGRKDSSIICAEVRCLQPSEVSSTEVNMRSRTLQEPLSDCEEVLC

SEQ ID NO: 31437 - protein, 311 aa, Homo sapiens
  Payload ID: 6157
  Gene Symbol: FCRL6
  Gene Name: Fc receptor-like 6
  Uniprot ID: Q6DN72
  ENSP ID: ENSP00000376068
MLLWTAVLLFVPCVGKTVWLYLQAWPNPVFEGDALTLRCQGWKNTPLSQVKFYRDGKFLHFSKENQTLSMGAATVQSRGQYSCSGQVMYIPQTFTQTSETAMVQVQAPVSRPVLTLHHGPADPAVGDMVQLLCEAQRGSPPILYSFYLDEKIVGNHSAPCGGTTSLLFPVKSEQDAGNYSCEAENSVSRERSEPKKLSLKGSQVLFTPASNWLVPWLPASLLGLMVIAAALLVYVRSWRKAGPLPSQIPPTAPGGEQCPLYANVHHQKGKDEGVVYSVVHRTSKRSEARSAEFTVGRKFYHLCGGEMPAAQ

SEQ ID NO: 31438 - protein, 158 aa, Homo sapiens
  Payload ID: 6157
  Gene Symbol: FCRL6
  Gene Name: Fc receptor-like 6
  ENSP ID: ENSP00000440712
MLPSLVPCVGKTVWLYLQAWPNPVFEGDALTLRCQGWKNTPLSQVKFYRDGKFLHFSKENQTLSMGAATVQSRGQYSCSGQVMYIPQTFTQTSETAMVQVQELFPPPVLSAIPSPEPREGSLVTLRCQTKLHPLRVARSRSRAPSWRSECRLLYPVLC

SEQ ID NO: 31439 - protein, 376 aa, Homo sapiens
  Payload ID: 6158
  Gene Symbol: FCRLA
  Gene Name: Fc receptor-like A
  Uniprot ID: Q7L513
  ENSP ID: ENSP00000236938
MLKKISVGVAGDLNTVTMKLGCVLMAWALYLSLGVLWVAQMLLAASFETLQCEGPVCTEESSCHTEDDLTDAREAGFQVKAYTFSEPFHLIVSYDWLILQGPAKPVFEGDLLVLRCQAWQDWPLTQVTFYRDGSALGPPGPNREFSITVVQKADSGHYHCSGIFQSPGPGIPETASVVAITVQELFPAPILRAVPSAEPQAGSPMTLSCQTKLPLQRSAARLLFSFYKDGRIVQSRGLSSEFQIPTASEDHSGSYWCEAATEDNQVWKQSPQLEIRVQGASSSAAPPTLNPAPQKSAAPGTAPEEAPGPLPPPPTPSSEDPGFSSPLGMPDPHLYHQMGLLLKHMQDVRVLLGHLLMELRELSGHRKPGTTKATAE

SEQ ID NO: 31440 - protein, 225 aa, Homo sapiens
  Payload ID: 6158
  Gene Symbol: FCRLA
  Gene Name: Fc receptor-like A
  Uniprot ID: Q7L513
  ENSP ID: ENSP00000294796
MKLGCVLMAWALYLSLGVLWVAQMLLAAGCHAELFPAPILRAVPSAEPQAGSPMTLSCQTKLPLQRSAARLLFSFYKDGRIVQSRGLSSEFQIPTASEDHSGSYWCEAATEDNQVWKQSPQLEIRVQGASSSAAPPTLNPAPQKSAAPGTAPEEAPGPLPPPPTPSSEDPGFSSPLGMPDPHLYHQMGLLLKHMQDVRVLLGHLLMELRELSGHRKPGTTKATAE

SEQ ID NO: 31441 - protein, 264 aa, Homo sapiens
  Payload ID: 6158
  Gene Symbol: FCRLA
  Gene Name: Fc receptor-like A
  Uniprot ID: Q7L513
  ENSP ID: ENSP00000294798
MKLGCVLMAWALYLSLGVLWVAQMLLAASFETLQCEGPVCTEESSCHTEDDLTDAREAGFQVKAYTFSEPFHLIVSYDWLILQGPAKPVFEGDLLVLRCQAWQDWPLTQVTFYRDGSALGPPGPNREFSITVVQKADSGHYHCSGIFQSPGPGIPETASVVAITVQGASSSAAPPTLNPAPQKSAAPGTAPEEAPGPLPPPPTPSSEDPGFSSPLGMPDPHLYHQMGLLLKHMQDVRVLLGHLLMELRELSGHRKPGTTKATAE

SEQ ID NO: 31442 - protein, 270 aa, Homo sapiens
  Payload ID: 6158
  Gene Symbol: FCRLA
  Gene Name: Fc receptor-like A
  Uniprot ID: Q7L513
  ENSP ID: ENSP00000309596
MKLGCVLMAWALYLSLGVLWVAQMLLAASFETLQCEGPVCTEESSCHTEDDLTDAREAGFQVKAYTFSEPFHLIVSYELFPAPILRAVPSAEPQAGSPMTLSCQTKLPLQRSAARLLFSFYKDGRIVQSRGLSSEFQIPTASEDHSGSYWCEAATEDNQVWKQSPQLEIRVQGASSSAAPPTLNPAPQKSAAPGTAPEEAPGPLPPPPTPSSEDPGFSSPLGMPDPHLYHQMGLLLKHMQDVRVLLGHLLMELRELSGHRKPGTTKATAE

SEQ ID NO: 31443 - protein, 141 aa, Homo sapiens
  Payload ID: 6158
  Gene Symbol: FCRLA
  Gene Name: Fc receptor-like A
  Uniprot ID: Q7L513
  ENSP ID: ENSP00000344808
MLKKISVGVAGDLNTVTMKLGCVLMAWALYLSLGVLWVAQMLLGASSSAAPPTLNPAPQKSAAPGTAPEEAPGPLPPPPTPSSEDPGFSSPLGMPDPHLYHQMGLLLKHMQDVRVLLGHLLMELRELSGHRKPGTTKATAE

SEQ ID NO: 31444 - protein, 192 aa, Homo sapiens
  Payload ID: 6158
  Gene Symbol: FCRLA
  Gene Name: Fc receptor-like A
  Uniprot ID: Q7L513
  ENSP ID: ENSP00000356926
MLKKISVGVAGDLNTVTMKLGCVLMAWALYLSLGVLWVAQMLLAASFETLQCEGPVCTEESSCHTEDDLTDAREAGFQVKAYTFSEPFHLIVSYGASSSAAPPTLNPAPQKSAAPGTAPEEAPGPLPPPPTPSSEDPGFSSPLGMPDPHLYHQMGLLLKHMQDVRVLLGHLLMELRELSGHRKPGTTKATAE

SEQ ID NO: 31445 - protein, 152 aa, Homo sapiens
  Payload ID: 6158
  Gene Symbol: FCRLA
  Gene Name: Fc receptor-like A
  ENSP ID: ENSP00000356927
MLLAASFETLQCEGPVCTEESSCHTEDDLTDAREAGFQVKAYTFSEPFHLIVSYGASSSAAPPTLNPAPQKSAAPGTAPEEAPGPLPPPPTPSSEDPGFSSPLGMPDPHLYHQMGLLLKHMQDVRVLLGHLLMELRELSGHRKPGTTKATAE

SEQ ID NO: 31446 - protein, 365 aa, Homo sapiens
  Payload ID: 6158
  Gene Symbol: FCRLA
  Gene Name: Fc receptor-like A
  Uniprot ID: Q7L513
  ENSP ID: ENSP00000356930
MKLGCVLMAWALYLSLGVLWVAQMLLAAGCHAAASFETLQCEGPVCTEESSCHTEDDLTDAREAGFQVKAYTFSEPFHLIVSYDWLILQGPAKPVFEGDLLVLRCQAWQDWPLTQVTFYRDGSALGPPGPNREFSITVVQKADSGHYHCSGIFQSPGPGIPETASVVAITVQELFPAPILRAVPSAEPQAGSPMTLSCQTKLPLQRSAARLLFSFYKDGRIVQSRGLSSEFQIPTASEDHSGSYWCEAATEDNQVWKQSPQLEIRVQGASSSAAPPTLNPAPQKSAAPGTAPEEAPGPLPPPPTPSSEDPGFSSPLGMPDPHLYHQMGLLLKHMQDVRVLLGHLLMELRELSGHRKPGTTKATAE

SEQ ID NO: 31447 - protein, 236 aa, Homo sapiens
  Payload ID: 6158
  Gene Symbol: FCRLA
  Gene Name: Fc receptor-like A
  Uniprot ID: Q7L513
  ENSP ID: ENSP00000356934
MLKKISVGVAGDLNTVTMKLGCVLMAWALYLSLGVLWVAQMLLELFPAPILRAVPSAEPQAGSPMTLSCQTKLPLQRSAARLLFSFYKDGRIVQSRGLSSEFQIPTASEDHSGSYWCEAATEDNQVWKQSPQLEIRVQGASSSAAPPTLNPAPQKSAAPGTAPEEAPGPLPPPPTPSSEDPGFSSPLGMPDPHLYHQMGLLLKHMQDVRVLLGHLLMELRELSGHRKPGTTKATAE

SEQ ID NO: 31448 - protein, 382 aa, Homo sapiens
  Payload ID: 6158
  Gene Symbol: FCRLA
  Gene Name: Fc receptor-like A
  Uniprot ID: Q7L513
  ENSP ID: ENSP00000356936
MLKKISVGVAGDLNTVTMKLGCVLMAWALYLSLGVLWVAQMLLAAGCHAAASFETLQCEGPVCTEESSCHTEDDLTDAREAGFQVKAYTFSEPFHLIVSYDWLILQGPAKPVFEGDLLVLRCQAWQDWPLTQVTFYRDGSALGPPGPNREFSITVVQKADSGHYHCSGIFQSPGPGIPETASVVAITVQELFPAPILRAVPSAEPQAGSPMTLSCQTKLPLQRSAARLLFSFYKDGRIVQSRGLSSEFQIPTASEDHSGSYWCEAATEDNQVWKQSPQLEIRVQGASSSAAPPTLNPAPQKSAAPGTAPEEAPGPLPPPPTPSSEDPGFSSPLGMPDPHLYHQMGLLLKHMQDVRVLLGHLLMELRELSGHRKPGTTKATAE

SEQ ID NO: 31449 - protein, 287 aa, Homo sapiens
  Payload ID: 6158
  Gene Symbol: FCRLA
  Gene Name: Fc receptor-like A
  Uniprot ID: Q7L513
  ENSP ID: ENSP00000439838
MLKKISVGVAGDLNTVTMKLGCVLMAWALYLSLGVLWVAQMLLAASFETLQCEGPVCTEESSCHTEDDLTDAREAGFQVKAYTFSEPFHLIVSYELFPAPILRAVPSAEPQAGSPMTLSCQTKLPLQRSAARLLFSFYKDGRIVQSRGLSSEFQIPTASEDHSGSYWCEAATEDNQVWKQSPQLEIRVQGASSSAAPPTLNPAPQKSAAPGTAPEEAPGPLPPPPTPSSEDPGFSSPLGMPDPHLYHQMGLLLKHMQDVRVLLGHLLMELRELSGHRKPGTTKATAE

SEQ ID NO: 31450 - protein, 242 aa, Homo sapiens
  Payload ID: 6158
  Gene Symbol: FCRLA
  Gene Name: Fc receptor-like A
  Uniprot ID: Q7L513
  ENSP ID: ENSP00000442870
MLKKISVGVAGDLNTVTMKLGCVLMAWALYLSLGVLWVAQMLLAAGCHAELFPAPILRAVPSAEPQAGSPMTLSCQTKLPLQRSAARLLFSFYKDGRIVQSRGLSSEFQIPTASEDHSGSYWCEAATEDNQVWKQSPQLEIRVQGASSSAAPPTLNPAPQKSAAPGTAPEEAPGPLPPPPTPSSEDPGFSSPLGMPDPHLYHQMGLLLKHMQDVRVLLGHLLMELRELSGHRKPGTTKATAE

SEQ ID NO: 31451 - protein, 275 aa, Homo sapiens
  Payload ID: 6159
  Gene Symbol: FCRLB
  Gene Name: Fc receptor-like B
  Uniprot ID: Q6BAA4
  ENSP ID: ENSP00000338598
MWPLTALLLLVPSSGQAATLEKPILSLHPPWTTIFKGERVTLKCDGYHPLLLELQPISTLWYLGHLLLPSHKKSIEVQTPGVYRCQTRGAPVSDPIHLSVSNDWLILQVPYAPVFEGEPLVLRCRGWYDKVVYKLHYYHDGQAVRYFHSSANYTVLQARASDSGRYQCSGTMRIPVESAPMFSAKVAVTVQEARHAAAVRVLQVQPRGAPLRLGRRVHSPGARGRGARIVLVRGGYRHPQCPETQSVAAAPGAGFSPGPGLHHRPSSMGRSLGSW

SEQ ID NO: 31452 - protein, 268 aa, Homo sapiens
  Payload ID: 6159
  Gene Symbol: FCRLB
  Gene Name: Fc receptor-like B
  Uniprot ID: Q6BAA4
  ENSP ID: ENSP00000356921
MWPLTALLLLATLEKPILSLHPPWTTIFKGERVTLKCDGYHPLLLELQPISTLWYLGHLLLPSHKKSIEVQTPGVYRCQTRGAPVSDPIHLSVSNDWLILQVPYAPVFEGEPLVLRCRGWYDKVVYKLHYYHDGQAVRYFHSSANYTVLQARASDSGRYQCSGTMRIPVESAPMFSAKVAVTVQEARHAAAVRVLQVQPRGAPLRLGRRVHSPGARGRGARIVLVRGGYRHPQCPETQSVAAAPGAGFSPGPGLHHRPSSMGRSLGSW

SEQ ID NO: 31453 - protein, 311 aa, Homo sapiens
  Payload ID: 6159
  Gene Symbol: FCRLB
  Gene Name: Fc receptor-like B
  Uniprot ID: Q6BAA4
  ENSP ID: ENSP00000356922
MWPLTALLLLATLEKPILSLHPPWTTIFKGERVTLKCDGYHPLLLELQPISTLWYLGHLLLPSHKKSIEVQTPGVYRCQTRGAPVSDPIHLSVSNDWLILQVPYAPVFEGEPLVLRCRGWYDKVVYKLHYYHDGQAVRYFHSSANYTVLQARASDSGRYQCSGTMRIPVESAPMFSAKVAVTVQAARCAASTGAPSTQSRSPRSRSSNRTGARRLPPPAVSGNAVRGCSSRGRVLPWTRPPPPPQLHGPQPWLLVIGRFPSESPRCPDRSRWSPPSGTPPPPGCSSRRAAPRLRGHPPALRRRPWNNRLEP

SEQ ID NO: 31454 - protein, 318 aa, Homo sapiens
  Payload ID: 6159
  Gene Symbol: FCRLB
  Gene Name: Fc receptor-like B
  Uniprot ID: Q6BAA4
  ENSP ID: ENSP00000356923
MWPLTALLLLVPSSGQAATLEKPILSLHPPWTTIFKGERVTLKCDGYHPLLLELQPISTLWYLGHLLLPSHKKSIEVQTPGVYRCQTRGAPVSDPIHLSVSNDWLILQVPYAPVFEGEPLVLRCRGWYDKVVYKLHYYHDGQAVRYFHSSANYTVLQARASDSGRYQCSGTMRIPVESAPMFSAKVAVTVQAARCAASTGAPSTQSRSPRSRSSNRTGARRLPPPAVSGNAVRGCSSRGRVLPWTRPPPPPQLHGPQPWLLVIGRFPSESPRCPDRSRWSPPSGTPPPPGCSSRRAAPRLRGHPPALRRRPWNNRLEP

SEQ ID NO: 31455 - protein, 426 aa, Homo sapiens
  Payload ID: 6159
  Gene Symbol: FCRLB
  Gene Name: Fc receptor-like B
  Uniprot ID: Q6BAA4
  ENSP ID: ENSP00000356925
MWPLTALLLLVPSSGQAATLEKPILSLHPPWTTIFKGERVTLKCDGYHPLLLELQPISTLWYLGHLLLPSHKKSIEVQTPGVYRCQTRGAPVSDPIHLSVSNDWLILQVPYAPVFEGEPLVLRCRGWYDKVVYKLHYYHDGQAVRYFHSSANYTVLQARASDSGRYQCSGTMRIPVESAPMFSAKVAVTVQELFRAPVLRVMGPREARGAALGGVVLRCDTRLHPQKRDTPLQFAFYKYSRAVRRFDWGAEYTVPEPEVEELESYWCEAATATRSVRKRSPWLQLPGPGSPLDPASTTAPAPWAAALAPGNRPLSFRKPPVSRSVPLVTSVRNTTSTGLQFPASGAPTAGPPACAPPTPLEQSAGALKPDVDLLLREMQLLKGLLSRVVLELKEPQALRELRGTPETPTSHFAVSPGTPETTPVES

SEQ ID NO: 31456 - protein, 198 aa, Homo sapiens
  Payload ID: 6160
  Gene Symbol: FCF1
  Gene Name: FCF1 rRNA-processing protein
  Uniprot ID: Q9Y324
  ENSP ID: ENSP00000344393
MGKQKKTRKYATMKRMLSLRDQRLKEKDRLKPKKKEKKDPSALKEREVPQHPSCLFFQYNTQLGPPYHILVDTNFINFSIKAKLDLVQSMMDCLYAKCIPCITDCVMAEIEKLGQKYRVALRIAKDPRFERLPCTHKGTYADDCLVQRVTQHKCYIVATVDRDLKRRIRKIPGVPIMYISNHRYNIERMPDDYGAPRF

SEQ ID NO: 31457 - protein, 186 aa, Homo sapiens
  Payload ID: 6160
  Gene Symbol: FCF1
  Gene Name: FCF1 rRNA-processing protein
  ENSP ID: ENSP00000444939
MKRMLSLRDQRLKEKDRLKPKKKEKKDPSALKEREVPQHPSCLFFQYNTQLGPPYHILVDTNFINFSIKAKLDLVQSMMDCLYAKCIPCITDCVMAEIEKLGQKYRVALRIAKDPRFERLPCTHKGTYADDCLVQRVTQHKCYIVATVDRDLKRRIRKIPGVPIMYISNHRYNIERMPDDYGAPRF

SEQ ID NO: 31458 - protein, 61 aa, Homo sapiens
  Payload ID: 6160
  Gene Symbol: FCF1
  Gene Name: FCF1 rRNA-processing protein
  ENSP ID: ENSP00000450750
MMDCLYAKCIPCITDCVMAEIEKLGQKYRVALRIAKDPRFERLPCTHKGTYADDCLVQRVT

SEQ ID NO: 31459 - protein, 65 aa, Homo sapiens
  Payload ID: 6160
  Gene Symbol: FCF1
  Gene Name: FCF1 rRNA-processing protein
  ENSP ID: ENSP00000451345
MGKQKKTRKYATMKRMLSLRDQRLKEKDRLKPKKKEKKDPSALKEREVWAHLTTSSLIPTLSTFP

SEQ ID NO: 31460 - protein, 40 aa, Homo sapiens
  Payload ID: 6160
  Gene Symbol: FCF1
  Gene Name: FCF1 rRNA-processing protein
  ENSP ID: ENSP00000452297
MKRMLSLRDQRLKEKDRLKPKKKEKKDPSALKEREVIYFQ

SEQ ID NO: 31461 - protein, 52 aa, Homo sapiens
  Payload ID: 6160
  Gene Symbol: FCF1
  Gene Name: FCF1 rRNA-processing protein
  ENSP ID: ENSP00000452415
MGKQKKTRKYATMKRMLSLRDQRLKEKDRLKPKKKEKKDPSALKEREVIYFQ

SEQ ID NO: 31462 - protein, 183 aa, Homo sapiens
  Payload ID: 6160
  Gene Symbol: FCF1
  Gene Name: FCF1 rRNA-processing protein
  ENSP ID: ENSP00000452497
MGKQKKTRNKEKDRLKPKKKEKKDPSALKEREVPQHPSCLFFQYNTQLGPPYHILVDTNFINFSIKAKLDLVQSMMDCLYAKCIPCITDCVMAEIEKLGQKYRVALRIAKDPRFERLPCTHKGTYADDCLVQRVTQHKCYIVATVDRDLKRRIRKIPGVPIMYISNHRYNIERMPDDYGAPRF

SEQ ID NO: 31463 - protein, 690 aa, Homo sapiens
  Payload ID: 6161
  Gene Symbol: FCHSD1
  Gene Name: FCH and double SH3 domains 1
  Uniprot ID: Q86WN1
  ENSP ID: ENSP00000399259
MQPPPRKVKPAQEVKLRFLEQLSILQTWQQREADLLEDIRSYSKQRAAIEREYGQALQKLAGPFLKREGHRSGEMDSRGRTVFGAWRCLLDATVAGGQTRLQASDRYRDLAGGTGRSAKEQVLRKGTENLQRAQAEVLQSVRELSRSRKLYGQRERVWALAQEKAADVQARLNRSDHGIFHSRTSLQKLSTKLSAQSAQYSQQLQAARNEYLLNLVATNAHLDHYYQEELPALLKALVSELSEHLRDPLTSLSHTELEAAEVILEHAHRGEQTTSQVSWEQDLKLFLQEPGVFSPTPPQQFQPAGTDQVCVLEWGAEGVAGKSGLEKEVQRLTSRAARDYKIQNHGHRVLQRLEQRRQQASEREAPSIEQRLQEVRESIRRAQVSQVKGAARLALLQGAGLDVERWLKPAMTQAQDEVEQERRLSEARLSQRDLSPTAEDAELSDFEECEETGELFEEPAPQALATRALPCPAHVVFRYQAGREDELTITEGEWLEVIEEGDADEWVKARNQHGEVGFVPERYLNFPDLSLPESSQDSDNPCGAEPTAFLAQALYSYTGQSAEELSFPEGALIRLLPRAQDGVDDGFWRGEFGGRVGVFPSLLVEELLGPPGPPELSDPEQMLPSPSPPSFSPPAPTSVLDGPPAPVLPGDKALDFPGFLDMMAPRLRPMRPPPPPPAKAPDPGHPDPLT

SEQ ID NO: 31464 - protein, 409 aa, Homo sapiens
  Payload ID: 6161
  Gene Symbol: FCHSD1
  Gene Name: FCH and double SH3 domains 1
  Uniprot ID: Q86WN1
  ENSP ID: ENSP00000427796
MDSRTVFGAWRCLLDATVAGGQTRLQASDRYRDLAGGTGRSAKEQVLRKGTENLQRAQAEVLQSVRELSRSRKLYGQRERVWALAQEKAADVQARLNRSDHGIFHSRTSLQKLSTKLSAQSAQYSQQLQAARNEYLLNLVATNAHLDHYYQEELPALLKALVSELSEHLRDPLTSLSHTELEAAEVILEHAHRGEQTTSQVSWEQDLKLFLQEPGVFSPTPPQQFQPAGTDQVCVLEWGAEGVAGKSGLEKEVQRLTSRAARDYKIQNHGHRVLQRLEQRRQQASEREAPSIEQRLQEVRESIRRAQVSQVKGAARLALLQGAGLDVERWLKPAMTQAQDEVEQERRLSEARLSQRDLSPTAEDAELSDFEECEETGELFEEPAPQALATRALPCPAHVVFRYQGVRMS

SEQ ID NO: 31465 - protein, 598 aa, Homo sapiens
  Payload ID: 6161
  Gene Symbol: FCHSD1
  Gene Name: FCH and double SH3 domains 1
  ENSP ID: ENSP00000428677
MQPPPRKVKPAQEVKLRFLEQLSILQTWQQREADLLEDIRSYSKQRAAIEREYGQALQKLAGPFLKREGHRSGEMDSRTVFGAWRCLLDATVAGGQTRLQASDRYRDLAGGTGRSAKEQVLRKGTENLQRAQAEVLQSVRELSRSRKLYGQRERVWALAQEKAADVQARLNRSDHGIFHSRTSLQKLSTKLSAQSAQYSQQLQAARNEYLLNLVATNAHLDHYYQEELPALLKALVSELSEHLRDPLTSLSHTELEAAEVILEHAHRGEQTTSQVSWEQDLKLFLQEPGVFSPTPPQQFQPAGTDQVCVLEWGAEGVAGKSGLEKEVQRLTSRAARDYKIQNHGHRERRLSEARLSQRDLSPTAEDAELSDFEECEETGELFEEPAPQALATRALPCPAHVVFRYQAGREDELTITEGEWLEVIEEGDADEWVKARNQHGEVGFVPERYLNFPDLSLPESSQDSDNPCGAEPTAFLAQALYSYTGQSAEELSFPEGALIRLLPRAQDGVDDGFWRGEFGGRVGVFPSLLVEELLGPPGPPELSDPEQMLPSPSPPSFSPPAPTSVLDGPPAPVLPGDSGGTCACLSYGYIAYWWRLGF

SEQ ID NO: 31466 - protein, 255 aa, Homo sapiens
  Payload ID: 6161
  Gene Symbol: FCHSD1
  Gene Name: FCH and double SH3 domains 1
  ENSP ID: ENSP00000428776
MQPPPRKVKPAQEVKLRFLEQLSILQTWQQREADLLEDIRSYSKQRAAIEREYGQALQKLAGPFLKREGHRSGEMDSRTVFGAWRCLLDATVAGGQTRLQASDRYRDLAGGTGRSAKEQVLRKGTENLQRAQAEVLQSVRELSRSRKLYGQRERVWALAQEKAADVQARLNRSDHGIFHSRTSLQKLSTKLSAQSAQYSQQLQAARNEYLLNLVATNAHLDHYYQEELPALLKASFNPDTPIPQQGGKGGPPPAS

SEQ ID NO: 31467 - protein, 211 aa, Homo sapiens
  Payload ID: 6161
  Gene Symbol: FCHSD1
  Gene Name: FCH and double SH3 domains 1
  ENSP ID: ENSP00000430448
MYVMQLAKYQSHSKSCPTVFPPTPVLCLPNQVLQRLEQRRQQASEREAPSIEQRLQEVRESIRRAQVSQVKGAARLALLQGAGLDVERWLKPAMTQAQDEVEQERRLSEARLSQRDLSPTAEDAELSDFEECEETGELFEEPAPQALATRALPCPAHVVFRYQAGREDELTITEGEWLEVIEEGDADEWVKARNQHGEVGFVPERYLNFPD

SEQ ID NO: 31468 - protein, 684 aa, Homo sapiens
  Payload ID: 6162
  Gene Symbol: FCHSD2
  Gene Name: FCH and double SH3 domains 2
  Uniprot ID: O94868
  ENSP ID: ENSP00000308978
MQKLASQYLKRDWPGVKADDRNDYRSMYPVWKSFLEGTMQVAQSRMNICENYKNFISEPARTVRSLKEQQLKRCVDQLTKIQTELQETVKDLAKGKKKYFETEQMAHAVREKADIEAKSKLSLFQSRISLQKASVKLKARRSECNSKATHARNDYLLTLAAANAHQDRYYQTDLVNIMKALDGNVYDHLKDYLIAFSRTELETCQAVQNTFQFLLENSSKVVRDYNLQLFLQENAVFHKPQPFQFQPCDSDTSRQLESETGTTEEHSLNKEARKWATRVAREHKNIVHQQRVLNDLECHGAAVSEQSRAELEQKIDEARENIRKAEIIKLKAEARLDLLKQIGVSVDTWLKSAMNQVMEELENERWARPPAVTSNGTLHSLNADTEREEGEEFEDNMDVFDDSSSSPSGTLRNYPLTCKVVYSYKASQPDELTIEEHEVLEVIEDGDMEDWVKARNKVGQVGYVPEKYLQFPTSNSLLSMLQSLAALDSRSHTSSNSTEAELVSGSLNGDASVCFVKALYDYEGQTDDELSFPEGAIIRILNKENQDDDGFWEGEFNGRIGVFPSVLVEELSASENGDTPWMREIQISPSPKPHASLPPLPLYDQPPSSPYPSPDKRSSLYFPRSPSANEKSLHAESPGFSQASRHTPETSYGKLRPVRAAPPPPTQNHRRPAEKIEDVEITLV

SEQ ID NO: 31469 - protein, 515 aa, Homo sapiens
  Payload ID: 6162
  Gene Symbol: FCHSD2
  Gene Name: FCH and double SH3 domains 2
  Uniprot ID: O94868
  ENSP ID: ENSP00000386314
MQKLASQYLKRDWPGVKADDRNDYRSMYPVWKSFLEGTMQVAQSRMNICENYKNFISEPARTVRSLKEQQLKRCVDQLTKIQTELQETVKDLAKGKKKYFETEQMAHAVREKADIEAKSKLSLFQSRISLQKASVKLKARRSECNSKATHARNDYLLTLAAANAHQDRYYQTDLVNIMKALDGNVYDHLKDYLIAFSRTELETCQAVQNTFQFLLENSSKVVRDYNLQLFLQENAVFHKPQPFQFQPCDSDTSRQLESETGTTEEHSLNKEARKWATRVAREHKNIVHQQRVLNDLECHGAAVSEQSRAELEQKIDEARENIRKAEIIKLKAEARLDLLKQIGVSVDTWLKSAMNQVMEELENERWARPPAVTSNGTLHSLNADTEREEGEEFEDNMDVFDDSSSSPSGTLRNYPLTCKVVYSYKASQPDELTIEEHEVLEVIEDGDMEDWVKARNKVGQVGYVPEKYLQFPTSNSLLSMLQSLAALDSRSHTSSNSTEAELVSGSLNGDASGKD

SEQ ID NO: 31470 - protein, 740 aa, Homo sapiens
  Payload ID: 6162
  Gene Symbol: FCHSD2
  Gene Name: FCH and double SH3 domains 2
  Uniprot ID: O94868
  ENSP ID: ENSP00000386722
MQPPPRKVKVTQELKNIQVEQMTKLQAKHQAECDLLEDMRTFSQKKAAIEREYAQGMQKLASQYLKRDWPGVKADDRNDYRSMYPVWKSFLEGTMQVAQSRMNICENYKNFISEPARTVRSLKEQQLKRCVDQLTKIQTELQETVKDLAKGKKKYFETEQMAHAVREKADIEAKSKLSLFQSRISLQKASVKLKARRSECNSKATHARNDYLLTLAAANAHQDRYYQTDLVNIMKALDGNVYDHLKDYLIAFSRTELETCQAVQNTFQFLLENSSKVVRDYNLQLFLQENAVFHKPQPFQFQPCDSDTSRQLESETGTTEEHSLNKEARKWATRVAREHKNIVHQQRVLNDLECHGAAVSEQSRAELEQKIDEARENIRKAEIIKLKAEARLDLLKQIGVSVDTWLKSAMNQVMEELENERWARPPAVTSNGTLHSLNADTEREEGEEFEDNMDVFDDSSSSPSGTLRNYPLTCKVVYSYKASQPDELTIEEHEVLEVIEDGDMEDWVKARNKVGQVGYVPEKYLQFPTSNSLLSMLQSLAALDSRSHTSSNSTEAELVSGSLNGDASVCFVKALYDYEGQTDDELSFPEGAIIRILNKENQDDDGFWEGEFNGRIGVFPSVLVEELSASENGDTPWMREIQISPSPKPHASLPPLPLYDQPPSSPYPSPDKRSSLYFPRSPSANEKSLHAESPGFSQASRHTPETSYGKLRPVRAAPPPPTQNHRRPAEKIEDVEITLV

SEQ ID NO: 31471 - protein, 101 aa, Homo sapiens
  Payload ID: 6162
  Gene Symbol: FCHSD2
  Gene Name: FCH and double SH3 domains 2
  ENSP ID: ENSP00000386903
MPVISPSPKPHASLPPLPLYDQPPSSPYPSPDKRSSLYFPRSPSANEKSLHAESPGFSQASRHTPETSYGKLRPVRAAPPPPTQNHRRPAEKIEDVEITLV

SEQ ID NO: 31472 - protein, 764 aa, Homo sapiens
  Payload ID: 6162
  Gene Symbol: FCHSD2
  Gene Name: FCH and double SH3 domains 2
  ENSP ID: ENSP00000386987
MQPPPRKVKVTQELKNIQVEQMTKLQAKHQAECDLLEDMRTFSQKKAAIEREYAQGMQKLASQYLKRDWPGVKADDRNDYRSMYPVWKSFLEGTMQVAQSRMNICENYKNFISEPARTVRSLKEQQLKRCVDQLTKIQTELQETVKDLAKGKKKYFETEQMAHAVREKADIEAKSKLSLFQSRISLQKASVKLKARRSECNSKATHARNDYLLTLAAANAHQDRYYQTDLVNIMKALDGNVYDHLKDYLIAFSRTELETCQAVQNTFQFLLENSSKVVRDYNLQLFLQENAVFHKPQPFQFQPCDSDTSLKAAQLVDIELSPVSALRMTIAESRQLESETGTTEEHSLNKEARKWATRVAREHKNIVHQQRVLNDLECHGAAVSEQSRAELEQKIDEARENIRKAEIIKLKAEARLDLLKQIGVSVDTWLKSAMNQVMEELENERWARPPAVTSNGTLHSLNADTEREEGEEFEDNMDVFDDSSSSPSGTLRNYPLTCKVVYSYKASQPDELTIEEHEVLEVIEDGDMEDWVKARNKVGQVGYVPEKYLQFPTSNSLLSMLQSLAALDSRSHTSSNSTEAELVSGSLNGDASVCFVKALYDYEGQTDDELSFPEGAIIRILNKENQDDDGFWEGEFNGRIGVFPSVLVEELSASENGDTPWMREIQISPSPKPHASLPPLPLYDQPPSSPYPSPDKRSSLYFPRSPSANEKSLHAESPGFSQASRHTPETSYGKLRPVRAAPPPPTQNHRRPAEKIEDVEITLV

SEQ ID NO: 31473 - protein, 604 aa, Homo sapiens
  Payload ID: 6162
  Gene Symbol: FCHSD2
  Gene Name: FCH and double SH3 domains 2
  ENSP ID: ENSP00000402972
MAHAVREKADIEAKSKLSLFQSRISLQKASVKLKARRSECNSKATHARNDYLLTLAAANAHQDRYYQTDLVNIMKALDGNVYDHLKDYLIAFSRTELETCQAVQNTFQFLLENSSKVVRDYNLQLFLQENAVFHKPQPFQFQPCDSDTSLKAAQLVDIELSPVSALRMTIAESRQLESETGTTEEHSLNKEARKWATRVAREHKNIVHQQRVLNDLECHGAAVSEQSRAELEQKIDEARENIRKAEIIKLKAEARLDLLKQIGVSVDTWLKSAMNQVMEELENERWARPPAVTSNGTLHSLNADTEREEGEEFEDNMDVFDDSSSSPSGTLRNYPLTCKVVYSYKASQPDELTIEEHEVLEVIEDGDMEDWVKARNKVGQVGYVPEKYLQFPTSNSLLSMLQSLAALDSRSHTSSNSTEAELVSGSLNGDASVCFVKALYDYEGQTDDELSFPEGAIIRILNKENQDDDGFWEGEFNGRIGVFPSVLVEELSASENGDTPWMREIQISPSPKPHASLPPLPLYDQPPSSPYPSPDKRSSLYFPRSPSANEKSLHAESPGFSQASRHTPETSYGKLRPVRAAPPPPTQNHRRPAEKIEDVEITLV

SEQ ID NO: 31474 - protein, 117 aa, Homo sapiens
  Payload ID: 6162
  Gene Symbol: FCHSD2
  Gene Name: FCH and double SH3 domains 2
  ENSP ID: ENSP00000406420
  MOD_RES (1)..(1): Any amino acid
XVLNDLECHGAAVSEQSRAELEQKIDEARENIRKAEIIKLKAEARLDLLKQIGVSVDTWLKSAMNQVMEELENERWARPPAVTSNGTLHSIPKEKKAKSLKITWMFSMTAVPALLAP

SEQ ID NO: 31475 - protein, 140 aa, Homo sapiens
  Payload ID: 6162
  Gene Symbol: FCHSD2
  Gene Name: FCH and double SH3 domains 2
  ENSP ID: ENSP00000408706
MTKLQAKHQAECDLLEDMRTFSQKKAAIEREYAQGMQKLASQYLKRDWPGVKADDRNDYRSMYPVWKSFLEGTMQVAQSRMNICENYKNFISEPARTVRSLKEQQLKRCVDQLTKIQTELQETVKDLAKGKKKYFETEQM

SEQ ID NO: 31476 - protein, 85 aa, Homo sapiens
  Payload ID: 6162
  Gene Symbol: FCHSD2
  Gene Name: FCH and double SH3 domains 2
  ENSP ID: ENSP00000441616
  MOD_RES (1)..(1): Any amino acid
XEQMAHAVREKADIEAKSKLSLFQSRISLQKASVKLKARRSECNSKATHARNDYLLTLAAANAHQDRYYQTDLVNIMKVRQTFVI

SEQ ID NO: 31477 - protein, 889 aa, Homo sapiens
  Payload ID: 6163
  Gene Symbol: FCHO1
  Gene Name: FCH domain only 1
  Uniprot ID: O14526
  ENSP ID: ENSP00000252771
MSYFGEHFWGEKNHGFEVLYHSVKQGPISTKELADFIRERATIEETYSKAMAKLSKLASNGTPMGTFAPLWEVFRVSSDKLALCHLELTRKLQDLIKDVLRYGEEQLKTHKKCKEEVVSTLDAVQVLSGVSQLLPKSRENYLNRCMDQERLRRESTSQKEMDKAETKTKKAAESLRRSVEKYNSARADFEQKMLDSALRFQAMEETHLRHMKALLGSYAHSVEDTHVQIGQVHEEFKQNIENVSVEMLLRKFAESKGTGREKPGPLDFEAYSAAALQEAMKRLRGAKAFRLPGLSRREREPEPPAAVDFLEPDSGTCPEVDEEGFTVRPDVTQNSTAEPSRFSSSDSDFDDEEPRKFYVHIKPAPARAPACSPEAAAAQLRATAGSLILPPGPGGTMKRHSSRDAAGKPQRPRSAPRTSSCAERLQSEEQVSKNLFGPPLESAFDHEDFTGSSSLGFTSSPSPFSSSSPENVEDSGLDSPSHAAPGPSPDSWVPRPGTPQSPPSCRAPPPEARGIRAPPLPDSPQPLASSPGPWGLEALAGGDLMPAPADPTAREGLAAPPRRLRSRKVSCPLTRSNGDLSRSLSPSPLGSSAASTALERPSFLSQTGHGVSRGPSPVVLGSQDALPIATAFTEYVHAYFRGHSPSCLARVTGELTMTFPAGIVRVFSGTPPPPVLSFRLVHTTAIEHFQPNADLLFSDPSQSDPETKDFWLNMAALTEALQRQAEQNPTASYYNVVLLRYQFSRPGPQSVPLQLSAHWQCGATLTQVSVEYGYRPGATAVPTPLTNVQILLPVGEPVTNVRLQPAATWNLEEKRLTWRLPDVSEAGGSGRLSASWEPLSGPSTPSPVAAQFTSEGTTLSGVDLELVGSGYRMSLVKRRFATGMYLVSC

SEQ ID NO: 31478 - protein, 175 aa, Homo sapiens
  Payload ID: 6163
  Gene Symbol: FCHO1
  Gene Name: FCH domain only 1
  ENSP ID: ENSP00000469075
MSYFGEHFWGEKNHGFEVLYHSVKQGPISTKELADFIRERATIEETYSKAMAKLSKLASNGTPMGTFAPLWEVFRVSSDKLALCHLELTRKLQDLIKDVLRYGEEQLKTHKKCKEEVVSTLDAVQVLSGVSQLLPKSRENYLNRCMDQERLRRESTSQKEMDKAETKTKKAAESL

SEQ ID NO: 31479 - protein, 111 aa, Homo sapiens
  Payload ID: 6163
  Gene Symbol: FCHO1
  Gene Name: FCH domain only 1
  ENSP ID: ENSP00000469425
MSYFGEHFWGEKNHGFEVLYHSVKQGPISTKELADFIRERATIEETYSKAMAKLSKLASNGTPMGTFAPLWEVFRVSSDKLALCHLELTRKLQDLIKDVLRYGEEQLKTHK

SEQ ID NO: 31480 - protein, 28 aa, Homo sapiens
  Payload ID: 6163
  Gene Symbol: FCHO1
  Gene Name: FCH domain only 1
  ENSP ID: ENSP00000469458
MSYFGEHFWGEKNHGFEVLYHSVKQGPI

SEQ ID NO: 31481 - protein, 155 aa, Homo sapiens
  Payload ID: 6163
  Gene Symbol: FCHO1
  Gene Name: FCH domain only 1
  ENSP ID: ENSP00000469511
MSYFGEHFWGEKNHGFEVLYHSVKQGPISTKELADFIRERATIEETYSKAMAKLSKLASNGTPMGTFAPLWEVFRVSSDKLALCHLELTRKLQDLIKDVLRYGEEQLKTHKKCKEEVVSTLDAVQVLSGVSQLLPKSRENYLNRCMDQERLRRES

SEQ ID NO: 31482 - protein, 42 aa, Homo sapiens
  Payload ID: 6163
  Gene Symbol: FCHO1
  Gene Name: FCH domain only 1
  ENSP ID: ENSP00000469711
MSYFGEHFWGEKNHGFEVLYHSVKQGPISTKELADFIRERAT

SEQ ID NO: 31483 - protein, 23 aa, Homo sapiens
  Payload ID: 6163
  Gene Symbol: FCHO1
  Gene Name: FCH domain only 1
  ENSP ID: ENSP00000469967
MSYFGEHFWGEKNHGFEVLYHSV

SEQ ID NO: 31484 - protein, 35 aa, Homo sapiens
  Payload ID: 6163
  Gene Symbol: FCHO1
  Gene Name: FCH domain only 1
  ENSP ID: ENSP00000470068
MSYFGEHFWGEKNHGFEVLYHSVKQGPISTKELAD

SEQ ID NO: 31485 - protein, 889 aa, Homo sapiens; identical to SEQ ID NO: 31477
  Payload ID: 6163
  Gene Symbol: FCHO1
  Gene Name: FCH domain only 1
  Uniprot ID: O14526
  ENSP ID: ENSP00000470493

SEQ ID NO: 31486 - protein, 134 aa, Homo sapiens
  Payload ID: 6163
  Gene Symbol: FCHO1
  Gene Name: FCH domain only 1
  ENSP ID: ENSP00000470495
MAKLSKLASNGTPMGTFAPLWEVFRVSSDKLALCHLELTRKLQDLIKDVLRYGEEQLKTHKKCKEEVVSTLDAVQVLSGVSQLLPKSRENYLNRCMDQERLRRESTSQKEMDKAETKTKKAAESLRRSVEKYNS

SEQ ID NO: 31487 - protein, 92 aa, Homo sapiens
  Payload ID: 6163
  Gene Symbol: FCHO1
  Gene Name: FCH domain only 1
  ENSP ID: ENSP00000470511
MSYFGEHFWGEKNHGFEVLYHSVKQGPISTKELADFIRERATIEETYSKAMAKLSKLASNGTPMGTFAPLWEVFRVSSDKLALCHLELTRKL

SEQ ID NO: 31488 - protein, 896 aa, Homo sapiens
  Payload ID: 6163
  Gene Symbol: FCHO1
  Gene Name: FCH domain only 1
  ENSP ID: ENSP00000470568
MMFSPSFLNLYSHPLQGEKNHGFEVLYHSVKQGPISTKELADFIRERATIEETYSKAMAKLSKLASNGTPMGTFAPLWEVFRVSSDKLALCHLELTRKLQDLIKDVLRYGEEQLKTHKKCKEEVVSTLDAVQVLSGVSQLLPKSRENYLNRCMDQERLRRESTSQKEMDKAETKTKKAAESLRRSVEKYNSARADFEQKMLDSALRFQAMEETHLRHMKALLGSYAHSVEDTHVQIGQVHEEFKQNIENVSVEMLLRKFAESKGTGREKPGPLDFEAYSAAALQEAMKRLRGAKAFRLPGLSRREREPEPPAAVDFLEPDSGTCPEVDEEGFTVRPDVTQNSTAEPSRFSSSDSDFDDEEPRKFYVHIKPAPARAPACSPEAAAAQLRATAGSLILPPGPGGTMKRHSSRDAAGKPQRPRSAPRTSSCAERLQSEEQVSKNLFGPPLESAFDHEDFTGSSSLGFTSSPSPFSSSSPENVEDSGLDSPSHAAPGPSPDSWVPRPGTPQSPPSCRAPPPEARGIRAPPLPDSPQPLASSPGPWGLEALAGGDLMPAPADPTAREGLAAPPRRLRSRKVSCPLTRSNGDLSRSLSPSPLGSSAASTALERPSFLSQTGHGVSRGPSPVVLGSQDALPIATAFTEYVHAYFRGHSPSCLARVTGELTMTFPAGIVRVFSGTPPPPVLSFRLVHTTAIEHFQPNADLLFSDPSQSDPETKDFWLNMAALTEALQRQAEQNPTASYYNVVLLRYQFSRPGPQSVPLQLSAHWQCGATLTQVSVEYGYRPGATAVPTPLTNVQILLPVGEPVTNVRLQPAATWNLEEKRLTWRLPDVSEAGGSGRLSASWEPLSGPSTPSPVAAQFTSEGTTLSGVDLELVGSGYRMSLVKRRFATGMYLVSC

SEQ ID NO: 31489 - protein, 235 aa, Homo sapiens
  Payload ID: 6163
  Gene Symbol: FCHO1
  Gene Name: FCH domain only 1
  ENSP ID: ENSP00000470578
MSYFGEHFWGEKNHGFEVLYHSVKQGPISTKELADFIRERATIEETYSKAMAKLSKLASNGTPMGTFAPLWEVFRVSSDKLALCHLELTRKLQDLIKDVLRYGEEQLKTHKKVLSGVSQLLPKSRENYLNRCMDQERLRRESTSQKEMDKAETKTKKAAESLRRSVEKYNSARADFEQKMLDSALRFQAMEETHLRHMKALLGSYAHSVEDTHVQIGQVHEEFKQNIENVSVEML

SEQ ID NO: 31490 - protein, 125 aa, Homo sapiens
  Payload ID: 6163
  Gene Symbol: FCHO1
  Gene Name: FCH domain only 1
  ENSP ID: ENSP00000470730
MSYFGEHFWGEKNHGFEVLYHSVKQGPISTKELADFIRERATIEETYSKAMAKLSKLASNGTPMGTFAPLWEVFRVSSDKLALCHLELTRKLQDLIKDVLRYGEEQLKTHKKCKEEVVSTLDAVQ

SEQ ID NO: 31491 - protein, 889 aa, Homo sapiens; identical to SEQ ID NO: 31477
  Payload ID: 6163
  Gene Symbol: FCHO1
  Gene Name: FCH domain only 1
  Uniprot ID: O14526
  ENSP ID: ENSP00000470731

SEQ ID NO: 31492 - protein, 2 aa, Homo sapiens
  Payload ID: 6163
  Gene Symbol: FCHO1
  Gene Name: FCH domain only 1
  ENSP ID: ENSP00000471003
MA

SEQ ID NO: 31493 - protein, 15 aa, Homo sapiens
  Payload ID: 6163
  Gene Symbol: FCHO1
  Gene Name: FCH domain only 1
  ENSP ID: ENSP00000471450
MSYFGEHFWGEKNHG

SEQ ID NO: 31494 - protein, 101 aa, Homo sapiens
  Payload ID: 6163
  Gene Symbol: FCHO1
  Gene Name: FCH domain only 1
  ENSP ID: ENSP00000471563
MSYFGEHFWGEKNHGFEVLYHSVKQGPISTKELADFIRERATIEETYSKAMAKLSKLASNGTPMGTFAPLWEVFRVSSDKLALCHLELTRKLQDLIKDVLR

SEQ ID NO: 31495 - protein, 264 aa, Homo sapiens
  Payload ID: 6163
  Gene Symbol: FCHO1
  Gene Name: FCH domain only 1
  ENSP ID: ENSP00000471935
MSYFGEHFWGEKNHGFEVLYHSVKQGPISTKELADFIRERATIEETYSKAMAKLSKLASNGTPMGTFAPLWEVFRVSSDKLALCHLELTRKLQDLIKDVLRYGEEQLKTHKKCKEEVVSTLDAVQVLSGVSQLLPKSRENYLNRCMDQERLRRESTSQKEMDKAETKTKKAAESLRRSVEKYNSARADFEQKMLDSALRFQAMEETHLRHMKALLGSYAHSVEDTHVQIGQVHEEFKQNIENVSVEMLLRKFAESKGTGREKPG

SEQ ID NO: 31496 - protein, 889 aa, Homo sapiens; identical to SEQ ID NO: 31477
  Payload ID: 6163
  Gene Symbol: FCHO1
  Gene Name: FCH domain only 1
  Uniprot ID: O14526
  ENSP ID: ENSP00000472417

SEQ ID NO: 31497 - protein, 97 aa, Homo sapiens
  Payload ID: 6163
  Gene Symbol: FCHO1
  Gene Name: FCH domain only 1
  ENSP ID: ENSP00000472623
MSYFGEHFWGEKNHGFEVLYHSVKQGPISTKELADFIRERATIEETYSKAMAKLSKLASNGTPMGTFAPLWEVFRVSSDKLALCHLELTRKLQDLIK

SEQ ID NO: 31498 - protein, 839 aa, Homo sapiens
  Payload ID: 6163
  Gene Symbol: FCHO1
  Gene Name: FCH domain only 1
  Uniprot ID: O14526
  ENSP ID: ENSP00000472668
MAKLSKLASNGTPMGTFAPLWEVFRVSSDKLALCHLELTRKLQDLIKDVLRYGEEQLKTHKKCKEEVVSTLDAVQVLSGVSQLLPKSRENYLNRCMDQERLRRESTSQKEMDKAETKTKKAAESLRRSVEKYNSARADFEQKMLDSALRFQAMEETHLRHMKALLGSYAHSVEDTHVQIGQVHEEFKQNIENVSVEMLLRKFAESKGTGREKPGPLDFEAYSAAALQEAMKRLRGAKAFRLPGLSRREREPEPPAAVDFLEPDSGTCPEVDEEGFTVRPDVTQNSTAEPSRFSSSDSDFDDEEPRKFYVHIKPAPARAPACSPEAAAAQLRATAGSLILPPGPGGTMKRHSSRDAAGKPQRPRSAPRTSSCAERLQSEEQVSKNLFGPPLESAFDHEDFTGSSSLGFTSSPSPFSSSSPENVEDSGLDSPSHAAPGPSPDSWVPRPGTPQSPPSCRAPPPEARGIRAPPLPDSPQPLASSPGPWGLEALAGGDLMPAPADPTAREGLAAPPRRLRSRKVSCPLTRSNGDLSRSLSPSPLGSSAASTALERPSFLSQTGHGVSRGPSPVVLGSQDALPIATAFTEYVHAYFRGHSPSCLARVTGELTMTFPAGIVRVFSGTPPPPVLSFRLVHTTAIEHFQPNADLLFSDPSQSDPETKDFWLNMAALTEALQRQAEQNPTASYYNVVLLRYQFSRPGPQSVPLQLSAHWQCGATLTQVSVEYGYRPGATAVPTPLTNVQILLPVGEPVTNVRLQPAATWNLEEKRLTWRLPDVSEAGGSGRLSASWEPLSGPSTPSPVAAQFTSEGTTLSGVDLELVGSGYRMSLVKRRFATGMYLVSC

SEQ ID NO: 31499 - protein, 891 aa, Homo sapiens
  Payload ID: 6163
  Gene Symbol: FCHO1
  Gene Name: FCH domain only 1
  ENSP ID: ENSP00000473001
MSYFGEHFWGEKNHGFEVLYHSVKQGPISTKELADFIRERATIEETYSKAMAKLSKLASNGTPMGTFAPLWEVFRVSSDKLALCHLELTRKLQDLIKDVLRYGEEQLKTHKKCKEEVVSTLDAVQVLSGVSQLLPKSRENYLNRCMDQERLRRESTSQKEMDKAETKTKKAAESLRRSVEKYNSARADFEQKMLDSALRFQAMEETHLRHMKALLGSYAHSVEDTHVQIGQVHEEFKQNIENVSVEMLLRKFAESKGTGREKPGPLDFEAYSAAALQEAMKRLRGAKAFRLPGLSRREREPEPPAAVDFLEPDSGTCPEVDEEGFTVRPDVTQNSTAEPSRFSSSDSDFDDEEPRKFYVHIKPAPARAPACSPEAAAAQLRATAGSLILPPGPGGTMKRHSSRDAAGKPQRPRSAPRTSSCAERLQSEEQVSKNLFGPPLESAFDHEDFTGSSSLGFTSSPSPFSSSSPENVEDSGLDSPSHAAPGPSPDSWVPRPGTPQSPPSCRAPPPEARGIRAPPLPDSPQPLASSPGPWGLEALAGGDLMPAPADPTAREGLAAPPRRLRSRKVSCPLTRSNGDLSRSLSPSPLGSSAASTALERPSFLSQTGHGVSRGPSPVVLGSQDALPIATAFTEYVHAYFRGHSPSCLARVTGELTMTFPAGIVRVFSGTPPPPVLSFRLVHTTAIEHFQPNADLLFSDPSQSDPETKDFWLNMAALTEALQRQAEQNPTASYYNVVLLRYQFSRPGPQSVPLQLSAHWQCGATLTQVSVEYGYRPGATAVPTPLTNVQILLPVGEPVTNVRLQPAATWNLEEKRLTWRLPDVSEAGGSGRLSASWEPLSGPSTPSPVAAQFTSEGTTLSGVDLELVGSGYRMSLVKRRFATAAPPQGCTW

SEQ ID NO: 31500 - protein, 218 aa, Homo sapiens
  Payload ID: 6163
  Gene Symbol: FCHO1
  Gene Name: FCH domain only 1
  ENSP ID: ENSP00000473169
MSYFGEHFWGEKNHGFEVLYHSVKQGPISTKELADFIRERATIEETYSKAMAKLSKLASNGTPMGTFAPLWEVFRVSSDKLALCHLELTRKLQDLIKDVLRYGEEQLKTHKKCKEEVVSTLDAVQVLSGVSQLLPKSRENYLNRCMDQERLRRESTSQKEMDKAETKTKKAAESLRRSVEKYNSARADFEQKMLDSALRFQAMEETHLRHMKALLGSY

SEQ ID NO: 31501 - protein, 185 aa, Homo sapiens
  Payload ID: 6163
  Gene Symbol: FCHO1
  Gene Name: FCH domain only 1
  ENSP ID: ENSP00000473173
MSYFGEHFWGEKNHGFEVLYHSVKQGPISTKELADFIRERATIEETYSKAMAKLSKLASNGTPMGTFAPLWEVFRVSSDKLALCHLELTRKLQDLIKDVLRYGEEQLKTHKKVLSGVSQLLPKSRENYLNRCMDQERLRRESTSQKEMDKAETKTKKAAESLRRSVEKYNSARADFEQKMLDSAL

SEQ ID NO: 31502 - protein, 378 aa, Homo sapiens
  Payload ID: 6164
  Gene Symbol: FCHO2
  Gene Name: FCH domain only 2
  ENSP ID: ENSP00000287761
MVMAYFVENFWGEKNSGFDVLYHNMKHGQISTKELADFVRERATIEEAYSRSMTKLAKSASNYSQLGTFAPVWDVFKTSTEKLANCHLDLVRKLQELIKEVQKYGEEQVKSHKKTKEEVAGTLEAVQTIQSITQALQKSKENYNAKCVEQERLKKEGATQREIEKAAVKSKKATDTYKLYVEKYALAKADFEQKMTETAQKFQDIEETHLIHIKEIIGSLSNAIKEIHLQIGQVHEEFINNMANTTVESLIQKFAESKGTGKERPGLIEFEECDTASAVEGIKPRKRKTFALPGIIKKEKDAESVWSFTVVAQVGMQWRDLGLLHSPPPRFKRFSSYLSLPSSWNYGAHHHIWLIFCIFSRDRVSPYWPGWSRTPDLR

SEQ ID NO: 31503 - protein, 810 aa, Homo sapiens
  Payload ID: 6164
  Gene Symbol: FCHO2
  Gene Name: FCH domain only 2
  Uniprot ID: Q0JRZ9
  ENSP ID: ENSP00000393776
MVMAYFVENFWGEKNSGFDVLYHNMKHGQISTKELADFVRERATIEEAYSRSMTKLAKSASNYSQLGTFAPVWDVFKTSTEKLANCHLDLVRKLQELIKEVQKYGEEQVKSHKKTKEEVAGTLEAVQTIQSITQALQKSKENYNAKCVEQERLKKEGATQREIEKAAVKSKKATDTYKLYVEKYALAKADFEQKMTETAQKFQDIEETHLIHIKEIIGSLSNAIKEIHLQIGQVHEEFINNMANTTVESLIQKFAESKGTGKERPGLIEFEECDTASAVEGIKPRKRKTFALPGIIKKEKDAESVECPDADSLNIPDVDEEGYSIKPETNQNDTKENHFYSSSDSDSEDEEPKKYRIEIKPMHPNNSHHTMASLDELKVSIGNITLSPAISRHSPVQMNRNLSNEELTKSKPSAPPNEKGTSDLLAWDPLFGPSLDSSSSSSLTSSSSARPTTPLSVGTIVPPPRPASRPKLTSGKLSGINEIPRPFSPPVTSNTSPPPAAPLARAESSSSISSSASLSAANTPTVGVSRGPSPVSLGNQDTLPVAVALTESVNAYFKGADPTKCIVKITGDMTMSFPSGIIKVFTSNPTPAVLCFRVKNISRLEQILPNAQLVFSDPSQCDSNTKDFWMNMQAVTVYLKKLSEQNPAASYYNVDVLKYQVSSNGIQSTPLNLATYWKCSASTTDLRVDYKYNPEAMVAPSVLSNIQVVVPVDGGVTNMQSLPPAIWNAEQMKAFWKLSSISEKSENGGSGSLRAKFDLSEGPSKPTTLAVQFLSEGSTLSGVDFELVGTGYRLSLIKKRFATGRYLADC

SEQ ID NO: 31504 - protein, 231 aa, Homo sapiens
  Payload ID: 6164
  Gene Symbol: FCHO2
  Gene Name: FCH domain only 2
  ENSP ID: ENSP00000426842
MVMAYFVENFWGEKNSGFDVLYHNMKHGQISTKELADFVRERTFAPVWDVFKTSTEKLANCHLDLVRKLQELIKEVQKYGEEQVKSHKKTKEEVAGTLEAVQTIQSITQALQKSKENYNAKCVEQERLKKEGATQREIEKAAVKSKKATDTYKLYVEKYALAKADFEQKMTETAQKFQDIEETHLIHIKEIIGSLSNAIKEIHLQIGQVHEEFINNMANTTVESLIQKFAE

SEQ ID NO: 31505 - protein, 777 aa, Homo sapiens
  Payload ID: 6164
  Gene Symbol: FCHO2
  Gene Name: FCH domain only 2
  Uniprot ID: Q0JRZ9
  ENSP ID: ENSP00000427296
MVMAYFVENFWGEKNSGFDVLYHNMKHGQISTKELADFVRERATIEEAYSRSMTKLAKSASNYSQLGTFAPVWDVFKTSTEKLANCHLDLVRKLQELIKEVQKYGEEQVKSHKKTKEEVAGTLEAVQTIQSITQALQKSKENYNAKCVEQERLKKEGATQREIEKAAVKSKKATDTYKLYVEKYALAKADFEQKMTETAQVHEEFINNMANTTVESLIQKFAESKGTGKERPGLIEFEECDTASAVEGIKPRKRKTFALPGIIKKEKDAESVECPDADSLNIPDVDEEGYSIKPETNQNDTKENHFYSSSDSDSEDEEPKKYRIEIKPMHPNNSHHTMASLDELKVSIGNITLSPAISRHSPVQMNRNLSNEELTKSKPSAPPNEKGTSDLLAWDPLFGPSLDSSSSSSLTSSSSARPTTPLSVGTIVPPPRPASRPKLTSGKLSGINEIPRPFSPPVTSNTSPPPAAPLARAESSSSISSSASLSAANTPTVGVSRGPSPVSLGNQDTLPVAVALTESVNAYFKGADPTKCIVKITGDMTMSFPSGIIKVFTSNPTPAVLCFRVKNISRLEQILPNAQLVFSDPSQCDSNTKDFWMNMQAVTVYLKKLSEQNPAASYYNVDVLKYQVSSNGIQSTPLNLATYWKCSASTTDLRVDYKYNPEAMVAPSVLSNIQVVVPVDGGVTNMQSLPPAIWNAEQMKAFWKLSSISEKSENGGSGSLRAKFDLSEGPSKPTTLAVQFLSEGSTLSGVDFELVGTGYRLSLIKKRFATGRYLADC

SEQ ID NO: 31506 - protein, 555 aa, Homo sapiens
  Payload ID: 6165
  Gene Symbol: FLVCR1
  Gene Name: feline leukemia virus subgroup C cellular receptor 1
  Uniprot ID: Q9Y5Y0
  ENSP ID: ENSP00000355938
MARPDDEEGAAVAPGHPLAKGYLPLPRGAPVGKESVELQNGPKAGTFPVNGAPRDSLAAASGVLGGPQTPLAPEEETQARLLPAGAGAETPGAESSPLPLTALSPRRFVVLLIFSLYSLVNAFQWIQYSIISNVFEGFYGVTLLHIDWLSMVYMLAYVPLIFPATWLLDTRGLRLTALLGSGLNCLGAWIKCGSVQQHLFWVTMLGQCLCSVAQVFILGLPSRIASVWFGPKEVSTACATAVLGNQLGTAVGFLLPPVLVPNTQNDTNLLACNISTMFYGTSAVATLLFILTAIAFKEKPRYPPSQAQAALQDSPPEEYSYKKSIRNLFKNIPFVLLLITYGIMTGAFYSVSTLLNQMILTYYEGEEVNAGRIGLTLVVAGMVGSILCGLWLDYTKTYKQTTLIVYILSFIGMVIFTFTLDLRYIIIVFVTGGVLGFFMTGYLPLGFEFAVEITYPESEGTSSGLLNASAQIFGILFTLAQGKLTSDYGPKAGNIFLCVWMFIGIILTALIKSDLRRHNINIGITNVDVKAIPADSPTDQEPKTVMLSKQSESAI

SEQ ID NO: 31507 - protein, 354 aa, Homo sapiens
  Payload ID: 6165
  Gene Symbol: FLVCR1
  Gene Name: feline leukemia virus subgroup C cellular receptor 1
  ENSP ID: ENSP00000414680
  MOD_RES (1)..(1): Any amino acid
XAYVPLIFPATWLLDTRGLRLTALLGSGLNCLGAWIKCGSVQQHLFWVTMLGQCLCSVAQVFILGLPSRIASVWFGPKEVSTACATAVLGNQLGTAVGFLLPPVLVPNTQNDTNLLACNISTMFYGTSAVATLLFILTAIGIMTGAFYSVSTLLNQMILTYYEGEEVNAGRIGLTLVVAGMVGSILCGLWLDYTKTYKQTTLIVYILSFIGMVIFTFTLDLRYIIIVFVTGGVLGFFMTGYLPLGFEFAVEITYPESEGTSSGLLNASAQIFGILFTLAQGKLTSDYGPKAGNIFLCVWMFIGIILTALIKSDLRRHNINIGITNVDVKAIPADSPTDQEPKTVMLSKQSESAI

SEQ ID NO: 31508 - protein, 526 aa, Homo sapiens
  Payload ID: 6166
  Gene Symbol: FLVCR2
  Gene Name: feline leukemia virus subgroup C cellular receptor family, member 2
  Uniprot ID: Q9UPI3
  ENSP ID: ENSP00000238667
MVNEGPNQEESDDTPVPESALQADPSVSVHPSVSVHPSVSINPSVSVHPSSSAHPSALAQPSGLAHPSSSGPEDLSVIKVSRRRWAVVLVFSCYSMCNSFQWIQYGSINNIFMHFYGVSAFAIDWLSMCYMLTYIPLLLPVAWLLEKFGLRTIALTGSALNCLGAWVKLGSLKPHLFPVTVVGQLICSVAQVFILGMPSRIASVWFGANEVSTACSVAVFGNQLGIAIGFLVPPVLVPNIEDRDELAYHISIMFYIIGGVATLLLILVIIVFKEKPKYPPSRAQSLSYALTSPDASYLGSIARLFKNLNFVLLVITYGLNAGAFYALSTLLNRMVIWHYPGEEVNAGRIGLTIVIAGMLGAVISGIWLDRSKTYKETTLVVYIMTLVGMVVYTFTLNLGHLWVVFITAGTMGFFMTGYLPLGFEFAVELTYPESEGISSGLLNISAQVFGIIFTISQGQIIDNYGTKPGNIFLCVFLTLGAALTAFIKADLRRQKANKETLENKLQEEEEESNTSKVPTAVSEDHL

SEQ ID NO: 31509 - protein, 321 aa, Homo sapiens
  Payload ID: 6166
  Gene Symbol: FLVCR2
  Gene Name: feline leukemia virus subgroup C cellular receptor family, member 2
  Uniprot ID: Q9UPI3
  ENSP ID: ENSP00000443439
MSADNSSTICVCRSVRQELGIAIGFLVPPVLVPNIEDRDELAYHISIMFYIIGGVATLLLILVIIVFKEKPKYPPSRAQSLSYALTSPDASYLGSIARLFKNLNFVLLVITYGLNAGAFYALSTLLNRMVIWHYPGEEVNAGRIGLTIVIAGMLGAVISGIWLDRSKTYKETTLVVYIMTLVGMVVYTFTLNLGHLWVVFITAGTMGFFMTGYLPLGFEFAVELTYPESEGISSGLLNISAQVFGIIFTISQGQIIDNYGTKPGNIFLCVFLTLGAALTAFIKADLRRQKANKETLENKLQEEEEESNTSKVPTAVSEDHL

SEQ ID NO: 31510 - protein, 88 aa, Homo sapiens
  Payload ID: 6166
  Gene Symbol: FLVCR2
  Gene Name: feline leukemia virus subgroup C cellular receptor family, member 2
  ENSP ID: ENSP00000451104
MFYIIGGVATLLLILVIIVFKEKPKYPPSRAQSLSYALTSPDASYLGSIARLFKNLNFVLLVITYGLNAGAFYALSTLLNRMVIWHYP

SEQ ID NO: 31511 - protein, 133 aa, Homo sapiens
  Payload ID: 6166
  Gene Symbol: FLVCR2
  Gene Name: feline leukemia virus subgroup C cellular receptor family, member 2
  ENSP ID: ENSP00000451603
MFYIIGGVATLLLILVIIVFKEKPKYPPSRAQSLSYALTSPDASYLGSIARLFKNLNFVLLVITYGLNAGAFYALSTLLNRMVIWHYPGEEVNAGRIGLTIVIAGMLGAVISGIWLDRSKTYKNLCHPNCLIQ

SEQ ID NO: 31512 - protein, 203 aa, Homo sapiens
  Payload ID: 6166
  Gene Symbol: FLVCR2
  Gene Name: feline leukemia virus subgroup C cellular receptor family, member 2
  ENSP ID: ENSP00000451781
MSPYGISSLGNGLSKWLSLNAGAFYALSTLLNRMVIWHYPGEEVNAGRIGLTIVIAGMLGAVISGIWLDRSKTYKETTLVVYIMTLVGMVVYTFTLNLGHLWVVFITAGTMGFFMTGYLPLGFEFAVELTYPESEGISSGLLNISAQVFGIIFTISQGQIIDNYGTKPGNIFLCVFLTLGAALTAFIKADLRRQKANKETLEN

SEQ ID NO: 31513 - protein, 241 aa, Homo sapiens
  Payload ID: 6166
  Gene Symbol: FLVCR2
  Gene Name: feline leukemia virus subgroup C cellular receptor family, member 2
  ENSP ID: ENSP00000452453
MCPDLHPSKYVQPPLSSSSSPLKGGQEAFSPLGLNAGAFYALSTLLNRMVIWHYPGEEVNAGRIGLTIVIAGMLGAVISGIWLDRSKTYKETTLVVYIMTLVGMVVYTFTLNLGHLWVVFITAGTMGFFMTGYLPLGFEFAVELTYPESEGISSGLLNISAQVFGIIFTISQGQIIDNYGTKPGNIFLCVFLTLGAALTAFIKADLRRQKANKETLENKLQEEEEESNTSKVPTAVSEDHL

SEQ ID NO: 31514 - protein, 93 aa, Homo sapiens
  Payload ID: 6166
  Gene Symbol: FLVCR2
  Gene Name: feline leukemia virus subgroup C cellular receptor family, member 2
  ENSP ID: ENSP00000452468
MFYIIGGVATLLLILVIIVFKEKPKYPPSRAQSLSYALTSPDASYLGSIARLFKNLNFVLLVITYETPRGGGGEQHQQSAHCCVRGSSLRGRW

SEQ ID NO: 31515 - protein, 203 aa, Homo sapiens
  Payload ID: 6166
  Gene Symbol: FLVCR2
  Gene Name: feline leukemia virus subgroup C cellular receptor family, member 2
  ENSP ID: ENSP00000452584
MFYIIGGVATLLLILVIIGLNAGAFYALSTLLNRMVIWHYPGEEVNAGRIGLTIVIAGMLGAVISGIWLDRSKTYKETTLVVYIMTLVGMVVYTFTLNLGHLWVVFITAGTMGFFMTGYLPLGFEFAVELTYPESEGISSGLLNISAQVFGIIFTISQGQIIDNYGTKPGNIFLCVFLTLGAALTAFIKADLRRQKANKETLE

SEQ ID NO: 31516 - protein, 669 aa, Homo sapiens
  Payload ID: 6167
  Gene Symbol: FEM1A
  Gene Name: fem-1 homolog a (C. elegans)
  Uniprot ID: Q9BSK4
  ENSP ID: ENSP00000269856
MDLRTAVYNAARDGKLQLLQKLLSGRSREELDELTGEVAGGGTPLLIAARYGHLDVVEYLVDRCGASVEAGGSVHFDGETIEGAPPLWAASAAGHLDVVRSLLRRGASVNRTTRTNSTPLRAACFDGHLEVVRYLVGEHQADLEVANRHGHTCLMISCYKGHREIARYLLEQGAQVNRRSAKGNTALHDCAESGSLEILQLLLGCKARMERDGYGMTPLLAASVTGHTNIVEYLIQEQPGQEQVAGGEAQPGLPQEDPSTSQGCAQPQGAPCCSSSPEEPLNGESYESCCPTSREAAVEALELLGATYVDKKRDLLGALKHWRRAMELRHQGGEYLPKPEPPQLVLAYDYSREVNTTEELEALITDPDEMRMQALLIRERILGPSHPDTSYYIRYRGAVYADSGNFERCIRLWKYALDMQQSNLEPLSPMTASSFLSFAELFSYVLQDRAAKGSLGTQIGFADLMGVLTKGVREVERALQLPREPGDSAQFTKALAIILHLLYLLEKVECTPSQEHLKHQTVYRLLKCAPRGKNGFTPLHMAVDKDTTNVGRYPVGRFPSLHVVKVLLDCGADPDSRDFDNNTPLHIAAQNNCPAIMNALIEAGAHMDATNAFKKTAYELLDEKLLARGTMQPFNYVTLQCLAARALDKNKIPYKGFIPEDLEAFIELH

SEQ ID NO: 31517 - protein, 627 aa, Homo sapiens
  Payload ID: 6168
  Gene Symbol: FEM1B
  Gene Name: fem-1 homolog b (C. elegans)
  Uniprot ID: Q9UK73
  ENSP ID: ENSP00000307298
MEGLAGYVYKAASEGKVLTLAALLLNRSESDIRYLLGYVSQQGGQRSTPLIIAARNGHAKVVRLLLEHYRVQTQQTGTVRFDGYVIDGATALWCAAGAGHFEVVKLLVSHGANVNHTTVTNSTPLRAACFDGRLDIVKYLVENNANISIANKYDNTCLMIAAYKGHTDVVRYLLEQRADPNAKAHCGATALHFAAEAGHIDIVKELIKWRAAIVVNGHGMTPLKVAAESCKADVVELLLSHADCDRRSRIEALELLGASFANDRENYDIIKTYHYLYLAMLERFQDGDNILEKEVLPPIHAYGNRTECRNPQELESIRQDRDALHMEGLIVRERILGADNIDVSHPIIYRGAVYADNMEFEQCIKLWLHALHLRQKGNRNTHKDLLRFAQVFSQMIHLNETVKAPDIECVLRCSVLEIEQSMNRVKNISDADVHNAMDNYECNLYTFLYLVCISTKTQCSEEDQCKINKQIYNLIHLDPRTREGFTLLHLAVNSNTPVDDFHTNDVCSFPNALVTKLLLDCGAEVNAVDNEGNSALHIIVQYNRPISDFLTLHSIIISLVEAGAHTDMTNKQNKTPLDKSTTGVSEILLKTQMKMSLKCLAARAVRANDINYQDQIPRTLEEFVGFH

SEQ ID NO: 31518 - protein, 269 aa, Homo sapiens
  Payload ID: 6168
  Gene Symbol: FEM1B
  Gene Name: fem-1 homolog b (C. elegans)
  ENSP ID: ENSP00000456968
  MOD_RES (1)..(1): Any amino acid
XDGDNILEKEVLPPIHAYGNRTECRNPQELESIRQDRDALHMEGLIVRERILGADNIDVSHPIIYRGAVYADNMEFEQCIKLWLHALHLRQKVCISTKTQCSEEDQCKINKQIYNLIHLDPRTREGFTLLHLAVNSNTPVDDFHTNDVCSFPNALVTKLLLDCGAEVNAVDNEGNSALHIIVQYNRPISDFLTLHSIIISLVEAGAHTDMTNKQNKTPLDKSTTGVSEILLKTQMKMSLKCLAARAVRANDINYQDQIPRTLEEFVGFH

SEQ ID NO: 31519 - protein, 4 aa, Homo sapiens
  Payload ID: 6168
  Gene Symbol: FEM1B
  Gene Name: fem-1 homolog b (C. elegans)
  ENSP ID: ENSP00000457002
MIAA

SEQ ID NO: 31520 - protein, 80 aa, Homo sapiens
  Payload ID: 6168
  Gene Symbol: FEM1B
  Gene Name: fem-1 homolog b (C. elegans)
  ENSP ID: ENSP00000457342
MIAAYKGHTDVVRYLLEQRADPNAKAHCGATALHFAAEAGHIDIVKELIKWRAAIVVNGHGMTPLKVAAESCKADVVELL

SEQ ID NO: 31521 - protein, 617 aa, Homo sapiens
  Payload ID: 6169
  Gene Symbol: FEM1C
  Gene Name: fem-1 homolog c (C. elegans)
  Uniprot ID: Q96JP0
  ENSP ID: ENSP00000274457
MDLKTAVFNAARDGKLRLLTKLLASKSKEEVSSLISEKTNGATPLLMAARYGHLDMVEFLLEQCSASIEVGGSVNFDGETIEGAPPLWAASAAGHLKVVQSLLNHGASVNNTTLTNSTPLRAACFDGHLEIVKYLVEHKADLEVSNRHGHTCLMISCYKGHKEIAQYLLEKGADVNRKSVKGNTALHDCAESGSLDIMKMLLMYCAKMEKDGYGMTPLLSASVTGHTNIVDFLTHHAQTSKTERINALELLGATFVDKKRDLLGALKYWKKAMNMRYSDRTNIISKPVPQTLIMAYDYAKEVNSAEELEGLIADPDEMRMQALLIRERILGPSHPDTSYYIRYRGAVYADSGNFKRCINLWKYALDMQQSNLDPLSPMTASSLLSFAELFSFMLQDRAKGLLGTTVTFDDLMGILCKSVLEIERAIKQTQCPADPLQLNKALSIILHLICLLEKVPCTLEQDHFKKQTIYRFLKLHPRGKNNFSPLHLAVDKNTTCVGRYPVCKFPSLQVTAILIECGADVNVRDSDDNSPLHIAALNNHPDIMNLLIKSGAHFDATNLHKQTASDLLDEKEIAKNLIQPINHTTLQCLAARVIVNHRIYYKGHIPEKLETFVSLHR

SEQ ID NO: 31522 - protein, 822 aa, Homo sapiens
  Payload ID: 6170
  Gene Symbol: FER
  Gene Name: fer (fps/fes related) tyrosine kinase
  Uniprot ID: P16591
  ENSP ID: ENSP00000281092
MGFGSDLKNSHEAVLKLQDWELRLLETVKKFMALRIKSDKEYASTLQNLCNQVDKESTVQMNYVSNVSKSWLLMIQQTEQLSRIMKTHAEDLNSGPLHRLTMMIKDKQQVKKSYIGVHQQIEAEMIKVTKTELEKLKCSYRQLIKEMNSAKEKYKEALAKGKETEKAKERYDKATMKLHMLHNQYVLALKGAQLHQNQYYDITLPLLLDSLQKMQEEMIKALKGIFDEYSQITSLVTEEIVNVHKEIQMSVEQIDPSTEYNNFIDVHRTTAAKEQEIEFDTSLLEENENLQANEIMWNNLTAESLQVMLKTLAEELMQTQQMLLNKEEAVLELEKRIEESSETCEKKSDIVLLLSQKQALEELKQSVQQLRCTEAKFSAQKELLEQKVQENDGKEPPPVVNYEEDARSVTSMERKERLSKFESIRHSIAGIIRSPKSALGSSALSDMISISEKPLAEQDWYHGAIPRIEAQELLKKQGDFLVRESHGKPGEYVLSVYSDGQRRHFIIQYVDNMYRFEGTGFSNIPQLIDHHYTTKQVITKKSGVVLLNPIPKDKKWILSHEDVILGELLGKGNFGEVYKGTLKDKTSVAVKTCKEDLPQELKIKFLQEAKILKQYDHPNIVKLIGVCTQRQPVYIIMELVSGGDFLTFLRRKKDELKLKQLVKFSLDAAAGMLYLESKNCIHRDLAARNCLVGENNVLKISDFGMSRQEDGGVYSSSGLKQIPIKWTAPEALNYGRYSSESDVWSFGILLWETFSLGVCPYPGMTNQQAREQVERGYRMSAPQHCPEDISKIMMKCWDYKPENRPKFSELQKELTIIKRKLT

SEQ ID NO: 31523 - protein, 411 aa, Homo sapiens
  Payload ID: 6170
  Gene Symbol: FER
  Gene Name: fer (fps/fes related) tyrosine kinase
  ENSP ID: ENSP00000394297
MERKERLSKFESIRHSIAGIIRSPKSALGSSALSDMISISEKPLAEQDWYHGAIPRIEAQELLKKQGDFLVRESHGKPGEYVLSVYSDGQRRHFIIQYVDNMYRFEGTGFSNIPQLIDHHYTTKQVITKKSGVVLLNPIPKDKKWILSHEDVILGELLGKGNFGEVYKGTLKDKTSVAVKTCKEDLPQELKIKFLQEAKILKQYDHPNIVKLIGVCTQRQPVYIIMELVSGGDFLTFLRRKKDELKLKQLVKFSLDAAAGMLYLESKNCIHRDLAARNCLVGENNVLKISDFGMSRQEDGGVYSSSGLKQIPIKWTAPEALNYGRYSSESDVWSFGILLWETFSLGVCPYPGMTNQQAREQVERGYRMSAPQHCPEDISKIMMKCWDYKPENRPKFSELQKELTIIKRKLT

SEQ ID NO: 31524 - protein, 84 aa, Homo sapiens
  Payload ID: 6170
  Gene Symbol: FER
  Gene Name: fer (fps/fes related) tyrosine kinase
  ENSP ID: ENSP00000421951
MGFGSDLKNSHEAVLKLQDWELRLLETVKKFMALRIKSDKEYASTLQNLCNQVDKESTVQMNYVSNVSKGRKLKRPRNDTTKPQ

SEQ ID NO: 31525 - protein, 453 aa, Homo sapiens
  Payload ID: 6170
  Gene Symbol: FER
  Gene Name: fer (fps/fes related) tyrosine kinase
  Uniprot ID: P16591
  ENSP ID: ENSP00000484767
MEQKMKCPHCKDQLESGFGSQSCKTCALMFSSEPSTSEVHRDQERKERLSKFESIRHSIAGIIRSPKSALGSSALSDMISISEKPLAEQDWYHGAIPRIEAQELLKKQGDFLVRESHGKPGEYVLSVYSDGQRRHFIIQYVDNMYRFEGTGFSNIPQLIDHHYTTKQVITKKSGVVLLNPIPKDKKWILSHEDVILGELLGKGNFGEVYKGTLKDKTSVAVKTCKEDLPQELKIKFLQEAKILKQYDHPNIVKLIGVCTQRQPVYIIMELVSGGDFLTFLRRKKDELKLKQLVKFSLDAAAGMLYLESKNCIHRDLAARNCLVGENNVLKISDFGMSRQEDGGVYSSSGLKQIPIKWTAPEALNYGRYSSESDVWSFGILLWETFSLGVCPYPGMTNQQAREQVERGYRMSAPQHCPEDISKIMMKCWDYKPENRPKFSELQKELTIIKRKLT

SEQ ID NO: 31526 - protein, 163 aa, Homo sapiens [sequence omitted]

SEQ ID NO: 31527 - protein, 2093 aa, Homo sapiens
  Payload ID: 6171
  Gene Symbol: FER1L5
  Gene Name: fer-1-like family member 5
  Uniprot ID: A0AVI2
  ENSP ID: ENSP00000485044
MLRLVVQSAKIDPPLAPLPRPCMSIDFRDIKKRTRVVEGNDPVWNETLIWHLWNRPLENDSFLQVTLQDMGSQKKERFIGLATVLLKPLLKQPSEVLFVKDLTLLNHSMKPTDCTVTLQVAHMSNQDIEKTGAEDHLGITAREAASQKLMVPGSTAHRALSSKPQHFQVRVKVFEARQLMGNNIKPVVKVSIAGQQHQTRIKMGNNPFFNEIFFQNFHEVPAKFFDETILIQTDIGFIYHSPGHTLLRKWLGLCQPNNPGSGVTGYLKVTIYALGVGDQALIDQKLLYGTDDTDIQIFKSAVVPINMAYLQLFIYCAEDLHLKKHQSVNPQLEVELIGEKLRTHMQTQTDNPIWNQILTFRIQLPCLSSYIKFRVLDCRKKDCPDEIGTASLSLNQISSTGEEIEGKQSLEPTSYTPRVYSGFLPCFGPSFLTLHGGKKAPFRIQEEGACIPDSVRDGLAYRGRVFLELITQIKSYQDSTIKDLSHEVTRIEKHQNRQKYGLCVIFLSCTMMPNFKELIHFEVSIGHYGNKMDLNYKPLVSSTPYSPVIYDGNIYHYVPWYNTKPVVAVTSNWEDVSFRMNCLNLLHFTRDRLKANLDTLKSTRNPKDPALLYQWEKLLRELAEDCKRPLPCMTYQPKATSLDRKRWQLRSLLLQELAQKAKQAKPKDMVATAEDWLYRLNTVLPEPQMGLPDVMIWLVAKEQRVAYAQVPAHSVLFSPAGALHSGRLCGKIQTLFLQYPEGEGQKDVLPAHLRVCMWLGNVTDSKDLQLLRQGDTAVYAEMYENQAKYKDQWGQQGLYHCPNFSDVMGNKTLPMTDFQPPLGWHWQDSWTVEPQRRLLLDIDINKSQVLEEVYENQGRDTRGAWGPAAIPNTDVNGQPMEARENVKCPQGWHFKKDWVVELNHAVDSWEYGVGIPPSGLPQVWSPVEKTYHSCRRRRWARVRFRNHGELSHEQETLSFLQLGLAKGEEEGWEYDTFGSKFHLNPQPQSRFRRRCWRRRLAPNKDKGIAPIFLLEGSLACEGGSVREEGDWAWARGNRSSTQEPQGRLSWVQAMDLKYHAGKEEDSKTWPWGLDRQFRDPQRQDTRPPNLPFIYCTFNKPHYYQLFCYIYQARNLVSNQILTFQGPFIRVVFLNHSQCTQTLRSSAGPTWAQTLIFQHLLLYENPQDTKESPPLVVLELWQRDFWGKESLWGRSVWPPMVWLDLQDRILPPMRWHPLVKELGKEEGEILASCELILQTEKLGEKQLPILSVPWKNGAYTLPKSIQPTIKRMAIEILAWGLRNMKKASSPQLLVEFGEESLRTEPIRDFQTNPNFPESESVLVLTVLMPTEEAYALPLVVKVVDNWAFGQQTVTGQANIDFLQPYFCDPWAQDYMHPKLPTLSEKKHQDFLGYLYRKFWFKSSKAEDEYEHEVDWWSKLFWATDEHKSLKYKYKDYHTLKVYECELEAVPAFQGLQDFCQTFKLYQEQPKLDSPVVGEFKGLFRIYPFPENPEAPKPPLQFLVWPEREDFPQPCLVRVYMVRAINLQPQDYNGLCDPYVILKLGKTELGNRDMYQPNTLDPIFGMMFELTCNIPLEKDLEIQLYDFDLFSPDDKIGTTVIDLENRLLSGFGAHCGLSKSYCQSGPFRWRDQMPPSYLLERYAKRKGLPPPLFSPEEDAVFYNGKKFKLQSFEPKTPTVHGLGPKKERLALYLLHTQGLVPEHVETRTLYSHSQPGIDQGKVQMWVDIFPKKLGPPGPQVNINPRKPKRKASEHSGHRYELRCIIWKTANVDLVDDNLSREKTSDIYIKGWLYGLEKDMQKTDIHYHSLTGEADFNWRFIFTMDYLAAERTCVQSQKDYIWSLDATSMKFPARLIIQVWDNDIFSPDDFLGVLELDLSDMPLPARHAKQCSIRMMDADPKWPYFIQYKHFSLFKKKTVTGWWPCQVLDGGKWRLSGKVKMSLEILSEKEALIKPAGRGQSEPNQYPTLHPPLRTNTSFTWLRSPVQNFCYIFWKRYRFKLIAFMVISIIALMLFNFIYSAPHYLAMSWIKPQLQLYPPIKIFNIINSLNTSNASSSILPTQDPNLKPTIDHEWKLHPGPTNHLSDIFPELPAPGD

SEQ ID NO: 31528 - protein, 2057 aa, Homo sapiens
  Payload ID: 6171
  Gene Symbol: FER1L5
  Gene Name: fer-1-like family member 5
  ENSP ID: ENSP00000485238
MLRLVVQSAKIDPPLAPLPRPCMSIDFRDIKKRTRVVEGNDPVWNETLIWHLWNRPLENDSFLQVTLQDMGSQKKERFIGLATVLLKPLLKQPSEVLFVKDLTLLNHSMKPTDCTVTLQVAHMSNQDIEKTGAEDHLGITAREAASQKLMVPGSTAHRALSSKPQHFQVRVKVFEARQLMGNNIKPVVKVSIAGQQHQTRIKMGNNPFFNEIFFQNFHEVPAKFFDETILIQVVNSSAMRYKAEIGRFQTDIGFIYHSPGHTLLRKWLGLCQPNNPGSGVTGYLKVTIYALGVGDQALIDQKLLYGTDDTDIQIFKSAVVPINMAYLQLFIYCAEDLHLKKHQSVNPQLEVELIGEKLRTHMQTQTDNPIWNQILTFRIQLPCLSSYIKFRVLDCRKKDCPDEIGTASLSLNQISSTGEEIEGVYSGFLPCFGPSFLTLHGGKKAPFRIQEEGACIPDSVRDGLAYRGRVFLELITQIKSYQDSTIKDLSHEVTRIEKHQNRQKYGLCVIFLSCTMMPNFKELIHFEVSIGHYGNKMDLNYKPLVSSTPYSPVIYDGNIYHYVPWYNTKPVVAVTSNWEDVSFRMNCLNLLHFTRDRLKANLDTLKSTRNPKDPALLYQWEKLLRELAEDCKRPLPCMTYQPKATSLDRKRWQLRSLLLQELAQKAKQAKPKDMVATAEDWLYRLNTVLPEPQMGLPDVMIWLVAKEQRVAYAQVPAHSVLFSPAGALHSGRLCGKIQTLFLQYPEGEGQKDVLPAHLRVCMWLGNVTDSKDLQLLRQGDTAVYAEMYENQAKYKDQWGQQGLYHCPNFSDVMGNKTLPMTDFQPPLGWHWQDSWTVEPQRRLLLDIDINKSQVLEEVYENQGRDTRGAWGPAAIPNTDVNGQPMEARENVKCPQGWHFKKDWVVELNHAVDSKGWEYGVGIPPSGLPQVWSPVEKTYHSCRRRRWARVRFRNHGELSHEQETLSFLQLGLAKGEEEGWEYDTFGSKFHLNPQPQSRFRRRCWRRRLAPNKDKGIAPIFLLEGSLAMDLKYHAGKEEDSKTWPWGLDRQFRDPQRQDTRPPNLPFIYCTFNKPHYYQLFCYIYQARNLVSNQILTFQGPFIRVVFLNHSQCTQTLRSSAGPTWAQTLIFQHLLLYENPQDTKESPPLVVLELWQRDFWGKESLWGRSVWPPMVWLDLQDRILPPMRWHPLVKELGKEEGEILASCELILQTEKLGEKQLPILSVPWKNGAYTLPKSIQPTIKRMAIEILAWGLRNMKKASSPQLLVEFGEESLRTEPIRDFQTNPNFPESESVLVLTVLMPTEEAYALPLVVKVVDNWAFGQQTVTGQANIDFLQPYFCDPWAQDYMHPKLPTLSEKKHQDFLGYLYRKFWFKSSKAEDEYEHEVDWWSKLFWATDEHKSLKYKYKDYHTLKVYECELEAVPAFQGLQDFCQTFKLYQEQPKLDSPVVGEFKGLFRIYPFPENPEAPKPPLQFLVWPEREDFPQPCLVRVYMVRAINLQPQDYNGLCDPYVILKLGKTELGNRDMYQPNTLDPIFGMMFELTCNIPLEKDLEIQLYDFDLFSPDDKIGTTVIDLENRLLSGFGAHCGLSKSYCQSGPFRWRDQMPPSYLLERYAKRKGLPPPLFSPEEDAVFYNGKKFKLQSFEPKTPTVHGLGPKKERLALYLLHTQGLVPEHVETRTLYSHSQPGIDQGKVQMWVDIFPKKLGPPGPQVNINPRKPKRYELRCIIWKTANVDLVDDNLSREKTSDIYIKGWLYGLEKDMQKTDIHYHSLTGEADFNWRFIFTMDYLAAERTCVQSQKDYIWSLDATSMKFPARLIIQVWDNDIFSPDDFLGVLELDLSDMPLPARHAKQCSIRMMDADPKWPYFIQYKHFSLFKKKTVTGWWPCQVLDGGKWRLSGKVKMSLEILSEKEALIKPAGRGQSEPNQYPTLHPPLRTNTSFTWLRSPVQNFCYIFWKRYRFKLIAFMVISIIALMLFNFIYSAPHYLAMSWIKPQLQLYPPIKIFNIINSLNTSNASSSILPTQDPNLKPTIDHEWKLHPGPTNHLSDIFPELPAPGD

SEQ ID NO: 31529 - protein, 2097 aa, Homo sapiens [sequence omitted]

SEQ ID NO: 31530 - protein, 1761 aa, Homo sapiens [sequence omitted]

SEQ ID NO: 31531 - protein, 1857 aa, Homo sapiens
  Payload ID: 6172
  Gene Symbol: FER1L6
  Gene Name: fer-1-like family member 6
  Uniprot ID: Q2WGJ9
  ENSP ID: ENSP00000381982
MFGLKVKKKRNKAEKGLILANKAAKDSQGDTEALQEEPSHQEGPRGDLVHDDASIFPVPSASPKRRSKLLTKIHDGEVRSQNYQIAITITEARQLVGENIDPVVTIEIGDEKKQSTVKEGTNSPFYNEYFVFDFIGPQVHLFDKIIKISVFHHKLIGSVLIGSFKVDLGTVYNQPGHQFCNKWALLTDPGDIRTGTKGYLKCDISVMGKGDVLKTSPKTSDTEEPIEKNLLIPNGFPLERPWARFYVRLYKAEGLPKMNSSIMANVTKAFVGDSKDLVDPFVEVSFAGQMGRTTVQKNCADPVWHEQVIFKEMFPPLCRRVKIQVWDEGSMNDVALATHFIDLKKISNEQDGDKGFLPTFGPAWINLYGSPRNHSLMDDYQEMNEGFGEGVSFRGRILVEIAVEILSGRAQESKFSKALKELKLPSKDKDSKSSKGKDKADKTEDGKSQQASNKTNSTEVEVESFDVPPEIVPEKNEEFLLFGAFFEATMIDRKIGDKPISFEVSIGNFGNLIDGGSHHGSKKSAESAEEDLLPLLHEGQGDVAHDVPIPMASTTHPEKPLVTEGNRNYNYLPFEAKKPCVYFISSWGDQTFRLHWSNMLEKMADFLEESIEEVRELIKISQEAPEEKMKTVLSDFISRSSAFISEAEKKPKMLNQTTLDKKRLTLCWQELEAMCKEAKGIIQQQKKKLSVDEMIHEAQNFVEKIRFLVDEPQHTIPDVFIWMLSNNRRVAYARIASKDLLYSPVAGQMGKHCGKIKTHFLKPPGKRPAGWSVQAKVDVYLWLGSIKHASAILDNLPVGYEAEMSSKGAGTNHPPSNLLYQEQHVFQLRAHMYQARGLIAADSNGLSDPFAKVTFLSHCQTTKIISQTLSPTWNQMLLFNDLVLHGDVKELAESPPLVVVELYDSDAVGKPEYLGATVAAPVVKLADQDYEPPRLCYHPIFCGNLSGGDLLAVFELLQVPPSGLQGLPPVEPPDITQIYPVPANIRPVLSKYRVEVLFWGVREMKKVQLLSVDRPQALIECGGQGVKSCVIQSYKNNPNFSIQADAFEVELPENELLHPPLSICVVDWRAFGRSTLVGTYTINYLKQFLCKLREPLAPITQVDGTQPGHDISDSLTATESSGAHSSSQDPPADHIYVDVEPPPTVVPDSAQAQPAILVDVPDSSPMLEPEHTPVAQEPPKDGKPKDPRKPSRRSTKRRKRTIADESAENVIDWWSKYYASLKKAQKAKERNPKGKKGNTEAKPDEVVVDIEDGPKKKKDKMLKKKPKDDGIPNLAILQIYDGDLESEFNNFEDWVKTFELFRGKSTEDDHGLDGDRVIGKFKGSFCIYKSPQDSSSEDSGQLRIQQGIPPNHPVTVLIRVYIVAAFNLSPADPDGKSDPYIVIKLGKTEIKDRDKYIPKQLNPVFGRSFEIQATFPKESLLSILIYDHDMIGTDDLIGETKIDLENRFYSKHRAICGLQSQYEIEGYNAWRDTSKPTEILTKLCKDNKLDGPYFHPGKIQIGNQVFSGKTIFTEEDTDETVESYEHLALKVLHSWEDIPEVGCRLVPEHIETRPLYHKDKPGMEQGRLQMWVDMFPKDMPQPGPPVDISPRRPKGYELRVTIWNTEDVILEDENIFTGQKSSDIYVKGWLKGLEDDKQETDVHYNSLTGEGNFNWRFLFPFQYLPAEKQMVITKRENIFSLEKMECKTPAVLVLQVWDFERLSSDDFLGTLEMNLNSFPRAAKSAKACDLAKFENASEETKISIFQQKRVRGWWPFSKSKELTGKVEAEFHLVTAEEAEKNPVGKARKEPEPLAKPNRPDTSFSWFMSPFKCLYYLIWKNYKKYIIIAFILIILIIFLVLFIYTLPGAISRRIVVGS

SEQ ID NO: 31532 - protein, 1857 aa, Homo sapiens; identical to SEQ ID NO: 31531
  Payload ID: 6172
  Gene Symbol: FER1L6
  Gene Name: fer-1-like family member 6
  Uniprot ID: Q2WGJ9
  ENSP ID: ENSP00000428280

SEQ ID NO: 31533 - protein, 166 aa, Homo sapiens
  Payload ID: 6173
  Gene Symbol: FERD3L
  Gene Name: Fer3-like bHLH transcription factor
  Uniprot ID: Q96RJ6
  ENSP ID: ENSP00000275461
MAAYPESCVDTTVLDFVADLSLASPRRPLLCDFAPGVSLGDPALALREGRPRRMARFEEGDPEEEECEVDQGDGEEEEEEERGRGVSLLGRPKRKRVITYAQRQAANIRERKRMFNLNEAFDQLRRKVPTFAYEKRLSRIETLRLAIVYISFMTELLESCEKKESG

SEQ ID NO: 31534 - protein, 1578 aa, Homo sapiens
  Payload ID: 6174
  Gene Symbol: FRMPD1
  Gene Name: FERM and PDZ domain containing 1
  Uniprot ID: Q5SYB0
  ENSP ID: ENSP00000366995
MEELETSLFQTRKAHRIEQMVARWLRRSRDSSARAKVAAADGPARNPTQTLIPVRHTVKIDKDTLLQDYGFHISESLPLTVVAVTAGGSAHGKLFPGDQILQMNNEPAEDLSWERAVDILREAEDSLSITVVRCTSGVPKSSFLTEEKRARLKTNPVKVHFAEEVLISGHSQGNSLLCMPNVLKLYLENGQTKAFKFEANTTVKDIILTVKEKLSIRSIEYFALALEEQYSISRLHLLHEEELIQQVVEREESHDYRCLFRVCFVPKDPLDLLKEDPVAFEYLYLQSCSDVLQERFAVEMKCSSALRLAALHIQERIYACAQPQKISLKYIEKDWGIENFISPTLLRNMKGKDIKKAISFHMKRNQNLLEPRQKQLISAAQLRLNYLQILGELKTYGGRIFNATLMLQDRESYIALLVGAKYGISQVINSKLNIMSTLAEFANISRVELTEESEKVSVVKVYLQDVKVLTLLLESNSAKDLACLIAGYYRLLVDPVTSIFLWPGNKQQAHRVSAEEGYESRACSDSEESSEVDCVLEPLSDRRLVKLAPCRSLIKEEQPPGNSPTPEVARRGPSTCGASSTTDSAESEASDSANTESRGYRTSGSSESMDALEEDDLDTCSSSRSTFFHFGSPGLAESIDSDSQEERSGIETSGFLCLLDLAQRANPQCQKTEFSESAALETFGWAPELSTVRLDPRLYEGSHADYYSLCSSVSPASYLSDSSESTASRQGGAPPAWGQQGWTEAQPSSMLEPLALHPPLAFEDGSSDEEYYDAADKLTPPGPPSGPRDVSTAEPSATSLQNKASTSSPENSLPCGPDGRQPSRRGGVKKYAKTLRKRRSFLQTDYTSQVSFPLVPSASLESVDDVCYYDREPYLALGAPSPTVSSLQDMQGEPGLLETKALGLLAPLRETKSTNPASRVMEMEPETMETKSVIDSRVSSISAIRFRIDPNNKENSGVVPAASSSASTPHCSNPGSSGPDTAQARPSQILPLSQDLDGIAPKEPTIEHGDSSFSLSSGDPNPDRACLASNPGLNNVSQGDTLELQLEPHVQLEMGLESFCTNHIQETAPKYTEPLLSPRDEPRSDECGINPGEKIASIPTKEEPQGQLSLERDREVTNKNGTNVFQEESRKDSGDSPGDVSNNVSQTLDISSPAGKIVTSLSLDAPVTGTEQIPPHPPRDPQGQSREPPGQGCQAQEQKLFVELDLDPDFFLGKQTVSPAVPPEGIKAEAPNHVTGQDIAPRDSPEWVCFNPEPSLPEPLPCPQEDPHLETSNHCLLSEGKSDSSSICLSAEKSFLCFAPESHPEVSASLRVATSLGFAGMNEMVAPRIGMDQCSCQFSYATCFRGPQPETEEEDRDLEAHPMAPLTSPPSAGSPVVLPWRPARAHSCTTAPLSRKSHIWPEYCSRALRQLKATPASTPEGFIQLMESLLELQDILETSWGVGNKHPPEKCTWHFTESRSRLCMGSQKLLSSCRHVIRMDQSPEEMQGAVRDTFQHLVQLAGLCFQFTDCSRCSARHREAAGNLRDVVYTYHQFIEAAKSTCERGYHDLSVKLLARQCTALTAAVFCLTQKFRASTAL

SEQ ID NO: 31535 - protein, 62 aa, Homo sapiens
  Payload ID: 6174
  Gene Symbol: FRMPD1
  Gene Name: FERM and PDZ domain containing 1
  ENSP ID: ENSP00000439868
MEELETSLFQTRKAHRIEQMVARWLRRSRDSSARAKVAAADGPARNPTQTLIPVRHTVKIDK

SEQ ID NO: 31536 - protein, 1578 aa, Homo sapiens; identical to SEQ ID NO: 31534
  Payload ID: 6174
  Gene Symbol: FRMPD1
  Gene Name: FERM and PDZ domain containing 1
  Uniprot ID: Q5SYB0
  ENSP ID: ENSP00000444411

SEQ ID NO: 31537 - protein, 1284 aa, Homo sapiens
  Payload ID: 6175
  Gene Symbol: FRMPD2
  Gene Name: FERM and PDZ domain containing 2
  Uniprot ID: Q68DX3
  ENSP ID: ENSP00000307079
MHVFIVGMSLSSVTLASALQVRGEALSEEEIWSLLFLAAEQLLEDLRNDSSDYVVCPWSALLSAAGSLSFQGRVSHIEAAPFKAPELLQGQSEDEQPDASQPLQLCEPLHSILLTMCEDQPHRRCTLQSVLEACRVHEKEVSVYPAPAGLHIRRLVGLVLGTISEVEKRVVEESSSVQQNRSYLLRKRLRGTSSESPAAQAPECLHPCRVSERSTETQSSPEPHWSTLTHSHCSLLVNRALPGADPQDQQAGRRLSSGSVHSAADSSWPTTPSQRGFLQRRSKFSRPEFILLAGEAPMTLHLPGSVVTKKGKSYLALRDLCVVLLNGQHLEVKCDVESTVGAVFNAVTSFANLEELTYFGLAYMKSKEFFFLDSETRLCKIAPEGWREQPQKTSMNTFTLFLRIKFFVSHYGLLQHSLTRHQFYLQLRKDILEERLYCNEEILLQLGVLALQAEFGNYPKEVESKPYFHVEDYIPASLIERMTALRVQVEVSEMHRLSSALWGEDAELKFLRVTQQLPEYGVLVHQVFSEKRRPEEEMALGICAKGVIVYEVKNNSRIAMLRFQWRETGKISTYQKKFTITSSVTGKKHTFVTDSAKTSKYLLDLCSAQHGFNAQMGSGQPSHVLFDHDKFVQMANLSPAHQARSKPLIWIQRLSCSENELFVSRLQGAAGGLLSTSMDNFNVDGSKEAGAEGIGRSPCTGREQLKSACVIQKPMTWDSLSGPPVQSMHAGSKNNRRKSFIAEPGREIVRVTLKRDPHRGFGFVINEGEYSGQADPGIFISSIIPGGPAEKAKTIKPGGQILALNHISLEGFTFNMAVRMIQNSPDNIELIISQSKGVGGNNPDEEKNSTANSGVSSTDILSFGYQGSLLSHTQDQDRNTEELDMAGVQSLVPRLRHQLSFLPLKGAGSSCPPSPPEISAGEIYFVELVKEDGTLGFSVTGGINTSVPYGGIYVKSIVPGGPAAKEGQILQGDRLLQVDGVILCGLTHKQAVQCLTGPGQVARLVLERRVPRSTQQCPSANDSMGDERTAVSLVTALPGRPSSCVSVTDGPKFEVKLKKNANGLGFSFVQMEKESCSHLKSDLVRIKRLFPGQPAEENGAIAAGDIILAVNGRSTEGLIFQEVLHLLRGAPQEVTLLLCRPPPGALPELEQEWQTPELSADKEFTRATCTDSCTSPILDQEDSWRDSASPDAGEGLGLRPESSQKAIREAQWGQNRERPWASSLTHSPESHPHLCKLHQERDESTLATSLEKDVRQNCYSVCDIMRLGRYSFSSPLTRLSTDIF

SEQ ID NO: 31538 - protein, 1309 aa, Homo sapiens
  Payload ID: 6175
  Gene Symbol: FRMPD2
  Gene Name: FERM and PDZ domain containing 2
  Uniprot ID: Q68DX3
  ENSP ID: ENSP00000363317
MQPLTKDAGMSLSSVTLASALQVRGEALSEEEIWSLLFLAAEQLLEDLRNDSSDYVVCPWSALLSAAGSLSFQGRVSHIEAAPFKAPELLQGQSEDEQPDASQMHVYSLGMTLYWSAGFHVPPHQPLQLCEPLHSILLTMCEDQPHRRCTLQSVLEACRVHEKEVSVYPAPAGLHIRRLVGLVLGTISEVEKRVVEESSSVQQNRSYLLRKRLRGTSSESPAAQAPECLHPCRVSERSTETQSSPEPHWSTLTHSHCSLLVNRALPGADPQDQQAGRRLSSGSVHSAADSSWPTTPSQRGFLQRRSKFSRPEFILLAGEAPMTLHLPGSVVTKKGKSYLALRDLCVVLLNGQHLEVKCDVESTVGAVFNAVTSFANLEELTYFGLAYMKSKEFFFLDSETRLCKIAPEGWREQPQKTSMNTFTLFLRIKFFVSHYGLLQHSLTRHQFYLQLRKDILEERLYCNEEILLQLGVLALQAEFGNYPKEQVESKPYFHVEDYIPASLIERMTALRVQVEVSEMHRLSSALWGEDAELKFLRVTQQLPEYGVLVHQVFSEKRRPEEEMALGICAKGVIVYEVKNNSRIAMLRFQWRETGKISTYQKKFTITSSVTGKKHTFVTDSAKTSKYLLDLCSAQHGFNAQMGSGQPSHVLFDHDKFVQMANLSPAHQARSKPLIWIQRLSCSENELFVSRLQGAAGGLLSTSMDNFNVDGSKEAGAEGIGRSPCTGREQLKSACVIQKPMTWDSLSGPPVQSMHAGSKNNRRKSFIAEPGREIVRVTLKRDPHRGFGFVINEGEYSGQADPGIFISSIIPGGPAEKAKTIKPGGQILALNHISLEGFTFNMAVRMIQNSPDNIELIISQSKGVGGNNPDEEKNSTANSGVSSTDILSFGYQGSLLSHTQDQDRNTEELDMAGVQSLVPRLRHQLSFLPLKGAGSSCPPSPPEISAGEIYFVELVKEDGTLGFSVTGGINTSVPYGGIYVKSIVPGGPAAKEGQILQGDRLLQVDGVILCGLTHKQAVQCLTGPGQVARLVLERRVPRSTQQCPSANDSMGDERTAVSLVTALPGRPSSCVSVTDGPKFEVKLKKNANGLGFSFVQMEKESCSHLKSDLVRIKRLFPGQPAEENGAIAAGDIILAVNGRSTEGLIFQEVLHLLRGAPQEVTLLLCRPPPGALPELEQEWQTPELSADKEFTRATCTDSCTSPILDQEDSWRDSASPDAGEGLGLRPESSQKAIREAQWGQNRERPWASSLTHSPESHPHLCKLHQERDESTLATSLEKDVRQNCYSVCDIMRLGRYSFSSPLTRLSTDIF

SEQ ID NO: 31539 - protein, 261 aa, Homo sapiens
  Payload ID: 6175
  Gene Symbol: FRMPD2
  Gene Name: FERM and PDZ domain containing 2
  Uniprot ID: Q68DX3
  ENSP ID: ENSP00000422446
MGDERTAVSLVTALPGRPSSCVSVTDGPKFEVKLKKNANGLGFSFVQMEKESCSHLKSDLVRIKRLFPGQPAEENGAIAAGDIILAVNGRSTEGLIFQEVLHLLRGAPQEVTLLLCRPPPGALPELEQEWQTPELSADKEFTRATCTDSCTSPILDQEDSWRDSASPDAGEGLGLRPESSQKAIREAQWGQNRERPWASSLTHSPESHPHLCKLHQERDESTLATSLEKDVRQNCYSVCDIMRLGRYSFSSPLTRLSTDIF

SEQ ID NO: 31540 - protein, 1810 aa, Homo sapiens
  Payload ID: 6176
  Gene Symbol: FRMPD3
  Gene Name: FERM and PDZ domain containing 3
  Uniprot ID: Q5JV73
  ENSP ID: ENSP00000276185
METLDSQRVQDRLLAAPGCSSPSGQQELFSSHVMQEESANDMECEQLPAEILRQVTVHRDPIYGFGFVAGSERPVVVRSVRPGGPSENKLLAGDQIVAINEEDVSEAPRERLIELIRSAKEFIVLTVLHTHQSPKSAFISAAKKAKLRSNPVKVRFSEQVAVGETDAKMMKKEALLLIPNVLKVFLENGQIKSFTFDGRTTVKDVMLTLQDRLSLRFIEHFALVLEYAGPEQNHKFLLLQDKQPLAYVVQRTHYHGMKCLFRISFFPKDPVELLRRDPAAFEYLYIQSRNDVIRERFGMDPKPEMLLGLAALHIYITVSATRPSQKISLKNVEKEWGLEPFLPPSLLQVIKEKNLRKSLSQQLKAHQTHPSCGTKGSAIQAKLQYLRILNELPTFTGVLFNTVGLDEKQSATTLLVGPRHGISHVIDLKTNLTTVLSEFSKISKIQLFRENQGVARVETSIMDAKPLVLLMEWPEATNFACLIAGYCRLLLDSRKMVFSRPASQPLPPPMIKADYMHSAHRPVTGGHLGKKESSYVGSVGTSPRKSSRCTPPPADSELVSFCYLHMREQRKEQESRTDVNENLIFFEETRPRTKSDPTSKSSGQGYEVVPDDFDAASLDHEPCASRARSYTLDNSLGAEALNFYCDSCKAKLQEQLGPRKGGKPGSSRDNIVDLMSLPPPGSEEEEEEEDETTSLLPAIAAPPPGFRDNSSDEDDPKRRAVQSQEQGRHLRGLLYDEIPVTLIDSVQTRTVRDHAQELDDALVSTLQALEALAASEDGPHPPPPQTAGLIVLATITPESSLDSGHETNSSELTDMSEMMSAMKQHQNTTYFLAQHLNKDSLLARKDLPFRIQSCAAQAVLTAPYSLGRPDPNPSLQPIATGQSPGPPGARRKLPQSEGQVQGERTYSLAVHPALSPQLSEQKNLSLLSPVPEDKGPGHTRAGLEMSLRAATSSLSEEQVSELRDNLPKEVRLSPKLILDPKSSVTPAIISAALQQVVHNKSLVTAGGALGNPPSRGERRLEASMGRPEVSMMSSSASKNLKFKISPSAPETSWNSQHQLGAEVSSSPRAPTGSRADSLHLSQQEDSLPVQNFPPKSYLLRTSRESVGKQATGEVAGKGGPVGGKPTLQKQGTISSQGEKAQLESTPKRSKLEETSLVPRATYPMALQSPSCQSRSHSPSCQPHGHSPSSQSRGQSPSCQPRGQSPLRSQAASRQVSTMPSRKLETTLNGAHSTSEGPAKPKSSRGPFRLRNLFSATFPTRQKKETDERQAQLQKVKQYELEFLEELLKPPSQGELPGTEYLQPPAPGRCSCQLRSSPVQQGPGMSREQRRSCDCKRICRGGRPQATQTPVPSLRGRERDRVLPSQRQPEAGPGVSLSSPINVQRIRSTSLESRECRSDPESGVSCLTTCASGGECLGAPNYRKLMRRYSISELDQGDRASLTSDVYPHPPLGMLPREAKEVEASLPIALGPKSRSLESPTLGDPSYVQVAPETKGPRQMAVFSLPEEVYRKPAELDEDSESSKCCSIRYCFYYRKCDMADDASDGKDELSYSIPMKILPGMKLDEQVVPVVSRTLQVLDAATCSSSSPEASRTQEIDLRVSTFEGSLAKINALRAHAYGLPDGFLAARLDTNELLTVLRQCVASPEARAPKPYVSQISEYKLELALKFKELRASCRRVANVDKSPTHMLAAITGSFQVLSSLIETFVRLVFIVRSEAQRQELLAKVEEVVRNYTFLLRAAEESTARNLNQQQQQQQQQQQQQQQQQQQQQQQQQQQVAAAAGAATEHPPGSPTSATVMSTFTHSLKTLIK

SEQ ID NO: 31541 - protein, 1758 aa, Homo sapiens
  Payload ID: 6176
  Gene Symbol: FRMPD3
  Gene Name: FERM and PDZ domain containing 3
  ENSP ID: ENSP00000398668
RQVTVHRDPIYGFGFVAGSERPVVVRSVRPGGPSENKLLAGDQIVAINEEDVSEAPRERLIELIRSAKEFIVLTVLHTHQSPKSAFISAAKKAKLRSNPVKVRFSEQVAVGETDAKMMKKEALLLIPNVLKVFLENGQIKSFTFDGRTTVKDVMLTLQDRLSLRFIEHFALVLEYAGPEQNHKFLLLQDKQPLAYVVQRTHYHGMKCLFRISFFPKDPVELLRRDPAAFEYLYIQSRNDVIRERFGMDPKPEMLLGLAALHIYITVSATRPSQKISLKNVEKEWGLEPFLPPSLLQVIKEKNLRKSLSQQLKAHQTHPSCGTKGSAIQAKLQYLRILNELPTFTGVLFNTVGLDEKQSATTLLVGPRHGISHVIDLKTNLTTVLSEFSKISKIQLFRENQGVARVETSIMDAKPLVLLMEWPEATNFACLIAGYCRLLLDSRKMVFSRPASQPLPPPMIKADYMHSAHRPVTGGHLGKKESSYVGSVGTSPRKSSRCTPPPADSELVSFCYLHMREQRKEQESRTDVNENLIFFEETRPRTKSDPTSKSSGQGYEVVPDDFDAASLDHEPCASRARSYTLDNSLGAEALNFYCDSCKAKLQEQLGPRKGGKPGSSRDNIVDLMSLPPPGSEEEEEEEDETTSLLPAIAAPPPGFRDNSSDEDDPKRRAVQSQEQGRHLRGLLYDEIPVTLIDSVQTRTVRDHAQELDDALVSTLQALEALAASEDGPHPPPPQTAGLIVLATITPESSLDSGHETNSSELTDMSEMMSAMKQHQNTTYFLAQHLNKDSLLARKDLPFRIQSCAAQAVLTAPYSLGRPDPNPSLQPIATGQSPGPPGARRKLPQSEGQVQGERTYSLAVHPALSPQLSEQKNLSLLSPVPEDKGPGHTRAGLEMSLRAATSSLSEEQVSELRDNLPKEVRLSPKLILDPKSSVTPAIISAALQQVVHNKSLVTAGGALGNPPSRGERRLEASMGRPEVSMMSSSASKNLKFKISPSAPETSWNSQHQLGAEVSSSPRAPTGSRADSLHLSQQEDSLPVQNFPPKSYLLRTSRESVGKQATGEVAGKGGPVGGKPTLQKQGTISSQGEKAQLESTPKRSKLEETSLVPRATYPMALQSPSCQSRSHSPSCQPHGHSPSSQSRGQSPSCQPRGQSPLRSQAASRQVSTMPSRKLETTLNGAHSTSEGPAKPKSSRGPFRLRNLFSATFPTRQKKETDERQAQLQKVKQYELEFLEELLKPPSQGELPGTEYLQPPAPGRCSCQLRSSPVQQGPGMSREQRRSCDCKRICRGGRPQATQTPVPSLRGRERDRVLPSQRQPEAGPGVSLSSPINVQRIRSTSLESRECRSDPESGVSCLTTCASGGECLGAPNYRKLMRRYSISELDQGDRASLTSDVYPHPPLGMLPREAKEVEASLPIALGPKSRSLESPTLGDPSYVQVAPETKGPRQMAVFSLPEEVYRKPAELDEDSESSKCCSIRYCFYYRKCDMADDASDGKDELSYSIPMKILPGMKLDEQVVPVVSRTLQVLDAATCSSSSPEASRTQEIDLRVSTFEGSLAKINALRAHAYGLPDGFLAARLDTNELLTVLRQCVASPEARAPKPYVSQISEYKLELALKFKELRASCRRVANVDKSPTHMLAAITGSFQVLSSLIETFVRLVFIVRSEAQRQELLAKVEEVVRNYTFLLRAAEESTARNLNQQQQQQQQQQQQQQQQQQQQQQQQQQQVAAAAGAATEHPPGSPTSATVMSTFTHSLKTLIK

SEQ ID NO: 31542 - protein, 1322 aa, Homo sapiens
  Payload ID: 6177
  Gene Symbol: FRMPD4
  Gene Name: FERM and PDZ domain containing 4
  Uniprot ID: Q14CM0
  ENSP ID: ENSP00000370057
MDVFSFVKIAKLSSHRTKSSGWPPPSGTWGLSQVPPYGWEMTANRDGRDYFINHMTQAIPFDDPRLESCQIIPPAPRKVEMRRDPVLGFGFVAGSEKPVVVRSVTPGGPSEGKLIPGDQIVMINDEPVSAAPRERVIDLVRSCKESILLTVIQPYPSPKSAFISAAKKARLKSNPVKVRFSEEVIINGQVSETVKDNSLLFMPNVLKVYLENGQTKSFRFDCSTSIKDVILTLQEKLSIKGIEHFSLMLEQRTEGAGTKLLLLHEQETLTQVTQRPSSHKMRCLFRISFVPKDPIDLLRRDPVAFEYLYVQSCNDVVQERFGPELKYDIALRLAALQMYIATVTTKQTQKISLKYIEKEWGLETFLPSAVLQSMKEKNIKKALSHLVKANQNLVPPGKKLSALQAKVHYLKFLSDLRLYGGRVFKATLVQAEKRSEVTLLVGPRYGISHVINTKTNLVALLADFSHVNRIEMFSEEESLVRVELHVLDVKPITLLMESSDAMNLACLTAGYYRLLVDSRRSIFNMANKKNTATQETGPENKGKHNLLGPDWNCIPQMTTFIGEGEQEAQITYIDSKQKTVEITDSTMCPKEHRHLYIDNAYSSDGLNQQLSQPGEAPCEADYRSLAQRSLLTLSGPETLKKAQESPRGAKVSFIFGDFALDDGISPPTLGYETLLDEGPEMLEKQRNLYIGSANDMKGLDLTPEAEGIQFVENSVYANIGDVKSFQAAEGIEEPLLHDICYAENTDDAEDEDEVSCEEDLVVGEMNQPAILNLSGSSDDIIDLTSLPPPEGDDNEDDFLLRSLNMAIAAPPPGFRDSSDEEDSQSQAASFPEDKEKGSSLQNDEIPVSLIDAVPTSAEGKCEKGLDNAVVSTLGALEALSVSEEQQTSDNSGVAILRAYSPESSSDSGNETNSSEMTESSELATAQKQSENLSRMFLATHEGYHPLAEEQTEFPASKTPAGGLPPKSSHALAARPATDLPPKVVPSKQLLHSDHMEMEPETMETKSVTDYFSKLHMGSVAYSCTSKRKSKLADGEGKAPPNGNTTGKKQQGTKTAEMEEEASGKFGTVSSRDSQHLSTFNLERTAFRKDSQRWYVATEGGMAEKSGLEAATGKTFPRASGLGAREAEGKEEGAPDGETSDGSGLGQGDRFLTDVTCASSAKDLDNPEDADSSTCDHPSKLPEADESVARLCDYHLAKRMSSLQSEGHFSLQSSQGSSVDAGCGTGSSGSACATPVESPLCPSLGKHLIPDASGKGVNYIPSEERAPGLPNHGATFKELHPQTEGMCPRMTVPALHTAINTEPLFGTLRDGCHRLPKIKETTV

SEQ ID NO: 31543 - protein, 1282 aa, Homo sapiens [sequence omitted]

SEQ ID NO: 31544 - protein, 549 aa, Homo sapiens
  Payload ID: 6178
  Gene Symbol: FRMD1
  Gene Name: FERM domain containing 1
  Uniprot ID: Q8N878
  ENSP ID: ENSP00000283309
MAVPPRGRGIDPARTNPDTFPPSGARCMEPSPERPACSQQEPTLGMDAMASEHRDVLVLLPSREQLRLAVGVKATGRELFQQVCNVASIRDAQFFGLCVVRNNEYIFMDLEQKLSKYFSKDWKKERNEGNEKPRAPFVAFLRVQHYVENGRVISDHRARHLYYCHLKERVLRSQCAHREEAYFLLAACALQADLGEHRESAHAGRYFEPHSYFPQWIITKRGIDYILRHMPTLHRERQGLSPKEAMLCFIQEACRLEDVPVHFFRLHKDKKEGRPTVILGLALRGVHIYQGKKLEIQLDGLPAAQKLVYYTGCTWRSRHLLHLLRASHQLHLRVRPTLQQLRQREEAEEKQHYRESYISDELELDLASRSFPGSGVSSQHCPHCLSRHSADSHGSSYTSGIKANSWLRESREMSVDVPLEVHGLHEKEPSSSPRTSRSHPSTRGDSQATRQEPCTQVRTRGQSAEAVHQIQEMTAGVSEEQHSHGLDDMQLHQLALHPAPTSLSHTFHRALDCRLAGPCETRATLPSKRSSNCLALDLFGEAPPQEFVV

SEQ ID NO: 31545 - protein, 481 aa, Homo sapiens
  Payload ID: 6178
  Gene Symbol: FRMD1
  Gene Name: FERM domain containing 1
  Uniprot ID: Q8N878
  ENSP ID: ENSP00000414115
MDDVKATGRELFQQVCNVASIRDAQFFGLCVVRNNEYIFMDLEQKLSKYFSKDWKKERNEGNEKPRAPFVAFLRVQHYVENGRVISDHRARHLYYCHLKERVLRSQCAHREEAYFLLAACALQADLGEHRESAHAGRYFEPHSYFPQWIITKRGIDYILRHMPTLHRERQGLSPKEAMLCFIQEACRLEDVPVHFFRLHKDKKEGRPTVILGLALRGVHIYQGKKLEIQLDGLPAAQKLVYYTGCTWRSRHLLHLLRASHQLHLRVRPTLQQLRQREEAEEKQHYRESYISDELELDLASRSFPGSGVSSQHCPHCLSRHSADSHGSSYTSGIKANSWLRESREMSVDVPLEVHGLHEKEPSSSPRTSRSHPSTRGDSQATRQEPCTQVRTRGQSAEAVHQIQEMTAGVSEEQHSHGLDDMQLHQLALHPAPTSLSHTFHRALDCRLAGPCETRATLPSKRSSNCLALDLFGEAPPQEFVV

SEQ ID NO: 31546 - protein, 180 aa, Homo sapiens
  Payload ID: 6178
  Gene Symbol: FRMD1
  Gene Name: FERM domain containing 1
  ENSP ID: ENSP00000423552
SRPEEERVGPRRTPGLSHEEIWAVVSSSSRPLPVHCPALTSRTWQASLFHHEQASREDKTFRGARCMEPSPERPACSQQEPTLGMDAMASEHRDVLVLLPSREQLRLAVGVKATGRELFQQVCNVASIRDAQFFGLCVVRNNEYIFMDLEQKLSKYFSKDWKKERNELLRPEGLSAGGLW

SEQ ID NO: 31547 - protein, 195 aa, Homo sapiens
  Payload ID: 6178
  Gene Symbol: FRMD1
  Gene Name: FERM domain containing 1
  ENSP ID: ENSP00000424439
METSRPEEERVGPRRTPGLSHEEIWAVVSSSSRPLPVHCPALTSRTWQASLFHHEQASREDKTFRGARCMEPSPERPACSQQEPTLGMDAMASEHRDVLVLLPSREQLRLAVGVKATGRELFQQVCNVASIRDAQFFGLCVVRNNEYIFMDLEQKLSKYFSKDWKKERNEGNEKPRAPFVAFLRVQHYVENGRVI

SEQ ID NO: 31548 - protein, 180 aa, Homo sapiens; identical to SEQ ID NO: 31546
  Payload ID: 6178
  Gene Symbol: FRMD1
  Gene Name: FERM domain containing 1
  ENSP ID: ENSP00000427668

SEQ ID NO: 31549 - protein, 597 aa, Homo sapiens
  Payload ID: 6179
  Gene Symbol: FRMD3
  Gene Name: FERM domain containing 3
  Uniprot ID: A2A2Y4
  ENSP ID: ENSP00000303508
MFASCHCVPRGRRTMKMIHFRSSSVKSLSQEMRCTIRLLDDSEISCHIQRETKGQFLIDHICNYYSLLEKDYFGIRYVDPEKQRHWLEPNKSIFKQMKTHPPYTMCFRVKFYPHEPLKIKEELTRYLLYLQIKRDIFHGRLLCSFSDAAYLGACIVQAELGDYDPDEHPENYISEFEIFPKQSQKLERKIVEIHKNELRGQSPPVAEFNLLLKAHTLETYGVDPHPCKDSTGTTTFLGFTAAGFVVFQGNKRIHLIKWPDVCKLKFEGKTFYVIGTQKEKKAMLAFHTSTPAACKHLWKCGVENQAFYKYAKSSQIKTVSSSKIFFKGSRFRYSGKVAKEVVEASSKIQREPPEVHRANITQSRSSHSLNKQLIINMEPLQPLLPSPSEQEEELPLGEGVPLPKEENISAPLISSSPVKAAREYEDPPSEEEDKIKEEPLTISELVYNPSASLLPTPVDDDEIDMLFDCPSRLELEREDTDSFEDLEADENAFLIAEEEELKEARRALSWSYDILTGHIRVNPLVKSFSRLLVVGLGLLLFVFPLLLLLLESGIDLSFLCEIRQTPEFEQFHYEYYCPLKEWVAGKVHLILYMLGCS

SEQ ID NO: 31550 - protein, 213 aa, Homo sapiens
  Payload ID: 6179
  Gene Symbol: FRMD3
  Gene Name: FERM domain containing 3
  Uniprot ID: A2A2Y4
  ENSP ID: ENSP00000328615
MQAEETKGIGITSMAKCLVKIQTRRSLQLHMVNHCNSNVFVRLLRLGSKVTARNTGVPLPKEENISAPLISSSPVKAAREYEDPPSEEEDKIKEEPLTISELVYNPSASLLPTPVDDDEIDMLFDCPSRLELEREDTDSFEDLEADENAFLIAEEEELKEARRALSWSYDILTGHIRVNPLVKSFSRLLVVGLGLLLFVFPLLLLLLESVSMQ

SEQ ID NO: 31551 - protein, 362 aa, Homo sapiens
  Payload ID: 6179
  Gene Symbol: FRMD3
  Gene Name: FERM domain containing 3
  Uniprot ID: A2A2Y4
  ENSP ID: ENSP00000365617
MVFRRGQSPPVAEFNLLLKAHTLETYGVDPHPCKDSTGTTTFLGFTAAGFVVFQGNKRIHLIKWPDVCKLKFEGKTFYVIGTQKEKKAMLAFHTSTPAACKHLWKCGVENQAFYKYAKSSQIKTVSSSKIFFKGSRFRYSGKVAKEVVEASSKIQREPPEVHRANITQSRSSHSLNKQLIINMEPLQPLLPSPSEQEEELPLGEGVPLPKEENISAPLISSSPVKAAREYEDPPSEEEDKIKEEPLTISELVYNPSASLLPTPVDDDEIDMLFDCPSRLELEREDTDSFEDLEADENAFLIAEEEELKEARRALSWSYDILTGHIRVNPLVKSFSRLLVVGLGLLLFVFPLLLLLLESVSMQ

SEQ ID NO: 31552 - protein, 556 aa, Homo sapiens
  Payload ID: 6179
  Gene Symbol: FRMD3
  Gene Name: FERM domain containing 3
  Uniprot ID: A2A2Y4
  ENSP ID: ENSP00000365621
MFASCHCVPRGRRTMKMIHFRSSSVKSLSQEMRCTIRLLDDSEISCHIQRETKGQFLIDHICNYYSLLEKDYFGIRYVDPEKQRHWLEPNKSIFKQMKTHPPYTMCFRVKFYPHEPLKIKEELTRYLLYLQIKRDIFHGRLLCSFSDAAYLGACIVQAELGDYDPDEHPENYISEFEIFPKQSQKLERKIVEIHKNELRGQSPPVAEFNLLLKAHTLETYGVDPHPCKDSTGTTTFLGFTAAGFVVFQGNKRIHLIKWPDVCKLKFEGKTFYVIGTQKEKKAMLAFHTSTPAACKHLWKCGVENQAFYKYAKSSQIKTVSSSKIFFKGSRFRYSGKVAKEVVEASSKIQREPPEVHRANITQSRSSHSLNKQLIINMEPLQPLLPSPSEQEEELPLGEGVPLPKEENISAPLISSSPVKAAREYEDPPSEEEDKIKEEPLTISELVYNPSASLLPTPVDDDEIDMLFDCPSRLELEREDTDSFEDLEADENAFLIAEEEELKEARRALSWSYDILTGHIRVNPLVKSFSRLLVVGLGLLLFVFPLLLLLLESVSMQ

SEQ ID NO: 31553 - protein, 140 aa, Homo sapiens
  Payload ID: 6179
  Gene Symbol: FRMD3
  Gene Name: FERM domain containing 3
  ENSP ID: ENSP00000412719
GTTTFLGFTAAGFVVFQGNKRIHLIKWPDVCKLKFEGKTFYVIGTQKEKKAMLAFHTSTPAACKHLWKCGVENQAFYKYAKSSQIKTVSSSKIFFKGSRFRYSGKVAKEVVEASSKIQREPPEVHRCVQKKICSCFGVTW

SEQ ID NO: 31554 - protein, 553 aa, Homo sapiens
  Payload ID: 6179
  Gene Symbol: FRMD3
  Gene Name: FERM domain containing 3
  Uniprot ID: A2A2Y4
  ENSP ID: ENSP00000484839
MQLSKRETKGQFLIDHICNYYSLLEKDYFGIRYVDPEKQRHWLEPNKSIFKQMKTHPPYTMCFRVKFYPHEPLKIKEELTRYLLYLQIKRDIFHGRLLCSFSDAAYLGACIVQAELGDYDPDEHPENYISEFEIFPKQSQKLERKIVEIHKNELRGQSPPVAEFNLLLKAHTLETYGVDPHPCKDSTGTTTFLGFTAAGFVVFQGNKRIHLIKWPDVCKLKFEGKTFYVIGTQKEKKAMLAFHTSTPAACKHLWKCGVENQAFYKYAKSSQIKTVSSSKIFFKGSRFRYSGKVAKEVVEASSKIQREPPEVHRANITQSRSSHSLNKQLIINMEPLQPLLPSPSEQEEELPLGEGVPLPKEENISAPLISSSPVKAAREYEDPPSEEEDKIKEEPLTISELVYNPSASLLPTPVDDDEIDMLFDCPSRLELEREDTDSFEDLEADENAFLIAEEEELKEARRALSWSYDILTGHIRVNPLVKSFSRLLVVGLGLLLFVFPLLLLLLESGIDLSFLCEIRQTPEFEQFHYEYYCPLKEWVAGKVHLILYMLGCS

SEQ ID NO: 31555 - protein, 525 aa, Homo sapiens
  Payload ID: 6180
  Gene Symbol: FRMD4A
  Gene Name: FERM domain containing 4A
  ENSP ID: ENSP00000264546
MAAGLLGSEDPPWSWNLTCRALRTCQVRNIRVLQLLLKPWCISRAVYQMTEGRRCQVHLLDDRKLELLVQPKLLAKELLDLVASHFNLKEKEYFGIAFTDETGHLNWLQLDRRVLEHDFPKKSGPVVLYFCVRFYIESISYLKDNATIELFFLNAKSCIYKELIDVDSEVVFELASYILQEAKGDFSSNEVVRSDLKKLPALPTQALKEHPSLAYCEDRVIEHYKKLNGQTRGQAIVNYMSIVESLPTYGVHYYAVKDKQGIPWWLGLSYKGIFQYDYHDKVKPRKIFQWRQLENLYFREKKFSVEVHDPRRASVTRRTFGHSGIAVHTWYACPALIKSIWAMAISQHQFYLDRKQSKSKIHAARSLSEIAIDLTETGTLKTSKLANMGSKGKIISGSSGSLLSSGSQESDSSQSAKKDMLAALKSRQEALEETLRQRLEELKKLCLREAELTGKLPVEYPLDPGEEPPIVRRRIGTAFKLDEQKILPKGEEAELERLEREFAIQSQITEAARRLASDPNVSKKL

SEQ ID NO: 31556 - protein, 1039 aa, Homo sapiens
  Payload ID: 6180
  Gene Symbol: FRMD4A
  Gene Name: FERM domain containing 4A
  Uniprot ID: Q9P2Q2
  ENSP ID: ENSP00000350032
MAVQLVPDSALGLLMMTEGRRCQVHLLDDRKLELLVQPKLLAKELLDLVASHFNLKEKEYFGIAFTDETGHLNWLQLDRRVLEHDFPKKSGPVVLYFCVRFYIESISYLKDNATIELFFLNAKSCIYKELIDVDSEVVFELASYILQEAKGDFSSNEVVRSDLKKLPALPTQALKEHPSLAYCEDRVIEHYKKLNGQTRGQAIVNYMSIVESLPTYGVHYYAVKDKQGIPWWLGLSYKGIFQYDYHDKVKPRKIFQWRQLENLYFREKKFSVEVHDPRRASVTRRTFGHSGIAVHTWYACPALIKSIWAMAISQHQFYLDRKQSKSKIHAARSLSEIAIDLTETGTLKTSKLANMGSKGKIISGSSGSLLSSGSQESDSSQSAKKDMLAALKSRQEALEETLRQRLEELKKLCLREAELTGKLPVEYPLDPGEEPPIVRRRIGTAFKLDEQKILPKGEEAELERLEREFAIQSQITEAARRLASDPNVSKKLKKQRKTSYLNALKKLQEIENAINENRIKSGKKPTQRASLIIDDGNIASEDSSLSDALVLEDEDSQVTSTISPLHSPHKGLPPRPPSHNRPPPPQSLEGLRQMHYHRNDYDKSPIKPKMWSESSLDEPYEKVKKRSSHSHSSSHKRFPSTGSCAEAGGGSNSLQNSPIRGLPHWNSQSSMPSTPDLRVRSPHYVHSTRSVDISPTRLHSLALHFRHRSSSLESQGKLLGSENDTGSPDFYTPRTRSSNGSDPMDDCSSCTSHSSSEHYYPAQMNANYSTLAEDSPSKARQRQRQRQRAAGALGSASSGSMPNLAARGGAGGAGGAGGGVYLHSQSQPSSQYRIKEYPLYIEGGATPVVVRSLESDQEGHYSVKAQFKTSNSYTAGGLFKESWRGGGGDEGDTGRLTPSRSQILRTPSLGREGAHDKGAGRAAVSDELRQWYQRSTASHKEHSRLSHTSSTSSDSGSQYSTSSQSTFVAHSRVTRMPQMCKATSAALPQSQRSSTPSSEIGATPPSSPHHILTWQTGEATENSPILDGSESPPHQSTDE

SEQ ID NO: 31557 - protein, 1024 aa, Homo sapiens
  Payload ID: 6180
  Gene Symbol: FRMD4A
  Gene Name: FERM domain containing 4A
  ENSP ID: ENSP00000351438
MTEGRRCQVHLLDDRKLELLVQPKLLAKELLDLVASHFNLKEKEYFGIAFTDETGHLNWLQLDRRVLEHDFPKKSGPVVLYFCVRFYIESISYLKDNATIELFFLNAKSCIYKELIDVDSEVVFELASYILQEAKGDFSSNEVVRSDLKKLPALPTQALKEHPSLAYCEDRVIEHYKKLNGQTRGQAIVNYMSIVESLPTYGVHYYAVKDKQGIPWWLGLSYKGIFQYDYHDKVKPRKIFQWRQLENLYFREKKFSVEVHDPRRASVTRRTFGHSGIAVHTWYACPALIKSIWAMAISQHQFYLDRKQSKSKIHAARSLSEIAIDLTETGTLKTSKLANMGSKGKIISGSSGSLLSSGSQESDSSQSAKKDMLAALKSRQEALEETLRQRLEELKKLCLREAELTGKLPVEYPLDPGEEPPIVRRRIGTAFKLDEQKILPKGEEAELERLEREFAIQSQITEAARRLASDPNVSKKLKKQRKTSYLNALKKLQEIENAINENRIKSGKKPTQRASLIIDDGNIASEDSSLSDALVLEDEDSQVTSTISPLHSPHKGLPPRPPSHNRPPPPQSLEGLRQMHYHRNDYDKSPIKPKMWSESSLDEPYEKVKKRSSHSHSSSHKRFPSTGSCAEAGGGSNSLQNSPIRGLPHWNSQSSMPSTPDLRVRSPHYVHSTRSVDISPTRLHSLALHFRHRSSSLESQGKLLGSENDTGSPDFYTPRTRSSNGSDPMDDCSSCTSHSSSEHYYPAQMNANYSTLAEDSPSKARQRQRQRQRAAGALGSASSGSMPNLAARGGAGGAGGAGGGVYLHSQSQPSSQYRIKEYPLYIEGGATPVVVRSLESDQEGHYSVKAQFKTSNSYTAGGLFKESWRGGGGDEGDTGRLTPSRSQILRTPSLGREGAHDKGAGRAAVSDELRQWYQRSTASHKEHSRLSHTSSTSSDSGSQYSTSSQSTFVAHSRVTRMPQMCKATSAALPQSQRSSTPSSEIGATPPSSPHHILTWQTGEATENSPILDGSESPPHQSTDE

SEQ ID NO: 31558 - protein, 72 aa, Homo sapiens
  Payload ID: 6180
  Gene Symbol: FRMD4A
  Gene Name: FERM domain containing 4A
  ENSP ID: ENSP00000473870
MAVQLVPDSALGLLMDRATHMTTEGGTWREDTFWWWRWPFRLLKSCLSHLCKNLRQRKKILLCSPTREEASD

SEQ ID NO: 31559 - protein, 53 aa, Homo sapiens
  Payload ID: 6180
  Gene Symbol: FRMD4A
  Gene Name: FERM domain containing 4A
  ENSP ID: ENSP00000474863
MAVQLVPDSALGLLMMESHCVVQAGGQWCHLGSLQSPISASRVQAILLLHPPE

SEQ ID NO: 31560 - protein, 77 aa, Homo sapiens
  Payload ID: 6180
  Gene Symbol: FRMD4A
  Gene Name: FERM domain containing 4A
  ENSP ID: ENSP00000487974
MAISQHQFYLDRKQSKSKIHAARSLSEIAIDLTETGTLKTSKLANMGSKGKIISGSSGSLLSSGSGARRHCILLPGS

SEQ ID NO: 31561 - protein, 35 aa, Homo sapiens
  Payload ID: 6180
  Gene Symbol: FRMD4A
  Gene Name: FERM domain containing 4A
  ENSP ID: ENSP00000488325
MAISQHQFYLDRKQSKSKIHAARSLSEIAIDLTET

SEQ ID NO: 31562 - protein, 229 aa, Homo sapiens
  Payload ID: 6180
  Gene Symbol: FRMD4A
  Gene Name: FERM domain containing 4A
  ENSP ID: ENSP00000488764
  MOD_RES (1)..(1): Any amino acid
XHSQSQPSSQYRIKEYPLYIEGGATPVVVRSLESDQEGHYSVKAQFKTSNSYTAGGLFKESWRGGGGDEGDTGRLTPSRSQILRTPSLGREGAHDKGAGRAAVSDELRQWYQRSTASHKEHSRLSHTSSTSSDSGSQYSTSSQSTFVAHSRVTRMPQMCKATSAALPQSQRSSTPSSEIGATPPSSPHHILTWQTGSYNDSCFLDSSLYPELADVQWYGQEKAKPGTLV

SEQ ID NO: 31563 - protein, 1034 aa, Homo sapiens
  Payload ID: 6181
  Gene Symbol: FRMD4B
  Gene Name: FERM domain containing 4B
  Uniprot ID: Q9Y2L6
  ENSP ID: ENSP00000381549
MASVFMCGVEDLLFSGSRFVWNLTVSTLRRWYTERLRACHQVLRTWCGLQDVYQMTEGRHCQVHLLDDRRLELLVQPKLLARELLDLVASHFNLKEKEYFGITFIDDTGQQNWLQLDHRVLDHDLPKKPGPTILHFAVRFYIESISFLKDKTTVELFFLNAKACVHKGQIEVESETIFKLAAFILQEAKGDYTSDENARKDLKTLPAFPTKTLQEHPSLAYCEDRVIEHYLKIKGLTRGQAVVQYMKIVEALPTYGVHYYAVKDKQGLPWWLGISYKGIGQYDIQDKVKPRKLFQWKQLENLYFREKKFAVEVHDPRRISVSRRTFGQSGLFVQTWYANSSLIKSIWVMAISQHQFYLDRKQSKAKIPSARSLDEIAMDLTETGTQRASKLVTLETKSQFIMASNGSLISSGSQDSEVSEEQKREKILELKKKEKLLQEKLLKKVEELKKICLREAELTGKMPKEYPLNIGEKPPQVRRRVGTAFKLDDNLLPSEEDPALQELESNFLIQQKLVEAAKKLANEPDLCKTVKKKRKQDYTDAMKKLQEIENAINEYRIRCGKKPSQKATVLPEDIIPSESSSLSDTTTYDDPSDAFTFPGQRSSSVPHSPRILPPKSLGIERIHFRKSSINEQFVDTRQSREMLSTHSSPYKTLERRPQGGRSMPTTPVLTRNAYSSSHLEPESSSQHCRQRSGSLESQSHLLSEMDSDKPFFSLSKSQRSSSTEILDDGSSYTSQSSTEYYCVTPVTGPYYTTQTLDTRTRGRRRSKKQNVSTSNSGSMPNLAQKDSLRNGVYSKSQEPPSSSYYIAGYTPYAECDFYYSGGYVYENDTEGQYSVNPSYRSSAHYGYERQRDYSRSFHEDEVDRVPHNPYATLRLPRKAAAKSEHITKNIHKALVAEHLRGWYQRASGQKDQGHSPQTSFDSDRGSQRCLGFAGLQVPCSPSSRASSYSSVSSTNASGNWRTQLTIGLSDYETPAHSSYTSCYGNVYNPLPSPSRQYTEISQLDGTDGNQLEDNLESSEQRLFWHEDSKPGTLV

SEQ ID NO: 31564 - protein, 113 aa, Homo sapiens
  Payload ID: 6181
  Gene Symbol: FRMD4B
  Gene Name: FERM domain containing 4B
  ENSP ID: ENSP00000417550
MTEGRHCQVHLLDDRRLELLVQPKLLARELLDLVASHFNLKEKEYFGITFIDDTGQQNWLQLDHRVLDHDLPKKPGPTILHFAVRFYIESISFLKDKTTVELFFLNAKACVHK

SEQ ID NO: 31565 - protein, 80 aa, Homo sapiens
  Payload ID: 6181
  Gene Symbol: FRMD4B
  Gene Name: FERM domain containing 4B
  ENSP ID: ENSP00000417765
MTEGRHCQVHLLDDRRLELLVQPKLLARELLDLVASHFNLKEKEYFGITFIDDTPICLHFMQPDTLSEESFHFLQIISKE

SEQ ID NO: 31566 - protein, 142 aa, Homo sapiens
  Payload ID: 6181
  Gene Symbol: FRMD4B
  Gene Name: FERM domain containing 4B
  ENSP ID: ENSP00000418023
MTEGRHCQVHLLDDRRLELLVQPKLLARELLDLVASHFNLKEKEYFGITFIDDTGQQNWLQLDHRVLDHDLPKKPGPTILHFAVRFYIESISFLKDKTTVELFFLNAKACVHKGQIEVESETIFKLAAFILQEAKGDYTSDE

SEQ ID NO: 31567 - protein, 167 aa, Homo sapiens
  Payload ID: 6181
  Gene Symbol: FRMD4B
  Gene Name: FERM domain containing 4B
  ENSP ID: ENSP00000418373
MTEGRHCQVHLLDDRRLELLVQPKLLARELLDLVASHFNLKEKEYFGITFIDDTGQQNWLQLDHRVLDHDLPKKPGPTILHFAVRFYIESISFLKDKTTVELFFLNAKACVHKGQIEVESETIFKLAAFILQEAKGDYTSDENARKDLKTLPAFPTKTLQEHPSLAY

SEQ ID NO: 31568 - protein, 686 aa, Homo sapiens
  Payload ID: 6181
  Gene Symbol: FRMD4B
  Gene Name: FERM domain containing 4B
  ENSP ID: ENSP00000418682
MAISQHQFYLDRKQSKAKIPSARSLDEIAMDLTETGTQRASKLVTLETKSQFIMASNGSLISSGSQDSEVSEEQKREKILELKKKEKLLQEKLLKKVEELKKICLREAELTGKMPKEYPLNIGEKPPQVRRRVGTAFKLDDNLLPSEEDPALQELESNFLIQQKLVEAAKKLANEPDLCKTVKKKRKQDYTDAMKKLQEIENAINEYRIRCGKKPSQKATVLPEDIIPSESSSLSDTTTYDDPSDAFTFPGQRSSSVPHSPRILPPKSLGIERIHFRKSSINEQFVDTRQSREMLSTHSSPYKTLERRPQGGRSMPTTPVLTRNAYSSSHLEPESSSQHCRQRSGSLESQSHLLSEMDSDKPFFSLSKSQRSSSTEILDDGSSYTSQSSTEYYCVTPVTGPYYTTQTLDTRTRGRRRSKKQNVSTSNSGSMPNLAQKDSLRNGVYSKSQEPPSSSYYIAGYTPYAECDFYYSGGYVYENDTEGQYSVNPSYRSSAHYGYERQRDYSRSFHEDEVDRVPHNPYATLRLPRKAAAKSEHITKNIHKALVAEHLRGWYQRASGQKDQGHSPQTSFDSDRGSQRCLGFAGLQVPCSPSSRASSYSSVSSTNASGNWRTQLTIGLSDYETPAHSSYTSCYGNVYNPLPSPSRQYTEISQLDGTDGNQLEDNLESSEQRLFWHEDSKPGTLV

SEQ ID NO: 31569 - protein, 183 aa, Homo sapiens
  Payload ID: 6181
  Gene Symbol: FRMD4B
  Gene Name: FERM domain containing 4B
  ENSP ID: ENSP00000418962
RNANGRSPNNSDKTFLSKFSSQEITLVKPRFYIESISFLKDKTTVELFFLNAKACVHKGQIEVESETIFKLAAFILQEAKGDYTSDENARKDLKTLPAFPTKTLQEHPSLAYCEDRVIEHYLKIKGLTRGQAVVQYMKIVEALPTYGVHYYAVKDKQGLPWWLGISYKGIGQYDIQDKVKPRK

SEQ ID NO: 31570 - protein, 161 aa, Homo sapiens
  Payload ID: 6181
  Gene Symbol: FRMD4B
  Gene Name: FERM domain containing 4B
  ENSP ID: ENSP00000419869
MSRLFQWKQLENLYFREKKFAVEVHDPRRISVSRRTFGQSGLFVQTWYANSSLIKSIWVMAISQHQFYLDRKQSKAKIPSARSLDEIAMDLTETGTQRASKLVTLETKSQFIMASNGSLISSGSQDSEVSEEQKREKILELKKKEKLLQEKLLKKVEELKK

SEQ ID NO: 31571 - protein, 17 aa, Homo sapiens
  Payload ID: 6181
  Gene Symbol: FRMD4B
  Gene Name: FERM domain containing 4B
  ENSP ID: ENSP00000420735
MAISQHQFYLDRKQSKV

SEQ ID NO: 31572 - protein, 517 aa, Homo sapiens
  Payload ID: 6182
  Gene Symbol: FRMD5
  Gene Name: FERM domain containing 5
  ENSP ID: ENSP00000384142
MLSRLMSGSSRSLEREYSCTVRLLDDSEYTCTIQRDAKGQYLFDLLCHHLNLLEKDYFGIRFVDPDKQRHWLEFTKSVVKQLRSQPPFTMCFRVKFYPADPAALKEEITRYLVFLQIKRDLYHGRLLCKTSDAALLAAYILQAEIGDYDSGKHPEGYSSKFQFFPKHSEKLERKIAEIHKTELSGQTPATSELNFLRKAQTLETYGVDPHPCKDVSGNAAFLAFTPFGFVVLQGNKRVHFIKWNEVTKLKFEGKTFYLYVSQKEEKKIILTYFAPTPEACKHLWKCGIENQAFYKLEKSSQVRTVSSSNLFFKGSRFRYSGRVAKEVMESSAKIKREPPEIHRAGMVPSRSCPSITHGPRLSSVPRTRRRAVHISIMEGLESLRDSAHSTPVRSTSHGDTFLPHVRSSRTDSNERVAVIADEAYSPADSVLPTPVAEHSLELMLLSRQINGATCSIEEEKESEASTPTATEVEALGGELRALCQGHSGPEEEQSGHLKGPPLQQQQHQGWGKSVPLV

SEQ ID NO: 31573 - protein, 216 aa, Homo sapiens
  Payload ID: 6182
  Gene Symbol: FRMD5
  Gene Name: FERM domain containing 5
  ENSP ID: ENSP00000392786
MLSRLMSGSSRSLEREYSCTVRLLDDSEYTCTIQRDAKGQYLFDLLCHHLNLLEKDYFGIRFVDPDKQRHWLEFTKSVVKQLRSQPPFTMCFRVKFYPADPAALKEEITRYLVFLQIKRDLYHGRLLCKTSDAALLAAYILQAEIGDYDSGKHPEGYSSKFQFFPKHSEKLERKIAEIHKTELRTCQEMLHFWPSLLLGLLFFKETRGSTSLNGMR

SEQ ID NO: 31574 - protein, 474 aa, Homo sapiens
  Payload ID: 6182
  Gene Symbol: FRMD5
  Gene Name: FERM domain containing 5
  ENSP ID: ENSP00000399684
RDAKGQYLFDLLCHHLNLLEKDYFGIRFVDPDKQRHWLEFTKSVVKQLRSQPPFTMCFRVKFYPADPAALKEEITRYLVFLQIKRDLYHGRLLCKTSDAALLAAYILQAEIGDYDSGKHPEGYSSKFQFFPKHSEKLERKIAEIHKTELSGQTPATSELNFLRKAQTLETYGVDPHPCKDVSGNAAFLAFTPFGFVVLQGNKRVHFIKWNEVTKLKFEGKTFYLYVSQKEEKKIILTYFAPTPEACKHLWKCGIENQAFYKLEKSSQVRTVSSSNLFFKGSRFRYSGRVAKEVMESSAKIKREPPEIHRAGMVPSRSCPSITHGPRLSSVPRTRRRAVHISIMEGLESLRDSAHSTPVRSTSHGDTFLPHVRSSRTDSNERVAVIADEAYSPADSVLPTPVAEHSLELMLLSRQINGATCSIEEEKESEASTPTATEVEALGGELRALCQGHSGPEEEQAMVCLQNPLSGEPAH

SEQ ID NO: 31575 - protein, 123 aa, Homo sapiens
  Payload ID: 6182
  Gene Symbol: FRMD5
  Gene Name: FERM domain containing 5
  ENSP ID: ENSP00000401635
MLSRLMSGSSRSLEREYSCTVRLLDDSEYTCTIQRDAKGQYLFDLLCHHLNLLEKDYFGIRFVDPDKQRHWLEFTKSVVKQLRSQPPFTMCFRVKFYPADPAALKEEITSAVATEWTSFLQEV

SEQ ID NO: 31576 - protein, 570 aa, Homo sapiens
  Payload ID: 6182
  Gene Symbol: FRMD5
  Gene Name: FERM domain containing 5
  Uniprot ID: Q7Z6J6
  ENSP ID: ENSP00000403067
MLSRLMSGSSRSLEREYSCTVRLLDDSEYTCTIQRDAKGQYLFDLLCHHLNLLEKDYFGIRFVDPDKQRHWLEFTKSVVKQLRSQPPFTMCFRVKFYPADPAALKEEITRYLVFLQIKRDLYHGRLLCKTSDAALLAAYILQAEIGDYDSGKHPEGYSSKFQFFPKHSEKLERKIAEIHKTELSGQTPATSELNFLRKAQTLETYGVDPHPCKDVSGNAAFLAFTPFGFVVLQGNKRVHFIKWNEVTKLKFEGKTFYLYVSQKEEKKIILTYFAPTPEACKHLWKCGIENQAFYKLEKSSQVRTVSSSNLFFKGSRFRYSGRVAKEVMESSAKIKREPPEIHRAGMVPSRSCPSITHGPRLSSVPRTRRRAVHISIMEGLESLRDSAHSTPVRSTSHGDTFLPHVRSSRTDSNERVAVIADEAYSPADSVLPTPVAEHSLELMLLSRQINGATCSIEEEKESEASTPTATEVEALGGELRALCQGHSGPEEEQVNKFVLSVLRLLLVTMGLLFVLLLLLIILTESDLDIAFFRDIRQTPEFEQFHYQYFCPLRRWFACKIRSVVSLLIDT

SEQ ID NO: 31577 - protein, 119 aa, Homo sapiens
  Payload ID: 6182
  Gene Symbol: FRMD5
  Gene Name: FERM domain containing 5
  ENSP ID: ENSP00000404496
  MOD_RES (1)..(1): Any amino acid
XMSGSSRSLEREYSCTVRLLDDSEYTCTIQRDAKGQYLFDLLCHHLNLLEKDYFGIRFVDPDKQRHWLEFTKSVVKQLRSQPPFTMCFRVKFYPADPAALKEEITSAVATEWTSFLQEV

SEQ ID NO: 31578 - protein, 414 aa, Homo sapiens
  Payload ID: 6182
  Gene Symbol: FRMD5
  Gene Name: FERM domain containing 5
  ENSP ID: ENSP00000452968
MCFRVKFYPADPAALKEEITRYLVFLQIKRDLYHGRLLCKTSDAALLAAYILQAEIGDYDSGKHPEGYSSKFQFFPKHSEKLERKIAEIHKTELSGQTPATSELNFLRKAQTLETYGVDPHPCKDVSGNAAFLAFTPFGFVVLQGNKRVHFIKWNEVTKLKFEGKTFYLYEKKIILTYFAPTPEACKHLWKCGIENQAFYKLEKSSQVRTVSSSNLFFKGSRFRYSGRVAKEVMESSAKIKREPPEIHRAGMVPSRSCPSITHGPRLSSVPRTRRRAVHISIMEGLESLRDSAHSTPVRSTSHGDTFLPHVRSSRTDSNERVAVIADEAYSPADSVLPTPVAEHSLELMLLSRQINGATCSIEEEKESEASTPTATEVEALGGELRALCQGHSGPEEEQAMVCLQNPLSGEPAH

SEQ ID NO: 31579 - protein, 178 aa, Homo sapiens
  Payload ID: 6182
  Gene Symbol: FRMD5
  Gene Name: FERM domain containing 5
  ENSP ID: ENSP00000454031
FYPADPAALKEEITRYLVFLQIKRDLYHGRLLCKTSDAALLAAYILQAEIGDYDSGKHPEGYSSKFQFFPKHSEKLERKIAEIHKTELSGQTPATSELNFLRKAQTLETYGVDPHPCKDVSGNAAFLAFTPFGFVVLQGNKRVHFIKWNEVTKLKFEGKTFYLYVSQKEKKGIGSCPV

SEQ ID NO: 31580 - protein, 336 aa, Homo sapiens
  Payload ID: 6182
  Gene Symbol: FRMD5
  Gene Name: FERM domain containing 5
  ENSP ID: ENSP00000479575
MEWILTHVRNEVTKLKFEGKTFYLYVSQKEEKKIILTYFAPTPEACKHLWKCGIENQAFYKLEKSSQVRTVSSSNLFFKGSRFRYSGRVAKEVMESSAKIKREPPEIHRAGMVPSRSCPSITHGPRLSSVPRTRRRAVHISIMEGLESLRDSAHSTPVRSTSHGDTFLPHVRSSRTDSNERVAVIADEAYSPADSVLPTPVAEHSLELMLLSRQINGATCSIEEEKESEASTPTATEVEALGGELRALCQGHSGPEEEQVNKFVLSVLRLLLVTMGLLFVLLLLLIILTESDLDIAFFRDIRQTPEFEQFHYQYFCPLRRWFACKIRSVVSLLIDT

SEQ ID NO: 31581 - protein, 622 aa, Homo sapiens
  Payload ID: 6183
  Gene Symbol: FRMD6
  Gene Name: FERM domain containing 6
  Uniprot ID: Q96NE9
  ENSP ID: ENSP00000343899
MNKLNFHNNRVMQDRRSVCIFLPNDESLNIIINVKILCHQLLVQVCDLLRLKDCHLFGLSVIQNNEHVYMELSQKLYKYCPKEWKKEASKVRQYEVTWGIDQFGPPMIIHFRVQYYVENGRLISDRAARYYYYWHLRKQVLHSQCVLREEAYFLLAAFALQADLGNFKRNKHYGKYFEPEAYFPSWVVSKRGKDYILKHIPNMHKDQFALTASEAHLKYIKEAVRLDDVAVHYYRLYKDKREIEASLTLGLTMRGIQIFQNLDEEKQLLYDFPWTNVGKLVFVGKKFEILPDGLPSARKLIYYTGCPMRSRHLLQLLSNSHRLYMNLQPVLRHIRKLEENEEKKQYRESYISDNLDLDMDQLEKRSRASGSSAGSMKHKRLSRHSTASHSSSHTSGIEADTKPRDTGPEDSYSSSAIHRKLKTCSSMTSHGSSHTSGVESGGKDRLEEDLQDDEIEMLVDDPRDLEQMNEESLEVSPDMCIYITEDMLMSRKLNGHSGLIVKEIGSSTSSSSETVVKLRGQSTDSLPQTICRKPKTSTDRHSLSLDDIRLYQKDFLRIAGLCQDTAQSYTFGCGHELDEEGLYCNSCLAQQCINIQDAFPVKRTSKYFSLDLTHDEVPEFVV

SEQ ID NO: 31582 - protein, 614 aa, Homo sapiens
  Payload ID: 6183
  Gene Symbol: FRMD6
  Gene Name: FERM domain containing 6
  Uniprot ID: Q96NE9
  ENSP ID: ENSP00000348550
MNKLNFHNNRVMQDRRSVCIFLPNDESLNIIINVKILCHQLLVQVCDLLRLKDCHLFGLSVIQNNEHVYMELSQKLYKYCPKEWKKEASKGIDQFGPPMIIHFRVQYYVENGRLISDRAARYYYYWHLRKQVLHSQCVLREEAYFLLAAFALQADLGNFKRNKHYGKYFEPEAYFPSWVVSKRGKDYILKHIPNMHKDQFALTASEAHLKYIKEAVRLDDVAVHYYRLYKDKREIEASLTLGLTMRGIQIFQNLDEEKQLLYDFPWTNVGKLVFVGKKFEILPDGLPSARKLIYYTGCPMRSRHLLQLLSNSHRLYMNLQPVLRHIRKLEENEEKKQYRESYISDNLDLDMDQLEKRSRASGSSAGSMKHKRLSRHSTASHSSSHTSGIEADTKPRDTGPEDSYSSSAIHRKLKTCSSMTSHGSSHTSGVESGGKDRLEEDLQDDEIEMLVDDPRDLEQMNEESLEVSPDMCIYITEDMLMSRKLNGHSGLIVKEIGSSTSSSSETVVKLRGQSTDSLPQTICRKPKTSTDRHSLSLDDIRLYQKDFLRIAGLCQDTAQSYTFGCGHELDEEGLYCNSCLAQQCINIQDAFPVKRTSKYFSLDLTHDEVPEFVV

SEQ ID NO: 31583 - protein, 614 aa, Homo sapiens; identical to SEQ ID NO: 31582
  Payload ID: 6183
  Gene Symbol: FRMD6
  Gene Name: FERM domain containing 6
  Uniprot ID: Q96NE9
  ENSP ID: ENSP00000379068

SEQ ID NO: 31584 - protein, 129 aa, Homo sapiens
  Payload ID: 6183
  Gene Symbol: FRMD6
  Gene Name: FERM domain containing 6
  ENSP ID: ENSP00000450667
FRVQYYVENGRLISDRAARYYYYWHLRKQVLHSQCVLREEAYFLLAAFALQADLGNFKRNKHYGKYFEPEAYFPSWVVSKRGKDYILKHIPNMHKDQFALTASEAHLKYIKEAVRLDDVAVHYYRLYKV

SEQ ID NO: 31585 - protein, 143 aa, Homo sapiens
  Payload ID: 6183
  Gene Symbol: FRMD6
  Gene Name: FERM domain containing 6
  ENSP ID: ENSP00000450735
MDQLEKRSRASGSSAGSMKHKRLSRHSTASHSSSHTSGIEADTKPRDTGPEDSYSSSAIHRKLKTCSSMTSHGSSHTSGVESGGKDRLEEDLQDDEMLVDDPRDLEQMNEESLEVSPDMCIYITEDMLMSRKLNGHSGLIVKE

SEQ ID NO: 31586 - protein, 205 aa, Homo sapiens
  Payload ID: 6183
  Gene Symbol: FRMD6
  Gene Name: FERM domain containing 6
  ENSP ID: ENSP00000451157
DFPWTNVGKLVFVGKKFEILPDGLPSARKLIYYTGCPMRSRHLLQLLSNSHRLYMNLQPVLRHIRKLEENEEKKQYRESYISDNLDLDMDQLEKRSRASGSSAGSMKHKRLSRHSTASHSSSHTSGIEADTKPRDTGPEDSYSSSAIHRKLKTCSSMTSHGSSHTSGVESGGKDRLEEDLQDDGNSTVPSLALCLVSQFFQALVL

SEQ ID NO: 31587 - protein, 120 aa, Homo sapiens
  Payload ID: 6183
  Gene Symbol: FRMD6
  Gene Name: FERM domain containing 6
  ENSP ID: ENSP00000451453
MELSQKLYKYCPKEWKKEASKVRQYEVTWGIDQFGPPMIIHFRVQYYVENGRLISDRAARYYYYWHLRKQVLHSQCVLREEAYFLLAAFALQADLGNFKRNKHYGKYFEPEAYFPSWVVS

SEQ ID NO: 31588 - protein, 545 aa, Homo sapiens
  Payload ID: 6183
  Gene Symbol: FRMD6
  Gene Name: FERM domain containing 6
  ENSP ID: ENSP00000451977
MELSQKLYKYCPKEWKKEASKGIDQFGPPMIIHFRVQYYVENGRLISDRAARYYYYWHLRKQVLHSQCVLREEAYFLLAAFALQADLGNFKRNKHYGKYFEPEAYFPSWVVSKRGKDYILKHIPNMHKDQFALTASEAHLKYIKEAVRLDDVAVHYYRLYKDKREIEASLTLGLTMRGIQIFQNLDEEKQLLYDFPWTNVGKLVFVGKKFEILPDGLPSARKLIYYTGCPMRSRHLLQLLSNSHRLYMNLQPVLRHIRKLEENEEKKQYRESYISDNLDLDMDQLEKRSRASGSSAGSMKHKRLSRHSTASHSSSHTSGIEADTKPRDTGPEDSYSSSAIHRKLKTCSSMTSHGSSHTSGVESGGKDRLEEDLQDDEIEMLVDDPRDLEQMNEESLEVSPDMCIYITEDMLMSRKLNGHSGLIVKEIGSSTSSSSETVVKLRGQSTDSLPQTICRKPKTSTDRHSLSLDDIRLYQKDFLRIAGLCQDTAQSYTFGCGHELDEEGLYCNSCLAQQCINIQDAFPVKRTSKYFSLDLTHDEVPEFVV

SEQ ID NO: 31589 - protein, 61 aa, Homo sapiens
  Payload ID: 6183
  Gene Symbol: FRMD6
  Gene Name: FERM domain containing 6
  ENSP ID: ENSP00000452122
MNKLNFHNNRVMQDRRSVCIFLPNDESLNIIINVKILCHQLLVQVCDLLRLKDCHLFGLSV

SEQ ID NO: 31590 - protein, 264 aa, Homo sapiens
  Payload ID: 6183
  Gene Symbol: FRMD6
  Gene Name: FERM domain containing 6
  Uniprot ID: Q96NE9
  ENSP ID: ENSP00000452529
MDQLEKRSRASGSSAGSMKHKRLSRHSTASHSSSHTSGIEADTKPRDTGPEDSYSSSAIHRKLKTCSSMTSHGSSHTSGVESGGKDRLEEDLQDDEIEMLVDDPRDLEQMNEESLEVSPDMCIYITEDMLMSRKLNGHSGLIVKEIGSSTSSSSETVVKLRGQSTDSLPQTICRKPKTSTDRHSLSLDDIRLYQKDFLRIAGLCQDTAQSYTFGCGHELDEEGLYCNSCLAQQCINIQDAFPVKRTSKYFSLDLTHDEVPEFVV

SEQ ID NO: 31591 - protein, 714 aa, Homo sapiens
  Payload ID: 6184
  Gene Symbol: FRMD7
  Gene Name: FERM domain containing 7
  Uniprot ID: Q6ZUT3
  ENSP ID: ENSP00000298542
MLHLKVQFLDDSQKIFVVDQKSSGKALFNLSCSHLNLAEKEYFGLEFCSHSGNNVWLELLKPITKQVKNPKEIVFKFMVKFFPVDPGHLREELTRYLFTLQIKKDLALGRLPCSDNCTALMVSHILQSELGDFHEETDRKHLAQTRYLPNQDCLEGKIMHFHQKHIGRSPAESDILLLDIARKLDMYGIRPHPASDGEGMQIHLAVAHMGVLVLRGNTKINTFNWAKIRKLSFKRKHFLIKLHANILVLCKDTLEFTMASRDACKAFWKTCVEYHAFFRLSEEPKSKPKTLLCSKGSSFRYSGRTQRQLLEYGRKGRLKSLPFERKHYPSQYHERQCRSSPDLLSDVSKQVEDLRLAYGGGYYQNVNGVHASEPVLESRRRNSALEVTFATELEHSKPEADPTLLHQSQSSSSFPFIYMDPVFNTEPNPNPDPRDIFSERSSLSSFQTSCKFSGNHMSIYSGLTSKVRPAKQLTYTDVPYIPCTGQQVGIMPPQVFFYVDKPPQVPRWSPIRAEERTSPHSYVEPTAMKPAERSPRNIRMKSFQQDLQVLQEAIARTSGRSNINVGLEEEDPNLEDAFVCNIQEQTPKRSQSQSDMKTIRFPFGSEFRPLGPCPALSHKADLFTDMFAEQELPAVLMDQSTAERYVASESSDSESEILKPDYYALYGKEIRSPMARIRLSSGSLQLDEEDEDAYFNTPTAEDRTSLKPCNYFLA

SEQ ID NO: 31592 - protein, 594 aa, Homo sapiens
  Payload ID: 6184
  Gene Symbol: FRMD7
  Gene Name: FERM domain containing 7
  ENSP ID: ENSP00000359916
MVSHILQSELGDFHEETDRKHLAQTRYLPNQDCLEGKIMHFHQKHIGRSPAESDILLLDIARKLDMYGIRPHPASDGEGMQIHLAVAHMGVLVLRGNTKINTFNWAKIRKLSFKRKHFLIKLHANILVLCKDTLEFTMASRDACKAFWKTCVEYHAFFRLSEEPKSKPKTLLCSKGSSFRYSGRTQRQLLEYGRKGRLKSLPFERKHYPSQYHERQCRSSPDLLSDVSKQVEDLRLAYGGGYYQNVNGVHASEPVLESRRRNSALEVTFATELEHSKPEADPTLLHQSQSSSSFPFIYMDPVFNTEPNPNPDPRDIFSERSSLSSFQTSCKFSGNHMSIYSGLTSKVRPAKQLTYTDVPYIPCTGQQVGIMPPQVFFYVDKPPQVPRWSPIRAEERTSPHSYVEPTAMKPAERSPRNIRMKSFQQDLQVLQEAIARTSGRSNINVGLEEEDPNLEDAFVCNIQEQTPKRSQSQSDMKTIRFPFGSEFRPLGPCPALSHKADLFTDMFAEQELPAVLMDQSTAERYVASESSDSESEILKPDYYALYGKEIRSPMARIRLSSGSLQLDEEDEDAYFNTPTAEDRTSLKPCNYFLA

SEQ ID NO: 31593 - protein, 699 aa, Homo sapiens
  Payload ID: 6184
  Gene Symbol: FRMD7
  Gene Name: FERM domain containing 7
  Uniprot ID: Q6ZUT3
  ENSP ID: ENSP00000417996
MLHLKVQFLDDSQKIFVVDQKSSGKALFNLSCSHLNLAEKEYFGLEFCSHSGNNVWLELLKPITKQVKMDPGHLREELTRYLFTLQIKKDLALGRLPCSDNCTALMVSHILQSELGDFHEETDRKHLAQTRYLPNQDCLEGKIMHFHQKHIGRSPAESDILLLDIARKLDMYGIRPHPASDGEGMQIHLAVAHMGVLVLRGNTKINTFNWAKIRKLSFKRKHFLIKLHANILVLCKDTLEFTMASRDACKAFWKTCVEYHAFFRLSEEPKSKPKTLLCSKGSSFRYSGRTQRQLLEYGRKGRLKSLPFERKHYPSQYHERQCRSSPDLLSDVSKQVEDLRLAYGGGYYQNVNGVHASEPVLESRRRNSALEVTFATELEHSKPEADPTLLHQSQSSSSFPFIYMDPVFNTEPNPNPDPRDIFSERSSLSSFQTSCKFSGNHMSIYSGLTSKVRPAKQLTYTDVPYIPCTGQQVGIMPPQVFFYVDKPPQVPRWSPIRAEERTSPHSYVEPTAMKPAERSPRNIRMKSFQQDLQVLQEAIARTSGRSNINVGLEEEDPNLEDAFVCNIQEQTPKRSQSQSDMKTIRFPFGSEFRPLGPCPALSHKADLFTDMFAEQELPAVLMDQSTAERYVASESSDSESEILKPDYYALYGKEIRSPMARIRLSSGSLQLDEEDEDAYFNTPTAEDRTSLKPCNYFLA

SEQ ID NO: 31594 - protein, 464 aa, Homo sapiens
  Payload ID: 6185
  Gene Symbol: FRMD8
  Gene Name: FERM domain containing 8
  Uniprot ID: Q9BZ67
  ENSP ID: ENSP00000319726
MDGTEGSAGQPGPAERSHRSSVSSVGARAADVLVYLADDTVVPLAVENLPSLSAHELHRAVREVLQLPDIALDVFALWLVSPLLEVQLKPKHQPYKLGRQWPELLLRFTSAPDDDVAMDEPFLQFRRNVFFPKRRELQIHDEEVLRLLYEEAKGNVLAARYPCDVEDCEALGALVCRVQLGPYQPGRPAACDLREKLDSFLPAHLCKRGQSLFAALRGRGARAGPGEQGLLNAYRQVQEVSSDGGCEAALGTHYRAYLLKCHELPFYGCAFFHGEVDKPAQGFLHRGGRKPVSVAISLEGVHVIDSREKHVLLGLRFQELSWDHTSPEEEEPILWLEFDGDSEGTPVNKLLKIYSKQAELMSSLIEYCIELSQAAEPAGPQDSATGSPSDPSSSLAPVQRPKLRRQGSVVSSRIQHLSTIDYVEDGKGIRRVKPKRTTSFFSRQLSLGQGSYTVVQPGDSLEQG

SEQ ID NO: 31595 - protein, 408 aa, Homo sapiens
  Payload ID: 6185
  Gene Symbol: FRMD8
  Gene Name: FERM domain containing 8
  Uniprot ID: Q9BZ67
  ENSP ID: ENSP00000348270
MDGTEGSAGQPGPAERSHRSSVSSVGAREVQLKPKHQPYKLGRQWPELLLRFTSAPDDDVAMDEPFLQFRRNVFFPKRRELQIHDEEVLRLLYEEAKGNVLAARYPCDVEDCEALGALVCRVQLGPYQPGRPAACDLREKLDSFLPAHLCKRGQSLFAALRGRGARAGPGEQGLLNAYRQVQEVSSDGGCEAALGTHYRAYLLKCHELPFYGCAFFHGEVDKPAQGFLHRGGRKPVSVAISLEGVHVIDSREKHVLLGLRFQELSWDHTSPEEEEPILWLEFDGDSEGTPVNKLLKIYSKQAELMSSLIEYCIELSQAAEPAGPQDSATGSPSDPSSSLAPVQRPKLRRQGSVVSSRIQHLSTIDYVEDGKGIRRVKPKRTTSFFSRQLSLGQGSYTVVQPGDSLEQG

SEQ ID NO: 31596 - protein, 430 aa, Homo sapiens
  Payload ID: 6185
  Gene Symbol: FRMD8
  Gene Name: FERM domain containing 8
  Uniprot ID: Q9BZ67
  ENSP ID: ENSP00000392111
MDGTEGSAGQPGPAERSHRSSVSSVGARAADVLVYLADDTVVPLAVENLPSLSAHELHRAVREVLQLPDIALDVFALWLVSPLLDEPFLQFRRNVFFPKRRELQIHDEEVLRLLYEEAKGNVLAARYPCDVEDCEALGALVCRVQLGPYQPGRPAACDLREKLDSFLPAHLCKRGQSLFAALRGRGARAGPGEQGLLNAYRQVQEVSSDGGCEAALGTHYRAYLLKCHELPFYGCAFFHGEVDKPAQGFLHRGGRKPVSVAISLEGVHVIDSREKHVLLGLRFQELSWDHTSPEEEEPILWLEFDGDSEGTPVNKLLKIYSKQAELMSSLIEYCIELSQAAEPAGPQDSATGSPSDPSSSLAPVQRPKLRRQGSVVSSRIQHLSTIDYVEDGKGIRRVKPKRTTSFFSRQLSLGQGSYTVVQPGDSLEQG

SEQ ID NO: 31597 - protein, 66 aa, Homo sapiens
  Payload ID: 6185
  Gene Symbol: FRMD8
  Gene Name: FERM domain containing 8
  ENSP ID: ENSP00000433479
MDGTEGSAGQPGPAERSHRSSVSSVGARGGSHPHLLFHTLLGPQPWRSSSGLSSFSLKIIYVSTKK

SEQ ID NO: 31598 - protein, 90 aa, Homo sapiens
  Payload ID: 6185
  Gene Symbol: FRMD8
  Gene Name: FERM domain containing 8
  ENSP ID: ENSP00000434274
MDGTEGSAGQPGPAERSHRSSVSSVGARAADVLVYLADDTVVPLAVENLPSLSAHELHRAVREVLQLPDIALDVFALWLVSPLLEVQLKP

SEQ ID NO: 31599 - protein, 184 aa, Homo sapiens
  Payload ID: 6185
  Gene Symbol: FRMD8
  Gene Name: FERM domain containing 8
  ENSP ID: ENSP00000435913
MDGTEGSAGQPGPAERSHRSSVSSVGAREVQLKPKHQPYKLGRQWPELLLRFTSAPDDDVAMDEPFLQFRRNVFFPKRRELQIHDEEVLRLLYEEAKGNVLAARYPCDVEDCEALGALVCRVQLGPYQPGRPAACDLREKLDSFLPAHLCKRGQSLFAALRGRGARAGPGEQGLLNAYRQVQEV

SEQ ID NO: 31600 - protein, 155 aa, Homo sapiens
  Payload ID: 6185
  Gene Symbol: FRMD8
  Gene Name: FERM domain containing 8
  ENSP ID: ENSP00000435991
MDGTEGSAGQPGPAERSHRSSVSSVGARADDTVVPLAVENLPSLSAHELHRAVREVLQLPDIALDVFALWLVSPLLDEPFLQFRRNVFFPKRRELQIHDEEVLRLLYEEAKGNVLAARYPCDVEDCEALGALVCRVQLGPYQPGRPAACDLREKL

SEQ ID NO: 31601 - protein, 1045 aa, Homo sapiens
  Payload ID: 6186
  Gene Symbol: FARP1
  Gene Name: FERM, RhoGEF (ARHGEF) and pleckstrin domain protein 1 (chondrocyte-derived)
  Uniprot ID: Q9Y4F1
  ENSP ID: ENSP00000322926
MGEIEQRPTPGSRLGAPENSGISTLERGQKPPPTPSGKLVSIKIQMLDDTQEAFEVPQRAPGKVLLDAVCNHLNLVEGDYFGLEFPDHKKITVWLDLLKPIVKQIRRPKHVVVKFVVKFFPPDHTQLQEELTRYLFALQVKQDLAQGRLTCNDTSAALLISHIVQSEIGDFDEALDREHLAKNKYIPQQDALEDKIVEFHHNHIGQTPAESDFQLLEIARRLEMYGIRLHPAKDREGTKINLAVANTGILVFQGFTKINAFNWAKVRKLSFKRKRFLIKLRPDANSAYQDTLEFLMASRDFCKSFWKICVEHHAFFRLFEEPKPKPKPVLFSRGSSFRFSGRTQKQVLDYVKEGGHKKVQFERKHSKIHSIRSLASQPTELNSEVLEQSQQSTSLTFGEGAESPGGQSCRRGKEPKVSAGEPGSHPSPAPRRSPAGNKQADGAASAPTEEEEEVVKDRTQQSKPQPPQPSTGSLTGSPHLSELSVNSQGGVAPANVTLSPNLSPDTKQASPLISPLLNDQACPRTDDEDEGRRKRFPTDKAYFIAKEVSTTERTYLKDLEVITSWFQSTVSKEDAMPEALKSLIFPNFEPLHKFHTNFLKEIEQRLALWEGRSNAQIRDYQRIGDVMLKNIQGMKHLAAHLWKHSEALEALENGIKSSRRLENFCRDFELQKVCYLPLNTFLLRPLHRLMHYKQVLERLCKHHPPSHADFRDCRAALAEITEMVAQLHGTMIKMENFQKLHELKKDLIGIDNLVVPGREFIRLGSLSKLSGKGLQQRMFFLFNDVLLYTSRGLTASNQFKVHGQLPLYGMTIEESEDEWGVPHCLTLRGQRQSIIVAASSRSEMEKWVEDIQMAIDLAEKSSSPAPEFLASSPPDNKSPDEATAADQESEDDLSASRTSLERQAPHRGNTMVHVCWHRNTSVSMVDFSIAVENQLSGNLLRKFKNSNGWQKLWVVFTNFCLFFYKSHQDNHPLASLPLLGYSLTIPSESENIQKDYVFKLHFKSHVYYFRAESEYTFERWMEVIRSATSSASRPHVLSHKESLVY

SEQ ID NO: 31602 - protein, 129 aa, Homo sapiens
  Payload ID: 6186
  Gene Symbol: FARP1
  Gene Name: FERM, RhoGEF (ARHGEF) and pleckstrin domain protein 1 (chondrocyte-derived)
  Uniprot ID: Q9Y4F1
  ENSP ID: ENSP00000365765
MGEIEQRPTPGSRLGAPENSGISTLERGQKPPPTPSGKLVSIKIQMLDDTQEAFEVPMVSSSSFLKATGSSWTGWVLRCSMKPKHHSHLIEKFGEDRILTHLTGSISYTNWAGSRSLAVTVTEELLNLF

SEQ ID NO: 31603 - protein, 215 aa, Homo sapiens
  Payload ID: 6186
  Gene Symbol: FARP1
  Gene Name: FERM, RhoGEF (ARHGEF) and pleckstrin domain protein 1 (chondrocyte-derived)
  ENSP ID: ENSP00000410930
HLAAHLWKHSEALEALENGIKSSRRLENFCRDFELQKVCYLPLNTFLLRPLHRLMHYKQVLERLCKHHPPSHADFRDCRAALAEITEMVAQLHGTMIKMENFQKLHELKKDLIGIDNLVVPGRVSSSGLTMHCAGSRKEASEGLTFEPFEERPLQSKMSSFHPPGRQLEKHNSVVSSESLCSEEIKQSSDLIFCFFSLRGDSLLYLFPYHIPQKI

SEQ ID NO: 31604 - protein, 248 aa, Homo sapiens
  Payload ID: 6186
  Gene Symbol: FARP1
  Gene Name: FERM, RhoGEF (ARHGEF) and pleckstrin domain protein 1 (chondrocyte-derived)
  ENSP ID: ENSP00000469365
  MOD_RES (1)..(1): Any amino acid
XEALENGIKSSRRLENFCRDFELQKVCYLPLNTFLLRPLHRLMHYKQVLERLCKHHPPSHADFRDCRAALAEITEMVAQLHGTMIKMENFQKLHELKKDLIGIDNLVVPGRFNDVLLYTSRGLTASNQFKVHGQLPLYGMTIEESEDEWGVPHCLTLRGQRQSIIVAASSRSEMEKWVEDIQMAIDLAEKSSSPAPEFLASSPPDNKSPDEATAADQESEDDLSASRTSLERQAPHRGNTMVHVCWHR

SEQ ID NO: 31605 - protein, 10 aa, Homo sapiens
  Payload ID: 6186
  Gene Symbol: FARP1
  Gene Name: FERM, RhoGEF (ARHGEF) and pleckstrin domain protein 1 (chondrocyte-derived)
  ENSP ID: ENSP00000469420
MYGIRLHPAK

SEQ ID NO: 31606 - protein, 203 aa, Homo sapiens
  Payload ID: 6186
  Gene Symbol: FARP1
  Gene Name: FERM, RhoGEF (ARHGEF) and pleckstrin domain protein 1 (chondrocyte-derived)
  ENSP ID: ENSP00000469712
MGEIEQRPTPGSRLGAPENSGISTLERGQKPPPTPSGKLVSIKIQMLDDTQEAFEVPQRAPGKVLLDAVCNHLNLVEGDYFGLEFPDHKKITVWLDLLKPIVKQIRRPKHVVVKFVVKFFPPDHTQLQEELTRYLFALQVKQDLAQGRLTCNDTSAALLISHIVQSEIGDFDEALDREHLAKNKYIPQQDALEDKIVEFHHNH

SEQ ID NO: 31607 - protein, 1076 aa, Homo sapiens
  Payload ID: 6186
  Gene Symbol: FARP1
  Gene Name: FERM, RhoGEF (ARHGEF) and pleckstrin domain protein 1 (chondrocyte-derived)
  ENSP ID: ENSP00000471242
MGEIEQRPTPGSRLGAPENSGISTLERGQKPPPTPSGKLVSIKIQMLDDTQEAFEVPQRAPGKVLLDAVCNHLNLVEGDYFGLEFPDHKKITVWLDLLKPIVKQIRRPKHVVVKFVVKFFPPDHTQLQEELTRYLFALQVKQDLAQGRLTCNDTSAALLISHIVQSEIGDFDEALDREHLAKNKYIPQQDALEDKIVEFHHNHIGQTPAESDFQLLEIARRLEMYGIRLHPAKDREGTKINLAVANTGILVFQGFTKINAFNWAKVRKLSFKRKRFLIKLRPDANSAYQDTLEFLMASRDFCKSFWKICVEHHAFFRLFEEPKPKPKPVLFSRGSSFRFSGRTQKQVLDYVKEGGHKKVQFERKHSKIHSIRSLASQPTELNSEVLEQSQQSTSLTFGEGAESPGGQSCRRGKEPKVSAGEPGSHPSPAPRRSPAGNKQADGAASAPTEEEEEVVKDRTQQSKPQPPQPSTGSLTGSPHLSELSVNSQGGVAPANVTLSPNLSPDTKQASPLISPLLNDQACPRTDDEDEGRRKRFPTDKAYFIAKEVSTTERTYLKDLEVITSWFQSTVSKEDAMPEALKSLIFPNFEPLHKFHTNFLKEIEQRLALWEGRSNAQIRDYQRIGDVMLKNIQGMKHLAAHLWKHSEALEALENGIKSSRRLENFCRDFELQKVCYLPLNTFLLRPLHRLMHYKQVLERLCKHHPPSHADFRDCRAALAEITEMVAQLHGTMIKMENFQKLHELKKDLIGIDNLVVPGRPGSFSLIRTPHLGQARRIPCAPERRPLLLVKEFIRLGSLSKLSGKGLQQRMFFLFNDVLLYTSRGLTASNQFKVHGQLPLYGMTIEESEDEWGVPHCLTLRGQRQSIIVAASSRSEMEKWVEDIQMAIDLAEKSSSPAPEFLASSPPDNKSPDEATAADQESEDDLSASRTSLERQAPHRGNTMVHVCWHRNTSVSMVDFSIAVENQLSGNLLRKFKNSNGWQKLWVVFTNFCLFFYKSHQDNHPLASLPLLGYSLTIPSESENIQKDYVFKLHFKSHVYYFRAESEYTFERWMEVIRSATSSASRPHVLSHKESLVY

SEQ ID NO: 31608 - protein, 171 aa, Homo sapiens
  Payload ID: 6186
  Gene Symbol: FARP1
  Gene Name: FERM, RhoGEF (ARHGEF) and pleckstrin domain protein 1 (chondrocyte-derived)
  ENSP ID: ENSP00000472346
  MOD_RES (1)..(1): Any amino acid
XYLFALQVKQDLAQGRLTCNDTSAALLISHIVQSEIGDFDEALDREHLAKNKYIPQQDALEDKIVEFHHNHIGQTPAESDFQLLEIARRLEMYGIRLHPAKDREGTKINLAVANTGILVFQGFTKINAFNWAKVRKLSFKRKRFLIKLRPDANFLGWPGARSRGRLHRETT

SEQ ID NO: 31609 - protein, 1076 aa, Homo sapiens; identical to SEQ ID NO: 31607
  Payload ID: 6186
  Gene Symbol: FARP1
  Gene Name: FERM, RhoGEF (ARHGEF) and pleckstrin domain protein 1 (chondrocyte-derived)
  ENSP ID: ENSP00000486285

SEQ ID NO: 31610 - protein, 1054 aa, Homo sapiens
  Payload ID: 6187
  Gene Symbol: FARP2
  Gene Name: FERM, RhoGEF and pleckstrin domain protein 2
  Uniprot ID: O94887
  ENSP ID: ENSP00000264042
MGEIEGTYRVLQTAGMRLGAQTPVGVSTLEPGQTLLPRMQEKHLHLRVKLLDNTMEIFDIEPKCDGQVLLTQVWKRLNLVECDYFGMEFQNTQSYWIWLEPMKPIIRQIRRPKNVVLRLAVKFFPPDPGQLQEEYTRYLFALQLKRDLLEERLTCADTTAALLTSHLLQSEIGDYDETLDREHLKVNEYLPGQQHCLEKILEFHQKHVGQTPAESDFQVLEIARKLEMYGIRFHMASDREGTKIQLAVSHMGVLVFQGTTKINTFNWSKVRKLSFKRKRFLIKLHPEVHGPYQDTLEFLLGSRDECKNFWKICVEYHTFFRLLDQPKPKAKAVFFSRGSSFRYSGRTQKQLVDYFKDSGMKRIPYERRHSKTHTSVRALTADLPKQSISFPEGLRTPASPSSANAFYSLSPSTLVPSGLPEFKDSSSSLTDPQVSYVKSPAAERRSGAVAGGPDTPSAQPLGPPALQPGPGLSTKSPQPSPSSRKSPLSLSPAFQVPLGPAEQGSSPLLSPVLSDAGGAGMDCEEPRHKRVPADEAYFIVKEILATERTYLKDLEVITVWFRSAVVKEDAMPATLMTLLFSNIDPIYEFHRGFLREVEQRLALWEGPSKAHTKGSHQRIGDILLRNMRQLKEFTSYFQRHDEVLTELEKATKRCKKLEAVYKEFELQKVCYLPLNTFLLKPIQRLLHYRLLLRRLCGHYSPGHHDYADCHDALKAITEVTTTLQHILIRLENLQKLTELQRDLVGIENLIAPGREFIREGCLHKLTKKGLQQRMFFLFSDMLLYTSKGVAGTSHFRIRGLLPLQGMLVEESDNEWSVPHCFTIYAAQKTIVVAASTRLEKEKWMLDLNSAIQAAKSGGDTAPALPGRTVCTRPPRSPNEVSLEQESEDDARGVRSSLEGHGQHRANTTMHVCWYRNTSVSRADHSAAVENQLSGYLLRKFKNSHGWQKLWVVFTNFCLFFYKTHQDDYPLASLPLLGYSVSIPREADGIHKDYVFKLQFKSHVYFFRAESKYTFERWMEVIQGASSSAGRAPSIVQDGPQPSSGLEGMVRGKEE

SEQ ID NO: 31611 - protein, 647 aa, Homo sapiens
  Payload ID: 6187
  Gene Symbol: FARP2
  Gene Name: FERM, RhoGEF and pleckstrin domain protein 2
  Uniprot ID: O94887
  ENSP ID: ENSP00000362384
MGEIEGTYRVLQTAGMRLGAQTPVGVSTLEPGQTLLPRMQEKHLHLRVKLLDNTMEIFDIEPKCDGQVLLTQVWKRLNLVECDYFGMEFQNTQSYWIWLEPMKPIIRQIRRPKNVVLRLAVKFFPPDPGQLQEEYTRYLFALQLKRDLLEERLTCADTTAALLTSHLLQSEIGDYDETLDREHLKVNEYLPGQQHCLEKILEFHQKHVGQTPAESDFQVLEIARKLEMYGIRFHMASDREGTKIQLAVSHMGVLVFQGTTKINTFNWSKVRKLSFKRKRFLIKLHPEVHGPYQDTLEFLLGSRDECKNFWKICVEYHTFFRLLDQPKPKAKAVFFSRGSSFRYSGRTQKQLVDYFKDSGMKRIPYERRHSKTHTSVRALTADLPKQSISFPEGLRTPASPSSANAFYSLSPSTLVPSGLPEFKDSSSSLTDPQVSYVKSPAAERRSGAVAGGPDTPSAQPLGPPALQPGPGLSTKSPQPSPSSRKSPLSLSPAFQVPLGPAEQGSSPLLSPVLSDAGGAGMDCEEPRHKRVPADEAYFIVKEILATERTYLKDLEVITVWFRSAVVKEDAMPATLMTLLFSNIDPIYEFHRGFLREVEQRLALWEGPSKAHTKGSHQRIGDILLRNMRQLKVFQLHEGHVAGVTKME

SEQ ID NO: 31612 - protein, 93 aa, Homo sapiens
  Payload ID: 6187
  Gene Symbol: FARP2
  Gene Name: FERM, RhoGEF and pleckstrin domain protein 2
  ENSP ID: ENSP00000388167
MGEIEGTYRVLQTAGMRLGAQTPVGVSTLEPGQTLLPRMQEKHLHLRVKLLDNTMEIFDIEPKCDGQVLLTQVWKRLNLVECDYFGMEFQNTQ

SEQ ID NO: 31613 - protein, 134 aa, Homo sapiens
  Payload ID: 6187
  Gene Symbol: FARP2
  Gene Name: FERM, RhoGEF and pleckstrin domain protein 2
  ENSP ID: ENSP00000393376
MGEIEGTYRVLQTAGMRLGAQTPVGVSTLEPGQTLLPRMQEKHLHLRVKLLDNTMEIFDIEPKCDGQVLLTQVWKRLNLVECDYFGMEFQNTQSYWIWLEPMKPIIRQIRRPKNVVLRLAVKFFPPDPGQLQEE

SEQ ID NO: 31614 - protein, 56 aa, Homo sapiens
  Payload ID: 6187
  Gene Symbol: FARP2
  Gene Name: FERM, RhoGEF and pleckstrin domain protein 2
  ENSP ID: ENSP00000403437
  MOD_RES (1)..(1): Any amino acid
XKSHVYFFRAESKYTFERWMEVIQGASSSAGRAPSIVQDGPQPSSGLEGMVRGKEE

SEQ ID NO: 31615 - protein, 79 aa, Homo sapiens
  Payload ID: 6187
  Gene Symbol: FARP2
  Gene Name: FERM, RhoGEF and pleckstrin domain protein 2
  ENSP ID: ENSP00000411353
  MOD_RES (1)..(1): Any amino acid
XFRSAVVKEDAMPATLMTLLFSNIDPIYEFHRGFLREVEQRLALWEGPSKAHTKGSHQRIGDILLRNMRQLKAAHEFTT

SEQ ID NO: 31616 - protein, 482 aa, Homo sapiens
  Payload ID: 6187
  Gene Symbol: FARP2
  Gene Name: FERM, RhoGEF and pleckstrin domain protein 2
  ENSP ID: ENSP00000412772
VEYHTFFRLLDQPKPKAKAVFFSRGSSFRYSGRTQKQLVDYFKDSGMKRIPYERRHSKTHTSVRALTADLPKQSISFPEGLRTPASPSSANAFYSLSPSTLVPSGLPEFKDSSSSLTDPQVSYVKSPAAERRSGAVAGGPDTPSAQPLGPPALQPGPGVGFCHVVSSCGSVCAGGQSFSALDLDTGRAGRELSAACKNDNGGDDFTTGSFPSGGEHRCDRQCRGGAPAFTLTNAQLQVSEEFIDDDPADISFFAGGSEAFSFPYGSVVPQESQASAQPLVAPPLCELPGSARSSPDRYSMEAVDMNTEDGFAFEEESDFNGNAHPSDTSELFEVKAQASRMQRLLGPSETSSLRNSQSENSSLNNMPLRGGLSVHTCSSASQSEASSMVNFPAYSVRSESSSAFQFSDIIDQLEQLSYPPTTAEDSSSTESDSWDSETEAPLDISLFFSNPFAHTSGERVPFDLQNNLKNLTPGEQIDKNPS

SEQ ID NO: 31617 - protein, 196 aa, Homo sapiens
  Payload ID: 6187
  Gene Symbol: FARP2
  Gene Name: FERM, RhoGEF and pleckstrin domain protein 2
  ENSP ID: ENSP00000415474
  MOD_RES (1)..(1): Any amino acid
XVEESDNEWSVPHCFTIYAAQKTIVVAASTRLEKEKWMLDLNSAIQAAKSGGDTAPALPGRTVCTRPPRSPNEVSLEQESEDDARGVRSSLEGHGQHRANTTMHVCWYRNTSVSRADHSAAVENQLSGYLLRKFKNSHGWQKLWVVFTNFCLFFYKTHQVDGGDPGGQQLSREGPKHRAGWPPTLLRAGGDGQGEG

SEQ ID NO: 31618 - protein, 638 aa, Homo sapiens
  Payload ID: 6187
  Gene Symbol: FARP2
  Gene Name: FERM, RhoGEF and pleckstrin domain protein 2
  Uniprot ID: O94887
  ENSP ID: ENSP00000486597
MGEIEGTYRVLQTAGMRLGAQTPVGVSTLEPGQTLLPRMQEKHLHLRVKLLDNTMEIFDIEPKCDGQVLLTQVWKRLNLVECDYFGMEFQNTQSYWIWLEPMKPIIRQIRRPKNVVLRLAVKFFPPDPGQLQEEYTRYLFALQLKRDLLEERLTCADTTAALLTSHLLQSEIGDYDETLDREHLKVNEYLPGQQHCLEKILEFHQKHVGQTPAESDFQVLEIARKLEMYGIRFHMASDREGTKIQLAVSHMGVLVFQGTTKINTFNWSKVRKLSFKRKRFLIKLHPEVHGPYQDTLEFLLGSRDECKNFWKICVEYHTFFRLLDQPKPKAKAVFFSRGSSFRYSGRTQKQLVDYFKDSGMKRIPYERRHSKTHTSVRALTADLPKQSISFPEGLRTPASPSSANAFYSLSPSTLVPSGLPEFKDSSSSLTDPQVSYVKSPAAERRSGAVAGGPDTPSAQPLGPPALQPGPGLSTKSPQPSPSSRKSPLSLSPAFQVPLGPAEQGSSPLLSPVLSDAGGAGMDCEEPRHKRVPADEAYFIVKEILATERTYLKDLEVITVWFRSAVVKEDAMPATLMTLLFSNIDPIYEFHRGFLREVEQRLALWEGPSKAHTKGSHQRIGDILLRNMRQLKAAHEFTT

SEQ ID NO: 31619 - protein, 677 aa, Homo sapiens
  Payload ID: 6188
  Gene Symbol: FERMT1
  Gene Name: fermitin family member 1
  Uniprot ID: Q9BQL6
  ENSP ID: ENSP00000217289
MLSSTDFTFASWELVVRVDHPNEEQQKDVTLRVSGDLHVGGVMLKLVEQINISQDWSDFALWWEQKHCWLLKTHWTLDKYGVQADAKLLFTPQHKMLRLRLPNLKMVRLRVSFSAVVFKAVSDICKILNIRRSEELSLLKPSGDYFKKKKKKDKNNKEPIIEDILNLESSPTASGSSVSPGLYSKTMTPIYDPINGTPASSTMTWFSDSPLTEQNCSILAFSQPPQSPEALADMYQPRSLVDKAKLNAGWLDSSRSLMEQGIQEDEQLLLRFKYYSFFDLNPKYDAVRINQLYEQARWAILLEEIDCTEEEMLIFAALQYHISKLSLSAETQDFAGESEVDEIEAALSNLEVTLEGGKADSLLEDITDIPKLADNLKLFRPKKLLPKAFKQYWFIFKDTSIAYFKNKELEQGEPLEKLNLRGCEVVPDVNVAGRKFGIKLLIPVADGMNEMYLRCDHENQYAQWMAACMLASKGKTMADSSYQPEVLNILSFLRMKNRNSASQVASSLENMDMNPECFVSPRCAKRHKSKQLAARILEAHQNVAQMPLVEAKLRFIQAWQSLPEFGLTYYLVRFKGSKKDDILGVSYNRLIKIDAATGIPVTTWRFTNIKQWNVNWETRQVVIEFDQNVFTAFTCLSADCKIVHEYIGGYIFLSTRSKDQNETLDEDLFHKLTGGQD

SEQ ID NO: 31620 - protein, 146 aa, Homo sapiens
  Payload ID: 6188
  Gene Symbol: FERMT1
  Gene Name: fermitin family member 1
  ENSP ID: ENSP00000368121
MLSSTDFTFASWELVVRVDHPNEEQQKDVTLRVSGDLHVGGVMLKLVEQINISQDWSDFALWWEQKHCWLLKTHWTLDKYGVQADAKLLFTPQHKMLRLRLPNLKMVRLRVSFSAVVFKAVSDICKILNIRRSEELSLLKPSGDYF

SEQ ID NO: 31621 - protein, 420 aa, Homo sapiens
  Payload ID: 6188
  Gene Symbol: FERMT1
  Gene Name: fermitin family member 1
  ENSP ID: ENSP00000441063
MEQGIQEDEQLLLRFKYYSFFDLNPKYDAVRINQLYEQARWAILLEEIDCTEEEMLIFAALQYHISKLSLSAETQDFAGESEVDEIEAALSNLEVTLEGGKADSLLEDITDIPKLADNLKLFRPKKLLPKAFKQYWFIFKDTSIAYFKNKELEQGEPLEKLNLRGCEVVPDVNVAGRKFGIKLLIPVADGMNEMYLRCDHENQYAQWMAACMLASKGKTMADSSYQPEVLNILSFLRMKNRNSASQVASSLENMDMNPECFVSPRCAKRHKSKQLAARILEAHQNVAQMPLVEAKLRFIQAWQSLPEFGLTYYLVRFKGSKKDDILGVSYNRLIKIDAATGIPVTTWRFTNIKQWNVNWETRQVVIEFDQNVFTAFTCLSADCKIVHEYIGGYIFLSTRSKDQNETLDEDLFHKLTGGQD

SEQ ID NO: 31622 - protein, 680 aa, Homo sapiens
  Payload ID: 6189
  Gene Symbol: FERMT2
  Gene Name: fermitin family member 2
  Uniprot ID: Q96AC1
  ENSP ID: ENSP00000340391
MALDGIRMPDGCYADGTWELSVHVTDLNRDVTLRVTGEVHIGGVMLKLVEKLDVKKDWSDHALWWEKKRTWLLKTHWTLDKYGIQADAKLQFTPQHKLLRLQLPNMKYVKVKVNFSDRVFKAVSDICKTFNIRHPEELSLLKKPRDPTKKKKKKLDDQSEDEALELEGPLITPGSGSIYSSPGLYSKTMTPTYDAHDGSPLSPTSAWFGDSALSEGNPGILAVSQPITSPEILAKMFKPQALLDKAKINQGWLDSSRSLMEQDVKENEALLLRFKYYSFFDLNPKYDAIRINQLYEQAKWAILLEEIECTEEEMMMFAALQYHINKLSIMTSENHLNNSDKEVDEVDAALSDLEITLEGGKTSTILGDITSIPELADYIKVFKPKKLTLKGYKQYWCTFKDTSISCYKSKEESSGTPAHQMNLRGCEVTPDVNISGQKFNIKLLIPVAEGMNEIWLRCDNEKQYAHWMAACRLASKGKTMADSSYNLEVQNILSFLKMQHLNPDPQLIPEQITTDITPECLVSPRYLKKYKNKQITARILEAHQNVAQMSLIEAKMRFIQAWQSLPEFGITHFIARFQGGKKEELIGIAYNRLIRMDASTGDAIKTWRFSNMKQWNVNWEIKMVTVEFADEVRLSFICTEVDCKVVHEFIGGYIFLSTRAKDQNESLDEEMFYKLTSGWV

SEQ ID NO: 31623 - protein, 687 aa, Homo sapiens
  Payload ID: 6189
  Gene Symbol: FERMT2
  Gene Name: fermitin family member 2
  Uniprot ID: Q96AC1
  ENSP ID: ENSP00000342858
MALDGIRMPDGCYADGTWELSVHVTDLNRDVTLRVTGEVHIGGVMLKLVEKLDVKKDWSDHALWWEKKRTWLLKTHWTLDKYGIQADAKLQFTPQHKLLRLQLPNMKYVKVKVNFSDRVFKAVSDICKTFNIRHPEELSLLKKPRDPTKKKKKKLDDQSEDEALELEGPLITPGSGSIYSSPGLYSKTMTPTYDAHDGSPLSPTSAWFGDSALSEGNPGILAVSQPITSPEILAKMFKPQALLDKAKINQGWLDSSRSLMEQDVKENEALLLRFKYYSFFDLNPKYDAIRINQLYEQAKWAILLEEIECTEEEMMMFAALQYHINKLSIMTSENHLNNSDKEVDEVDAALSDLEITLEGGKTSTILGDITSIPELADYIKVFKPKKLTLKGYKQYWCTFKDTSISCYKSKEESSGTPAHQMNLRGCEVTPDVNISGQKFNIKLLIPVAEGMNEIWLRCDNEKQYAHWMAACRLASKGKTMADSSYNLEVQNILSFLKMQHLNPDPQLIPEQITTDITPECLVSPRYLKKYKNKQPGYIRDLITARILEAHQNVAQMSLIEAKMRFIQAWQSLPEFGITHFIARFQGGKKEELIGIAYNRLIRMDASTGDAIKTWRFSNMKQWNVNWEIKMVTVEFADEVRLSFICTEVDCKVVHEFIGGYIFLSTRAKDQNESLDEEMFYKLTSGWV

SEQ ID NO: 31624 - protein, 680 aa, Homo sapiens; identical to SEQ ID NO: 31622
  Payload ID: 6189
  Gene Symbol: FERMT2
  Gene Name: fermitin family member 2
  Uniprot ID: Q96AC1
  ENSP ID: ENSP00000378993

SEQ ID NO: 31625 - protein, 633 aa, Homo sapiens
  Payload ID: 6189
  Gene Symbol: FERMT2
  Gene Name: fermitin family member 2
  Uniprot ID: Q96AC1
  ENSP ID: ENSP00000382243
MALDGIRMPDGCYADGTWELSVHVTDLNRDVTLRVTGEVHIGGVMLKLVEKLDVKKDWSDHALWWEKKRTWLLKTHWTLDKYGIQADAKLQFTPQHKLLRLQLPNMKYVKVKVNFSDRVFKAVSDICKTFNIRHPEELSLLKKPRDPTKKKKKKLDDQSEDEALELEGPLITPGSGSIYSSPGLYSKTMTPTYDAHDGSPLSPTSAWFGDSALSEGNPGILAVSQPITSPEILAKMFKPQALLDKAKINQGWLDSSRSLMEQDVKENEALLLRFKYYSFFDLNPKYDAIRINQLYEQAKWAILLEEIECTEEEMMMFAALQYHINKLSIMTSENHLNNSDKEVDEVDAALSDLEITLEGGKTSTILGDITSIPELADYIKVFKPKKLTLKGYKQYWCTFKDTSISCYKSKEESSGTPAHQMNLRGCEVTPDVNISGQKFNIKLLIPVAEGMNEIWLRCDNEKQYAHWMAACRLASKGKTMADSSYNLEVQNILSFLKMQHLNPDPQLIPEQITTDITPECLVSPRYLKKYKNKQPGYIRDLITARILEAHQNVAQMSLIEAKMRFIQAWQSLPEFGITHFIARFQGGKKEELIGIAYNRLIRMDASTGDAIKTWRFSNMKQWNVNWEIKMVNS

SEQ ID NO: 31626 - protein, 153 aa, Homo sapiens
  Payload ID: 6189
  Gene Symbol: FERMT2
  Gene Name: fermitin family member 2
  ENSP ID: ENSP00000450506
MALDGIRMPDGCYADGTWELSVHVTDLNRDVTLRVTGEVHIGGVMLKLVEKLDVKKDWSDHALWWEKKRTWLLKTHWTLDKYGIQADAKLQFTPQHKLLRLQLPNMKYVKVKVNFSDRVFKAVSDICKTFNIRHPEELSLLKKPRDPTKKKKK

SEQ ID NO: 31627 - protein, 640 aa, Homo sapiens
  Payload ID: 6189
  Gene Symbol: FERMT2
  Gene Name: fermitin family member 2
  ENSP ID: ENSP00000450741
SDHALWWEKKRTWLLKTHWTLDKYGIQADAKLQFTPQHKLLRLQLPNMKYVKVKVNFSDRVFKAVSDICKTFNIRHPEELSLLKKPRDPTKKKKKKLDDQSEDEALELEGPLITPGSGTDVLYIGPLKGSIYSSPGLYSKTMTPTYDAHDGSPLSPTSAWFGDSALSEGNPGILAVSQPITSPEILAKMFKPQALLDKAKINQGWLDSSRSLMEQDVKENEALLLRFKYYSFFDLNPKYDAIRINQLYEQAKWAILLEEIECTEEEMMMFAALQYHINKLSIMTSENHLNNSDKEVDEVDAALSDLEITLEGGKTSTILGDITSIPELADYIKVFKPKKLTLKGYKQYWCTFKDTSISCYKSKEESSGTPAHQMNLRGCEVTPDVNISGQKFNIKLLIPVAEGMNEIWLRCDNEKQYAHWMAACRLASKGKTMADSSYNLEVQNILSFLKMQHLNPDPQLIPEQITTDITPECLVSPRYLKKYKNKQPGYIRDLITARILEAHQNVAQMSLIEAKMRFIQAWQSLPEFGITHFIARFQGGKKEELIGIAYNRLIRMDASTGDAIKTWRFSNMKQWNVNWEIKMVTVEFADEVRLSFICTEVDCKVVHEFIGGYIFLSTRAKDQNESLDEEMFYKLTSGWV

SEQ ID NO: 31628 - protein, 687 aa, Homo sapiens; identical to SEQ ID NO: 31623
  Payload ID: 6189
  Gene Symbol: FERMT2
  Gene Name: fermitin family member 2
  Uniprot ID: Q96AC1
  ENSP ID: ENSP00000451084

SEQ ID NO: 31629 - protein, 65 aa, Homo sapiens
  Payload ID: 6189
  Gene Symbol: FERMT2
  Gene Name: fermitin family member 2
  ENSP ID: ENSP00000451085
MALDGIRMPDGCYADGTWELSVHVTDLNRDVTLRVTGEVHIGGVMLKLVEKLEKRSPTRCKKRLV

SEQ ID NO: 31630 - protein, 133 aa, Homo sapiens
  Payload ID: 6189
  Gene Symbol: FERMT2
  Gene Name: fermitin family member 2
  ENSP ID: ENSP00000451134
  MOD_RES (1)..(1): Any amino acid
XFLKMQHLNPDPQLIPEQITTDITPECLVSPRYLKKYKNKQITARILEAHQNVAQMSLIEAKMRFIQAWQSLPEFGITHFIARFQGGKKEELIGIAYNRLIRMDASTGDAIKTWRFSNMKQWNVNWEIKMVNS

SEQ ID NO: 31631 - protein, 155 aa, Homo sapiens
  Payload ID: 6189
  Gene Symbol: FERMT2
  Gene Name: fermitin family member 2
  ENSP ID: ENSP00000451268
MKYVKVKVNFSDRVFKAVSDICKTFNIRHPEELSLLKKPRDPTKKKKKKLDDQSEDEALELEGPLITPGSGSIYSSPGLYSKTMTPTYDAHDGSPLSPTSAWFGDSALSEGNPGILAVSQPITSPEILAKMFKPQALLDKAKINQGWLDSSRSLM

SEQ ID NO: 31632 - protein, 133 aa, Homo sapiens
  Payload ID: 6189
  Gene Symbol: FERMT2
  Gene Name: fermitin family member 2
  ENSP ID: ENSP00000452472
MWLLKVRKNVKKDWSDHALWWEKKRTWLLKTHWTLDKYGIQADAKLQFTPQHKLLRLQLPNMKYVKVKVNFSDRVFKAVSDICKTFNIRHPEELSLLKKPRDPTKKKKKKLDDQSEDEALELEGPLITPGSGK

SEQ ID NO: 31633 - protein, 545 aa, Homo sapiens
  Payload ID: 6189
  Gene Symbol: FERMT2
  Gene Name: fermitin family member 2
  ENSP ID: ENSP00000489609
  MOD_RES (1)..(1): Any amino acid
XALELEGPLITPGSGTDVLYIGPLKGSIYSSPGLYSKTMTPTYDAHDGSPLSPTSAWFGDSALSEGNPGILAVSQPITSPEILAKMFKPQALLDKAKINQGWLDSSRSLMEQDVKENEALLLRFKYYSFFDLNPKYDAIRINQLYEQAKWAILLEEIECTEEEMMMFAALQYHINKLSIMTSENHLNNSDKEVDEVDAALSDLEITLEGGKTSTILGDITSIPELADYIKVFKPKKLTLKGYKQYWCTFKDTSISCYKSKEESSGTPAHQMNLRGCEVTPDVNISGQKFNIKLLIPVAEGMNEIWLRCDNEKQYAHWMAACRLASKGKTMADSSYNLEVQNILSFLKMQHLNPDPQLIPEQITTDITPECLVSPRYLKKYKNKQEKGCKKHMPGYIRDLITARILEAHQNVAQMSLIEAKMRFIQAWQSLPEFGITHFIARFQGGKKEELIGIAYNRLIRMDASTGDAIKTWRFSNMKQWNVNWEIKMVTVEFADEVRLSFICTEVDCKVVHEFIGGYIFLSTRAKDQNESLDEEMFYKLTSGWV

SEQ ID NO: 31634 - protein, 667 aa, Homo sapiens
  Payload ID: 6190
  Gene Symbol: FERMT3
  Gene Name: fermitin family member 3
  Uniprot ID: Q86UX7
  ENSP ID: ENSP00000279227
MAGMKTASGDYIDSSWELRVFVGEEDPEAESVTLRVTGESHIGGVLLKIVEQINRKQDWSDHAIWWEQKRQWLLQTHWTLDKYGILADARLFFGPQHRPVILRLPNRRALRLRASFSQPLFQAVAAICRLLSIRHPEELSLLRAPEKKEKKKKEKEPEEELYDLSKVVLAGGVAPALFRGMPAHFSDSAQTEACYHMLSRPQPPPDPLLLQRLPRPSSLSDKTQLHSRWLDSSRCLMQQGIKAGDALWLRFKYYSFFDLDPKTDPVRLTQLYEQARWDLLLEEIDCTEEEMMVFAALQYHINKLSQSGEVGEPAGTDPGLDDLDVALSNLEVKLEGSAPTDVLDSLTTIPELKDHLRIFRIPRRPRKLTLKGYRQHWVVFKETTLSYYKSQDEAPGDPIQQLNLKGCEVVPDVNVSGQKFCIKLLVPSPEGMSEIYLRCQDEQQYARWMAGCRLASKGRTMADSSYTSEVQAILAFLSLQRTGSGGPGNHPHGPDASAEGLNPYGLVAPRFQRKFKAKQLTPRILEAHQNVAQLSLAEAQLRFIQAWQSLPDFGISYVMVRFKGSRKDEILGIANNRLIRIDLAVGDVVKTWRFSNMRQWNVNWDIRQVAIEFDEHINVAFSCVSASCRIVHEYIGGYIFLSTRERARGEELDEDLFLQLTGGHEAF

SEQ ID NO: 31635 - protein, 663 aa, Homo sapiens
  Payload ID: 6190
  Gene Symbol: FERMT3
  Gene Name: fermitin family member 3
  Uniprot ID: Q86UX7
  ENSP ID: ENSP00000339950
MAGMKTASGDYIDSSWELRVFVGEEDPEAESVTLRVTGESHIGGVLLKIVEQINRKQDWSDHAIWWEQKRQWLLQTHWTLDKYGILADARLFFGPQHRPVILRLPNRRALRLRASFSQPLFQAVAAICRLLSIRHPEELSLLRAPEKKEKKKKEKEPEEELYDLSKVVLAGGVAPALFRGMPAHFSDSAQTEACYHMLSRPQPPPDPLLLQRLPRPSSLSDKTQLHSRWLDSSRCLMQQGIKAGDALWLRFKYYSFFDLDPKTDPVRLTQLYEQARWDLLLEEIDCTEEEMMVFAALQYHINKLSQSGEVGEPAGTDPGLDDLDVALSNLEVKLEGSAPTDVLDSLTTIPELKDHLRIFRPRKLTLKGYRQHWVVFKETTLSYYKSQDEAPGDPIQQLNLKGCEVVPDVNVSGQKFCIKLLVPSPEGMSEIYLRCQDEQQYARWMAGCRLASKGRTMADSSYTSEVQAILAFLSLQRTGSGGPGNHPHGPDASAEGLNPYGLVAPRFQRKFKAKQLTPRILEAHQNVAQLSLAEAQLRFIQAWQSLPDFGISYVMVRFKGSRKDEILGIANNRLIRIDLAVGDVVKTWRFSNMRQWNVNWDIRQVAIEFDEHINVAFSCVSASCRIVHEYIGGYIFLSTRERARGEELDEDLFLQLTGGHEAF

SEQ ID NO: 31636 - protein, 81 aa, Homo sapiens
  Payload ID: 6190
  Gene Symbol: FERMT3
  Gene Name: fermitin family member 3
  ENSP ID: ENSP00000438885
MPAHFSDSAQTEACYHMLSRPQPPPDPLLLQRLPRPSSLSDKTQLHSRWLDSSRCLMQQGIKAGDALWLRFKYYSFFDLDP

SEQ ID NO: 31637 - protein, 184 aa, Homo sapiens
  Payload ID: 6190
  Gene Symbol: FERMT3
  Gene Name: fermitin family member 3
  ENSP ID: ENSP00000440209
SSSMPAGWLAAAWPPKAAPWPTAATPARCRPSWPSSACSARAVGARATTPTALMPLPRASTPTASLPPVSSESSRPSRFKGSRKDEILGIANNRLIRIDLAVGDVVKTWRFSNMRQWNVNWDIRQVAIEFDEHINVAFSCVSASCRIVHEYIGGYIFLSTRERARGEELDEDLFLQLTGGHEAF

SEQ ID NO: 31638 - protein, 286 aa, Homo sapiens
  Payload ID: 6190
  Gene Symbol: FERMT3
  Gene Name: fermitin family member 3
  ENSP ID: ENSP00000445778
MAGMKTASGDYIDSSWELRVFVGEEDPEAESVTLRVTGESHIGGVLLKIVEQINRKQDWSDHAIWWEQKRQWLLQTHWTLDKYGILADARLFFGPQHRPVILRLPNRRALRLRASFSQPLFQAVAAICRLLSIRHPEELSLLRAPEKKEKKKKEKEPEEELYDLSKVVLAGGVAPALFRGMPAHFSDSAQTEACYHMLSRPQPPPDPLLLQRLPRPSSLSDKTQLHSRWLDSSRCLMQQGIKAGDALWLRFKYYSFFDLDPKTDPVRLTQLYEQARWDLLLEEIDC

SEQ ID NO: 31639 - protein, 184 aa, Homo sapiens
  Payload ID: 6191
  Gene Symbol: FDX1
  Gene Name: ferredoxin 1
  Uniprot ID: P10109
  ENSP ID: ENSP00000260270
MAAAGGARLLRAASAVLGGPAGRWLHHAGSRAGSSGLLRNRGPGGSAEASRSLSVSARARSSSEDKITVHFINRDGETLTTKGKVGDSLLDVVVENNLDIDGFGACEGTLACSTCHLIFEDHIYEKLDAITDEENDMLDLAYGLTDRSRLGCQICLTKSMDNMTVRVPETVADARQSIDVGKTS

SEQ ID NO: 31640 - protein, 186 aa, Homo sapiens
  Payload ID: 6192
  Gene Symbol: FDX1L
  Gene Name: ferredoxin 1-like
  Uniprot ID: Q6P4F2
  ENSP ID: ENSP00000377311
MHVMAASMARGGVSARVLLQAARGTWWNRPGGTSGSGEGVALGTTRKFQATGSRPAGEEDAGGPERPGDVVNVVFVDRSGQRIPVSGRVGDNVLHLAQRHGVDLEGACEASLACSTCHVYVSEDHLDLLPPPEEREDDMLDMAPLLQENSRLGCQIVLTPELEGAEFTLPKITRNFYVDGHVPKPH

SEQ ID NO: 31641 - protein, 48 aa, Homo sapiens
  Payload ID: 6192
  Gene Symbol: FDX1L
  Gene Name: ferredoxin 1-like
  ENSP ID: ENSP00000467188
MLDMAPLLQENSRLGCQIVLTPELEGAEFTLPKITRNFYVDGHVPKPH

SEQ ID NO: 31642 - protein, 48 aa, Homo sapiens; identical to SEQ ID NO: 31641
  Payload ID: 6192
  Gene Symbol: FDX1L
  Gene Name: ferredoxin 1-like
  ENSP ID: ENSP00000488228

SEQ ID NO: 31643 - protein, 491 aa, Homo sapiens
  Payload ID: 6193
  Gene Symbol: FDXR
  Gene Name: ferredoxin reductase
  ENSP ID: ENSP00000293195
MASRCWRWWGWSAWPRTRLPPAGSTPSFCHHFSTQEKTPQICVVGSGPAGFYTAQHLLKHPQAHVDIYEKQPVPFGLVRFGVAPDHPEVKNVINTFTQTAHSGRCAFWGNVEVGRDVTVPELQEAYHAVVLSYGAEDHRALEIPGEELPGVCSARAFVGWYNGLPENQELEPDLSCDTAVILGQGNVALDVARILLTPPEHLERTDITKAALGVLRQSRVKTVWLVGRRGPLQVAFTIKELREMIQLPGARPILDPVDFLGLQDKIKEVPRPRKRLTELLLRTATEKPGPAEAARQASASRAWGLRFFRSPQQVLPSPDGRRAAGVRLAVTRLEGVDEATRAVPTGDMEDLPCGLVLSSIGYKSRPVDPSVPFDSKLGVIPNVEGRVMDVPGLYCSGWVKRGPTGVIATTMTDSFLTGQMLLQDLKAGLLPSGPRPGYAAIQALLSSRGVRPVSFSDWEKLDAEEVARGQGTGKPREKLVDPQEMLRLLGH

SEQ ID NO: 31644 - protein, 522 aa, Homo sapiens
  Payload ID: 6193
  Gene Symbol: FDXR
  Gene Name: ferredoxin reductase
  ENSP ID: ENSP00000408595
MASRCWRWWGWSAWPRTRLPPAGSTPTFGGSDEVRDPANAKALRNKRRRMQVRVKLGKFQLLLDIQEKTPQICVVGSGPAGFYTAQHLLKHPQAHVDIYEKQPVPFGLVRFGVAPDHPEVKNVINTFTQTAHSGRCAFWGNVEVGRDVTVPELQEAYHAVVLSYGAEDHRALEIPGEELPGVCSARAFVGWYNGLPENQELEPDLSCDTAVILGQGNVALDVARILLTPPEHLERTDITKAALGVLRQSRVKTVWLVGRRGPLQVAFTIKELREMIQLPGARPILDPVDFLGLQDKIKEVPRPRKRLTELLLRTATEKPGPAEAARQASASRAWGLRFFRSPQQVLPSPDGRRAAGVRLAVTRLEGVDEATRAVPTGDMEDLPCGLVLSSIGYKSRPVDPSVPFDSKLGVIPNVEGRVMDVPGLYCSGWVKRGPTGVIATTMTDSFLTGQMLLQDLKAGLLPSGPRPGYAAIQALLSSRGVRPVSFSDWEKLDAEEVARGQGTGKPREKLVDPQEMLRLLGH

SEQ ID NO: 31645 - protein, 451 aa, Homo sapiens
  Payload ID: 6193
  Gene Symbol: FDXR
  Gene Name: ferredoxin reductase
  Uniprot ID: P22570
  ENSP ID: ENSP00000414172
MASRCWRWWGWSAWPRTRLPPAGSTPSFCHHFSTQEKTPQICVVGSGPAGFYTAQHLLKQHPQAHVDIYEKQPVPFGLVRFGVAPDHPEVKSYGAEDHRALEIPGEELPGVCSARAFVGWYNGLPENQELEPDLSCDTAVILGQGNVALDVARILLTPPEHLERTDITKAALGVLRQSRVKTVWLVGRRGPLQVAFTIKELREMIQLPGARPILDPVDFLGLQDKIKEVPRPRKRLTELLLRTATEKPGPAEAARQASASRAWGLRFFRSPQQVLPSPDGRRAAGVRLAVTRLEGVDEATRAVPTGDMEDLPCGLVLSSIGYKSRPVDPSVPFDSKLGVIPNVEGRVMDVPGLYCSGWVKRGPTGVIATTMTDSFLTGQMLLQDLKAGLLPSGPRPGYAAIQALLSSRGVRPVSFSDWEKLDAEEVARGQGTGKPREKLVDPQEMLRLLGH

SEQ ID NO: 31646 - protein, 534 aa, Homo sapiens
  Payload ID: 6193
  Gene Symbol: FDXR
  Gene Name: ferredoxin reductase
  ENSP ID: ENSP00000416515
MASRCWRWWGWSAWPRTRLPPAGSTPSFCHHFSTQEKTPQICVVGSGPAGFYTAQHLLKRVEALCSQPRVLNSPALSGEGEDLGASQPLSLGPTSCHPVPQQHPQAHVDIYEKQPVPFGLVRFGVAPDHPEVKNVINTFTQTAHSGRCAFWGNVEVGRDVTVPELQEAYHAVVLSYGAEDHRALEIPGEELPGVCSARAFVGWYNGLPENQELEPDLSCDTAVILGQGNVALDVARILLTPPEHLERTDITKAALGVLRQSRVKTVWLVGRRGPLQVAFTIKELREMIQLPGARPILDPVDFLGLQDKIKEVPRPRKRLTELLLRTATEKPGPAEAARQASASRAWGLRFFRSPQQVLPSPDGRRAAGVRLAVTRLEGVDEATRAVPTGDMEDLPCGLVLSSIGYKSRPVDPSVPFDSKLGVIPNVEGRVMDVPGLYCSGWVKRGPTGVIATTMTDSFLTGQMLLQDLKAGLLPSGPRPGYAAIQALLSSRGVRPVSFSDWEKLDAEEVARGQGTGKPREKLVDPQEMLRLLGH

SEQ ID NO: 31647 - protein, 439 aa, Homo sapiens
  Payload ID: 6193
  Gene Symbol: FDXR
  Gene Name: ferredoxin reductase
  ENSP ID: ENSP00000445432
MEDKDREHPQAHVDIYEKQPVPFGLVRFGVAPDHPEVKNVINTFTQTAHSGRCAFWGNVEVGRDVTVPELQEAYHAVVLSYGAEDHRALEIPGEELPGVCSARAFVGWYNGLPENQELEPDLSCDTAVILGQGNVALDVARILLTPPEHLERTDITKAALGVLRQSRVKTVWLVGRRGPLQVAFTIKELREMIQLPGARPILDPVDFLGLQDKIKEVPRPRKRLTELLLRTATEKPGPAEAARQASASRAWGLRFFRSPQQVLPSPDGRRAAGVRLAVTRLEGVDEATRAVPTGDMEDLPCGLVLSSIGYKSRPVDPSVPFDSKLGVIPNVEGRVMDVPGLYCSGWVKRGPTGVIATTMTDSFLTGQMLLQDLKAGLLPSGPRPGYAAIQALLSSRGVRPVSFSDWEKLDAEEVARGQGTGKPREKLVDPQEMLRLLGH

SEQ ID NO: 31648 - protein, 46 aa, Homo sapiens
  Payload ID: 6193
  Gene Symbol: FDXR
  Gene Name: ferredoxin reductase
  ENSP ID: ENSP00000461993
MASRCWRWWGWSAWPRTRLPPAGSTPSRSRAPLGLDGSAGRPASAE

SEQ ID NO: 31649 - protein, 46 aa, Homo sapiens; identical to SEQ ID NO: 31648
  Payload ID: 6193
  Gene Symbol: FDXR
  Gene Name: ferredoxin reductase
  ENSP ID: ENSP00000462083

SEQ ID NO: 31650 - protein, 483 aa, Homo sapiens
  Payload ID: 6193
  Gene Symbol: FDXR
  Gene Name: ferredoxin reductase
  ENSP ID: ENSP00000462183
MASRCWRWWGWSAWPRTRLPPAGSTPSFCHHFSTQEKTPQICVVGSGPAGFYTAQHLLKHPQAHVDIYEKQPVPFGLVRFGVAPDHPEVKTAHSGRCAFWGNVEVGRDVTVPELQEAYHAVVLSYGAEDHRALEIPGEELPGVCSARAFVGWYNGLPENQELEPDLSCDTAVILGQGNVALDVARILLTPPEHLERTDITKAALGVLRQSRVKTVWLVGRRGPLQVAFTIKELREMIQLPGARPILDPVDFLGLQDKIKEVPRPRKRLTELLLRTATEKPGPAEAARQASASRAWGLRFFRSPQQVLPSPDGRRAAGVRLAVTRLEGVDEATRAVPTGDMEDLPCGLVLSSIGYKSRPVDPSVPFDSKLGVIPNVEGRVMDVPGLYCSGWVKRGPTGVIATTMTDSFLTGQMLLQDLKAGLLPSGPRPGYAAIQALLSSRGVRPVSFSDWEKLDAEEVARGQGTGKPREKLVDPQEMLRLLGH

SEQ ID NO: 31651 - protein, 91 aa, Homo sapiens
  Payload ID: 6193
  Gene Symbol: FDXR
  Gene Name: ferredoxin reductase
  ENSP ID: ENSP00000462330
MASRCWRWWGWSAWPRTRLPPAGSTPSFCHHFSTQEKTPQICVVGSGPAGFYTAQHLLKLPPCSPAAPPGPRGHLRETACALWPGALWCGA

SEQ ID NO: 31652 - protein, 46 aa, Homo sapiens; identical to SEQ ID NO: 31648
  Payload ID: 6193
  Gene Symbol: FDXR
  Gene Name: ferredoxin reductase
  ENSP ID: ENSP00000462488

SEQ ID NO: 31653 - protein, 46 aa, Homo sapiens
  Payload ID: 6193
  Gene Symbol: FDXR
  Gene Name: ferredoxin reductase
  ENSP ID: ENSP00000462884
  MOD_RES (1)..(1): Any amino acid
XASRCWRWWGWSAWPRTRLPPAGSTPSRSRAPLGLDGSAGRPASAE

SEQ ID NO: 31654 - protein, 497 aa, Homo sapiens
  Payload ID: 6193
  Gene Symbol: FDXR
  Gene Name: ferredoxin reductase
  ENSP ID: ENSP00000462972
MASRCWRWWGWSAWPRTRLPPAGSTPSFCHHFSTQEKTPQICVVGSGPAGFYTAQHLLKHPQAHVDIYEKQPVPFGLVRFGVAPDHPEVKNVINTFTQTAHSGRCAFWGNVEVGRDVTVPELQEAYHAVVLSYGAEDHRALEIPGEELPGVCSARAFVGWYNGLPENQELEPDLSCDTAVILGQGNVALDVARILLTPPEHLEALLLCQRTDITKAALGVLRQSRVKTVWLVGRRGPLQVAFTIKELREMIQLPGARPILDPVDFLGLQDKIKEVPRPRKRLTELLLRTATEKPGPAEAARQASASRAWGLRFFRSPQQVLPSPDGRRAAGVRLAVTRLEGVDEATRAVPTGDMEDLPCGLVLSSIGYKSRPVDPSVPFDSKLGVIPNVEGRVMDVPGLYCSGWVKRGPTGVIATTMTDSFLTGQMLLQDLKAGLLPSGPRPGYAAIQALLSSRGVRPVSFSDWEKLDAEEVARGQGTGKPREKLVDPQEMLRLLGH

SEQ ID NO: 31655 - protein, 164 aa, Homo sapiens
  Payload ID: 6193
  Gene Symbol: FDXR
  Gene Name: ferredoxin reductase
  ENSP ID: ENSP00000463308
MEDKDREQHPQAHVDIYEKQPVPFGLVRFGVAPDHPEVKNVINTFTQTAHSGRCAFWGNVEVGRDVTVPELQEAYHAVVLSYGAEDHRALEIPGEELPGVCSARAFVGWYNGLPENQELEPDLSCDTAVILGQGNVALDVARILLTPPEHLERTDITKAALGVL

SEQ ID NO: 31656 - protein, 178 aa, Homo sapiens
  Payload ID: 6193
  Gene Symbol: FDXR
  Gene Name: ferredoxin reductase
  ENSP ID: ENSP00000463934
MASRCWRWWGWSAWPRTRLPPAGSTPSFCHHFSTQEKTPQICVVGSGPAGFYTAQHLLKRVEALCSQPRVLNSPALSGEGEDLGASQPLSLGPTSCHPVPQQHPQAHVDIYEKQPVPFGLVRFGVAPDHPEVKTAHSGRCAFWGNVEVGRDVTVPELQEAYHAVVLSYGAEDHRALEI

SEQ ID NO: 31657 - protein, 463 aa, Homo sapiens
  Payload ID: 6193
  Gene Symbol: FDXR
  Gene Name: ferredoxin reductase
  ENSP ID: ENSP00000463940
MASRCWRWWGWSAWPRTRLPPAGSTPSFCHHFSTQEKTPQICVVGSGPAGFYTAQHLLKQHPQAHVDIYEKQPVPFGLVRFGVAPDHPEVKNVINTFTQTAHSGRCAFWGNVEVGRDVTVPELQEAYHAVVLSYGAEDHRALEIPGEELPGVCSARAFVGWYNGLPENQELEPDLSCDTAVILGQGNVALDVARILLTPPEHLERTDITKAALGVLRQSRVKTVWLVGRRGPLQVAFTIKVPRPRKRLTELLLRTATEKPGPAEAARQASASRAWGLRFFRSPQQVLPSPDGRRAAGVRLAVTRLEGVDEATRAVPTGDMEDLPCGLVLSSIGYKSRPVDPSVPFDSKLGVIPNVEGRVMDVPGLYCSGWVKRGPTGVIATTMTDSFLTGQMLLQDLKAGLLPSGPRPGYAAIQALLSSRGVRPVSFSDWEKLDAEEVARGQGTGKPREKLVDPQEMLRLLGH

SEQ ID NO: 31658 - protein, 76 aa, Homo sapiens
  Payload ID: 6193
  Gene Symbol: FDXR
  Gene Name: ferredoxin reductase
  ENSP ID: ENSP00000464670
MASRCWRWWGWSAWPRTRLPPAGSTPREDPPDLCGGQWPSWLLHGPTPAKAAPPGPRGHLRETACALWPGALWCGA

SEQ ID NO: 31659 - protein, 624 aa, Homo sapiens
  Payload ID: 6194
  Gene Symbol: FDXACB1
  Gene Name: ferredoxin-fold anticodon binding domain containing 1
  Uniprot ID: Q9BRP7
  ENSP ID: ENSP00000260257
MAPRRLLLVGEGNFSFAAALSETLDQSTQLTATCLQRPAELARDPLAWENLQCLRERGIDVRFGVDCTQLADVFELHEREFDQIYFIFPHCGRKAGVAKNRELLAKFFQSCADVLAEEGEVHVALCRGQGGTPADKPQREWHNSWQVVAMAALGGLILSDVYPFSCKAVAGYKCTGYRSQDKSFHVEGALNHIFTRSLPFEGSQPRIFRIKLGNQWFSFPEPEALVGKLNRGFLEAPSCHPIKTINEKLIAELGKVFPLKRLKCSYPLLPQEGTSVLPFWNCDFLSAAFWISLHEDNSNSESLTGGTSQDVEDFLVSFSELSLLKNPGRDGKEEACEGTCGQAKICLRPSLLVHVQDVIEVPDFLSGSLHILSGPVFQKCHILPFTMPAFHETLFILGVNQNLKDGCLQSLLDHLKGILDSLLTQTLPESSKLSSLVKFVLQSNGKDYMIRVKTHNFSPDCTEDLIIGSVITSATSVIHKDQCFVFVSMNLDLLAMLVWCISDWRMLWTFDNRFLKNFVPGKIEPFKSHSLYPPCYVHDVSFWIDQKKGFDELEFHTVARAVSQDTIISIQFLSRFQHPKTQQVSLCYRLTYQTCDKALTQQQVASMQSQFRKEIQQHLYVIPR

SEQ ID NO: 31660 - protein, 105 aa, Homo sapiens
  Payload ID: 6194
  Gene Symbol: FDXACB1
  Gene Name: ferredoxin-fold anticodon binding domain containing 1
  ENSP ID: ENSP00000431629
MAPRRLLLVGEGNFSFAAALSETLDQSTQLTATCLQRPAELARDPLAWENLQCLRERAVQTFLQRKEKSTWHYVEDKVELLRISPRENGTTVGKWLPWQPWGGSF

SEQ ID NO: 31661 - protein, 396 aa, Homo sapiens
  Payload ID: 6194
  Gene Symbol: FDXACB1
  Gene Name: ferredoxin-fold anticodon binding domain containing 1
  ENSP ID: ENSP00000435572
MFLLPEGVLIQTPRDTRNNSSCADVLAEEGEVHVALCRGQGGTPADKPQREWHNSWQVVAMAALGGLILSDVYPFSCKAVAGYKCTGYRSQDKSFHVEGALNHIFTRSLPFEGSQPRIFRIKLGNQWFSFPEPEALVGKLNRGFLEAPSCHPIKTINEKLIAELGKVFPLKRLKCSYPLLPQEGTSVLPFWNCDFLSAAFWISLHEDNSNSESLTGGTSQDVEDFLVSFSELSLLKNPGRDGKEEACEGTCGQAKICLRPSLLVHVQDVIEVPDFLSGSLHILSGPVFQKCHILPFTMPAFHETLFILGVNQNLKDGCLQSLLDHLKGILDSLLTQTLPESSKLSSLVKFVLQSNGKDYMIRVKTHNFSPDCTEDLIIGSVITSATSVIHKDQCFV

SEQ ID NO: 31662 - protein, 626 aa, Homo sapiens
  Payload ID: 6195
  Gene Symbol: FRRS1
  Gene Name: ferric-chelate reductase 1
  Uniprot ID: Q6ZNA5
  ENSP ID: ENSP00000287474
MAVSGFTLGTCILLLHISYVANYPNGKVTQSCHGMIPEHGHSPQSVPVHDIYVSQMTFRPGDQIEVTLSGHPFKGFLLEARNAEDLNGPPIGSFTLIDSEVSQLLTCEDIQGSAVSHRSASKKTEIKVYWNAPSSAPNHTQFLVTVVEKYKIYWVKIPGPIISQPNAFPFTTPKATVVPLPTLPPVSHLTKPFSASDCGNKKFCIRSPLNCDPEKEASCVFLSFTRDDQSVMVEMSGPSKGYLSFALSHDQWMGDDDAYLCIHEDQTVYIQPSHLTGRSHPVMDSRDTLEDMAWRLADGVMQCSFRRNITLPGVKNRFDLNTSYYIFLADGAANDGRIYKHSQQPLITYEKYDVTDSPKNIGGSHSVLLLKVHGALMFVAWMTTVSIGVLVARFFKPVWSKAFLLGEAAWFQVHRMLMFTTTVLTCIAFVMPFIYRGGWSRHAGYHPYLGCIVMTLAVLQPLLAVFRPPLHDPRRQMFNWTHWSMGTAARIIAVAAMFLGMDLPGLNLPDSWKTYAMTGFVAWHVGTEVVLELKYWMMTEFRSFSHLLQWKQRVMLLKRQCWQFMSVGMLLFSSYFYLQSTIYEQAKTLAFAGQVIIIIKPKKLEACPDCLEHICEFSLGRLGSCL

SEQ ID NO: 31663 - protein, 344 aa, Homo sapiens
  Payload ID: 6196
  Gene Symbol: FRRS1L
  Gene Name: ferric-chelate reductase 1-like
  Uniprot ID: Q9P0K9
  ENSP ID: ENSP00000477141
MRRPRQGGGGAGGSAAARARAGGLGGGSVPARARGAPAAARAAWLRDLCARMARPPRQHPGVWASLLLLLLTGPAACAASPADDGAGPGGRGPRGRARGDTGADEAVPRHDSSYGTFAGEFYDLRYLSEEGYPFPTAPPVDPFAKIKVDDCGKTKGCFRYGKPGCNAETCDYFLSYRMIGADVEFELSADTDGWVAVGFSSDKKMGGDDVMACVHDDNGRVRIQHFYNVGQWAKEIQRNPARDEEGVFENNRVTCRFKRPVNVPRDETIVDLHLSWYYLFAWGPAIQGSITRHDIDSPPASERVVSIYKYEDIFMPSAAYQTFSSPFCLLLIVALTFYLLMGTP

SEQ ID NO: 31664 - protein, 242 aa, Homo sapiens [sequence omitted]

SEQ ID NO: 31665 - protein, 183 aa, Homo sapiens
  Payload ID: 6198
  Gene Symbol: FTH1
  Gene Name: ferritin, heavy polypeptide 1
  Uniprot ID: P02794
  ENSP ID: ENSP00000273550
MTTASTSQVRQNYHQDSEAAINRQINLELYASYVYLSMSYYFDRDDVALKNFAKYFLHQSHEEREHAEKLMKLQNQRGGRIFLQDIKKPDCDDWESGLNAMECALHLEKNVNQSLLELHKLATDKNDPHLCDFIETHYLNEQVKAIKELGDHVTNLRKMGAPESGLAEYLFDKHTLGDSDNES

SEQ ID NO: 31666 - protein, 81 aa, Homo sapiens
  Payload ID: 6198
  Gene Symbol: FTH1
  Gene Name: ferritin, heavy polypeptide 1
  ENSP ID: ENSP00000431575
MTTASTSQVRQNYHQDSEAAINRQINLELYASYVYLSMPTGTPGHQGQKKSHRKIIPGRTLYVPDDLEESLPLSGPQFPCL

SEQ ID NO: 31667 - protein, 102 aa, Homo sapiens
  Payload ID: 6198
  Gene Symbol: FTH1
  Gene Name: ferritin, heavy polypeptide 1
  ENSP ID: ENSP00000431659
MTTASTSQVRQNYHQDSEAAINRQINLELYASYVYLSMVLVHLIHSQQGHLVTRDRRSPTERSSQAGPCMCLMTWRNLSLSLDLSFPACEMGRWVPACSLKD

SEQ ID NO: 31668 - protein, 95 aa, Homo sapiens
  Payload ID: 6198
  Gene Symbol: FTH1
  Gene Name: ferritin, heavy polypeptide 1
  ENSP ID: ENSP00000432223
MTTASTSQVRQNYHQDSEAAINRQINLELYASYVYLSMSYYFDRDDVALKNFAKYFLHQSHEEREHAEKLMKLQNQRGGRIFLQDIKTVMTGRAG

SEQ ID NO: 31669 - protein, 153 aa, Homo sapiens
  Payload ID: 6198
  Gene Symbol: FTH1
  Gene Name: ferritin, heavy polypeptide 1
  ENSP ID: ENSP00000433321
MTTASTSQSYYFDRDDVALKNFAKYFLHQSHEEREHAEKLMKLQNQRGGRIFLQDIKKPDCDDWESGLNAMECALHLEKNVNQSLLELHKLATDKNDPHLCDFIETHYLNEQVKAIKELGDHVTNLRKMGAPESGLAEYLFDKHTLGDSDNES

SEQ ID NO: 31670 - protein, 114 aa, Homo sapiens
  Payload ID: 6198
  Gene Symbol: FTH1
  Gene Name: ferritin, heavy polypeptide 1
  ENSP ID: ENSP00000433470
MTTASTSQVRQNYHQDSEAAINRQINLELYASYVYLSMSYYFDRDDVALKNFAKYFLHQSHEEREHAEKLMKLQNQRGGRIFLQDIKPTGTPGHQGQKKSHRKIIPGRTLYVPD

SEQ ID NO: 31671 - protein, 50 aa, Homo sapiens
  Payload ID: 6198
  Gene Symbol: FTH1
  Gene Name: ferritin, heavy polypeptide 1
  ENSP ID: ENSP00000434403
MTTASTSQVRQNYHQDSEAAINRQINLELYASYVYLSMIVTATCLWGSLV

SEQ ID NO: 31672 - protein, 113 aa, Homo sapiens
  Payload ID: 6198
  Gene Symbol: FTH1
  Gene Name: ferritin, heavy polypeptide 1
  ENSP ID: ENSP00000435111
MKLQNQRGGRIFLQDIKKPDCDDWESGLNAMECALHLEKNVNQSLLELHKLATDKNDPHLCDFIETHYLNEQVKAIKELGDHVTNLRKMGAPESGLAEYLFDKHTLGDSDNES

SEQ ID NO: 31673 - protein, 58 aa, Homo sapiens
  Payload ID: 6198
  Gene Symbol: FTH1
  Gene Name: ferritin, heavy polypeptide 1
  ENSP ID: ENSP00000436947
MKLQNQRGGRIFLQDIKKPDCDDWESGLNAMECALHLEKNVNQSLLELHKLATDKNDP

SEQ ID NO: 31674 - protein, 183 aa, Homo sapiens; identical to SEQ ID NO: 31665
  Payload ID: 6198
  Gene Symbol: FTH1
  Gene Name: ferritin, heavy polypeptide 1
  Uniprot ID: P02794
  ENSP ID: ENSP00000484477

SEQ ID NO: 31675 - protein, 183 aa, Homo sapiens
  Payload ID: 6199
  Gene Symbol: FTHL17
  Gene Name: ferritin, heavy polypeptide-like 17
  Uniprot ID: Q9BXU8
  ENSP ID: ENSP00000368207
MATAQPSQVRQKYDTNCDAAINSHITLELYTSYLYLSMAFYFNRDDVALENFFRYFLRLSDDKMEHAQKLMRLQNLRGGHICLHDIRKPECQGWESGLVAMESAFHLEKNVNQSLLDLYQLAVEKGDPQLCHFLESHYLHEQVKTIKELGGYVSNLRKICSPEAGLAEYLFDKLTLGGRVKET

SEQ ID NO: 31676 - protein, 175 aa, Homo sapiens
  Payload ID: 6200
  Gene Symbol: FTL
  Gene Name: ferritin, light polypeptide
  Uniprot ID: P02792
  ENSP ID: ENSP00000366525
MSSQIRQNYSTDVEAAVNSLVNLYLQASYTYLSLGFYFDRDDVALEGVSHFFRELAEEKREGYERLLKMQNQRGGRALFQDIKKPAEDEWGKTPDAMKAAMALEKKLNQALLDLHALGSARTDPHLCDFLETHFLDEEVKLIKKMGDHLTNLHRLGGPEAGLGEYLFERLTLKHD

SEQ ID NO: 31677 - protein, 190 aa, Homo sapiens
  Payload ID: 6200
  Gene Symbol: FTL
  Gene Name: ferritin, light polypeptide
  ENSP ID: ENSP00000484043
MSSQIRQNYSTDVEAAVNSLVNLYLQASYTYLSLGFYFDRDDVALEGVSHFFRELAEEKREGYERLLKMQNQRGGRALFQDIKKPAEDEWGKTPDAMKAAMALEKKLNQALLDLHALGSARTDPHLCDFLETHFLDEEVKLIKKMGDHLTNLHRLGGPEAGLGEYSSKGSLSSTTKSLLSPATSEGPLAK

SEQ ID NO: 31678 - protein, 423 aa, Homo sapiens
  Payload ID: 6201
  Gene Symbol: FECH
  Gene Name: ferrochelatase
  Uniprot ID: P22830
  ENSP ID: ENSP00000262093
MRSLGANMAAALRAAGVLLRDPLASSSWRVCQPWRWKSGAAAAAVTTETAQHAQGAKPQVQPQKRKPKTGILMLNMGGPETLGDVHDFLLRLFLDRDLMTLPIQNKLAPFIAKRRTPKIQEQYRRIGGGSPIKIWTSKQGEGMVKLLDELSPNTAPHKYYIGFRYVHPLTEEAIEEMERDGLERAIAFTQYPQYSCSTTGSSLNAIYRYYNQVGRKPTMKWSTIDRWPTHHLLIQCFADHILKELDHFPLEKRSEVVILFSAHSLPMSVVNRGDPYPQEVSATVQKVMERLEYCNPYRLVWQSKVGPMPWLGPQTDESIKGLCERGRKNILLVPIAFTSDHIETLYELDIEYSQVLAKECGVENIRRAESLNGNPLFSKALADLVHSHIQSNELCSKQLTLSCPLCVNPVCRETKSFFTSQQL

SEQ ID NO: 31679 - protein, 429 aa, Homo sapiens
  Payload ID: 6201
  Gene Symbol: FECH
  Gene Name: ferrochelatase
  Uniprot ID: P22830
  ENSP ID: ENSP00000372326
MRSLGANMAAALRAAGVLLRDPLASSSWRVCQPWRWKSGAAAAAVTTETAQHAQGAKPQVQPQKRYESNIRKPKTGILMLNMGGPETLGDVHDFLLRLFLDRDLMTLPIQNKLAPFIAKRRTPKIQEQYRRIGGGSPIKIWTSKQGEGMVKLLDELSPNTAPHKYYIGFRYVHPLTEEAIEEMERDGLERAIAFTQYPQYSCSTTGSSLNAIYRYYNQVGRKPTMKWSTIDRWPTHHLLIQCFADHILKELDHFPLEKRSEVVILFSAHSLPMSVVNRGDPYPQEVSATVQKVMERLEYCNPYRLVWQSKVGPMPWLGPQTDESIKGLCERGRKNILLVPIAFTSDHIETLYELDIEYSQVLAKECGVENIRRAESLNGNPLFSKALADLVHSHIQSNELCSKQLTLSCPLCVNPVCRETKSFFTSQQL

SEQ ID NO: 31680 - protein, 111 aa, Homo sapiens
  Payload ID: 6201
  Gene Symbol: FECH
  Gene Name: ferrochelatase
  ENSP ID: ENSP00000465243
MRSLGANMAAALRAAGVLLRDPLASSSWRVCQPWRWKSGAAAAAVTTETAQHAQGAKPQVQPQKRKPKTGILMLNMGGPETLGDVHDFLLRLFLDRDLMTLPIQKKHFSGC

SEQ ID NO: 31681 - protein, 143 aa, Homo sapiens
  Payload ID: 6201
  Gene Symbol: FECH
  Gene Name: ferrochelatase
  ENSP ID: ENSP00000465363
  MOD_RES (1)..(1): Any amino acid
XDHFPLEKRSEVVILFSAHSLPMSVVNRGDPYPQEVSATVQKVMERLEYCNPYRLVWQSKVGPMPWLGPQTDESIKGLCERGRKNILLVPIAFTSDHIETLYELDIEYSQVLAKECGVENIRRAESLNGNPLFSKVSTVLQSF

SEQ ID NO: 31682 - protein, 165 aa, Homo sapiens
  Payload ID: 6201
  Gene Symbol: FECH
  Gene Name: ferrochelatase
  ENSP ID: ENSP00000465717
MRSLGANMAAALRAAGVLLRDPLASSSWRVCQPWRWKSGAAAAAVTTETAQHAQGAKPQVQPQKRKPKTGILMLNMGGPETLGDVHDFLLRLFLDRDLMTLPIQNKLAPFIAKRRTPKIQEQYRRIGGGSPIKIWTSKQGEGMVKLLDELSPNTVPNQRILSPTS

SEQ ID NO: 31683 - protein, 326 aa, Homo sapiens
  Payload ID: 6201
  Gene Symbol: FECH
  Gene Name: ferrochelatase
  ENSP ID: ENSP00000466263
MRSLGANMAAALRAAGVLLRDPLASSSWRVCQPWRWKSGAAAAAVTTETAQHAQGAKPQVQPQKRKPKTGILMLNMGGPETLGDVHDFLLRLFLDRDLMTLPIQNKLAPFIAKRRTPKIQEQYRRIGGGSPIKIWTSKQGEGMVKLLDELSPNTAPHKYYIGFRYVHPLTEEAIEEMERDGLERAIAFTQYPQYSCSTTGSSLNAIYRYYNQVGRKPTMKWSTIDRWPTHHLLIQVVNRGDPYPQEVSATVQKVMERLEYCNPYRLVWQSKVGPMPWLGPQTDESIKGLCERGRKNILLVPIAFTSDHIETLYELDIEYSQVLAKE

SEQ ID NO: 31684 - protein, 90 aa, Homo sapiens
  Payload ID: 6201
  Gene Symbol: FECH
  Gene Name: ferrochelatase
  ENSP ID: ENSP00000467461
MLNMGGPETLGDVHDFLLRLFLDRDLMTLPIQNKLAPFIAKRRTPKIQEQYRRIGGGSPIKIWTSKQGEGMVKLLDELSPNTAPHKYYIG

SEQ ID NO: 31685 - protein, 822 aa, Homo sapiens
  Payload ID: 6202
  Gene Symbol: FES
  Gene Name: FES proto-oncogene, tyrosine kinase
  Uniprot ID: P07332
  ENSP ID: ENSP00000331504
MGFSSELCSPQGHGVLQQMQEAELRLLEGMRKWMAQRVKSDREYAGLLHHMSLQDSGGQSRAISPDSPISQSWAEITSQTEGLSRLLRQHAEDLNSGPLSKLSLLIRERQQLRKTYSEQWQQLQQELTKTHSQDIEKLKSQYRALARDSAQAKRKYQEASKDKDRDKAKDKYVRSLWKLFAHHNRYVLGVRAAQLHHQHHHQLLLPGLLRSLQDLHEEMACILKEILQEYLEISSLVQDEVVAIHREMAAAAARIQPEAEYQGFLRQYGSAPDVPPCVTFDESLLEEGEPLEPGELQLNELTVESVQHTLTSVTDELAVATEMVFRRQEMVTQLQQELRNEEENTHPRERVQLLGKRQVLQEALQGLQVALCSQAKLQAQQELLQTKLEHLGPGEPPPVLLLQDDRHSTSSSEQEREGGRTPTLEILKSHISGIFRPKFSLPPPLQLIPEVQKPLHEQLWYHGAIPRAEVAELLVHSGDFLVRESQGKQEYVLSVLWDGLPRHFIIQSLDNLYRLEGEGFPSIPLLIDHLLSTQQPLTKKSGVVLHRAVPKDKWVLNHEDLVLGEQIGRGNFGEVFSGRLRADNTLVAVKSCRETLPPDLKAKFLQEARILKQYSHPNIVRLIGVCTQKQPIYIVMELVQGGDFLTFLRTEGARLRVKTLLQMVGDAAAGMEYLESKCCIHRDLAARNCLVTEKNVLKISDFGMSREEADGVYAASGGLRQVPVKWTAPEALNYGRYSSESDVWSFGILLWETFSLGASPYPNLSNQQTREFVEKGGRLPCPELCPDAVFRLMEQCWAYEPGQRPSFSTIYQELQSIRKRHR

SEQ ID NO: 31686 - protein, 764 aa, Homo sapiens
  Payload ID: 6202
  Gene Symbol: FES
  Gene Name: FES proto-oncogene, tyrosine kinase
  Uniprot ID: P07332
  ENSP ID: ENSP00000377837
MGFSSELCSPQGHGVLQQMQEAELRLLEGMRKWMAQRVKSDREYAGLLHHMSLQDSGGQSRAISPDSPISQTHSQDIEKLKSQYRALARDSAQAKRKYQEASKDKDRDKAKDKYVRSLWKLFAHHNRYVLGVRAAQLHHQHHHQLLLPGLLRSLQDLHEEMACILKEILQEYLEISSLVQDEVVAIHREMAAAAARIQPEAEYQGFLRQYGSAPDVPPCVTFDESLLEEGEPLEPGELQLNELTVESVQHTLTSVTDELAVATEMVFRRQEMVTQLQQELRNEEENTHPRERVQLLGKRQVLQEALQGLQVALCSQAKLQAQQELLQTKLEHLGPGEPPPVLLLQDDRHSTSSSEQEREGGRTPTLEILKSHISGIFRPKFSLPPPLQLIPEVQKPLHEQLWYHGAIPRAEVAELLVHSGDFLVRESQGKQEYVLSVLWDGLPRHFIIQSLDNLYRLEGEGFPSIPLLIDHLLSTQQPLTKKSGVVLHRAVPKDKWVLNHEDLVLGEQIGRGNFGEVFSGRLRADNTLVAVKSCRETLPPDLKAKFLQEARILKQYSHPNIVRLIGVCTQKQPIYIVMELVQGGDFLTFLRTEGARLRVKTLLQMVGDAAAGMEYLESKCCIHRDLAARNCLVTEKNVLKISDFGMSREEADGVYAASGGLRQVPVKWTAPEALNYGRYSSESDVWSFGILLWETFSLGASPYPNLSNQQTREFVEKGGRLPCPELCPDAVFRLMEQCWAYEPGQRPSFSTIYQELQSIRKRHR

SEQ ID NO: 31687 - protein, 681 aa, Homo sapiens
  Payload ID: 6202
  Gene Symbol: FES
  Gene Name: FES proto-oncogene, tyrosine kinase
  ENSP ID: ENSP00000377839
MGFSSELCSPQGHGVLQQMQEAELRLLEGMRKWMAQRVKSDREYAGLLHHMSLQDSGGQSRAISPDSPISQTHSQDIEKLKSQYRALARDSAQAKRKYQEASKDKDRDKAKDKYVRSLWKLFAHHNRYVLGVRAAQLHHQHHHQLLLPGLLRSLQDLHEEMACILKEILQEYLEISSLVQDEVVAIHREMAAAAARIQPEAEYQGFLRQYGSAPDVPPCVTFDESLLEEGEPLEPGELQLNELTVESVQHTLTSVTDELAVATEMVFRRQEMVTQLQQELRNEEENTHPRERVQLLGKRQVLQEALQGLQVALCSQAKLQAQQELLQTKLEHLGPGEPPPVLLLQDDRHSTSSSEQEREGGRTPTLEILKSHISGIFRPKFSNLYRLEGEGFPSIPLLIDHLLSTQQPLTKKSGVVLHRAVPKDKWVLNHEDLVLGEQIGRGNFGEVFSGRLRADNTLVAVKSCRETLPPDLKAKFLQEARSSPSTSSWSLCRGSSPPAGGDFLTFLRTEGARLRVKTLLQMVGDAAAGMEYLESKCCIHRDLAARNCLVTEKNVLKISDFGMSREEADGVYAASGGLRQVPVKWTAPEALNYGRYSSESDVWSFGILLWETFSLGASPYPNLSNQQTREFVEKGGRLPCPELCPDAVFRLMEQCWAYEPGQRPSFSTIYQELQSIRKRHR

SEQ ID NO: 31688 - protein, 147 aa, Homo sapiens
  Payload ID: 6202
  Gene Symbol: FES
  Gene Name: FES proto-oncogene, tyrosine kinase
  ENSP ID: ENSP00000392696
MGFSSELCSPQGHGVLQQMQEAELRLLEGMRKWMAQRVKSDREYAGLLHHMSLQDSGGQSRAISPDSPISQSWAEITSQTEGLSRLLRQHAEDLNSGPLSKLSLLIRERQQLRKTYSEQWQQLQQELTKTHSQDIEKLKSQYRALAR

SEQ ID NO: 31689 - protein, 114 aa, Homo sapiens
  Payload ID: 6202
  Gene Symbol: FES
  Gene Name: FES proto-oncogene, tyrosine kinase
  ENSP ID: ENSP00000395425
MGFSSELCSPQGHGVLQQMQEAELRLLEGMRKWMAQRVKSDREYAGLLHHMSLQDSGGQSRAISPDSPISQSWAEITSQTEGLSRLLRQHAEDLNSGPLSKLSLLIRERQQLRK

SEQ ID NO: 31690 - protein, 752 aa, Homo sapiens
  Payload ID: 6202
  Gene Symbol: FES
  Gene Name: FES proto-oncogene, tyrosine kinase
  Uniprot ID: P07332
  ENSP ID: ENSP00000400868
MGFSSELCSPQGHGVLQQMQEAELRLLEGMRKWMAQRVKSDREYAGLLHHMSLQDSGGQSRAISPDSPISQSWAEITSQTEGLSRLLRQHAEDLNSGPLSKLSLLIRERQQLRKTYSEQWQQLQQELTKTHSQDIEKLKSQYRALARDSAQAKRKYQEASKDKDRDKAKDKYVRSLWKLFAHHNRYVLGVRAAQLHHQHHHQLLLPGLLRSLQDLHEEMACILKEILQEYLEISSLVQDEVVAIHREMAAAAARIQPEAEYQGFLRQYGSAPDVPPCVTFDESLLEEGEPLEPGELQLNELTVESVQHTLTSVTDELAVATEMVFRRQEMVTQLQQELRNEEENTHPRERVQLLGKRQVLQEALQGLQVALCSQAKLQAQQELLQTKLEHLGPGEPPPVLLLQDDRHSTSSSEQEREGGRTPTLEILKSHISGIFRPKFSNLYRLEGEGFPSIPLLIDHLLSTQQPLTKKSGVVLHRAVPKDKWVLNHEDLVLGEQIGRGNFGEVFSGRLRADNTLVAVKSCRETLPPDLKAKFLQEARILKQYSHPNIVRLIGVCTQKQPIYIVMELVQGGDFLTFLRTEGARLRVKTLLQMVGDAAAGMEYLESKCCIHRDLAARNCLVTEKNVLKISDFGMSREEADGVYAASGGLRQVPVKWTAPEALNYGRYSSESDVWSFGILLWETFSLGASPYPNLSNQQTREFVEKGGRLPCPELCPDAVFRLMEQCWAYEPGQRPSFSTIYQELQSIRKRHR

SEQ ID NO: 31691 - protein, 42 aa, Homo sapiens
  Payload ID: 6202
  Gene Symbol: FES
  Gene Name: FES proto-oncogene, tyrosine kinase
  ENSP ID: ENSP00000410477
MGFSSELCSPQGHGVLQQMQEAELRLLEGMRKWMAQRVKSDR

SEQ ID NO: 31692 - protein, 694 aa, Homo sapiens
  Payload ID: 6202
  Gene Symbol: FES
  Gene Name: FES proto-oncogene, tyrosine kinase
  Uniprot ID: P07332
  ENSP ID: ENSP00000414629
MGFSSELCSPQGHGVLQQMQEAELRLLEGMRKWMAQRVKSDREYAGLLHHMSLQDSGGQSRAISPDSPISQTHSQDIEKLKSQYRALARDSAQAKRKYQEASKDKDRDKAKDKYVRSLWKLFAHHNRYVLGVRAAQLHHQHHHQLLLPGLLRSLQDLHEEMACILKEILQEYLEISSLVQDEVVAIHREMAAAAARIQPEAEYQGFLRQYGSAPDVPPCVTFDESLLEEGEPLEPGELQLNELTVESVQHTLTSVTDELAVATEMVFRRQEMVTQLQQELRNEEENTHPRERVQLLGKRQVLQEALQGLQVALCSQAKLQAQQELLQTKLEHLGPGEPPPVLLLQDDRHSTSSSEQEREGGRTPTLEILKSHISGIFRPKFSNLYRLEGEGFPSIPLLIDHLLSTQQPLTKKSGVVLHRAVPKDKWVLNHEDLVLGEQIGRGNFGEVFSGRLRADNTLVAVKSCRETLPPDLKAKFLQEARILKQYSHPNIVRLIGVCTQKQPIYIVMELVQGGDFLTFLRTEGARLRVKTLLQMVGDAAAGMEYLESKCCIHRDLAARNCLVTEKNVLKISDFGMSREEADGVYAASGGLRQVPVKWTAPEALNYGRYSSESDVWSFGILLWETFSLGASPYPNLSNQQTREFVEKGGRLPCPELCPDAVFRLMEQCWAYEPGQRPSFSTIYQELQSIRKRHR

SEQ ID NO: 31693 - protein, 545 aa, Homo sapiens
  Payload ID: 6202
  Gene Symbol: FES
  Gene Name: FES proto-oncogene, tyrosine kinase
  ENSP ID: ENSP00000435811
MGFSSELCSPQGHGVLQQMQEAELRLLEGMRKWMAQRVKSDREYAGLLHHMSLQDSGGQSRAISPDSPISQSWAEITSQTEGLSRLLRQHAEDLNSGPLSKLSLLIRERQQLRKTYSEQWQQLQQELTKTHSQDIEKLKSQYRALARDSAQAKRKYQEASKDKDRDKAKDKYVRSLWKLFAHHNRYVLGVRAAQLHHQHHHQLLLPGLLRSLQDLHEEMACILKEILQEYLEISSLVQDEVVAIHREMAAAAARIQPEAEYQGFLRQYGSAPDVPPCVTFDESLLEEGEPLEPGELQLNELTVESVQHTLTSVTDELAVATEMVFRRQEMVTQLQQELRNEEENTHPRERVQLLGKRQVLQEALQGLQVALCSQAKLQAQQELLQTKLEHLGPGEPPPVLLLQDDRHSTSSSEQEREGGRTPTLEILKSHISGIFRPKFSLPPPLQLIPEVQKPLHEQLWYHGAIPRAEVAELLVHSGDFLVRESQGKQEYVLSVLWDGLPRHFIIQAHAPSEWRLLTPGPLPCRTCTDWKGKAFLAFLCSSTTY

SEQ ID NO: 31694 - protein, 169 aa, Homo sapiens
  Payload ID: 6202
  Gene Symbol: FES
  Gene Name: FES proto-oncogene, tyrosine kinase
  ENSP ID: ENSP00000454089
MGFSSELCSPQGHGVLQQMQEAELRLLEGMRKWMAQRVKSDREYAGLLHHMSLQDSGGQSRAISPDSPISQSWAEITSQTEGLSRLLRQHAEDLNSGPLSKLSLLIRERQQLRKTYSEQWQQLQQELTKTHSQDIEKLKSQYRALARDSAQAKRKYQEASKDKDRDKAK

SEQ ID NO: 31695 - protein, 121 aa, Homo sapiens
  Payload ID: 6202
  Gene Symbol: FES
  Gene Name: FES proto-oncogene, tyrosine kinase
  ENSP ID: ENSP00000454146
MGFSSELCSPQGHGVLQQMQEAELRLLEGMRKWMAQRVKSDREYAGLLHHMSLQDSGGQSRAISPDSPISQVGLYGTLVGAGCICLLLPLLGALWGSGWRSGRPMLGSHCAPLPASPICAV

SEQ ID NO: 31696 - protein, 183 aa, Homo sapiens
  Payload ID: 6203
  Gene Symbol: FATE1
  Gene Name: fetal and adult testis expressed 1
  Uniprot ID: Q969F0
  ENSP ID: ENSP00000359375
MAGGPPNTKAEMEMSLAEELNHGRQGENQEHLVIAEMMELGSRSRGASQKKQKLEQKAAGSASAKRVWNMTATRPKKMGSQLPKPRMLRESGHGDAHLQEYAGNFQGIRFHYDRNPGTDAVAQTSLEEFNVLEMEVMRRQLYAVNRRLRALEEQGATWRHRETLIIAVLVSASIANLWLWMNQ

SEQ ID NO: 31697 - protein, 80 aa, Homo sapiens
  Payload ID: 6203
  Gene Symbol: FATE1
  Gene Name: fetal and adult testis expressed 1
  ENSP ID: ENSP00000400493
KAEMEMSLAEELNHGRQGENQEHLVIAEMMELGSRSRGASQKKQKLEQKAAGSASAKRVWNMTATRPKKMQPRDRCSGAD

SEQ ID NO: 31698 - protein, 382 aa, Homo sapiens
  Payload ID: 6204
  Gene Symbol: FETUB
  Gene Name: fetuin B
  Uniprot ID: Q9UGM5
  ENSP ID: ENSP00000265029
MGLLLPLALCILVLCCGAMSPPQLALNPSALLSRGCNDSDVLAVAGFALRDINKDRKDGYVLRLNRVNDAQEYRRGGLGSLFYLTLDVLETDCHVLRKKAWQDCGMRIFFESVYGQCKAIFYMNNPSRVLYLAAYNCTLRPVSKKKIYMTCPDCPSSIPTDSSNHQVLEAATESLAKYNNENTSKQYSLFKVTRASSQWVVGPSYFVEYLIKESPCTKSQASSCSLQSSDSVPVGLCKGSLTRTHWEKFVSVTCDFFESQAPATGSENSAVNQKPTNLPKVEESQQKNTPPTDSPSKAGPRGSVQYLPDLDDKNSQEKGPQEAFPVHLDLTTNPQGETLDISFLFLEPMEEKLVVLPFPKEKARTAECPGPAQNASPLVLPP

SEQ ID NO: 31699 - protein, 317 aa, Homo sapiens
  Payload ID: 6204
  Gene Symbol: FETUB
  Gene Name: fetuin B
  ENSP ID: ENSP00000371569
MGLLLPLALCILVLCCGAMSPPQLALNPSALLSRGCNDSDVLAVAGFALRDINKDRKDGYVLRLNRVNDAQEYRRAISKKKIYMTCPDCPSSIPTDSSNHQVLEAATESLAKYNNENTSKQYSLFKVTRASSQWVVGPSYFVEYLIKESPCTKSQASSCSLQSSDSVPVGLCKGSLTRTHWEKFVSVTCDFFESQAPATGSENSAVNQKPTNLPKVEESQQKNTPPTDSPSKAGPRGSVQYLPDLDDKNSQEKGPQEAFPVHLDLTTNPQGETLDISFLFLEPMEEKLVVLPFPKEKARTAECPGPAQNASPLVLPP

SEQ ID NO: 31700 - protein, 345 aa, Homo sapiens
  Payload ID: 6204
  Gene Symbol: FETUB
  Gene Name: fetuin B
  Uniprot ID: Q9UGM5
  ENSP ID: ENSP00000371571
MGLLLPLALCILVLCCGAMSPPQLALNPSALLSRGCNDSDVLAVAGFALRDINKDRKDGYVLRLNRVNDAQEYRRVYGQCKAIFYMNNPSRVLYLAAYNCTLRPVSKKKIYMTCPDCPSSIPTDSSNHQVLEAATESLAKYNNENTSKQYSLFKVTRASSQWVVGPSYFVEYLIKESPCTKSQASSCSLQSSDSVPVGLCKGSLTRTHWEKFVSVTCDFFESQAPATGSENSAVNQKPTNLPKVEESQQKNTPPTDSPSKAGPRGSVQYLPDLDDKNSQEKGPQEAFPVHLDLTTNPQGETLDISFLFLEPMEEKLVVLPFPKEKARTAECPGPAQNASPLVLPP

SEQ ID NO: 31701 - protein, 119 aa, Homo sapiens
  Payload ID: 6204
  Gene Symbol: FETUB
  Gene Name: fetuin B
  ENSP ID: ENSP00000393851
MGLLLPLALCILVLCCGAMSPPQLALNPSALLSRGCNDSDVLAVAGFALRDINKDRKDGYVLRLNRVNDAQEYRRGGLGSLFYLTLDVLETDCHVLRKKAWQDCGMRIFFESFQKKRFT

SEQ ID NO: 31702 - protein, 103 aa, Homo sapiens
  Payload ID: 6204
  Gene Symbol: FETUB
  Gene Name: fetuin B
  ENSP ID: ENSP00000396581
MTCPDCPSSIPTDSSNHQVLEAATESLAKYNNENTSKQYSLFKVTRASSQWVVGPSYFVEYLIKESPCTKSQASSCSLQSSDSVPVGLCKGSLTRTHWEKFVS

SEQ ID NO: 31703 - protein, 382 aa, Homo sapiens; identical to SEQ ID NO: 31698
  Payload ID: 6204
  Gene Symbol: FETUB
  Gene Name: fetuin B
  Uniprot ID: Q9UGM5
  ENSP ID: ENSP00000404288

SEQ ID NO: 31704 - protein, 92 aa, Homo sapiens
  Payload ID: 6204
  Gene Symbol: FETUB
  Gene Name: fetuin B
  ENSP ID: ENSP00000405438
MGLLLPLALCILVLCCGAMSPPQLALNPSALLSRGCNDSDVLAVAGFALRDINKDRKDGYVLRLNRVNDAQEYRRARWPGISVLSYTGCARD

SEQ ID NO: 31705 - protein, 238 aa, Homo sapiens
  Payload ID: 6205
  Gene Symbol: FEV
  Gene Name: FEV (ETS oncogene family)
  Uniprot ID: Q99581
  ENSP ID: ENSP00000295727
MRQSGASQPLLINMYLPDPVGDGLFKDGKNPSWGPLSPAVQKGSGQIQLWQFLLELLADRANAGCIAWEGGHGEFKLTDPDEVARRWGERKSKPNMNYDKLSRALRYYYDKNIMSKVHGKRYAYRFDFQGLAQACQPPPAHAHAAAAAAAAAAAAQDGALYKLPAGLAPLPFPGLSKLNLMAASAGVAPAGFSYWPGPGPAATAAAATAALYPSPSLQPPPGPFGAVAAASHLGGHYH

SEQ ID NO: 31706 - protein, 425 aa, Homo sapiens
  Payload ID: 6206
  Gene Symbol: FEZF1
  Gene Name: FEZ family zinc finger 1
  Uniprot ID: A0PJY2
  ENSP ID: ENSP00000392727
MDSSCHNATTKMLATAPARGNMMSTSKPLAFSIERIMARTPEPKALPVPHFLQGALPKGEPKHSLHLNSSIPCMIPFVPVAYDTSPKAGVTGSEPRKASLEAPAAPAAVPSAPAFSCSDLLNCALSLKGDLARDALPLQQYKLPKTYLAERNKLVVPAVEKYPSGVAFKDLSQAQLQHYMKESAQLLSEKIAFKTSDFSRGSPNAKPKVFTCEVCGKVFNAHYNLTRHMPVHTGARPFVCKVCGKGFRQASTLCRHKIIHTQEKPHKCNQCGKAFNRSSTLNTHTRIHAGYKPFVCEFCGKGFHQKGNYKNHKLTHSGEKQFKCNICNKAFHQVYNLTFHMHTHNDKKPFTCPTCGKGFCRNFDLKKHVRKLHDSSLGLARTPAGEPGTEPPPPLPQQPPMTLPPLQPPLPTPGPLQPGLHQGHQ

SEQ ID NO: 31707 - protein, 35 aa, Homo sapiens
  Payload ID: 6206
  Gene Symbol: FEZF1
  Gene Name: FEZ family zinc finger 1
  ENSP ID: ENSP00000406919
MDSSCHNATTKMLATAPARGNMMSTSKPLAFSIER

SEQ ID NO: 31708 - protein, 475 aa, Homo sapiens
  Payload ID: 6206
  Gene Symbol: FEZF1
  Gene Name: FEZ family zinc finger 1
  Uniprot ID: A0PJY2
  ENSP ID: ENSP00000411145
MDSSCHNATTKMLATAPARGNMMSTSKPLAFSIERIMARTPEPKALPVPHFLQGALPKGEPKHSLHLNSSIPCMIPFVPVAYDTSPKAGVTGSEPRKASLEAPAAPAAVPSAPAFSCSDLLNCALSLKGDLARDALPLQQYKLVRPRVVNHSSFHAMGALCYLNRGDGPCHPAAGVNIHPVASYFLSSPLHPQPKTYLAERNKLVVPAVEKYPSGVAFKDLSQAQLQHYMKESAQLLSEKIAFKTSDFSRGSPNAKPKVFTCEVCGKVFNAHYNLTRHMPVHTGARPFVCKVCGKGFRQASTLCRHKIIHTQEKPHKCNQCGKAFNRSSTLNTHTRIHAGYKPFVCEFCGKGFHQKGNYKNHKLTHSGEKQFKCNICNKAFHQVYNLTFHMHTHNDKKPFTCPTCGKGFCRNFDLKKHVRKLHDSSLGLARTPAGEPGTEPPPPLPQQPPMTLPPLQPPLPTPGPLQPGLHQGHQ

SEQ ID NO: 31709 - protein, 459 aa, Homo sapiens
  Payload ID: 6207
  Gene Symbol: FEZF2
  Gene Name: FEZ family zinc finger 2
  Uniprot ID: Q8TBJ5
  ENSP ID: ENSP00000283268
MASSASLETMVPPACPRAGASPATSKTLAFSIERIMAKTSEPRAPFEPRPGALEADGSQGKKLLNLCSPLPCMIPLQPLGYEVPSKTLLSYSELWKSSLRAGGGGGGGGGGGGGGGGAPVCGASGLCKTNCGVCCKAELGLAPSALPAGRVIKPQVINQAVGLPASGSLYYFNYLDSTAYPPSELLSGHLFPSGLLNAQAPAALAAHPKLFLLENAKLAGLAADKFPHPAPYPHKERLPAPLEQVLKENSALTAERGGVKGHSKLPGGSADGKPKNFTCEVCGKVFNAHYNLTRHMPVHTGARPFVCKVCGKGFRQASTLCRHKIIHTQEKPHKCNQCGKAFNRSSTLNTHIRIHAGYKPFVCEFCGKGFHQKGNYKNHKLTHSGEKQYKCTICNKAFHQVYNLTFHMHTHNDKKPFTCATCGKGFCRNFDLKKHVRKLHDSVGPAAPSAKDLTRTVQS

SEQ ID NO: 31710 - protein, 459 aa, Homo sapiens; identical to SEQ ID NO: 31709
  Payload ID: 6207
  Gene Symbol: FEZF2
  Gene Name: FEZ family zinc finger 2
  Uniprot ID: Q8TBJ5
  ENSP ID: ENSP00000418589

SEQ ID NO: 31711 - protein, 459 aa, Homo sapiens; identical to SEQ ID NO: 31709
  Payload ID: 6207
  Gene Symbol: FEZF2
  Gene Name: FEZ family zinc finger 2
  Uniprot ID: Q8TBJ5
  ENSP ID: ENSP00000418804

SEQ ID NO: 31712 - protein, 379 aa, Homo sapiens
  Payload ID: 6208
  Gene Symbol: FGFR1OP
  Gene Name: FGFR1 oncogene partner
  Uniprot ID: O95684
  ENSP ID: ENSP00000230248
MAATAAAVVAEEDTELRDLLVQTLENSGVLNRIKAELRAAVFLALEEQEKVENKTPLVNESLKKFLNTKDGRLVASLVAEFLQFFNLDFTLAVFQPETSTLQGLEGRENLARDLGIIEAEGTVGGPLLLEVIRRCQQKEKGPTTGEGALDLSDVHSPPKSPEGKTSAQTTPSKKANDEANQSDTSVSLSEPKSKSSLHLLSHETKIGSFLSNRTLDGKDKAGLCPDEDDMEGDSFFDDPIPKPEKTYGLRKEPRKQAGSLASLSDAPPLKSGLSSLAGAPSLKDSESKRGNTVLKDLKLISDKIGSLGLGTGEDDDYVDDFNSTSHRSEKSEISIGEEIEEDLSVEIDDINTSDKLDDLTQDLTVSQLSDVADYLEDVA

SEQ ID NO: 31713 - protein, 399 aa, Homo sapiens
  Payload ID: 6208
  Gene Symbol: FGFR1OP
  Gene Name: FGFR1 oncogene partner
  Uniprot ID: O95684
  ENSP ID: ENSP00000355812
MAATAAAVVAEEDTELRDLLVQTLENSGVLNRIKAELRAAVFLALEEQEKVENKTPLVNESLKKFLNTKDGRLVASLVAEFLQFFNLDFTLAVFQPETSTLQGLEGRENLARDLGIIEAEGTVGGPLLLEVIRRCQQKEKGPTTGEGALDLSDVHSPPKSPEGKTSAQTTPSKIPRYKGQGKKKTSGQKAGDKKANDEANQSDTSVSLSEPKSKSSLHLLSHETKIGSFLSNRTLDGKDKAGLCPDEDDMEGDSFFDDPIPKPEKTYGLRKEPRKQAGSLASLSDAPPLKSGLSSLAGAPSLKDSESKRGNTVLKDLKLISDKIGSLGLGTGEDDDYVDDFNSTSHRSEKSEISIGEEIEEDLSVEIDDINTSDKLDDLTQDLTVSQLSDVADYLEDVA

SEQ ID NO: 31714 - protein, 351 aa, Homo sapiens
  Payload ID: 6208
  Gene Symbol: FGFR1OP
  Gene Name: FGFR1 oncogene partner
  ENSP ID: ENSP00000479115
MAATAAAVVAEEDTELRDLLVQTLENSGVLNRIKAELRAAVFLALEEQEKVENKTPLVNESLKKFLNTKDGRLVASLVAEFLQFFNLDFTLAVFQPETSTLQGLEGRENLARDLGIIEAEGTVGGPLLLEVIRRCQQKEKGPTTGEKANDEANQSDTSVSLSEPKSKSSLHLLSHETKIGSFLSNRTLDGKDKAGLCPDEDDMEGDSFFDDPIPKPEKTYGLRKEPRKQAGSLASLSDAPPLKSGLSSLAGAPSLKDSESKRGNTVLKDLKLISDKIGSLGLGTGEDDDYVDDFNSTSHRSEKSEISIGEEIEEDLSVEIDDINTSDKTITQLECLLSIGALHFKNTADIF

SEQ ID NO: 31715 - protein, 253 aa, Homo sapiens
  Payload ID: 6209
  Gene Symbol: FGFR1OP2
  Gene Name: FGFR1 oncogene partner 2
  Uniprot ID: Q9NVK5
  ENSP ID: ENSP00000229395
MSCTIEKALADAKALVERLRDHDDAAESLIEQTTALNKRVEAMKQYQEEIQELNEVARHRPRSTLVMGIQQENRQIRELQQENKELRTSLEEHQSALELIMSKYREQMFRLLMASKKDDPGIIMKLKEQHSKIDMVHRNKSEGFFLDASRHILEAPQHGLERRHLEANQNELQAHVDQITEMAAVMRKAIEIDEQQGCKEQERIFQLEQENKGLREILQITRESFLNLRKDDASESTSLSALVTNSDLSLRKS

SEQ ID NO: 31716 - protein, 215 aa, Homo sapiens
  Payload ID: 6209
  Gene Symbol: FGFR1OP2
  Gene Name: FGFR1 oncogene partner 2
  Uniprot ID: Q9NVK5
  ENSP ID: ENSP00000323763
MSCTIEKALADAKALVERLRDHDDAAESLIEQTTALNKRVEAMKQYQEEIQELNEVARHRPRSTLVMGIQQENRQIRELQQENKELRTSLEEHQSALELIMSKYREQMFRLLMASKKDDPGIIMKLKEQHSKELQAHVDQITEMAAVMRKAIEIDEQQGCKEQERIFQLEQENKGLREILQITRESFLNLRKDDASESTSLSALVTNSDLSLRKS

SEQ ID NO: 31717 - protein, 172 aa, Homo sapiens
  Payload ID: 6209
  Gene Symbol: FGFR1OP2
  Gene Name: FGFR1 oncogene partner 2
  Uniprot ID: Q9NVK5
  ENSP ID: ENSP00000437556
MSCTIEKALADAKALVERLRDHDDAAESLIEQTTALNKRVEAMKQYQEEIQELNEVARHRPRSTLVMGIQQENRQIRELQQENKELRTSLEEHQSALELIMSKYREQMFRLLMASKKDDPGIIMKLKEQHSKIDMVHRNKSEGFFLDASRHILEAPQHGLERRHLEANQNVH

SEQ ID NO: 31718 - protein, 60 aa, Homo sapiens
  Payload ID: 6209
  Gene Symbol: FGFR1OP2
  Gene Name: FGFR1 oncogene partner 2
  ENSP ID: ENSP00000441144
MSCTIEKALADAKALVERLRDHDDAAESLIEQTTALNKRVEAMKQYQEEIQELNEVARHR

SEQ ID NO: 31719 - protein, 174 aa, Homo sapiens
  Payload ID: 6210
  Gene Symbol: FOPNL
  Gene Name: FGFR1OP N-terminal like
  Uniprot ID: Q96NB1
  ENSP ID: ENSP00000255759
MATVAELKAVLKDTLEKKGVLGHLKARIRAEVFNALDDDREPRPSLSHENLLINELIREYLEFNKYKYTASVLIAESGQPVVPLDRQFLIHELNAFEESKDNTIPLLYGILAHFLRGTKDGIQNAFLKGPSLQPSDPSLGRQPSRRKPMDDHLRKEEQKSTNIEDLHVSQAVNR

SEQ ID NO: 31720 - protein, 82 aa, Homo sapiens
  Payload ID: 6210
  Gene Symbol: FOPNL
  Gene Name: FGFR1OP N-terminal like
  ENSP ID: ENSP00000458159
MATVAELKAVLKDTLEKKGVLGHLKARIRAEVFNALDDDREPRPSLSHENLLINELIREYLEFNKYKYTASVLIADLFYMGF

SEQ ID NO: 31721 - protein, 124 aa, Homo sapiens
  Payload ID: 6210
  Gene Symbol: FOPNL
  Gene Name: FGFR1OP N-terminal like
  ENSP ID: ENSP00000458348
MATVAELKADDDREPRPSLSHENLLINELIREYLEFNKYKYTASVLIAESGQPVVPLDRQFLIHELNAFEESKDNTIPLLYGILAHFLRGTKDGIQNAFLKGPSLQPSDPSLGRQPSRRKPMGM

SEQ ID NO: 31722 - protein, 108 aa, Homo sapiens
  Payload ID: 6210
  Gene Symbol: FOPNL
  Gene Name: FGFR1OP N-terminal like
  ENSP ID: ENSP00000459429
MATVAELKAESGQPVVPLDRQFLIHELNAFEESKDNTIPLLYGILAHFLRGTKDGIQNAFLKGPSLQPSDPSLGRQPSRRKPMDDHLRKEEQKSTNIEDLHVSQAVNR

SEQ ID NO: 31723 - protein, 104 aa, Homo sapiens
  Payload ID: 6210
  Gene Symbol: FOPNL
  Gene Name: FGFR1OP N-terminal like
  ENSP ID: ENSP00000459804
MATVAELKAVLKDTLEKKGVLGHLKARIRAEVFNALDDDREPRPSLSHENLLINELIREYLEFNKYKYTASVLIAESGQPVVPLDRQFLIHELNAFEESKDNTI

SEQ ID NO: 31724 - protein, 100 aa, Homo sapiens
  Payload ID: 6210
  Gene Symbol: FOPNL
  Gene Name: FGFR1OP N-terminal like
  Uniprot ID: Q96NB1
  ENSP ID: ENSP00000460312
MATVAELKAVLKDTLEKKGVLGHLKARIRAEVFNALDDDREPRPSLSHENLLINELIREYLEFNKYKYTASVLIADDHLRKEEQKSTNIEDLHVSQAVNR

SEQ ID NO: 31725 - protein, 124 aa, Homo sapiens
  Payload ID: 6210
  Gene Symbol: FOPNL
  Gene Name: FGFR1OP N-terminal like
  ENSP ID: ENSP00000460592
MATVAELKAVLKDTLEKKGVLGHLKARIRAEVFNALDDDREPRPSLSHENLLINELIREYLEFNKYKYTASVLIADGVSLYCDLSSLHPPPPGFKQFSCLSLPSTWNYRIWSTCSSVGQTVSHP

SEQ ID NO: 31726 - protein, 128 aa, Homo sapiens
  Payload ID: 6210
  Gene Symbol: FOPNL
  Gene Name: FGFR1OP N-terminal like
  ENSP ID: ENSP00000461548
MATVAELKAVLKDTLEKKGVLGHLKARIRAEVFNALDDDREPRPSLSHENLLINELIREYLEFNKYKYTASVLIAAHCILRLLGSSSSPASASRVPGTTESGQPVVPLDRQFLIHELNAFEESKDNTI

SEQ ID NO: 31727 - protein, 198 aa, Homo sapiens
  Payload ID: 6210
  Gene Symbol: FOPNL
  Gene Name: FGFR1OP N-terminal like
  ENSP ID: ENSP00000461830
MATVAELKAVLKDTLEKKGVLGHLKARIRAEVFNALDDDREPRPSLSHENLLINELIREYLEFNKYKYTASVLIAAHCILRLLGSSSSPASASRVPGTTESGQPVVPLDRQFLIHELNAFEESKDNTIPLLYGILAHFLRGTKDGIQNAFLKGPSLQPSDPSLGRQPSRRKPMDDHLRKEEQKSTNIEDLHVSQAVNR

SEQ ID NO: 31728 - protein, 174 aa, Homo sapiens; identical to SEQ ID NO: 31719
  Payload ID: 6210
  Gene Symbol: FOPNL
  Gene Name: FGFR1OP N-terminal like
  Uniprot ID: Q96NB1
  ENSP ID: ENSP00000481290

SEQ ID NO: 31729 - protein, 124 aa, Homo sapiens; identical to SEQ ID NO: 31725
  Payload ID: 6210
  Gene Symbol: FOPNL
  Gene Name: FGFR1OP N-terminal like
  ENSP ID: ENSP00000487858

SEQ ID NO: 31730 - protein, 198 aa, Homo sapiens; identical to SEQ ID NO: 31727
  Payload ID: 6210
  Gene Symbol: FOPNL
  Gene Name: FGFR1OP N-terminal like
  ENSP ID: ENSP00000488051

SEQ ID NO: 31731 - protein, 128 aa, Homo sapiens; identical to SEQ ID NO: 31726
  Payload ID: 6210
  Gene Symbol: FOPNL
  Gene Name: FGFR1OP N-terminal like
  ENSP ID: ENSP00000488284

SEQ ID NO: 31732 - protein, 100 aa, Homo sapiens; identical to SEQ ID NO: 31724
  Payload ID: 6210
  Gene Symbol: FOPNL
  Gene Name: FGFR1OP N-terminal like
  Uniprot ID: Q96NB1
  ENSP ID: ENSP00000488488

SEQ ID NO: 31733 - protein, 104 aa, Homo sapiens; identical to SEQ ID NO: 31723
  Payload ID: 6210
  Gene Symbol: FOPNL
  Gene Name: FGFR1OP N-terminal like
  ENSP ID: ENSP00000488499

SEQ ID NO: 31734 - protein, 108 aa, Homo sapiens; identical to SEQ ID NO: 31722
  Payload ID: 6210
  Gene Symbol: FOPNL
  Gene Name: FGFR1OP N-terminal like
  ENSP ID: ENSP00000488552

SEQ ID NO: 31735 - protein, 82 aa, Homo sapiens; identical to SEQ ID NO: 31720
  Payload ID: 6210
  Gene Symbol: FOPNL
  Gene Name: FGFR1OP N-terminal like
  ENSP ID: ENSP00000488765

SEQ ID NO: 31736 - protein, 124 aa, Homo sapiens; identical to SEQ ID NO: 31721
  Payload ID: 6210
  Gene Symbol: FOPNL
  Gene Name: FGFR1OP N-terminal like
  ENSP ID: ENSP00000488883

SEQ ID NO: 31737 - protein, 551 aa, Homo sapiens
  Payload ID: 6211
  Gene Symbol: FGGY
  Gene Name: FGGY carbohydrate kinase domain containing
  Uniprot ID: Q96C11
  ENSP ID: ENSP00000305922
MSGGEQKPERYYVGVDVGTGSVRAALVDQSGVLLAFADQPIKNWEPQFNHHEQSSEDIWAACCVVTKKVVQGIDLNQIRGLGFDATCSLVVLDKQFHPLPVNQEGDSHRNVIMWLDHRAVSQVNRINETKHSVLQYVGGVMSVEMQAPKLLWLKENLREICWDKAGHFFDLPDFLSWKATGVTARSLCSLVCKWTYSAEKGWDDSFWKMIGLEDFVADNYSKIGNQVLPPGASLGNGLTPEAARDLGLLPGIAVAASLIDAHAGGLGVIGADVRGHGLICEGQPVTSRLAVICGTSSCHMGISKDPIFVPGVWGPYFSAMVPGFWLNEGGQSVTGKLIDHMVQGHAAFPELQVKATARCQSIYAYLNSHLDLIKKAQPVGFLTVDLHVWPDFHGNRSPLADLTLKGMVTGLKLSQDLDDLAILYLATVQAIALGTRFIIEAMEAAGHSISTLFLCGGLSKNPLFVQMHADITGMPVVLSQEVESVLVGAAVLGACASGDFASVQEAMAKMSKVGKVVFPRLQDKKYYDKKYQVFLKLVEHQKEYLAIMNDD

SEQ ID NO: 31738 - protein, 252 aa, Homo sapiens
  Payload ID: 6211
  Gene Symbol: FGGY
  Gene Name: FGGY carbohydrate kinase domain containing
  Uniprot ID: Q96C11
  ENSP ID: ENSP00000360254
MGISKDPIFVPGVWGPYFSAMVPGFWLNEGGQSVTGKLIDHMVQGHAAFPELQVKATARCQSIYAYLNSHLDLIKKAQPVGFLTVDLHVWPDFHGNRSPLADLTLKGMVTGLKLSQDLDDLAILYLATVQAIALGTRFIIEAMEAAGHSISTLFLCGGLSKNPLFVQMHADITGMPVVLSQEVESVLVGAAVLGACASGDFASVQEAMAKMSKVGKVVFPRLQDKKYYDKKYQVFLKLVEHQKEYLAIMNDD

SEQ ID NO: 31739 - protein, 463 aa, Homo sapiens
  Payload ID: 6211
  Gene Symbol: FGGY
  Gene Name: FGGY carbohydrate kinase domain containing
  Uniprot ID: Q96C11
  ENSP ID: ENSP00000360256
MSGGEQKPERYYVGVDVGTGSVRAALVDQSGVLLAFADQPIKNWEPQFNHHEQSSEDIWAACCVVTKNLREICWDKAGHFFDLPDFLSWKATGVTARSLCSLVCKWTYSAEKGWDDSFWKMIGLEDFVADNYSKIGNQVLPPGASLGNGLTPEAARDLGLLPGIAVAASLIDAHAGGLGVIGADVRGHGLICEGQPVTSRLAVICGTSSCHMGISKDPIFVPGVWGPYFSAMVPGFWLNEGGQSVTGKLIDHMVQGHAAFPELQVKATARCQSIYAYLNSHLDLIKKAQPVGFLTVDLHVWPDFHGNRSPLADLTLKGMVTGLKLSQDLDDLAILYLATVQAIALGTRFIIEAMEAAGHSISTLFLCGGLSKNPLFVQMHADITGMPVVLSQEVESVLVGAAVLGACASGDFASVQEAMAKMSKVGKVVFPRLQDKKYYDKKYQVFLKLVEHQKEYLAIMNDD

SEQ ID NO: 31740 - protein, 575 aa, Homo sapiens
  Payload ID: 6211
  Gene Symbol: FGGY
  Gene Name: FGGY carbohydrate kinase domain containing
  Uniprot ID: Q96C11
  ENSP ID: ENSP00000360262
MSGGEQKPERYYVGVDVGTGSVRAALVDQSGVLLAFADQPIKNWEPQFNHHEQSSEDIWAACCVVTKKVVQGIDLNQIRGLGFDATCSLVVLDKQFHPLPVNQEGDSHRNVIMWLDHRAVSQVNRINETKHSVLQYVGGVMSVEMQAPKLLWLKENLREICWDKAGHFFDLPDFLSWKATGVTARSLCSLVCKWTYSAEKGWDDSFWKMIGLEDFVADNYSKIGNQVLPPGASLGNGLTPEAARDLGLLPGIAVAASLIDAHAGGLGVIGADVRGHGLICEGQPVTSRLAVICGTSSCHMGISKDPIFVPGVWGPYFSAMVPGFWLNEGGQSVTGKLIDHMVQGHAAFPELQVKATARCQSIYAYLNSHLDLIKKAQPVGFLTVDLHVWPDFHGNRSPLADLTLKGMRTTGYLYIPALAALHSPSSLLSPQVTGLKLSQDLDDLAILYLATVQAIALGTRFIIEAMEAAGHSISTLFLCGGLSKNPLFVQMHADITGMPVVLSQEVESVLVGAAVLGACASGDFASVQEAMAKMSKVGKVVFPRLQDKKYYDKKYQVFLKLVEHQKEYLAIMNDD

SEQ ID NO: 31741 - protein, 507 aa, Homo sapiens
  Payload ID: 6211
  Gene Symbol: FGGY
  Gene Name: FGGY carbohydrate kinase domain containing
  ENSP ID: ENSP00000403425
MSGGEQKPERYYVGVDVGTGSVRAALVDQSGVLLAFADQPIKNWEPQFNHHEQSSEDIWAACCVVTKKVVQGIDLNQIRGLGFDATCSLVVLDKQFHPLPVNQEGDSHRNVIMWLDHRAVSQVNRINETKHSVLQYVGGVMSVEMQAPKLLWLKENLREICWDKAGHFFDLPDFLSWKATGVTARSLCSLVCKWTYSAEKGWDDSFWKMIGLEDFVADNYSKIGNQVLPPGASLGNGLTPEAARDLGLLPGIAVAASLIDAHAGGLGVIGADVRGHGLICEGQPVTSRLAVICGTSSCHMGISKDPIFVPGVWGPYFSAMVPGFWLNEGGQSVTGKLIDHMVQGHAAFPELQVKATARCQSIYAYLNSHLDLIKKAQPVGFLTVDLHVWPDFHGNRSPLADLTLKGMVTGLKLSQDLDDLAILYLATVQAIALGTRFIIEAMEAAGHSISTLFLCGGLSKNPLFVQMHADITGMPVVLSQEVESVLVGAAVLGACASGDFASVQWGK

SEQ ID NO: 31742 - protein, 184 aa, Homo sapiens
  Payload ID: 6211
  Gene Symbol: FGGY
  Gene Name: FGGY carbohydrate kinase domain containing
  ENSP ID: ENSP00000406607
MSGGEQKPERYYVGVDVGTGSVRAALVDQSGVLLAFADQPIKNWEPQFNHHEQSSEDIWAACCVVTKKVVQGIDLNQIRGLGFDATCSLVVLDKQFHPLPVNQEGDSHRNVIMWLDHRAVSQVNRINETKHSVLQYVGGVMSVEMQAPKLLWLKENLREICWDKAGHFFDLPDFLSWKATGVTA

SEQ ID NO: 31743 - protein, 54 aa, Homo sapiens
  Payload ID: 6211
  Gene Symbol: FGGY
  Gene Name: FGGY carbohydrate kinase domain containing
  ENSP ID: ENSP00000463260
MSGGEQKPERYYVGVDVGTGSVRAALVDQSGVLLAFADQPIKNWEPQFNHHEQS

SEQ ID NO: 31744 - protein, 249 aa, Homo sapiens
  Payload ID: 6211
  Gene Symbol: FGGY
  Gene Name: FGGY carbohydrate kinase domain containing
  ENSP ID: ENSP00000489030
MWLDHRAVSQVNRINETKHSVLQYVGGVMSVEMQAPKLLWLKENLREICWDKAGHFFDLPDFLSWKATGVTARSLCSLVCKWTYSAEKGWDDSFWKMIGLEDFVADNYSKIGNQVLPPGASLGNGLTPEAARDLGLLPGIAVAASLIDAHAGGLGVIGADVRGHGLICEGQPVTSRLAVICGTSSCHMGISKDPIFVPGVWGPYFSAMVPGFWLNEGGQSVTGKLIDHMVQGHAAFPELQVKATARSPD

SEQ ID NO: 31745 - protein, 112 aa, Homo sapiens
  Payload ID: 6211
  Gene Symbol: FGGY
  Gene Name: FGGY carbohydrate kinase domain containing
  ENSP ID: ENSP00000489146
MSGGEQKPERYYVGVDVGTGSVRAALVDQSGVLLAFADQPIKNWEPQFNHHEQSSEDIWAACCVVTKKVVQGIDLNQIRGLGFDATCSLVVLDKQFHPLPVNQEELERDLLG

SEQ ID NO: 31746 - protein, 128 aa, Homo sapiens
  Payload ID: 6211
  Gene Symbol: FGGY
  Gene Name: FGGY carbohydrate kinase domain containing
  ENSP ID: ENSP00000489345
MSGGEQKPERYYVGVDVGTGSVRAALVDQSGVLLAFADQPIKNWEPQFNHHEQSSEDIWAACCVVTKKVVQGIDLNQIRGLGFDATCSLVVLDKQFHPLPVNQEGLSAPWCVSGHIQQRKAGTTVSGK

SEQ ID NO: 31747 - protein, 463 aa, Homo sapiens; identical to SEQ ID NO: 31739
  Payload ID: 6211
  Gene Symbol: FGGY
  Gene Name: FGGY carbohydrate kinase domain containing
  ENSP ID: ENSP00000489417

SEQ ID NO: 31748 - protein, 514 aa, Homo sapiens
  Payload ID: 6211
  Gene Symbol: FGGY
  Gene Name: FGGY carbohydrate kinase domain containing
  ENSP ID: ENSP00000489446
MSGGEQKPERYYVGVDVGTGSVRAALVDQSGVLLAFADQPIKNWEPQFNHHEQSSEDIWAACCVVTKKVVQGIDLNQIRGLGFDATCSLVVLDKQFHPLPVNQEGDSHRNVIMWLDHRAVSQVNRINETKHSVLQYVGGVMSVEMQAPKLLWLKENLREICWDKAGHFFDLPDFLSWKATGVTARSLCSLVCKWTYSAEKGWDDSFWKMIGLEDFVADNYSKIGNQVLPPGASLGNGLTPEAARDLGLLPGIAVAASLIDAHAGGLGVIGADVRGHGLICEGQPVTSRLAVICGTSSCHMGISKDPIFVPGVWGPYFSAMVPGFWLNEGGQSVTGKLIDHMVQGHAAFPELQVKATARCQSIYAYLNSHLDLIKKAQPVGFLTVDLHVWPDFHGNRSPLADLTLKGMVTGLKLSQDLDDLAILYLATVQAIALGTRFIIEAMEAAGHSISTLFLCGGLSKNPLFVQMHADITGMPVVLSQEVESVLVGAAVLGACASGDFASVQIRKTKHRAIK

SEQ ID NO: 31749 - protein, 153 aa, Homo sapiens
  Payload ID: 6211
  Gene Symbol: FGGY
  Gene Name: FGGY carbohydrate kinase domain containing
  ENSP ID: ENSP00000489549
MIGLEDFVADNYSKIGNQVLPPGASLGNGLTPEAARDLGLLPGIAVAASLIDAHAGGLGVIGADVRGHGLICEGQPVTSRLAVICGTSSCHMGISKDPIFVPGVWGPYFSAMVPGFWLNEGGQSVTGKLIDHMVQGHAAFPELQVKATARSPD

SEQ ID NO: 31750 - protein, 529 aa, Homo sapiens
  Payload ID: 6212
  Gene Symbol: FGR
  Gene Name: FGR proto-oncogene, Src family tyrosine kinase
  Uniprot ID: P09769
  ENSP ID: ENSP00000363115
MGCVFCKKLEPVATAKEDAGLEGDFRSYGAADHYGPDPTKARPASSFAHIPNYSNFSSQAINPGFLDSGTIRGVSGIGVTLFIALYDYEARTEDDLTFTKGEKFHILNNTEGDWWEARSLSSGKTGCIPSNYVAPVDSIQAEEWYFGKIGRKDAERQLLSPGNPQGAFLIRESETTKGAYSLSIRDWDQTRGDHVKHYKIRKLDMGGYYITTRVQFNSVQELVQHYMEVNDGLCNLLIAPCTIMKPQTLGLAKDAWEISRSSITLERRLGTGCFGDVWLGTWNGSTKVAVKTLKPGTMSPKAFLEEAQVMKLLRHDKLVQLYAVVSEEPIYIVTEFMCHGSLLDFLKNPEGQDLRLPQLVDMAAQVAEGMAYMERMNYIHRDLRAANILVGERLACKIADFGLARLIKDDEYNPCQGSKFPIKWTAPEAALFGRFTIKSDVWSFGILLTELITKGRIPYPGMNKREVLEQVEQGYHMPCPPGCPASLYEAMEQTWRLDPEERPTFEYLQSFLEDYFTSAEPQYQPGDQT

SEQ ID NO: 31751 - protein, 529 aa, Homo sapiens; identical to SEQ ID NO: 31750
  Payload ID: 6212
  Gene Symbol: FGR
  Gene Name: FGR proto-oncogene, Src family tyrosine kinase
  Uniprot ID: P09769
  ENSP ID: ENSP00000363116

SEQ ID NO: 31752 - protein, 529 aa, Homo sapiens; identical to SEQ ID NO: 31750
  Payload ID: 6212
  Gene Symbol: FGR
  Gene Name: FGR proto-oncogene, Src family tyrosine kinase
  Uniprot ID: P09769
  ENSP ID: ENSP00000363117

SEQ ID NO: 31753 - protein, 529 aa, Homo sapiens; identical to SEQ ID NO: 31750
  Payload ID: 6212
  Gene Symbol: FGR
  Gene Name: FGR proto-oncogene, Src family tyrosine kinase
  Uniprot ID: P09769
  ENSP ID: ENSP00000382126

SEQ ID NO: 31754 - protein, 312 aa, Homo sapiens
  Payload ID: 6212
  Gene Symbol: FGR
  Gene Name: FGR proto-oncogene, Src family tyrosine kinase
  ENSP ID: ENSP00000407670
MGCVFCKKLEPVATAKEDAGLEGDFRSYGAADHYGPDPTKARPASSFAHIPNYSNFSSQAINPGFLDSGTIRGVSGIGVTLFIALYDYEARTEDDLTFTKGEKFHILNNTEGDWWEARSLSSGKTGCIPSNYVAPVDSIQAEEWYFGKIGRKDAERQLLSPGNPQGAFLIRESETTKGAYSLSIRDWDQTRGDHVKHYKIRKLDMGGYYITTRVQFNSVQELVQHYMEVNDGLCNLLIAPCTIMKPQTLGLAKDAWEISRSSITLERRLGTGCFGDVWLGTWNGSTKVAVKTLKPGTMSPKAFLEEAQVMKL

SEQ ID NO: 31755 - protein, 1143 aa, Homo sapiens
  Payload ID: 6213
  Gene Symbol: FHDC1
  Gene Name: FH2 domain containing 1
  Uniprot ID: Q9C0D6
  ENSP ID: ENSP00000260008
MHVMNCVSLVSDKENGNIATAPGFMIGQTPPPAPPPPPPPPPPSPPCSCSREECPSSPPPPPPPPLPGEPPIPPPPPGLPPTTHMNGYSHLGKKKRMRSFFWKTIPEEQVRGKTNIWTLAARQEHHYQIDTKTIEELFGQQEDTTKSSLPRRGRTLNSSFREAREEITILDAKRSMNIGIFLKQFKKSPRSIVEDIHQGKSEHYGSETLREFLKFLPESEEVKKLKAFSGDVSKLSLADSFLYGLIQVPNYSLRIEAMVLKKEFLPSCSSLYTDITVLRTAIKELMSCEELHSILHLVLQAGNIMNAGGYAGNAVGFKLSSLLKLADTKANKPGMNLLHFVAQEAQKKDTILLNFSEKLHHVQKTARLSLENTEAELHLLFVRTKSLKENIQRDGELCQQMEDFLQFAIEKLRELECWKQELQDEAYTLIDFFCEDKKTMKLDECFQIFRDFCTKFNKAVKDNHDREAQELRQLQRLKEQEQKQRSWATGELGAFGRSSSENDVELLTKKGAEGLLPFLHPRPISPSSPSYRPPNTRRSRLSLGPSADRELLTFLESSTGSPEEPNKFHSLPRSSPRQARPTIACLEPAEVRHQDSSFAHKPQASGGQEEAPNPPSAQAHQLAAAQPENHASAFPRARRQGVSVLRKRYSEPVSLGSAQSPPLSPLALGIKEHELVTGLAQFNLQGSQGMEETSQLTLSDFSPMELESVGHRGPQSLSASSSSLTPMGRDALGSLSPALEDGKAAPDEPGSAALGSVGSSDPENKDPRPLFCISDTTDCSLTLDCSEGTDSRPRGGDPEEGGEGDGSMSSGVGEMGDSQVSSNPTSSPPGEAPAPVSVDSEPSCKGGLPRDKPTKRKDVVAPKRGSLKEASPGASKPGSARRSQGAVAKSVRTLTASENESMRKVMPITKSSRGAGWRRPELSSRGPSQNPPSSTDTVWSRQNSVRRASTGAEEQRLPRGSSGSSSTRPGRDVPLQPRGSFKKPSAKPLRNLPRQKPEENKTCRAHSEGPESPKEEPKTPSVPSVPHELPRVPSFARNTVASSSRSMRTDLPPVAKAPGITRTVSQRQLRVKGDPEDAAPKDSSTLRRASSARAPKKRPESAEGPSANTEAPLKARGAGERASLRRKDSSRTTLGRILNPLRK

SEQ ID NO: 31756 - protein, 1143 aa, Homo sapiens; identical to SEQ ID NO: 31755
  Payload ID: 6213
  Gene Symbol: FHDC1
  Gene Name: FH2 domain containing 1
  Uniprot ID: Q9C0D6
  ENSP ID: ENSP00000427567

SEQ ID NO: 31757 - protein, 321 aa, Homo sapiens
  Payload ID: 6214
  Gene Symbol: FBL
  Gene Name: fibrillarin
  Uniprot ID: P22087
  ENSP ID: ENSP00000221801
MKPGFSPRGGGFGGRGGFGDRGGRGGRGGFGGGRGRGGGFRGRGRGGGGGGGGGGGGGRGGGGFHSGGNRGRGRGGKRGNQSGKNVMVEPHRHEGVFICRGKEDALVTKNLVPGESVYGEKRVSISEGDDKIEYRAWNPFRSKLAAAILGGVDQIHIKPGAKVLYLGAASGTTVSHVSDIVGPDGLVYAVEFSHRSGRDLINLAKKRTNIIPVIEDARHPHKYRMLIAMVDVIFADVAQPDQTRIVALNAHTFLRNGGHFVISIKANCIDSTASAEAVFASEVKKMQQENMKPQEQLTLEPYERDHAVVVGVYRPPPKVKN

SEQ ID NO: 31758 - protein, 40 aa, Homo sapiens
  Payload ID: 6214
  Gene Symbol: FBL
  Gene Name: fibrillarin
  ENSP ID: ENSP00000469072
MKPGGGFHSGGNRGRGRGGKRGNQSGKNVMVEPHRHEGRR

SEQ ID NO: 31759 - protein, 244 aa, Homo sapiens
  Payload ID: 6214
  Gene Symbol: FBL
  Gene Name: fibrillarin
  ENSP ID: ENSP00000469249
GRGGFGGGRGRGGGFRGNQSGKNVMVEPHRHEGVFICRGKEDALVTKNLVPGESVYGEKRVSISEGDDKIEYRAWNPFRSKLAAAILGGVDQIHIKPGAKVLYLGAASGTTVSHVSDIVGPDGLVYAVEFSHRSGRDLINLAKKRTNIIPVIEDARHPHKYRMLIAMVDVIFADVAQPDQTRIVALNAHTFLRNGGHFVISIKANCIDSTASAEAVFASEVKKMQQENMKPQEQLTLEPYERDH

SEQ ID NO: 31760 - protein, 228 aa, Homo sapiens
  Payload ID: 6214
  Gene Symbol: FBL
  Gene Name: fibrillarin
  ENSP ID: ENSP00000471350
MKPGFSPRGGGFGGRGGFGDRGGRGGFHSGGNRGRGRGGKRGNQSGKNVMVEPHRHEGVFICRGKEDALVTKNLVPGESVYGEKRVSISEGDDKIEYRAWNPFRSKLAAAILGGVDQIHIKPGAKVLYLGAASGTTVSHVSDIVGPDGLVYAVEFSHRSGRDLINLAKKRTNIIPVIEDARHPHKYRMLIAMVDVIFADVAQPDQTRIVALNAHTFLRNGGHFVISIK

SEQ ID NO: 31761 - protein, 178 aa, Homo sapiens
  Payload ID: 6214
  Gene Symbol: FBL
  Gene Name: fibrillarin
  ENSP ID: ENSP00000471867
MKPGFSPRGGGFGGRGGFGDRGGRGGFRGRGRGGGGGGGGGGGGGRGGGGFHSGGNRGRGRGGKRGNQSGKNVMVEPHRHEGVFICRGKEDALVTKNLVPGESVYGEKRVSISEGDDKIEYRAWNPFRSKLAAAILGGVDQIHIKPGAKVLYLGAASGTTVSHVSDIVGPDGLVYAVE

SEQ ID NO: 31762 - protein, 229 aa, Homo sapiens
  Payload ID: 6214
  Gene Symbol: FBL
  Gene Name: fibrillarin
  ENSP ID: ENSP00000472419
VMVEPHRHEGVFICRGKEDALVTKNLVPGESVYGEKRVSISEGDDKIEYRAWNPFRSKLAAAILGGVDQIHIKPGAKVLYLGAASGTTVSHVSDIVGPDGLVYAVEFSHRSGRDLINLAKKRTNIIPVIEDARHPHKYRMLIAMVDVIFADVAQPDQTRIVALNAHTFLRNGGHFVISIKANCIDSTASAEAVFASEVKKMQQENMKPQEQLTLEPYERDHAVVVGVYR

SEQ ID NO: 31763 - protein, 182 aa, Homo sapiens
  Payload ID: 6214
  Gene Symbol: FBL
  Gene Name: fibrillarin
  ENSP ID: ENSP00000472433
MKPGFSPRGGGFGGRGGFGDRGGRGGRGGFGGGRGRGGGFRGRGRGGGGGGGGGGGGGRGGGFHSGGNRGRGRGGKRGNQSGKNVMVEPHRHEGVFICRGKEDALVTKNLVPGESVYGEKRVSISEGDDKIEYRAWNPFRSKLAAAILGGVDQIHIKPGAKVLYLGAASGTTVSHVSDIVGP

SEQ ID NO: 31764 - protein, 273 aa, Homo sapiens
  Payload ID: 6214
  Gene Symbol: FBL
  Gene Name: fibrillarin
  ENSP ID: ENSP00000472726
MKPGFSPRGGGFGGRGGFGDRGGRGGRGGFGGGRGRGGGFHSGGNRGRGRGGKRGNQSGKNVMVEPHRHEGVFICRGKEDALVTKNLVPGESVYGEKRVSISEGDDKIEYRAWNPFRSKLAAAILGGVDQIHIKPGAKVLYLGAASGTTVSHVSDIVGPDGLVYAVEFSHRSGRDLINLAKKRTNIIPVIEDARHPHKYRMLIAMVDVIFADVAQPDQTRIVALNAHTFLRNGGHFVISIKANCIDSTASAEAVFASEVKKMQQENMKPQEQL

SEQ ID NO: 31765 - protein, 157 aa, Homo sapiens
  Payload ID: 6214
  Gene Symbol: FBL
  Gene Name: fibrillarin
  ENSP ID: ENSP00000472805
MKPGFSPRGGGFGGRGGFGDRGGRGGRGGFGGGRGRGGGFRGRGRGGGGGFHSGGNRGRGRGGKRGNQSGKNVMVEPHRHEGVFICRGKEDALVTKNLVPGESVYGEKRVSISEGDDKIEYRAWNPFRSKLAAAILGGVDQIHIKPGAKVLYLGAAS

SEQ ID NO: 31766 - protein, 244 aa, Homo sapiens; identical to SEQ ID NO: 31759
  Payload ID: 6214
  Gene Symbol: FBL
  Gene Name: fibrillarin
  ENSP ID: ENSP00000485785

SEQ ID NO: 31767 - protein, 157 aa, Homo sapiens; identical to SEQ ID NO: 31765
  Payload ID: 6214
  Gene Symbol: FBL
  Gene Name: fibrillarin
  ENSP ID: ENSP00000485834

SEQ ID NO: 31768 - protein, 182 aa, Homo sapiens; identical to SEQ ID NO: 31763
  Payload ID: 6214
  Gene Symbol: FBL
  Gene Name: fibrillarin
  ENSP ID: ENSP00000485963

SEQ ID NO: 31769 - protein, 229 aa, Homo sapiens; identical to SEQ ID NO: 31762
  Payload ID: 6214
  Gene Symbol: FBL
  Gene Name: fibrillarin
  ENSP ID: ENSP00000486271

SEQ ID NO: 31770 - protein, 37 aa, Homo sapiens
  Payload ID: 6214
  Gene Symbol: FBL
  Gene Name: fibrillarin
  ENSP ID: ENSP00000486564
GGGFHSGGNRGRGRGGKRGNQSGKNVMVEPHRHEGDR

SEQ ID NO: 31771 - protein, 37 aa, Homo sapiens; identical to SEQ ID NO: 31770
  Payload ID: 6214
  Gene Symbol: FBL
  Gene Name: fibrillarin
  ENSP ID: ENSP00000486736

SEQ ID NO: 31772 - protein, 178 aa, Homo sapiens; identical to SEQ ID NO: 31761
  Payload ID: 6214
  Gene Symbol: FBL
  Gene Name: fibrillarin
  ENSP ID: ENSP00000486882

SEQ ID NO: 31773 - protein, 228 aa, Homo sapiens; identical to SEQ ID NO: 31760
  Payload ID: 6214
  Gene Symbol: FBL
  Gene Name: fibrillarin
  ENSP ID: ENSP00000487026

SEQ ID NO: 31774 - protein, 40 aa, Homo sapiens; identical to SEQ ID NO: 31758
  Payload ID: 6214
  Gene Symbol: FBL
  Gene Name: fibrillarin
  ENSP ID: ENSP00000487091

SEQ ID NO: 31775 - protein, 273 aa, Homo sapiens; identical to SEQ ID NO: 31764
  Payload ID: 6214
  Gene Symbol: FBL
  Gene Name: fibrillarin
  ENSP ID: ENSP00000487170

SEQ ID NO: 31776 - protein, 321 aa, Homo sapiens; identical to SEQ ID NO: 31757
  Payload ID: 6214
  Gene Symbol: FBL
  Gene Name: fibrillarin
  Uniprot ID: P22087
  ENSP ID: ENSP00000487390

SEQ ID NO: 31777 - protein, 334 aa, Homo sapiens
  Payload ID: 6215
  Gene Symbol: FBLL1
  Gene Name: fibrillarin-like 1
  Uniprot ID: A6NHQ2
  ENSP ID: ENSP00000473383
MKSAASSRGGGGGGRGGGGWGSWGGGRGGGGGAGKGGGGDGGGQGGKGGFGARARGFGGGGRGRGRGGGDGKDRGGGGQRRGGVAKSKSRRRKGAMVVSVEPHRHEGVFIYRGAEDALVTLNMVPGQSVYGERRVTVTEGGVKQEYRTWNPFRSKLAAAILGGVDQIHIKPKSKVLYLGAASGTTVSHVSDIIGPDGLVYAVEFSHRAGRDLVNVAKKRTNIIPVLEDARHPLKYRMLIGMVDVIFADVAQPDQSRIVALNAHTFLRNGGHFLISIKANCIDSTASAEAVFASEVRKLQQENLKPQEQLTLEPYERDHAVVVGVYRPLPKSSSK

SEQ ID NO: 31778 - protein, 2871 aa, Homo sapiens
  Payload ID: 6216
  Gene Symbol: FBN1
  Gene Name: fibrillin 1
  Uniprot ID: P35555
  ENSP ID: ENSP00000325527
MRRGRLLEIALGFTVLLASYTSHGADANLEAGNVKETRASRAKRRGGGGHDALKGPNVCGSRYNAYCCPGWKTLPGGNQCIVPICRHSCGDGFCSRPNMCTCPSGQIAPSCGSRSIQHCNIRCMNGGSCSDDHCLCQKGYIGTHCGQPVCESGCLNGGRCVAPNRCACTYGFTGPQCERDYRTGPCFTVISNQMCQGQLSGIVCTKTLCCATVGRAWGHPCEMCPAQPHPCRRGFIPNIRTGACQDVDECQAIPGLCQGGNCINTVGSFECKCPAGHKLNEVSQKCEDIDECSTIPGICEGGECTNTVSSYFCKCPPGFYTSPDGTRCIDVRPGYCYTALTNGRCSNQLPQSITKMQCCCDAGRCWSPGVTVAPEMCPIRATEDFNKLCSVPMVIPGRPEYPPPPLGPIPPVLPVPPGFPPGPQIPVPRPPVEYLYPSREPPRVLPVNVTDYCQLVRYLCQNGRCIPTPGSYRCECNKGFQLDLRGECIDVDECEKNPCAGGECINNQGSYTCQCRAGYQSTLTRTECRDIDECLQNGRICNNGRCINTDGSFHCVCNAGFHVTRDGKNCEDMDECSIRNMCLNGMCINEDGSFKCICKPGFQLASDGRYCKDINECETPGICMNGRCVNTDGSYRCECFPGLAVGLDGRVCVDTHMRSTCYGGYKRGQCIKPLFGAVTKSECCCASTEYAFGEPCQPCPAQNSAEYQALCSSGPGMTSAGSDINECALDPDICPNGICENLRGTYKCICNSGYEVDSTGKNCVDINECVLNSLLCDNGQCRNTPGSFVCTCPKGFIYKPDLKTCEDIDECESSPCINGVCKNSPGSFICECSSESTLDPTKTICIETIKGTCWQTVIDGRCEININGATLKSQCCSSLGAAWGSPCTLCQVDPICGKGYSRIKGTQCEDIDECEVFPGVCKNGLCVNTRGSFKCQCPSGMTLDATGRICLDIRLETCFLRYEDEECTLPIAGRHRMDACCCSVGAAWGTEECEECPMRNTPEYEELCPRGPGFATKEITNGKPFFKDINECKMIPSLCTHGKCRNTIGSFKCRCDSGFALDSEERNCTDIDECRISPDLCGRGQCVNTPGDFECKCDEGYESGFMMMKNCMDIDECQRDPLLCRGGVCHNTEGSYRCECPPGHQLSPNISACIDINECELSAHLCPNGRCVNLIGKYQCACNPGYHSTPDRLFCVDIDECSIMNGGCETFCTNSEGSYECSCQPGFALMPDQRSCTDIDECEDNPNICDGGQCTNIPGEYRCLCYDGFMASEDMKTCVDVNECDLNPNICLSGTCENTKGSFICHCDMGYSGKKGKTGCTDINECEIGAHNCGKHAVCTNTAGSFKCSCSPGWIGDGIKCTDLDECSNGTHMCSQHADCKNTMGSYRCLCKEGYTGDGFTCTDLDECSENLNLCGNGQCLNAPGGYRCECDMGFVPSADGKACEDIDECSLPNICVFGTCHNLPGLFRCECEIGYELDRSGGNCTDVNECLDPTTCISGNCVNTPGSYICDCPPDFELNPTRVGCVDTRSGNCYLDIRPRGDNGDTACSNEIGVGVSKASCCCSLGKAWGTPCEMCPAVNTSEYKILCPGGEGFRPNPITVILEDIDECQELPGLCQGGKCINTFGSFQCRCPTGYYLNEDTRVCDDVNECETPGICGPGTCYNTVGNYTCICPPDYMQVNGGNNCMDMRRSLCYRNYYADNQTCDGELLFNMTKKMCCCSYNIGRAWNKPCEQCPIPSTDEFATLCGSQRPGFVIDIYTGLPVDIDECREIPGVCENGVCINMVGSFRCECPVGFFYNDKLLVCEDIDECQNGPVCQRNAECINTAGSYRCDCKPGYRFTSTGQCNDRNECQEIPNICSHGQCIDTVGSFYCLCHTGFKTNDDQTMCLDINECERDACGNGTCRNTIGSFNCRCNHGFILSHNNDCIDVDECASGNGNLCRNGQCINTVGSFQCQCNEGYEVAPDGRTCVDINECLLEPRKCAPGTCQNLDGSYRCICPPGYSLQNEKCEDIDECVEEPEICALGTCSNTEGSFKCLCPEGFSLSSSGRRCQDLRMSYCYAKFEGGKCSSPKSRNHSKQECCCALKGEGWGDPCELCPTEPDEAFRQICPYGSGIIVGPDDSAVDMDECKEPDVCKHGQCINTDGSYRCECPFGYILAGNECVDTDECSVGNPCGNGTCKNVIGGFECTCEEGFEPGPMMTCEDINECAQNPLLCAFRCVNTYGSYECKCPVGYVLREDRRMCKDEDECEEGKHDCTEKQMECKNLIGTYMCICGPGYQRRPDGEGCVDENECQTKPGICENGRCLNTRGSYTCECNDGFTASPNQDECLDNREGYCFTEVLQNMCQIGSSNRNPVTKSECCCDGGRGWGPHCEICPFQGTVAFKKLCPHGRGFMTNGADIDECKVIHDVCRNGECVNDRGSYHCICKTGYTPDITGTSCVDLNECNQAPKPCNFICKNTEGSYQCSCPKGYILQEDGRSCKDLDECATKQHNCQFLCVNTIGGFTCKCPPGFTQHHTSCIDNNECTSDINLCGSKGICQNTPGSFTCECQRGFSLDQTGSSCEDVDECEGNHRCQHGCQNIIGGYRCSCPQGYLQHYQWNQCVDENECLSAHICGGASCHNTLGSYKCMCPAGFQYEQFSGGCQDINECGSAQAPCSYGCSNTEGGYLCGCPPGYFRIGQGHCVSGMGMGRGNPEPPVSGEMDDNSLSPEACYECKINGYPKRGRKRRSTNETDASNIEDQSETEANVSLASWDVEKTAIFAFNISHVSNKVRILELLPALTTLTNHNRYLIESGNEDGFFKINQKEGISYLHFTKKKPVAGTYSLQISSTPLYKKKELNQLEDKYDKDYLSGELGDNLKMKIQVLLH

SEQ ID NO: 31779 - protein, 302 aa, Homo sapiens
  Payload ID: 6216
  Gene Symbol: FBN1
  Gene Name: fibrillin 1
  ENSP ID: ENSP00000440294
MRRGRLLEIALGFTVLLASYTSHGADANLEAGNVKETRASRAKRRGGGGHDALKGPNVCGSRYNAYCCPGWKTLPGGNQCIVPICRHSCGDGFCSRPNMCTCPSGQIAPSCGSRSIQHCNIRCMNGGSCSDDHCLCQKGYIGTHCGQPVCESGCLNGGRCVAPNRCACTYGFTGPQCERDYRTGPCFTVISNQMCQGQLSGIVCTKTLCCATTSMNVKLEHTTVANMLYVPIQQEASNVAAVPGGLEMALSALIWTNVPMEPICAASMQTARIPWDLTAVCARKDTQVMASLVQTLMSALRT

SEQ ID NO: 31780 - protein, 55 aa, Homo sapiens
  Payload ID: 6216
  Gene Symbol: FBN1
  Gene Name: fibrillin 1
  ENSP ID: ENSP00000453901
MRRGRLLEIALGFTVLLASYTSHGADANLEAGNVKETRASRAKRRGGGGHDALKG

SEQ ID NO: 31781 - protein, 853 aa, Homo sapiens
  Payload ID: 6216
  Gene Symbol: FBN1
  Gene Name: fibrillin 1
  ENSP ID: ENSP00000453958
  MOD_RES (1)..(1): Any amino acid
XLGKAWGTPCEMCPAVNTSEYKILCPGGEGFRPNPITVILEDIDECQELPGLCQGGKCINTFGSFQCRCPTGYYLNEDTRVCDDVNECETPGICGPGTCYNTVGNYTCICPPDYMQVNGGNNCMDMRRSLCYRNYYADNQTCDGELLFNMTKKMCCCSYNIGRAWNKPCEQCPIPSTDEFATLCGSQRPGFVIDIYTGLPVDIDECREIPGVCENGVCINMVGSFRCECPVGFFYNDKLLVCEDIDECQNGPVCQRNAECINTAGSYRCDCKPGYRFTSTGQCNDRNECQEIPNICSHGQCIDTVGSFYCLCHTGFKTNDDQTMCLDINECERDACGNGTCRNTIGSFNCRCNHGFILSHNNDCIDVDECASGNGNLCRNGQCINTVGSFQCQCNEGYEVAPDGRTCVDINECLLEPRKCAPGTCQNLDGSYRCICPPGYSLQNEKCEDIDECVEEPEICALGTCSNTEGSFKCLCPEGFSLSSSGRRCQDLRMSYCYAKFEGGKCSSPKSRNHSKQECCCALKGEGWGDPCELCPTEPDEAFRQICPYGSGIIVGPDDSAVDMDECKEPDVCKHGQCINTDGSYRCECPFGYILAGNECVDTDECSVGNPCGNGTCKNVIGGFECTCEEGFEPGPMMTCEDINECAQNPLLCAFRCVNTYGSYECKCPVGYVLREDRRMCKDEDECEEGKHDCTEKQMECKNLIGTYMCICGPGYQRRPDGEGCVDENECQTKPGICENGRCLNTRGSYTCECNDGFTASPNQDECLDVILSLLLLSPAFPSCFFSPRTIGKGTASQRCYKTCVRSAPATGTPSPNRNAAVTEGEAGVPTVRSALSRGLWLSRNSVPMAEDS

SEQ ID NO: 31782 - protein, 2912 aa, Homo sapiens
  Payload ID: 6217
  Gene Symbol: FBN2
  Gene Name: fibrillin 2
  Uniprot ID: P35556
  ENSP ID: ENSP00000262464
MGRRRRLCLQLYFLWLGCVVLWAQGTAGQPQPPPPKPPRPQPPPQQVRSATAGSEGGFLAPEYREEGAAVASRVRRRGQQDVLRGPNVCGSRFHSYCCPGWKTLPGGNQCIVPICRNSCGDGFCSRPNMCTCSSGQISSTCGSKSIQQCSVRCMNGGTCADDHCQCQKGYIGTYCGQPVCENGCQNGGRCIGPNRCACVYGFTGPQCERDYRTGPCFTQVNNQMCQGQLTGIVCTKTLCCATIGRAWGHPCEMCPAQPQPCRRGFIPNIRTGACQDVDECQAIPGICQGGNCINTVGSFECRCPAGHKQSETTQKCEDIDECSIIPGICETGECSNTVGSYFCVCPRGYVTSTDGSRCIDQRTGMCFSGLVNGRCAQELPGRMTKMQCCCEPGRCWGIGTIPEACPVRGSEEYRRLCMDGLPMGGIPGSAGSRPGGTGGNGFAPSGNGNGYGPGGTGFIPIPGGNGFSPGVGGAGVGAGGQGPIITGLTILNQTIDICKHHANLCLNGRCIPTVSSYRCECNMGYKQDANGDCIDVDECTSNPCTNGDCVNTPGSYYCKCHAGFQRTPTKQACIDIDECIQNGVLCKNGRCVNTDGSFQCICNAGFELTTDGKNCVDHDECTTTNMCLNGMCINEDGSFKCICKPGFVLAPNGRYCTDVDECQTPGICMNGHCINSEGSFRCDCPPGLAVGMDGRVCVDTHMRSTCYGGIKKGVCVRPFPGAVTKSECCCANPDYGFGEPCQPCPAKNSAEFHGLCSSGVGITVDGRDINECALDPDICANGICENLRGSYRCNCNSGYEPDASGRNCIDIDECLVNRLLCDNGLCRNTPGSYSCTCPPGYVFRTETETCEDINECESNPCVNGACRNNLGSFNCECSPGSKLSSTGLICIDSLKGTCWLNIQDSRCEVNINGATLKSECCATLGAAWGSPCERCELDTACPRGLARIKGVTCEDVNECEVFPGVCPNGRCVNSKGSFHCECPEGLTLDGTGRVCLDIRMEQCYLKWDEDECIHPVPGKFRMDACCCAVGAAWGTECEECPKPGTKEYETLCPRGAGFANRGDVLTGRPFYKDINECKAFPGMCTYGKCRNTIGSFKCRCNSGFALDMEERNCTDIDECRISPDLCGSGICVNTPGSFECECFEGYESGFMMMKNCMDIDECERNPLLCRGGTCVNTEGSFQCDCPLGHELSPSREDCVDINECSLSDNLCRNGKCVNMIGTYQCSCNPGYQATPDRQGCTDIDECMIMNGGCDTQCTNSEGSYECSCSEGYALMPDGRSCADIDECENNPDICDGGQCTNIPGEYRCLCYDGFMASMDMKTCIDVNECDLNSNICMFGECENTKGSFICHCQLGYSVKKGTTGCTDVDECEIGAHNCDMHASCLNIPGSFKCSCREGWIGNGIKCIDLDECSNGTHQCSINAQCVNTPGSYRCACSEGFTGDGFTCSDVDECAENINLCENGQCLNVPGAYRCECEMGFTPASDSRSCQDIDECSFQNICVFGTCNNLPGMFHCICDDGYELDRTGGNCTDIDECADPINCVNGLCVNTPGRYECNCPPDFQLNPTGVGCVDNRVGNCYLKFGPRGDGSLSCNTEIGVGVSRSSCCCSLGKAWGNPCETCPPVNSTEYYTLCPGGEGFRPNPITIILEDIDECQELPGLCQGGNCINTFGSFQCECPQGYYLSEDTRICEDIDECFAHPGVCGPGTCYNTLGNYTCICPPEYMQVNGGHNCMDMRKSFCYRSYNGTTCENELPFNVTKRMCCCTYNVGKAWNKPCEPCPTPGTADFKTICGNIPGFTFDIHTGKAVDIDECKEIPGICANGVCINQIGSFRCECPTGFSYNDLLLVCEDIDECSNGDNLCQRNADCINSPGSYRCECAAGFKLSPNGACVDRNECLEIPNVCSHGLCVDLQGSYQCICHNGFKASQDQTMCMDVDECERHPCGNGTCKNTVGSYNCLCYPGFELTHNNDCLDIDECSSFFGQVCRNGRCFNEIGSFKCLCNEGYELTPDGKNCIDTNECVALPGSCSPGTCQNLEGSFRCICPPGYEVKSENCIDINECDEDPNICLFGSCTNTPGGFQCLCPPGFVLSDNGRRCFDTRQSFCFTNFENGKCSVPKAFNTTKAKCCCSKMPGEGWGDPCELCPKDDEVAFQDLCPYGHGTVPSLHDTREDVNECLESPGICSNGQCINTDGSFRCECPMGYNLDYTGVRCVDTDECSIGNPCGNGTCTNVIGSFECNCNEGFEPGPMMNCEDINECAQNPLLCAFRCMNTFGSYECTCPIGYALREDQKMCKDLDECAEGLHDCESRGMMCKNLIGTFMCICPPGMARRPDGEGCVDENECRTKPGICENGRCVNIIGSYRCECNEGFQSSSSGTECLDNRQGLCFAEVLQTICQMASSSRNLVTKSECCCDGGRGWGHQCELCPLPGTAQYKKICPHGPGYTTDGRDIDECKVMPNLCTNGQCINTMGSFRCFCKVGYTTDISGTSCIDLDECSQSPKPCNYICKNTEGSYQCSCPRGYVLQEDGKTCKDLDECQTKQHNCQFLCVNTLGGFTCKCPPGFTQHHTACIDNNECGSQPSLCGAKGICQNTPGSFSCECQRGFSLDATGLNCEDVDECDGNHRCQHGCQNILGGYRCGCPQGYIQHYQWNQCVDENECSNPNACGSASCYNTLGSYKCACPSGFSFDQFSSACHDVNECSSSKNPCNYGCSNTEGGYLCGCPPGYYRVGQGHCVSGMGFNKGQYLSLDTEVDEENALSPEACYECKINGYSKKDSRQKRSIHEPDPTAVEQISLESVDMDSPVNMKFNLSHLGSKEHILELRPAIQPLNNHIRYVISQGNDDSVFRIHQRNGLSYLHTAKKKLMPGTYTLEITSIPLYKKKELKKLEESNEDDYLLGELGEALRMRLQIQLY

SEQ ID NO: 31783 - protein, 2912 aa, Homo sapiens; identical to SEQ ID NO: 31782
  Payload ID: 6217
  Gene Symbol: FBN2
  Gene Name: fibrillin 2
  Uniprot ID: P35556
  ENSP ID: ENSP00000424571

SEQ ID NO: 31784 - protein, 341 aa, Homo sapiens
  Payload ID: 6217
  Gene Symbol: FBN2
  Gene Name: fibrillin 2
  ENSP ID: ENSP00000424753
MGRRRRLCLQLYFLWLGCVVLWAQGTAGQPQPPPPKPPRPQPPPQQVRSATAGSEGGFLAPEYREEGAAVASRVRRRGQQDVLRGPNVCGSRFHSYCCPGWKTLPGGNQCIVPICRNSCGDGFCSRPNMCTCSSGQISSTCGSKSIQQCSVRCMNGGTCADDHCQCQKGYIGTYCGQPVCENGCQNGGRCIGPNRCACVYGFTGPQCERDYRTGPCFTQVNNQMCQGQLTGIVCTKTLCCATIGRAWGHPCEMCPAQPQPCRRGFIPNIRTGACQDVDECQAIPGICQGGNCINTVGSFECRCPAGHKQSETTQKCEVHVDKAQAGARCPCVILPSRLYLR

SEQ ID NO: 31785 - protein, 1473 aa, Homo sapiens
  Payload ID: 6217
  Gene Symbol: FBN2
  Gene Name: fibrillin 2
  ENSP ID: ENSP00000425596
MGRRRRLCLQLYFLWLGCVVLWAQGTAGQPQPPPPKPPRPQPPPQQVRSATAGSEGGFLAPEYREEGAAVASRVRRRGQQDVLRGPNVCGSRFHSYCCPGWKTLPGGNQCIVLQQCSVRCMNGGTCADDHCQCQKGYIGTYCGQPVCENGCQNGGRCIGPNRCACVYGFTGPQCERDYRTGPCFTQVNNQMCQGQLTGIVCTKTLCCATIGRAWGHPCEMCPAQPQPCRRGFIPNIRTGACQDVDECQAIPGICQGGNCINTVGSFECRCPAGHKQSETTQKCEDIDECSIIPGICETGECSNTVGSYFCVCPRGYVTSTDGSRCIDQRTGMCFSGLVNGRCAQELPGRMTKMQCCCEPGRCWGIGTIPEACPVRGSEEYRRLCMDGLPMGGIPGSAGSRPGGTGGNGFAPSGNGNGYGPGGTGFIPIPGGNGFSPGVGGAGVGAGGQGPIITGLTILNQTIDICKHHANLCLNGRCIPTVSSYRCECNMGYKQDANGDCIDVDECTSNPCTNGDCVNTPGSYYCKCHAGFQRTPTKQACIDIDECIQNGVLCKNGRCVNTDGSFQCICNAGFELTTDGKNCVDHDECTTTNMCLNGMCINEDGSFKCICKPGFVLAPNGRYCTDVDECQTPGICMNGHCINSEGSFRCDCPPGLAVGMDGRVCVDTHMRSTCYGGIKKGVCVRPFPGAVTKSECCCANPDYGFGEPCQPCPAKNSAEFHGLCSSGVGITVDGRDINECALDPDICANGICENLRGSYRCNCNSGYEPDASGRNCIDIDECLVNRLLCDNGLCRNTPGSYSCTCPPGYVFRTETETCEDINECESNPCVNGACRNNLGSFNCECSPGSKLSSTGLICIDSLKGTCWLNIQDSRCEVNINGATLKSECCATLGAAWGSPCERCELDTACPRGLARIKGVTCEDVNECEVFPGVCPNGRCVNSKGSFHCECPEGLTLDGTGRVCLDIRMEQCYLKWDEDECIHPVPGKFRMDACCCAVGAAWGTECEECPKPGTKEYETLCPRGAGFANRGDVLTGRPFYKDINECKAFPGMCTYGKCRNTIGSFKCRCNSGFALDMEERNCTDIDECRISPDLCGSGICVNTPGSFECECFEGYESGFMMMKNCMDIDECERNPLLCRGGTCVNTEGSFQCDCPLGHELSPSREDCVDINECSLSDNLCRNGKCVNMIGTYQCSCNPGYQATPDRQGCTDIDECMIMNGGCDTQCTNSEGSYECSCSEGYALMPDGRSCADIDECENNPDICDGGQCTNIPGEYRCLCYDGFMASMDMKTCIDVNECDLNSNICMFGECENTKGSFICHCQLGYSVKKGTTGCTDVDECEIGAHNCDMHASCLNIPGSFKCSCREGWIGNGIKCIDLDECSNGTHQCSINAQCVNTPGSYRCACSEGFTGDGFTCSDVDECAENINLCENGQCLNVPGAYRCECEMGFTPASDSRSCQGGSPGFQLIFKLDQPQ

SEQ ID NO: 31786 - protein, 356 aa, Homo sapiens
  Payload ID: 6217
  Gene Symbol: FBN2
  Gene Name: fibrillin 2
  ENSP ID: ENSP00000426839
MMMKNCMDIDECERNPLLCRGGTCVNTEGSFQCDCPLGHELSPSREDCVDINECSLSDNLCRNGKCVNMIGTYQCSCNPGYQATPDRQGCTDIDECMIMNGGCDTQCTNSEGSYECSCSEGYALMPDGRSCADIDECENNPDICDGGQCTNIPGEYRCLCYDGFMASMDMKTCIDVNECDLNSNICMFGECENTKGSFICHCQLGYSVKKGTTGCTDVDECEIGAHNCDMHASCLNIPGSFKCSCREGWIGNGIKCIDLDECSNGTHQCSINAQCVNTPGSYRCACSEGFTGDGFTCSDVDECAENINLCENGQCLNVPGAYRCECEMGFTPASDSRSCQGGSPGFQLIFKLDQPQ

SEQ ID NO: 31787 - protein, 276 aa, Homo sapiens
  Payload ID: 6217
  Gene Symbol: FBN2
  Gene Name: fibrillin 2
  ENSP ID: ENSP00000479157
MGRRRRLCLQLYFLWLGCVVLWAQGTAGQPQPPPPKPPRPQPPPQQVRSATAGSEGGFLAPEYREEGAAVASRVRRRGQQDVLRGPNVCGSRFHSYCCPGWKTLPGGNQCIVPICRNSCGDGFCSRPNMCTCSSGQISSTCGSKSIQQCSVRCMNGGTCADDHCQCQKGYIGTYCGQPVCENGCQNGGRCIGPNRCACVYGFTGPQCERDYRTGPCFTQVNNQMCQGQLTGIVCTKTLCCATIGRAWGHPCEMCPAQPQPCRRGFIPHPHWSLPRC

SEQ ID NO: 31788 - protein, 2911 aa, Homo sapiens
  Payload ID: 6217
  Gene Symbol: FBN2
  Gene Name: fibrillin 2
  ENSP ID: ENSP00000482132
MGRRRRLCLQLYFLWLGCVVLWAQGTAGQPQPPPPKPPRPQPPPQQVRSATAGSEGGFLAPEYREEGAAVASRVRRRGQQDVLRGPNVCGSRFHSYCCPGWKTLPGGNQCIVPICRNSCGDGFCSRPNMCTCSSGQISSTCGSKSIQQCSVRCMNGGTCADDHCQCQKGYIGTYCGQPVCENGCQNGGRCITQPCACVYGFTGPQCERDYRTGPCFTQVNNQMCQGQLTGIVCTKTLCCATIGRAWGHPCEMCPAQPQPCRRGFIPNIRTGACQDVDECQAIPGICQGGNCINTVGSFECRCPAGHKQSETTQKCEDIDECSIIPGICETGECSNTVGSYFCVCPRGYVTSTDGSRCIDQRTGMCFSGLVNGRCAQELPGRMTKMQCCCEPGRCWGIGTIPEACPVRGSEEYRRLCMDGLPMGGIPGSAGSRPGGTGGNGFAPSGNGNGYGPGGTGFIPIPGGNGFSPGVGGAGVGAGGQGPIITGLTILNQTIDICKHHANLCLNGRCIPTVSSYRCECNMGYKQDANGDCIDVDECTSNPCTNGDCVNTPGSYYCKCHAGFQRTPTKQACIDIDECIQNGVLCKNGRCVNTDGSFQCICNAGFELTTDGKNCVDHDECTTTNMCLNGMCINEDGSFKCICKPGFVLAPNGRYCTDVDECQTPGICMNGHCINSEGSFRCDCPPGLAVGMDGRVCVDTHMRSTCYGGIKKGVCVRPFPGAVTKSECCCANPDYGFGEPCQPCPAKNSAEFHGLCSSGVGITVDGRDINECALDPDICANGICENLRGSYRCNCNSGYEPDASGRNCIDIDECLVNRLLCDNGLCRNTPGSYSCTCPPGYVFRTETETCEDINECESNPCVNGACRNNLGSFNCECSPGSKLSSTGLICIDSLKGTCWLNIQDSRCEVNINGATLKSECCATLGAAWGSPCERCELDTACPRGLARIKGVTCEDVNECEVFPGVCPNGRCVNSKGSFHCECPEGLTLDGTGRVCLDIRMEQCYLKWDEDECIHPVPGKFRMDACCCAVGAAWGTECEECPKPGTKEYETLCPRGAGFANRGDVLTGRPFYKDINECKAFPGMCTYGKCRNTIGSFKCRCNSGFALDMEERNCTDIDECRISPDLCGSGICVNTPGSFECECFEGYESGFMMMKNCMDIDECERNPLLCRGGTCVNTEGSFQCDCPLGHELSPSREDCVDINECSLSDNLCRNGKCVNMIGTYQCSCNPGYQATPDRQGCTDIDECMIMNGGCDTQCTNSEGSYECSCSEGYALMPDGRSCADIDECENNPDICDGGQCTNIPGEYRCLCYDGFMASMDMKTCIDVNECDLNSNICMFGECENTKGSFICHCQLGYSVKKGTTGCTDVDECEIGAHNCDMHASCLNIPGSFKCSCREGWIGNGIKCIDLDECSNGTHQCSINAQCVNTPGSYRCACSEGFTGDGFTCSDVDECAENINLCENGQCLNVPGAYRCECEMGFTPASDSRSCQDIDECSFQNICVFGTCNNLPGMFHCICDDGYELDRTGGNCTDIDECADPINCVNGLCVNTPGRYECNCPPDFQLNPTGVGCVDNRVGNCYLKFGPRGDGSLSCNTEIGVGVSRSSCCCSLGKAWGNPCETCPPVNSTEYYTLCPGGEGFRPNPITIILEDIDECQELPGLCQGGNCINTFGSFQCECPQGYYLSEDTRICEDIDECFAHPGVCGPGTCYNTLGNYTCICPPEYMQVNGGHNCMDMRKSFCYRSYNGTTCENELPFNVTKRMCCCTYNVGKAWNKPCEPCPTPGTADFKTICGNIPGFTFDIHTGKAVDIDECKEIPGICANGVCINQIGSFRCECPTGFSYNDLLLVCEDIDECSNGDNLCQRNADCINSPGSYRCECAAGFKLSPNGACVDRNECLEIPNVCSHGLCVDLQGSYQCICHNGFKASQDQTMCMDVDECERHPCGNGTCKNTVGSYNCLCYPGFELTHNNDCLDIDECSSFFGQVCRNGRCFNEIGSFKCLCNEGYELTPDGKNCIDTNECVALPGSCSPGTCQNLEGSFRCICPPGYEVKSENCIDINECDEDPNICLFGSCTNTPGGFQCLCPPGFVLSDNGRRCFDTRQSFCFTNFENGKCSVPKAFNTTKAKCCCSKMPGEGWGDPCELCPKDDEVAFQDLCPYGHGTVPSLHDTREDVNECLESPGICSNGQCINTDGSFRCECPMGYNLDYTGVRCVDTDECSIGNPCGNGTCTNVIGSFECNCNEGFEPGPMMNCEDINECAQNPLLCAFRCMNTFGSYECTCPIGYALREDQKMCKDLDECAEGLHDCESRGMMCKNLIGTFMCICPPGMARRPDGEGCVDENECRTKPGICENGRCVNIIGSYRCECNEGFQSSSSGTECLDNRQGLCFAEVLQTICQMASSSRNLVTKSECCCDGGRGWGHQCELCPLPGTAQYKKICPHGPGYTTDGRDIDECKVMPNLCTNGQCINTMGSFRCFCKVGYTTDISGTSCIDLDECSQSPKPCNYICKNTEGSYQCSCPRGYVLQEDGKTCKDLDECQTKQHNCQFLCVNTLGGFTCKCPPGFTQHHTACIDNNECGSQPSLCGAKGICQNTPGSFSCECQRGFSLDATGLNCEDVDECDGNHRCQHGCQNILGGYRCGCPQGYIQHYQWNQCVDENECSNPNACGSASCYNTLGSYKCACPSGFSFDQFSSACHDVNECSSSKNPCNYGCSNTEGGYLCGCPPGYYRVGQGHCVSGMGFNKGQYLSLDTEVDEENALSPEACYECKINGYSKKDSRQKRSIHEPDPTAVEQISLESVDMDSPVNMKFNLSHLGSKEHILELRPAIQPLNNHIRYVISQGNDDSVFRIHQRNGLSYLHTAKKKLMPGTYTLEITSIPLYKKKELKKLEESNEDDYLLGELGEALRMRLQIQLY

SEQ ID NO: 31789 - protein, 2809 aa, Homo sapiens
  Payload ID: 6218
  Gene Symbol: FBN3
  Gene Name: fibrillin 3
  Uniprot ID: Q75N90
  ENSP ID: ENSP00000270509
MTLEGLYLARGPLARLLLAWSALLCMAGGQGRWDGALEAAGPGRVRRRGSPGILQGPNVCGSRFHAYCCPGWRTFPGRSQCVVPICRRACGEGFCSQPNLCTCADGTLAPSCGVSRGSGCSVSCMNGGTCRGASCLCQKGYTGTVCGQPICDRGCHNGGRCIGPNRCACVYGFMGPQCERDYRTGPCFGQVGPEGCQHQLTGLVCTKALCCATVGRAWGLPCELCPAQPHPCRRGFIPNIHTGACQDVDECQAVPGLCQGGSCVNMVGSFHCRCPVGHRLSDSSAACEDYRAGACFSVLFGGRCAGDLAGHYTRRQCCCDRGRCWAAGPVPELCPPRGSNEFQQLCAQRLPLLPGHPGLFPGLLGFGSNGMGPPLGPARLNPHGSDARGIPSLGPGNSNIGTATLNQTIDICRHFTNLCLNGRCLPTPSSYRCECNVGYTQDVRGECIDVDECTSSPCHHGDCVNIPGTYHCRCYPGFQATPTRQACVDVDECIVSGGLCHLGRCVNTEGSFQCVCNAGFELSPDGKNCVDHNECATSTMCVNGVCLNEDGSFSCLCKPGFLLAPGGHYCMDIDECQTPGICVNGHCTNTEGSFRCQCLGGLAVGTDGRVCVDTHVRSTCYGAIEKGSCARPFPGTVTKSECCCANPDHGFGEPCQLCPAKDSAEFQALCSSGLGITTDGRDINECALDPEVCANGVCENLRGSYRCVCNLGYEAGASGKDCTDVDECALNSLLCDNGWCQNSPGSYSCSCPPGFHFWQDTEICKDVDECLSSPCVSGVCRNLAGSYTCKCGPGSRLDPSGTFCLDSTKGTCWLKIQESRCEVNLQGASLRSECCATLGAAWGSPCERCEIDPACARGFARMTGVTCDDVNECESFPGVCPNGRCVNTAGSFRCECPEGLMLDASGRLCVDVRLEPCFLRWDEDECGVTLPGKYRMDVCCCSIGAVWGVECEACPDPESLEFASLCPRGLGFASRDFLSGRPFYKDVNECKVFPGLCTHGTCRNTVGSFHCACAGGFALDAQERNCTDIDECRISPDLCGQGTCVNTPGSFECECFPGYESGFMLMKNCMDVDECARDPLLCRGGTCTNTDGSYKCQCPPGHELTAKGTACEDIDECSLSDGLCPHGQCVNVIGAFQCSCHAGFQSTPDRQGCVDINECRVQNGGCDVHCINTEGSYRCSCGQGYSLMPDGRACADVDECEENPRVCDQGHCTNMPGGHRCLCYDGFMATPDMRTCVDVDECDLNPHICLHGDCENTKGSFVCHCQLGYMVRKGATGCSDVDECEVGGHNCDSHASCLNIPGSFSCRCLPGWVGDGFECHDLDECVSQEHRCSPRGDCLNVPGSYRCTCRQGFAGDGFFCEDRDECAENVDLCDNGQCLNAPGGYRCECEMGFDPTEDHRACQDVDECAQGNLCAFGSCENLPGMFRCICNGGYELDRGGGNCTDINECADPVNCINGVCINTPGSYLCSCPQDFELNPSGVGCVDTRAGNCFLETHDRGDSGISCSAEIGVGVTRASCCCSLGRAWGNPCELCPMANTTEYRTLCPGGEGFQPNRITVILEDIDECQELPGLCQGGDCVNTFGSFQCECPPGYHLSEHTRICEDIDECSTHSGICGPGTCYNTLGNYTCVCPAEYLQVNGGNNCMDMRKSVCFRHYNGTCQNELAFNVTRKMCCCSYNIGQAWNRPCEACPTPISPDYQILCGNQAPGFLTDIHTGKPLDIDECGEIPAICANGICINQIGSFRCECPAGFNYNSILLACEDVDECGSRESPCQQNADCINIPGSYRCKCTRGYKLSPGGACVGRNECREIPNVCSHGDCMDTEGSYMCLCHRGFQASADQTLCMDIDECDRQPCGNGTCKNIIGSYNCLCFPGFVVTHNGDCVDFDECTTLVGQVCRFGHCLNTAGSFHCLCQDGFELTADGKNCVDTNECLSLAGTCLPGTCQNLEGSFRCICPPGFQVQSDHCIDIDECSEEPNLCLFGTCTNSPGSFQCLCPPGFVLSDNGHRCFDTRQSFCFTRFEAGKCSVPKAFNTTKTRCCCSKRPGEGWGDPCELCPQEGSAAFQELCPFGHGAVPGPDDSREDVNECAENPGVCTNGVCVNTDGSFRCECPFGYSLDFTGINCVDTDECSVGHPCGQGTCTNVIGGFECACADGFEPGLMMTCEDIDECSLNPLLCAFRCHNTEGSYLCTCPAGYTLREDGAMCRDVDECADGQQDCHARGMECKNLIGTFACVCPPGMRPLPGSGEGCTDDNECHAQPDLCVNGRCVNTAGSFRCDCDEGFQPSPTLTECHDIRQGPCFAEVLQTMCRSLSSSSEAVTRAECCCGGGRGWGPRCELCPLPGTSAYRKLCPHGSGYTAEGRDVDECRMLAHLCAHGECINSLGSFRCHCQAGYTPDATATTCLDMDECSQVPKPCTFLCKNTKGSFLCSCPRGYLLEEDGRTCKDLDECTSRQHNCQFLCVNTVGAFTCRCPPGFTQHHQACFDNDECSAQPGPCGAHGHCHNTPGSFRCECHQGFTLVSSGHGCEDVNECDGPHRCQHGCQNQLGGYRCSCPQGFTQHSQWAQCVDENECALSPPTCGSASCRNTLGGFRCVCPSGFDFDQALGGCQEVDECAGRRGPCSYSCANTPGGFLCGCPQGYFRAGQGHCVSGLGFSPGPQDTPDKEELLSSEACYECKINGLSPRDRPRRSAHRDHQVNLATLDSEALLTLGLNLSHLGRAERILELRPALEGLEGRIRYVIVRGNEQGFFRMHHLRGVSSLQLGRRRPGPGTYRLEVVSHMAGPWGVQPEGQPGPWGQALRLKVQLQLL

SEQ ID NO: 31790 - protein, 188 aa, Homo sapiens
  Payload ID: 6218
  Gene Symbol: FBN3
  Gene Name: fibrillin 3
  ENSP ID: ENSP00000469256
  MOD_RES (1)..(1): Any amino acid
XYQILCGNQAPGFLTDIHTGKPLDVDECGSRESPCQQNADCINIPGSYRCKCTRGYKLSPGGACVGRNECREIPNVCSHGDCMDTEGSYMCLCHRGFQASADQTLCMDIDECDRQPCGNGTCKNIIGSYNCLCFPGFVVTHNGDCVDFDECTTLVGQVCRFGHCLNTAGSFHCLCQDGFELTADGKNC

SEQ ID NO: 31791 - protein, 2809 aa, Homo sapiens; identical to SEQ ID NO: 31789
  Payload ID: 6218
  Gene Symbol: FBN3
  Gene Name: fibrillin 3
  Uniprot ID: Q75N90
  ENSP ID: ENSP00000470498

SEQ ID NO: 31792 - protein, 2809 aa, Homo sapiens; identical to SEQ ID NO: 31789
  Payload ID: 6218
  Gene Symbol: FBN3
  Gene Name: fibrillin 3
  Uniprot ID: Q75N90
  ENSP ID: ENSP00000472324

SEQ ID NO: 31793 - protein, 171 aa, Homo sapiens
  Payload ID: 6218
  Gene Symbol: FBN3
  Gene Name: fibrillin 3
  ENSP ID: ENSP00000472729
  MOD_RES (1)..(1): Any amino acid
XFTRFEAGKCSVPKAFNTTKTRCCCSKRPGEGWGDPCELCPQEGSDVNECAENPGVCTNGVCVNTDGSFRCECPFGYSLDFTGINCVDTDECSVGHPCGQGTCTNVIGGFECACADGFEPGLMMTCEDIDECSLNPLLCAFRCHNTEGSYLCTCPAGYTLREDGAMCRDVD

SEQ ID NO: 31794 - protein, 866 aa, Homo sapiens
  Payload ID: 6219
  Gene Symbol: FGA
  Gene Name: fibrinogen alpha chain
  Uniprot ID: P02671
  ENSP ID: ENSP00000306361
MFSMRIVCLVLSVVGTAWTADSGEGDFLAEGGGVRGPRVVERHQSACKDSDWPFCSDEDWNYKCPSGCRMKGLIDEVNQDFTNRINKLKNSLFEYQKNNKDSHSLTTNIMEILRGDFSSANNRDNTYNRVSEDLRSRIEVLKRKVIEKVQHIQLLQKNVRAQLVDMKRLEVDIDIKIRSCRGSCSRALAREVDLKDYEDQQKQLEQVIAKDLLPSRDRQHLPLIKMKPVPDLVPGNFKSQLQKVPPEWKALTDMPQMRMELERPGGNEITRGGSTSYGTGSETESPRNPSSAGSWNSGSSGPGSTGNRNPGSSGTGGTATWKPGSSGPGSTGSWNSGSSGTGSTGNQNPGSPRPGSTGTWNPGSSERGSAGHWTSESSVSGSTGQWHSESGSFRPDSPGSGNARPNNPDWGTFEEVSGNVSPGTRREYHTEKLVTSKGDKELRTGKEKVTSGSTTTTRRSCSKTVTKTVIGPDGHKEVTKEVVTSEDGSDCPEAMDLGTLSGIGTLDGFRHRHPDEAAFFDTASTGKTFPGFFSPMLGEFVSETESRGSESGIFTNTKESSSHHPGIAEFPSRGKSSSYSKQFTSSTSYNRGDSTFESKSYKMADEAGSEADHEGTHSTKRGHAKSRPVRDCDDVLQTHPSGTQSGIFNIKLPGSSKIFSVYCDQETSLGGWLLIQQRMDGSLNFNRTWQDYKRGFGSLNDEGEGEFWLGNDYLHLLTQRGSVLRVELEDWAGNEAYAEYHFRVGSEAEGYALQVSSYEGTAGDALIEGSVEEGAEYTSHNNMQFSTFDRDADQWEENCAEVYGGGWWYNNCQAANLNGIYYPGGSYDPRNNSPYEIENGVVWVSFRGADYSLRAVRMKIRPLVTQ

SEQ ID NO: 31795 - protein, 644 aa, Homo sapiens
  Payload ID: 6219
  Gene Symbol: FGA
  Gene Name: fibrinogen alpha chain
  Uniprot ID: P02671
  ENSP ID: ENSP00000385981
MFSMRIVCLVLSVVGTAWTADSGEGDFLAEGGGVRGPRVVERHQSACKDSDWPFCSDEDWNYKCPSGCRMKGLIDEVNQDFTNRINKLKNSLFEYQKNNKDSHSLTTNIMEILRGDFSSANNRDNTYNRVSEDLRSRIEVLKRKVIEKVQHIQLLQKNVRAQLVDMKRLEVDIDIKIRSCRGSCSRALAREVDLKDYEDQQKQLEQVIAKDLLPSRDRQHLPLIKMKPVPDLVPGNFKSQLQKVPPEWKALTDMPQMRMELERPGGNEITRGGSTSYGTGSETESPRNPSSAGSWNSGSSGPGSTGNRNPGSSGTGGTATWKPGSSGPGSTGSWNSGSSGTGSTGNQNPGSPRPGSTGTWNPGSSERGSAGHWTSESSVSGSTGQWHSESGSFRPDSPGSGNARPNNPDWGTFEEVSGNVSPGTRREYHTEKLVTSKGDKELRTGKEKVTSGSTTTTRRSCSKTVTKTVIGPDGHKEVTKEVVTSEDGSDCPEAMDLGTLSGIGTLDGFRHRHPDEAAFFDTASTGKTFPGFFSPMLGEFVSETESRGSESGIFTNTKESSSHHPGIAEFPSRGKSSSYSKQFTSSTSYNRGDSTFESKSYKMADEAGSEADHEGTHSTKRGHAKSRPVRGIHTSPLGKPSLSP

SEQ ID NO: 31796 - protein, 289 aa, Homo sapiens [sequence omitted]

SEQ ID NO: 31797 - protein, 491 aa, Homo sapiens
  Payload ID: 6220
  Gene Symbol: FGB
  Gene Name: fibrinogen beta chain
  Uniprot ID: P02675
  ENSP ID: ENSP00000306099
MKRMVSWSFHKLKTMKHLLLLLLCVFLVKSQGVNDNEEGFFSARGHRPLDKKREEAPSLRPAPPPISGGGYRARPAKAAATQKKVERKAPDAGGCLHADPDLGVLCPTGCQLQEALLQQERPIRNSVDELNNNVEAVSQTSSSSFQYMYLLKDLWQKRQKQVKDNENVVNEYSSELEKHQLYIDETVNSNIPTNLRVLRSILENLRSKIQKLESDVSAQMEYCRTPCTVSCNIPVVSGKECEEIIRKGGETSEMYLIQPDSSVKPYRVYCDMNTENGGWTVIQNRQDGSVDFGRKWDPYKQGFGNVATNTDGKNYCGLPGEYWLGNDKISQLTRMGPTELLIEMEDWKGDKVKAHYGGFTVQNEANKYQISVNKYRGTAGNALMDGASQLMGENRTMTIHNGMFFSTYDRDNDGWLTSDPRKQCSKEDGGGWWYNRCHAANPNGRYYWGGQYTWDMAKHGTDDGVVWMNWKGSWYSMRKMSMKIRPFFPQQ

SEQ ID NO: 31798 - protein, 45 aa, Homo sapiens
  Payload ID: 6220
  Gene Symbol: FGB
  Gene Name: fibrinogen beta chain
  ENSP ID: ENSP00000398719
MKRMVSWSFHKLKTMKHLLLLLLCVFLVKSQGVNDNEEMRKLGHR

SEQ ID NO: 31799 - protein, 272 aa, Homo sapiens
  Payload ID: 6220
  Gene Symbol: FGB
  Gene Name: fibrinogen beta chain
  ENSP ID: ENSP00000426757
MEYCRTPCTVSCNIPVVSGKECEEIIRKGGETSEMYLIQPDSSVKPYRVYCDMNTENGGWTVIQNRQDGSVDFGRKWDPYKQGFGNVATNTDGKNYCGLPGEYWLGNDKISQLTRMGPTELLIEMEDWKGDKVKAHYGGFTVQNEANKYQISVNKYRGTAGNALMDGASQLMGENRTMTIHNGMFFSTYDRDNDGWLTSDPRKQCSKEDGGGWWYNRCHAANPNGRYYWGGQYTWDMAKHGTDDGVVWMNWKGSWYSMRKMSMKIRPFFPQQ

SEQ ID NO: 31800 - protein, 303 aa, Homo sapiens
  Payload ID: 6221
  Gene Symbol: FIBCD1
  Gene Name: fibrinogen C domain containing 1
  ENSP ID: ENSP00000361412
MGLRKGHGTLGQGLSALQSEQGRLIQLLSESQGHMAHLVNSVSDILDALQRDRGLGRPRNKADLQRAPARGTRPRGCATGSRPRDCLDVLLSGQQDDGVYSVFPTHYPAGFQVYCDMRTDGGGWTVFQRREDGSVNFFRGWDAYRDGFGRLTGEHWLGLKRIHALTTQAAYELHVDLEDFENGTAYARYGSFGVGLFSVDPEEDGYPLTVADYSGTAGDSLLKHSGMRFTTKDRDSDHSENNCAAFYRGAWWYRNCHTSNLNGQYLRGAHASYADGVEWSSWTGWQYSLKFSEMKIRPVREDR

SEQ ID NO: 31801 - protein, 461 aa, Homo sapiens
  Payload ID: 6221
  Gene Symbol: FIBCD1
  Gene Name: fibrinogen C domain containing 1
  Uniprot ID: Q8N539
  ENSP ID: ENSP00000361413
MVNDRWKTMGGAAQLEDRPRDKPQRPSCGYVLCTVLLALAVLLAVAVTGAVLFLNHAHAPGTAPPPVVSTGAASANSALVTVERADSSHLSILIDPRCPDLTDSFARLESAQASVLQALTEHQAQPRLVGDQEQELLDTLADQLPRLLARASELQTECMGLRKGHGTLGQGLSALQSEQGRLIQLLSESQGHMAHLVNSVSDILDALQRDRGLGRPRNKADLQRAPARGTRPRGCATGSRPRDCLDVLLSGQQDDGVYSVFPTHYPAGFQVYCDMRTDGGGWTVFQRREDGSVNFFRGWDAYRDGFGRLTGEHWLGLKRIHALTTQAAYELHVDLEDFENGTAYARYGSFGVGLFSVDPEEDGYPLTVADYSGTAGDSLLKHSGMRFTTKDRDSDHSENNCAAFYRGAWWYRNCHTSNLNGQYLRGAHASYADGVEWSSWTGWQYSLKFSEMKIRPVREDR

SEQ ID NO: 31802 - protein, 289 aa, Homo sapiens
  Payload ID: 6221
  Gene Symbol: FIBCD1
  Gene Name: fibrinogen C domain containing 1
  ENSP ID: ENSP00000393894
MVNDRWKTMGGAAQLEDRPRDKPQRPSCGYVLCTVLLALAVLLAVAVTGAVLFLNHAHAPGTAPPPVVSTGAASANSALVTVERADSSHLSILIDPRCPDLTDSFARLESAQASVLQALTEHQAQPRLVGDQEQELLDTLADQLPRLLARASELQTECMGLRKGHGTLGQGLSALQSEQGRLIQLLSESQGHMAHLVNSVSDILDALQRDRGLGRPRNKADLQRAPARGTRPRGCATGSRPRDCLDVLLSGQQDDGVYSVFPTHYPAGFQVYCDMRTDGGGWTVFQRRE

SEQ ID NO: 31803 - protein, 310 aa, Homo sapiens
  Payload ID: 6221
  Gene Symbol: FIBCD1
  Gene Name: fibrinogen C domain containing 1
  ENSP ID: ENSP00000395319
  MOD_RES (1)..(1): Any amino acid
XTGAVLFLNHAHAPGTAPPPVVSTGAASANSALVTVERADSSHLSILIDPRCPDLTDSFARLESAQASVLQALTEHQAQPRLVGDQEQELLDTLADQLPRLLARASELQTECMGLRKGHGTLGQGLSALQSEQGRLIQLLSESQGHMAHLVNSVSDILDALQRDRGLGRPRNKADLQRAPARGTRPRGCATGSRPRDCLDVLLSGQQDDGVYSVFPTHYPAGFQVYCDMRTDGGGWTVFQRREDGSVNFFRGWDAYRDGFGRLTGEHWLGPLDWCTLSLALLVPVAPSPTPPHSFVNVLHPPVPGGPTLQ

SEQ ID NO: 31804 - protein, 461 aa, Homo sapiens; identical to SEQ ID NO: 31801
  Payload ID: 6221
  Gene Symbol: FIBCD1
  Gene Name: fibrinogen C domain containing 1
  Uniprot ID: Q8N539
  ENSP ID: ENSP00000414501

SEQ ID NO: 31805 - protein, 453 aa, Homo sapiens
  Payload ID: 6222
  Gene Symbol: FGG
  Gene Name: fibrinogen gamma chain
  Uniprot ID: P02679
  ENSP ID: ENSP00000336829
MSWSLHPRNLILYFYALLFLSSTCVAYVATRDNCCILDERFGSYCPTTCGIADFLSTYQTKVDKDLQSLEDILHQVENKTSEVKQLIKAIQLTYNPDESSKPNMIDAATLKSRKMLEEIMKYEASILTHDSSIRYLQEIYNSNNQKIVNLKEKVAQLEAQCQEPCKDTVQIHDITGKDCQDIANKGAKQSGLYFIKPLKANQQFLVYCEIDGSGNGWTVFQKRLDGSVDFKKNWIQYKEGFGHLSPTGTTEFWLGNEKIHLISTQSAIPYALRVELEDWNGRTSTADYAMFKVGPEADKYRLTYAYFAGGDAGDAFDGFDFGDDPSDKFFTSHNGMQFSTWDNDNDKFEGNCAEQDGSGWWMNKCHAGHLNGVYYQGGTYSKASTPNGYDNGIIWATWKTRWYSMKKTTMKIIPFNRLTIGEGQQHHLGGAKQVRPEHPAETEYDSLYPEDDL

SEQ ID NO: 31806 - protein, 119 aa, Homo sapiens
  Payload ID: 6222
  Gene Symbol: FGG
  Gene Name: fibrinogen gamma chain
  ENSP ID: ENSP00000377429
MIDAATLKSRKMLEEIMKYEASILTHDSSIRYLQEIYNSNNQKIVNLKEKVAQLEAQCQEPCKDTVQIHDITGKDCQDIANKGAKQSGLYFIKPLKANQQFLVYCEIDGSGNGWTVFQK

SEQ ID NO: 31807 - protein, 445 aa, Homo sapiens
  Payload ID: 6222
  Gene Symbol: FGG
  Gene Name: fibrinogen gamma chain
  ENSP ID: ENSP00000384101
MSWSLHPRNLILYFYALLFLSSTCVAYVATRDNCCILDERFGSYCPTTCGIADFLSTYQTKVDKDLQSLEDILHQVENKTSEVKQLIKAIQLTYNPDESSKPNMIDAATLKSRKMLEEIMKYEASILTHDSSIRYLQEIYNSNNQKIVNLKEKVAQLEAQCQEPCKDTVQIHDITGKVKVDSPSLDCQDIANKGAKQSGLYFIKPLKANQQFLVYCEIDGSGNGWTVFQKRLDGSVDFKKNWIQYKEGFGHLSPTGTTEFWLGNEKIHLISTQSAIPYALRVELEDWNGRTSTADYAMFKVGPEADKYRLTYAYFAGGDAGDAFDGFDFGDDPSDKFFTSHNGMQFSTWDNDNDKFEGNCAEQDGSGWWMNKCHAGHLNGVYYQGGTYSKASTPNGYDNGIIWATWKTRWYSMKKTTMKIIPFNRLTIGEGQQHHLGGAKQAGDV

SEQ ID NO: 31808 - protein, 461 aa, Homo sapiens
  Payload ID: 6222
  Gene Symbol: FGG
  Gene Name: fibrinogen gamma chain
  ENSP ID: ENSP00000384552
MSWSLHPRNLILYFYALLFLSSTCVAYVATRDNCCILDERFGSYCPTTCGIADFLSTYQTKVDKDLQSLEDILHQVENKTSEVKQLIKAIQLTYNPDESSKPNMIDAATLKSRKMLEEIMKYEASILTHDSSIRYLQEIYNSNNQKIVNLKEKVAQLEAQCQEPCKDTVQIHDITGKVKVDSPSLDCQDIANKGAKQSGLYFIKPLKANQQFLVYCEIDGSGNGWTVFQKRLDGSVDFKKNWIQYKEGFGHLSPTGTTEFWLGNEKIHLISTQSAIPYALRVELEDWNGRTSTADYAMFKVGPEADKYRLTYAYFAGGDAGDAFDGFDFGDDPSDKFFTSHNGMQFSTWDNDNDKFEGNCAEQDGSGWWMNKCHAGHLNGVYYQGGTYSKASTPNGYDNGIIWATWKTRWYSMKKTTMKIIPFNRLTIGEGQQHHLGGAKQVRPEHPAETEYDSLYPEDDL

SEQ ID NO: 31809 - protein, 437 aa, Homo sapiens
  Payload ID: 6222
  Gene Symbol: FGG
  Gene Name: fibrinogen gamma chain
  Uniprot ID: P02679
  ENSP ID: ENSP00000384860
MSWSLHPRNLILYFYALLFLSSTCVAYVATRDNCCILDERFGSYCPTTCGIADFLSTYQTKVDKDLQSLEDILHQVENKTSEVKQLIKAIQLTYNPDESSKPNMIDAATLKSRKMLEEIMKYEASILTHDSSIRYLQEIYNSNNQKIVNLKEKVAQLEAQCQEPCKDTVQIHDITGKDCQDIANKGAKQSGLYFIKPLKANQQFLVYCEIDGSGNGWTVFQKRLDGSVDFKKNWIQYKEGFGHLSPTGTTEFWLGNEKIHLISTQSAIPYALRVELEDWNGRTSTADYAMFKVGPEADKYRLTYAYFAGGDAGDAFDGFDFGDDPSDKFFTSHNGMQFSTWDNDNDKFEGNCAEQDGSGWWMNKCHAGHLNGVYYQGGTYSKASTPNGYDNGIIWATWKTRWYSMKKTTMKIIPFNRLTIGEGQQHHLGGAKQAGDV

SEQ ID NO: 31810 - protein, 123 aa, Homo sapiens
  Payload ID: 6222
  Gene Symbol: FGG
  Gene Name: fibrinogen gamma chain
  ENSP ID: ENSP00000407562
MIDAATLKSRKMLEEIMKYEASILTHDSSIRYLQEIYNSNNQKIVNLKEKVAQLEAQCQEPCKDTVQIHDITGKDCQDIANKGAKQSGLYFIKPLKANQQFLVYCEIDGSGNGWTVFQKRLDG

SEQ ID NO: 31811 - protein, 299 aa, Homo sapiens
  Payload ID: 6223
  Gene Symbol: FSBP
  Gene Name: fibrinogen silencer binding protein
  Uniprot ID: O95073
  ENSP ID: ENSP00000420405
MVGKARSSNFTLSEKLDLLKLVKPYVKILEEHTNKHSVIVEKNRCWDIIAVNYNAIGVDRPPRTAQGLRTLYKRLKEYAKQELLQQKETQSDFKSNISEPTKKVMEMIPQISSFCLVRDRNHIQSANLDEEAQAGTSSLQVMLDHHPVAITVEVKQEEDIKPPPPLVLNSQQSDTLEQREEHELVHVMERSLSPSLSSVDMRMTSSPSSIPRRDDFFRHESGEHFRSLLGYDPQILQMLKEEHQIILENQKNFGLYVQEKRDGLKRRQQLEEELLRAKIEVEKLKAIRLRHDLPEYNSL

SEQ ID NO: 31812 - protein, 129 aa, Homo sapiens
  Payload ID: 6223
  Gene Symbol: FSBP
  Gene Name: fibrinogen silencer binding protein
  ENSP ID: ENSP00000462684
MVGKARSSNFTLSEKLDLLKLVKPYVKILEEHTNKHSVIVEKNRCWDIIAVNYNAIGVDRPPRTAQGLRTLYKRLKEYAKQELLQQKETQSDFKSNISEPTKKVMEMIPQISSFCLVRDRNHIQSSFGS

SEQ ID NO: 31813 - protein, 312 aa, Homo sapiens
  Payload ID: 6224
  Gene Symbol: FGL1
  Gene Name: fibrinogen-like 1
  Uniprot ID: Q08830
  ENSP ID: ENSP00000371262
MAKVFSFILVTTALTMGREISALEDCAQEQMRLRAQVRLLETRVKQQQVKIKQLLQENEVQFLDKGDENTVIDLGSKRQYADCSEIFNDGYKLSGFYKIKPLQSPAEFSVYCDMSDGGGWTVIQRRSDGSENFNRGWKDYENGFGNFVQKHGEYWLGNKNLHFLTTQEDYTLKIDLADFEKNSRYAQYKNFKVGDEKNFYELNIGEYSGTAGDSLAGNFHPEVQWWASHQRMKFSTWDRDHDNYEGNCAEEDQSGWWFNRCHSANLNGVYYSGPYTAKTDNGIVWYTWHGWWYSLKSVVMKIRPNDFIPNVI

SEQ ID NO: 31814 - protein, 312 aa, Homo sapiens; identical to SEQ ID NO: 31813
  Payload ID: 6224
  Gene Symbol: FGL1
  Gene Name: fibrinogen-like 1
  Uniprot ID: Q08830
  ENSP ID: ENSP00000371263

SEQ ID NO: 31815 - protein, 312 aa, Homo sapiens; identical to SEQ ID NO: 31813
  Payload ID: 6224
  Gene Symbol: FGL1
  Gene Name: fibrinogen-like 1
  Uniprot ID: Q08830
  ENSP ID: ENSP00000381131

SEQ ID NO: 31816 - protein, 312 aa, Homo sapiens; identical to SEQ ID NO: 31813
  Payload ID: 6224
  Gene Symbol: FGL1
  Gene Name: fibrinogen-like 1
  Uniprot ID: Q08830
  ENSP ID: ENSP00000381133

SEQ ID NO: 31817 - protein, 312 aa, Homo sapiens; identical to SEQ ID NO: 31813
  Payload ID: 6224
  Gene Symbol: FGL1
  Gene Name: fibrinogen-like 1
  Uniprot ID: Q08830
  ENSP ID: ENSP00000401952

SEQ ID NO: 31818 - protein, 312 aa, Homo sapiens; identical to SEQ ID NO: 31813
  Payload ID: 6224
  Gene Symbol: FGL1
  Gene Name: fibrinogen-like 1
  Uniprot ID: Q08830
  ENSP ID: ENSP00000428430

SEQ ID NO: 31819 - protein, 312 aa, Homo sapiens; identical to SEQ ID NO: 31813
  Payload ID: 6224
  Gene Symbol: FGL1
  Gene Name: fibrinogen-like 1
  Uniprot ID: Q08830
  ENSP ID: ENSP00000429757

SEQ ID NO: 31820 - protein, 439 aa, Homo sapiens
  Payload ID: 6225
  Gene Symbol: FGL2
  Gene Name: fibrinogen-like 2
  Uniprot ID: Q14314
  ENSP ID: ENSP00000248598
MKLANWYWLSSAVLATYGFLVVANNETEEIKDERAKDVCPVRLESRGKCEEAGECPYQVSLPPLTIQLPKQFSRIEEVFKEVQNLKEIVNSLKKSCQDCKLQADDNGDPGRNGLLLPSTGAPGEVGDNRVRELESEVNKLSSELKNAKEEINVLHGRLEKLNLVNMNNIENYVDSKVANLTFVVNSLDGKCSKCPSQEQIQSRPVQHLIYKDCSDYYAIGKRSSETYRVTPDPKNSSFEVYCDMETMGGGWTVLQARLDGSTNFTRTWQDYKAGFGNLRREFWLGNDKIHLLTKSKEMILRIDLEDFNGVELYALYDQFYVANEFLKYRLHVGNYNGTAGDALRFNKHYNHDLKFFTTPDKDNDRYPSGNCGLYYSSGWWFDACLSANLNGKYYHQKYRGVRNGIFWGTWPGVSEAHPGGYKSSFKEAKMMIRPKHFKP

SEQ ID NO: 31821 - protein, 760 aa, Homo sapiens
  Payload ID: 6226
  Gene Symbol: FAP
  Gene Name: fibroblast activation protein, alpha
  Uniprot ID: Q12884
  ENSP ID: ENSP00000188790
MKTWVKIVFGVATSAVLALLVMCIVLRPSRVHNSEENTMRALTLKDILNGTFSYKTFFPNWISGQEYLHQSADNNIVLYNIETGQSYTILSNRTMKSVNASNYGLSPDRQFVYLESDYSKLWRYSYTATYYIYDLSNGEFVRGNELPRPIQYLCWSPVGSKLAYVYQNNIYLKQRPGDPPFQITFNGRENKIFNGIPDWVYEEEMLATKYALWWSPNGKFLAYAEFNDTDIPVIAYSYYGDEQYPRTINIPYPKAGAKNPVVRIFIIDTTYPAYVGPQEVPVPAMIASSDYYFSWLTWVTDERVCLQWLKRVQNVSVLSICDFREDWQTWDCPKTQEHIEESRTGWAGGFFVSTPVFSYDAISYYKIFSDKDGYKHIHYIKDTVENAIQITSGKWEAINIFRVTQDSLFYSSNEFEEYPGRRNIYRISIGSYPPSKKCVTCHLRKERCQYYTASFSDYAKYYALVCYGPGIPISTLHDGRTDQEIKILEENKELENALKNIQLPKEEIKKLEVDEITLWYKMILPPQFDRSKKYPLLIQVYGGPCSQSVRSVFAVNWISYLASKEGMVIALVDGRGTAFQGDKLLYAVYRKLGVYEVEDQITAVRKFIEMGFIDEKRIAIWGWSYGGYVSSLALASGTGLFKCGIAVAPVSSWEYYASVYTERFMGLPTKDDNLEHYKNSTVMARAEYFRNVDYLLIHGTADDNVHFQNSAQIAKALVNAQVDFQAMWYSDQNHGLSGLSTNHLYTHMTHFLKQCFSLSD

SEQ ID NO: 31822 - protein, 155 aa, Homo sapiens
  Payload ID: 6226
  Gene Symbol: FAP
  Gene Name: fibroblast activation protein, alpha
  ENSP ID: ENSP00000400137
MCIVLRPSRVHNSEENTMRALTLKDILNGTFSYKTFFPNWISGQEYLHQSADNNIVLYNIETGQSYTILSNRTMKSVNASNYGLSPDRQFVYLESDYSKLWRYSYTATYYIYDLSNGEFVRGNELPRPIQYLCWSPVGSKLAYVYQNNIYLKQRP

SEQ ID NO: 31823 - protein, 121 aa, Homo sapiens
  Payload ID: 6226
  Gene Symbol: FAP
  Gene Name: fibroblast activation protein, alpha
  ENSP ID: ENSP00000407404
MCIVLRPSRVHNSEENTMRALTLKDILNGTFSYKTFFPNWISGQEYLHQSADNNIVLYNIETGQSYTILSNRTMKSVNASNYGLSPDRQFVYLESDYSKLWRYSYTATYYIYDLSNGKWQL

SEQ ID NO: 31824 - protein, 735 aa, Homo sapiens
  Payload ID: 6226
  Gene Symbol: FAP
  Gene Name: fibroblast activation protein, alpha
  ENSP ID: ENSP00000411391
MKTWVKIVFGVATSAVLALLVMCIVLRPSRVHNSEENTMRALTLKDILNGTFSYKTFFPNWISGQEYLHQSADNNIVLYNIETGQSYTILSNRTMLWRYSYTATYYIYDLSNGEFVRGNELPRPIQYLCWSPVGSKLAYVYQNNIYLKQRPGDPPFQITFNGRENKIFNGIPDWVYEEEMLATKYALWWSPNGKFLAYAEFNDTDIPVIAYSYYGDEQYPRTINIPYPKAGAKNPVVRIFIIDTTYPAYVGPQEVPVPAMIASSDYYFSWLTWVTDERVCLQWLKRVQNVSVLSICDFREDWQTWDCPKTQEHIEESRTGWAGGFFVSTPVFSYDAISYYKIFSDKDGYKHIHYIKDTVENAIQITSGKWEAINIFRVTQDSLFYSSNEFEEYPGRRNIYRISIGSYPPSKKCVTCHLRKERCQYYTASFSDYAKYYALVCYGPGIPISTLHDGRTDQEIKILEENKELENALKNIQLPKEEIKKLEVDEITLWYKMILPPQFDRSKKYPLLIQVYGGPCSQSVRSVFAVNWISYLASKEGMVIALVDGRGTAFQGDKLLYAVYRKLGVYEVEDQITAVRKFIEMGFIDEKRIAIWGWSYGGYVSSLALASGTGLFKCGIAVAPVSSWEYYASVYTERFMGLPTKDDNLEHYKNSTVMARAEYFRNVDYLLIHGTADDNVHFQNSAQIAKALVNAQVDFQAMWYSDQNHGLSGLSTNHLYTHMTHFLKQCFSLSD

SEQ ID NO: 31825 - protein, 25 aa, Homo sapiens
  Payload ID: 6226
  Gene Symbol: FAP
  Gene Name: fibroblast activation protein, alpha
  ENSP ID: ENSP00000417028
KERCQYYTASFSDYAKYYALVCYGE

SEQ ID NO: 31826 - protein, 47 aa, Homo sapiens
  Payload ID: 6226
  Gene Symbol: FAP
  Gene Name: fibroblast activation protein, alpha
  ENSP ID: ENSP00000441940
  MOD_RES (1)..(1): Any amino acid
XYTERFMGLPTKDDNLEHYKNSTVMARAEYFRNVDYLLIHGTADGEV

SEQ ID NO: 31827 - protein, 759 aa, Homo sapiens
  Payload ID: 6226
  Gene Symbol: FAP
  Gene Name: fibroblast activation protein, alpha
  ENSP ID: ENSP00000485844
MTWVKIVFGVATSAVLALLVMCIVLRPSRVHNSEENTMRALTLKDILNGTFSYKTFFPNWISGQEYLHQSADNNIVLYNIETGQSYTILSNRTMKSVNASNYGLSPDRQFVYLESDYSKLWRYSYTATYYIYDLSNGEFVRGNELPRPIQYLCWSPVGSKLAYVYQNNIYLKQRPGDPPFQITFNGRENKIFNGIPDWVYEEEMLATKYALWWSPNGKFLAYAEFNDTDIPVIAYSYYGDEQYPRTINIPYPKAGAKNPVVRIFIIDTTYPAYVGPQEVPVPAMIASSDYYFSWLTWVTDERVCLQWLKRVQNVSVLSICDFREDWQTWDCPKTQEHIEESRTGWAGGFFVSTPVFSYDAISYYKIFSDKDGYKHIHYIKDTVENAIQITSGKWEAINIFRVTQDSLFYSSNEFEEYPGRRNIYRISIGSYPPSKKCVTCHLRKERCQYYTASFSDYAKYYALVCYGPGIPISTLHDGRTDQEIKILEENKELENALKNIQLPKEEIKKLEVDEITLWYKMILPPQFDRSKKYPLLIQVYGGPCSQSVRSVFAVNWISYLASKEGMVIALVDGRGTAFQGDKLLYAVYRKLGVYEVEDQITAVRKFIEMGFIDEKRIAIWGWSYGGYVSSLALASGTGLFKCGIAVAPVSSWEYYASVYTERFMGLPTKDDNLEHYKNSTVMARAEYFRNVDYLLIHGTADDNVHFQNSAQIAKALVNAQVDFQAMWYSDQNHGLSGLSTNHLYTHMTHFLKQCFSLSD

SEQ ID NO: 31828 - protein, 364 aa, Homo sapiens
  Payload ID: 6227
  Gene Symbol: FIBP
  Gene Name: fibroblast growth factor (acidic) intracellular binding protein
  Uniprot ID: O43427
  ENSP ID: ENSP00000344572
MTSELDIFVGNTTLIDEDVYRLWLDGYSVTDAVALRVRSGILEQTGATAAVLQSDTMDHYRTFHMLERLLHAPPKLLHQLIFQIPPSRQALLIERYYAFDEAFVREVLGKKLSKGTKKDLDDISTKTGITLKSCRRQFDNFKRVFKVVEEMRGSLVDNIQQHFLLSDRLARDYAAIVFFANNRFETGKKKLQYLSFGDFAFCAELMIQNWTLGAVGEAPTDPDSQMDDMDMDLDKEFLQDLKELKVLVADKDLLDLHKSLVCTALRGKLGVFSEMEANFKNLSRGLVNVAAKLTHNKDVRDLFVDLVEKFVEPCRSDHWPLSDVRFFLNQYSASVHSLDGFRHQALWDRYMGTLRGCLLRLYHD

SEQ ID NO: 31829 - protein, 357 aa, Homo sapiens
  Payload ID: 6227
  Gene Symbol: FIBP
  Gene Name: fibroblast growth factor (acidic) intracellular binding protein
  Uniprot ID: O43427
  ENSP ID: ENSP00000350124
MTSELDIFVGNTTLIDEDVYRLWLDGYSVTDAVALRVRSGILEQTGATAAVLQSDTMDHYRTFHMLERLLHAPPKLLHQLIFQIPPSRQALLIERYYAFDEAFVREVLGKKLSKGTKKDLDDISTKTGITLKSCRRQFDNFKRVFKVVEEMRGSLVDNIQQHFLLSDRLARDYAAIVFFANNRFETGKKKLQYLSFGDFAFCAELMIQNWTLGAVDSQMDDMDMDLDKEFLQDLKELKVLVADKDLLDLHKSLVCTALRGKLGVFSEMEANFKNLSRGLVNVAAKLTHNKDVRDLFVDLVEKFVEPCRSDHWPLSDVRFFLNQYSASVHSLDGFRHQALWDRYMGTLRGCLLRLYHD

SEQ ID NO: 31830 - protein, 146 aa, Homo sapiens
  Payload ID: 6227
  Gene Symbol: FIBP
  Gene Name: fibroblast growth factor (acidic) intracellular binding protein
  ENSP ID: ENSP00000431414
MTSELDIFVGNTTLIDEDVYRLWLDGYSVTDAVALRVRSGILEQTGATAAVLQSDTMDHYRTFHMLERLLHAPPKLLHQLIFQIPPSRQALLIERYYAFDEAFVREVLGKKLSKGTKKDLDDISTKTGITLKSCRRQGLCSHRLLC

SEQ ID NO: 31831 - protein, 137 aa, Homo sapiens
  Payload ID: 6227
  Gene Symbol: FIBP
  Gene Name: fibroblast growth factor (acidic) intracellular binding protein
  ENSP ID: ENSP00000431457
  MOD_RES (1)..(1): Any amino acid
XAFCAELMIQNWTLGAVDSQMDDMDMDLDKEFLQDLKELKVLVADKDLLDLHKSLVCTALRGKLGVFSEMEANFKNLSRGLVNVAAKLTHNKDVRDLFVDLVEKFVEPCRSDHWPLSDVRFFLNQYSASVHSLDGFR

SEQ ID NO: 31832 - protein, 146 aa, Homo sapiens; identical to SEQ ID NO: 31830
  Payload ID: 6227
  Gene Symbol: FIBP
  Gene Name: fibroblast growth factor (acidic) intracellular binding protein
  ENSP ID: ENSP00000433683

SEQ ID NO: 31833 - protein, 348 aa, Homo sapiens
  Payload ID: 6227
  Gene Symbol: FIBP
  Gene Name: fibroblast growth factor (acidic) intracellular binding protein
  ENSP ID: ENSP00000434043
MTSELDIFVGNTTLIDEDVYRLWLDVTDAVALRVRSGILEQTGATAAVLQSDTMDHYRTFHMLERLLHAPPKLLHQLIFQIPPSRQALLIERYYAFDEAFVREVLGKKLSKGTKKDLDDISTKTGITLKSCRRQFDNFKRVFKVVEEMRGSLVDNIQQHFLLSDRLARDYAAIVFFANNRFETGKKKLQYLSFGDFAFCAELMIQNWTLGAVDSQMDDMDMDLDKEFLQDLKELKVLVADKDLLDLHKSLVCTALRGKLGVFSEMEANFKNLSRGLVNVAAKLTHNKDYSLGPAVCGTLPLRPLATQRRAVLPESVFSVCPLPRWLPTPGPLGPLHGHPPRLPPAPVS

SEQ ID NO: 31834 - protein, 155 aa, Homo sapiens
  Payload ID: 6228
  Gene Symbol: FGF1
  Gene Name: fibroblast growth factor 1 (acidic)
  Uniprot ID: P05230
  ENSP ID: ENSP00000338548
MAEGEITTFTALTEKFNLPPGNYKKPKLLYCSNGGHFLRILPDGTVDGTRDRSDQHIQLQLSAESVGEVYIKSTETGQYLAMDTDGLLYGSQTPNEECLFLERLEENHYNTYISKKHAEKNWFVGLKKNGSCKRGPRTHYGQKAILFLPLPVSSD

SEQ ID NO: 31835 - protein, 155 aa, Homo sapiens; identical to SEQ ID NO: 31834
  Payload ID: 6228
  Gene Symbol: FGF1
  Gene Name: fibroblast growth factor 1 (acidic)
  Uniprot ID: P05230
  ENSP ID: ENSP00000352329

SEQ ID NO: 31836 - protein, 60 aa, Homo sapiens
  Payload ID: 6228
  Gene Symbol: FGF1
  Gene Name: fibroblast growth factor 1 (acidic)
  Uniprot ID: P05230
  ENSP ID: ENSP00000354231
MAEGEITTFTALTEKFNLPPGNYKKPKLLYCSNGGHFLRILPDGTVDGTRDRSDQHTDTK

SEQ ID NO: 31837 - protein, 155 aa, Homo sapiens; identical to SEQ ID NO: 31834
  Payload ID: 6228
  Gene Symbol: FGF1
  Gene Name: fibroblast growth factor 1 (acidic)
  Uniprot ID: P05230
  ENSP ID: ENSP00000367285

SEQ ID NO: 31838 - protein, 58 aa, Homo sapiens
  Payload ID: 6228
  Gene Symbol: FGF1
  Gene Name: fibroblast growth factor 1 (acidic)
  ENSP ID: ENSP00000378005
MAEGEITTFTALTEKFNLPPGNYKKPKLLYCSNGGHFLRILPDGTVDGTRDRSDQHIQ

SEQ ID NO: 31839 - protein, 93 aa, Homo sapiens
  Payload ID: 6228
  Gene Symbol: FGF1
  Gene Name: fibroblast growth factor 1 (acidic)
  ENSP ID: ENSP00000383969
MAEGEITTFTALTEKFNLPPGNYKKPKLLYCSNGGHFLRILPDGTVDGTRDRSDQHTAAQCGKRGGGVYKEYRDWPVLGHGHRRAFIRLTDTK

SEQ ID NO: 31840 - protein, 155 aa, Homo sapiens; identical to SEQ ID NO: 31834
  Payload ID: 6228
  Gene Symbol: FGF1
  Gene Name: fibroblast growth factor 1 (acidic)
  Uniprot ID: P05230
  ENSP ID: ENSP00000396195

SEQ ID NO: 31841 - protein, 41 aa, Homo sapiens
  Payload ID: 6228
  Gene Symbol: FGF1
  Gene Name: fibroblast growth factor 1 (acidic)
  ENSP ID: ENSP00000399458
MAEGEITTFTALTEKFNLPPGNYKKPKLLYCSNGGHFLRIL

SEQ ID NO: 31842 - protein, 155 aa, Homo sapiens; identical to SEQ ID NO: 31834
  Payload ID: 6228
  Gene Symbol: FGF1
  Gene Name: fibroblast growth factor 1 (acidic)
  Uniprot ID: P05230
  ENSP ID: ENSP00000404742

SEQ ID NO: 31843 - protein, 155 aa, Homo sapiens; identical to SEQ ID NO: 31834
  Payload ID: 6228
  Gene Symbol: FGF1
  Gene Name: fibroblast growth factor 1 (acidic)
  Uniprot ID: P05230
  ENSP ID: ENSP00000479024

SEQ ID NO: 31844 - protein, 155 aa, Homo sapiens; identical to SEQ ID NO: 31834
  Payload ID: 6228
  Gene Symbol: FGF1
  Gene Name: fibroblast growth factor 1 (acidic)
  Uniprot ID: P05230
  ENSP ID: ENSP00000480791

SEQ ID NO: 31845 - protein, 155 aa, Homo sapiens; identical to SEQ ID NO: 31834
  Payload ID: 6228
  Gene Symbol: FGF1
  Gene Name: fibroblast growth factor 1 (acidic)
  Uniprot ID: P05230
  ENSP ID: ENSP00000480980

SEQ ID NO: 31846 - protein, 155 aa, Homo sapiens; identical to SEQ ID NO: 31834
  Payload ID: 6228
  Gene Symbol: FGF1
  Gene Name: fibroblast growth factor 1 (acidic)
  Uniprot ID: P05230
  ENSP ID: ENSP00000481868

SEQ ID NO: 31847 - protein, 208 aa, Homo sapiens
  Payload ID: 6229
  Gene Symbol: FGF10
  Gene Name: fibroblast growth factor 10
  Uniprot ID: O15520
  ENSP ID: ENSP00000264664
MWKWILTHCASAFPHLPGCCCCCFLLLFLVSSVPVTCQALGQDMVSPEATNSSSSSFSSPSSAGRHVRSYNHLQGDVRWRKLFSFTKYFLKIEKNGKVSGTKKENCPYSILEITSVEIGVVAVKAINSNYYLAMNKKGKLYGSKEFNNDCKLKERIEENGYNTYASFNWQHNGRQMYVALNGKGAPRRGQKTRRKNTSAHFLPMVVHS

SEQ ID NO: 31848 - protein, 66 aa, Homo sapiens
  Payload ID: 6229
  Gene Symbol: FGF10
  Gene Name: fibroblast growth factor 10
  ENSP ID: ENSP00000426406
MWKWILTHCASAFPHLPGCCCCCFLLLFLVSSVPVTCQALGQDMVSPEATNSSSSSFSSPSSAGRH

SEQ ID NO: 31849 - protein, 225 aa, Homo sapiens
  Payload ID: 6230
  Gene Symbol: FGF11
  Gene Name: fibroblast growth factor 11
  Uniprot ID: Q92914
  ENSP ID: ENSP00000293829
MAALASSLIRQKREVREPGGSRPVSAQRRVCPRGTKSLCQKQLLILLSKVRLCGGRPARPDRGPEPQLKGIVTKLFCRQGFYLQANPDGSIQGTPEDTSSFTHFNLIPVGLRVVTIQSAKLGHYMAMNAEGLLYSSPHFTAECRFKECVFENYYVLYASALYRQRRSGRAWYLGLDKEGQVMKGNRVKKTKAAAHFLPKLLEVAMYQEPSLHSVPEASPSSPPAP

SEQ ID NO: 31850 - protein, 101 aa, Homo sapiens
  Payload ID: 6230
  Gene Symbol: FGF11
  Gene Name: fibroblast growth factor 11
  ENSP ID: ENSP00000459746
MAMNAEGLLYSSPHFTAECRFKECVFENYYVLYASALYRQRRSGRAWYLGLDKEGQVMKGNRVKKTKAAAHFLPKLLEVAMYQEPSLHSVPEASPSSPPAP

SEQ ID NO: 31851 - protein, 101 aa, Homo sapiens; identical to SEQ ID NO: 31850
  Payload ID: 6230
  Gene Symbol: FGF11
  Gene Name: fibroblast growth factor 11
  ENSP ID: ENSP00000460753

SEQ ID NO: 31852 - protein, 101 aa, Homo sapiens; identical to SEQ ID NO: 31850
  Payload ID: 6230
  Gene Symbol: FGF11
  Gene Name: fibroblast growth factor 11
  ENSP ID: ENSP00000461397

SEQ ID NO: 31853 - protein, 101 aa, Homo sapiens; identical to SEQ ID NO: 31850
  Payload ID: 6230
  Gene Symbol: FGF11
  Gene Name: fibroblast growth factor 11
  ENSP ID: ENSP00000465134

SEQ ID NO: 31854 - protein, 181 aa, Homo sapiens
  Payload ID: 6231
  Gene Symbol: FGF12
  Gene Name: fibroblast growth factor 12
  Uniprot ID: P61328
  ENSP ID: ENSP00000393686
MESKEPQLKGIVTRLFSQQGYFLQMHPDGTIDGTKDENSDYTLFNLIPVGLRVVAIQGVKASLYVAMNGEGYLYSSDVFTPECKFKESVFENYYVIYSSTLYRQQESGRAWFLGLNKEGQIMKGNRVKKTKPSSHFVPKPIEVCMYREPSLHEIGEKQGRSRKSSGTPTMNGGKVVNQDST

SEQ ID NO: 31855 - protein, 107 aa, Homo sapiens
  Payload ID: 6231
  Gene Symbol: FGF12
  Gene Name: fibroblast growth factor 12
  ENSP ID: ENSP00000395517
MESKEPQLKGIVTRLFSQQGYFLQMHPDGTIDGTKDENSDYTLFNLIPVGLRVVAIQGVKASLYVAMNGEGYLYSSDVFTPECKFKESVFENYYVIYSSTLYRQQES

SEQ ID NO: 31856 - protein, 181 aa, Homo sapiens; identical to SEQ ID NO: 31854
  Payload ID: 6231
  Gene Symbol: FGF12
  Gene Name: fibroblast growth factor 12
  Uniprot ID: P61328
  ENSP ID: ENSP00000397635

SEQ ID NO: 31857 - protein, 144 aa, Homo sapiens
  Payload ID: 6231
  Gene Symbol: FGF12
  Gene Name: fibroblast growth factor 12
  ENSP ID: ENSP00000410125
MESKALFNLIPVGLRVVAIQGVKASLYVAMNGEGYLYSSDVFTPECKFKESVFENYYVIYSSTLYRQQESGRAWFLGLNKEGQIMKGNRVKKTKPSSHFVPKPIEVCMYREPSLHEIGEKQGRSRKSSGTPTMNGGKVVNQDST

SEQ ID NO: 31858 - protein, 141 aa, Homo sapiens
  Payload ID: 6231
  Gene Symbol: FGF12
  Gene Name: fibroblast growth factor 12
  ENSP ID: ENSP00000412904
MHPDGTIDGTKDENSDYTLFNLIPVGLRVVAIQGVKASLYVAMNGEGYLYSSDVFTPECKFKESVFENYYVIYSSTLYRQQESGRAWFLGLNKEGQIMKGNRVKKTKPSSHFVPKPIEVCMYREPSLHEIGEKQGRSRKSS

SEQ ID NO: 31859 - protein, 243 aa, Homo sapiens
  Payload ID: 6231
  Gene Symbol: FGF12
  Gene Name: fibroblast growth factor 12
  Uniprot ID: P61328
  ENSP ID: ENSP00000413496
MAAAIASSLIRQKRQARESNSDRVSASKRRSSPSKDGRSLCERHVLGVFSKVRFCSGRKRPVRRRPEPQLKGIVTRLFSQQGYFLQMHPDGTIDGTKDENSDYTLFNLIPVGLRVVAIQGVKASLYVAMNGEGYLYSSDVFTPECKFKESVFENYYVIYSSTLYRQQESGRAWFLGLNKEGQIMKGNRVKKTKPSSHFVPKPIEVCMYREPSLHEIGEKQGRSRKSSGTPTMNGGKVVNQDST

SEQ ID NO: 31860 - protein, 192 aa, Homo sapiens
  Payload ID: 6232
  Gene Symbol: FGF13
  Gene Name: fibroblast growth factor 13
  Uniprot ID: Q92913
  ENSP ID: ENSP00000303391
MALLRKSYSEPQLKGIVTKLYSRQGYHLQLQADGTIDGTKDEDSTYTLFNLIPVGLRVVAIQGVQTKLYLAMNSEGYLYTSELFTPECKFKESVFENYYVTYSSMIYRQQQSGRGWYLGLNKEGEIMKGNHVKKNKPAAHFLPKPLKVAMYKEPSLHDLTEFSRSGSGTPTKSRSVSGVLNGGKSMSHNEST

SEQ ID NO: 31861 - protein, 245 aa, Homo sapiens
  Payload ID: 6232
  Gene Symbol: FGF13
  Gene Name: fibroblast growth factor 13
  Uniprot ID: Q92913
  ENSP ID: ENSP00000322390
MAAAIASSLIRQKRQAREREKSNACKCVSSPSKGKTSCDKNKLNVFSRVKLFGSKKRRRRRPEPQLKGIVTKLYSRQGYHLQLQADGTIDGTKDEDSTYTLFNLIPVGLRVVAIQGVQTKLYLAMNSEGYLYTSELFTPECKFKESVFENYYVTYSSMIYRQQQSGRGWYLGLNKEGEIMKGNHVKKNKPAAHFLPKPLKVAMYKEPSLHDLTEFSRSGSGTPTKSRSVSGVLNGGKSMSHNEST

SEQ ID NO: 31862 - protein, 43 aa, Homo sapiens
  Payload ID: 6232
  Gene Symbol: FGF13
  Gene Name: fibroblast growth factor 13
  ENSP ID: ENSP00000388688
MLRQDSIQSAELKKKESPFRAKCHEIFCCPLKQVHHKENTEPE

SEQ ID NO: 31863 - protein, 255 aa, Homo sapiens
  Payload ID: 6232
  Gene Symbol: FGF13
  Gene Name: fibroblast growth factor 13
  Uniprot ID: Q92913
  ENSP ID: ENSP00000396198
MSGKVTKPKEEKDASKVLDDAPPGTQEYIMLRQDSIQSAELKKKESPFRAKCHEIFCCPLKQVHHKENTEPEEPQLKGIVTKLYSRQGYHLQLQADGTIDGTKDEDSTYTLFNLIPVGLRVVAIQGVQTKLYLAMNSEGYLYTSELFTPECKFKESVFENYYVTYSSMIYRQQQSGRGWYLGLNKEGEIMKGNHVKKNKPAAHFLPKPLKVAMYKEPSLHDLTEFSRSGSGTPTKSRSVSGVLNGGKSMSHNEST

SEQ ID NO: 31864 - protein, 206 aa, Homo sapiens
  Payload ID: 6232
  Gene Symbol: FGF13
  Gene Name: fibroblast growth factor 13
  ENSP ID: ENSP00000406916
MRTSMKKVGMHHLSSSGGSYYLILDDAPPGTQEYIMLRQDSIQSAELKKKESPFRAKCHEIFCCPLKQVHHKENTEPEEPQLKGIVTKLYSRQGYHLQLQADGTIDGTKDEDSTYTLFNLIPVGLRVVAIQGVQTKLYLAMNSEGYLYTSELFTPECKFKESVFENYYVTYSSMIYRQQQSGRGWYLGLNKEGEIMKGNHVKKNKP

SEQ ID NO: 31865 - protein, 226 aa, Homo sapiens
  Payload ID: 6232
  Gene Symbol: FGF13
  Gene Name: fibroblast growth factor 13
  Uniprot ID: Q92913
  ENSP ID: ENSP00000409276
MLRQDSIQSAELKKKESPFRAKCHEIFCCPLKQVHHKENTEPEEPQLKGIVTKLYSRQGYHLQLQADGTIDGTKDEDSTYTLFNLIPVGLRVVAIQGVQTKLYLAMNSEGYLYTSELFTPECKFKESVFENYYVTYSSMIYRQQQSGRGWYLGLNKEGEIMKGNHVKKNKPAAHFLPKPLKVAMYKEPSLHDLTEFSRSGSGTPTKSRSVSGVLNGGKSMSHNEST

SEQ ID NO: 31866 - protein, 98 aa, Homo sapiens
  Payload ID: 6232
  Gene Symbol: FGF13
  Gene Name: fibroblast growth factor 13
  ENSP ID: ENSP00000411999
MSGKVTKPKEEKDASKVLDDAPPGTQEYIMLRQDSIQSAELKKKESPFRAKCHEIFCCPLKQVHHKENTEPEEPQLKGIVTKLYSRQGYHLQLQADGT

SEQ ID NO: 31867 - protein, 199 aa, Homo sapiens
  Payload ID: 6232
  Gene Symbol: FGF13
  Gene Name: fibroblast growth factor 13
  Uniprot ID: Q92913
  ENSP ID: ENSP00000487411
MSGKVTKPKEEKDASKEPQLKGIVTKLYSRQGYHLQLQADGTIDGTKDEDSTYTLFNLIPVGLRVVAIQGVQTKLYLAMNSEGYLYTSELFTPECKFKESVFENYYVTYSSMIYRQQQSGRGWYLGLNKEGEIMKGNHVKKNKPAAHFLPKPLKVAMYKEPSLHDLTEFSRSGSGTPTKSRSVSGVLNGGKSMSHNEST

SEQ ID NO: 31868 - protein, 252 aa, Homo sapiens
  Payload ID: 6233
  Gene Symbol: FGF14
  Gene Name: fibroblast growth factor 14
  Uniprot ID: Q92915
  ENSP ID: ENSP00000365301
MVKPVPLFRRTDFKLLLCNHKDLFFLRVSKLLDCFSPKSMWFLWNIFSKGTHMLQCLCGKSLKKNKNPTDPQLKGIVTRLYCRQGYYLQMHPDGALDGTKDDSTNSTLFNLIPVGLRVVAIQGVKTGLYIAMNGEGYLYPSELFTPECKFKESVFENYYVIYSSMLYRQQESGRAWFLGLNKEGQAMKGNRVKKTKPAAHFLPKPLEVAMYREPSLHDVGETVPKPGVTPSKSTSASAIMNGGKPVNKSKTT

SEQ ID NO: 31869 - protein, 247 aa, Homo sapiens
  Payload ID: 6233
  Gene Symbol: FGF14
  Gene Name: fibroblast growth factor 14
  Uniprot ID: Q92915
  ENSP ID: ENSP00000365313
MAAAIASGLIRQKRQAREQHWDRPSASRRRSSPSKNRGLCNGNLVDIFSKVRIFGLKKRRLRRQDPQLKGIVTRLYCRQGYYLQMHPDGALDGTKDDSTNSTLFNLIPVGLRVVAIQGVKTGLYIAMNGEGYLYPSELFTPECKFKESVFENYYVIYSSMLYRQQESGRAWFLGLNKEGQAMKGNRVKKTKPAAHFLPKPLEVAMYREPSLHDVGETVPKPGVTPSKSTSASAIMNGGKPVNKSKTT

SEQ ID NO: 31870 - protein, 207 aa, Homo sapiens
  Payload ID: 6234
  Gene Symbol: FGF16
  Gene Name: fibroblast growth factor 16
  Uniprot ID: O43320
  ENSP ID: ENSP00000399324
MAEVGGVFASLDWDLHGFSSSLGNVPLADSPGFLNERLGQIEGKLQRGSPTDFAHLKGILRRRQLYCRTGFHLEIFPNGTVHGTRHDHSRFGILEFISLAVGLISIRGVDSGLYLGMNERGELYGSKKLTRECVFREQFEENWYNTYASTLYKHSDSERQYYVALNKDGSPREGYRTKRHQKFTHFLPRPVDPSKLPSMSRDLFHYR

SEQ ID NO: 31871 - protein, 216 aa, Homo sapiens
  Payload ID: 6235
  Gene Symbol: FGF17
  Gene Name: fibroblast growth factor 17
  Uniprot ID: O60258
  ENSP ID: ENSP00000352414
MGAARLLPNLTLCLQLLILCCQTQGENHPSPNFNQYVRDQGAMTDQLSRRQIREYQLYSRTSGKHVQVTGRRISATAEDGNKFAKLIVETDTFGSRVRIKGAESEKYICMNKRGKLIGKPSGKSKDCVFTEIVLENNYTAFQNARHEGWFMAFTRQGRPRQASRSRQNQREAHFIKRLYQGQLPFPNHAEKQKQFEFVGSAPTRRTKRTRRPQPLT

SEQ ID NO: 31872 - protein, 205 aa, Homo sapiens
  Payload ID: 6235
  Gene Symbol: FGF17
  Gene Name: fibroblast growth factor 17
  Uniprot ID: O60258
  ENSP ID: ENSP00000431041
MGAARLLPNLTLCLQLLILCCQTQYVRDQGAMTDQLSRRQIREYQLYSRTSGKHVQVTGRRISATAEDGNKFAKLIVETDTFGSRVRIKGAESEKYICMNKRGKLIGKPSGKSKDCVFTEIVLENNYTAFQNARHEGWFMAFTRQGRPRQASRSRQNQREAHFIKRLYQGQLPFPNHAEKQKQFEFVGSAPTRRTKRTRRPQPLT

SEQ ID NO: 31873 - protein, 207 aa, Homo sapiens
  Payload ID: 6236
  Gene Symbol: FGF18
  Gene Name: fibroblast growth factor 18
  Uniprot ID: O76093
  ENSP ID: ENSP00000274625
MYSAPSACTCLCLHFLLLCFQVQVLVAEENVDFRIHVENQTRARDDVSRKQLRLYQLYSRTSGKHIQVLGRRISARGEDGDKYAQLLVETDTFGSQVRIKGKETEFYLCMNRKGKLVGKPDGTSKECVFIEKVLENNYTALMSAKYSGWYVGFTKKGRPRKGPKTRENQQDVHFMKRYPKGQPELQKPFKYTTVTKRSRRIRPTHPA

SEQ ID NO: 31874 - protein, 216 aa, Homo sapiens
  Payload ID: 6237
  Gene Symbol: FGF19
  Gene Name: fibroblast growth factor 19
  Uniprot ID: O95750
  ENSP ID: ENSP00000294312
MRSGCVVVHVWILAGLWLAVAGRPLAFSDAGPHVHYGWGDPIRLRHLYTSGPHGLSSCFLRIRADGVVDCARGQSAHSLLEIKAVALRTVAIKGVHSVRYLCMGADGKMQGLLQYSEEDCAFEEEIRPDGYNVYRSEKHRLPVSLSSAKQRQLYKNRGFLPLSHFLPMLPMVPEEPEDLRGHLESDMFSSPLETDSMDPFGLVTGLEAVRSPSFEK

SEQ ID NO: 31875 - protein, 288 aa, Homo sapiens
  Payload ID: 6238
  Gene Symbol: FGF2
  Gene Name: fibroblast growth factor 2 (basic)
  ENSP ID: ENSP00000264498
LVGVGGGDVEDVTPRPGGCQISGRGARGCNGIPGAAAWEAALPRRRPRRHPSVNPRSRAAGSPRTRGRRTEERPSGSRLGDRGRGRALPGGRLGGRGRGRAPERVGGRGRGRGTAAPRAAPAARGSRPGPAGTMAAGSITTLPALPEDGGSGAFPPGHFKDPKRLYCKNGGFFLRIHPDGRVDGVREKSDPHIKLQLQAEERGVVSIKGVCANRYLAMKEDGRLLASKCVTDECFFFERLESNNYNTYRSRKYTSWYVALKRTGQYKLGSKTGPGQKAILFLPMSAKS

SEQ ID NO: 31876 - protein, 155 aa, Homo sapiens [sequence omitted]

SEQ ID NO: 31877 - protein, 288 aa, Homo sapiens; identical to SEQ ID NO: 31875
  Payload ID: 6238
  Gene Symbol: FGF2
  Gene Name: fibroblast growth factor 2 (basic)
  ENSP ID: ENSP00000478620

SEQ ID NO: 31878 - protein, 211 aa, Homo sapiens
  Payload ID: 6239
  Gene Symbol: FGF20
  Gene Name: fibroblast growth factor 20
  Uniprot ID: Q9NP95
  ENSP ID: ENSP00000180166
MAPLAEVGGFLGGLEGLGQQVGSHFLLPPAGERPPLLGERRSAAERSARGGPGAAQLAHLHGILRRRQLYCRTGFHLQILPDGSVQGTRQDHSLFGILEFISVAVGLVSIRGVDSGLYLGMNDKGELYGSEKLTSECIFREQFEENWYNTYSSNIYKHGDTGRRYFVALNKDGTPRDGARSKRHQKFTHFLPRPVDPERVPELYKDLLMYT

SEQ ID NO: 31879 - protein, 113 aa, Homo sapiens
  Payload ID: 6239
  Gene Symbol: FGF20
  Gene Name: fibroblast growth factor 20
  ENSP ID: ENSP00000428072
  MOD_RES (1)..(1): Any amino acid
XAAGSSIAAPASTCRSCPTAACRAPGRTTASSEKLTSECIFREQFEENWYNTYSSNIYKHGDTGRRYFVALNKDGTPRDGARSKRHQKFTHFLPRPVDPERVPELYKDLLMYT

SEQ ID NO: 31880 - protein, 209 aa, Homo sapiens
  Payload ID: 6240
  Gene Symbol: FGF21
  Gene Name: fibroblast growth factor 21
  Uniprot ID: Q9NSA1
  ENSP ID: ENSP00000222157
MDSDETGFEHSGLWVSVLAGLLLGACQAHPIPDSSPLLQFGGQVRQRYLYTDDAQQTEAHLEIREDGTVGGAADQSPESLLQLKALKPGVIQILGVKTSRFLCQRPDGALYGSLHFDPEACSFRELLLEDGYNVYQSEAHGLPLHLPGNKSPHRDPAPRGPARFLPLPGLPPALPEPPGILAPQPPDVGSSDPLSMVGPSQGRSPSYAS

SEQ ID NO: 31881 - protein, 209 aa, Homo sapiens; identical to SEQ ID NO: 31880
  Payload ID: 6240
  Gene Symbol: FGF21
  Gene Name: fibroblast growth factor 21
  Uniprot ID: Q9NSA1
  ENSP ID: ENSP00000471477

SEQ ID NO: 31882 - protein, 170 aa, Homo sapiens
  Payload ID: 6241
  Gene Symbol: FGF22
  Gene Name: fibroblast growth factor 22
  Uniprot ID: Q9HCT0
  ENSP ID: ENSP00000215530
MRRRLWLGLAWLLLARAPDAAGTPSASRGPRSYPHLEGDVRWRRLFSSTHFFLRVDPGGRVQGTRWRHGQDSILEIRSVHVGVVVIKAVSSGFYVAMNRRGRLYGSRLYTVDCRFRERIEENGHNTYASQRWRRRGQPMFLALDRRGGPRPGGRTRRYHLSAHFLPVLVS

SEQ ID NO: 31883 - protein, 165 aa, Homo sapiens
  Payload ID: 6241
  Gene Symbol: FGF22
  Gene Name: fibroblast growth factor 22
  ENSP ID: ENSP00000466004
MRRRLWLGLAWLLLARAPDAAGTPSASRGPRSYPHLEGDVRWRRLFSSTHFFLRVDPGGRVQGTRWRHGQDSILEIRSVHVGVVVIKAVSSGFYVAMNRRGRLYGSVPGAHRRERPQHLRLTALAPPRPAHVPGAGQEGGAPARRPDAAVPPVRPLPARPGLLRP

SEQ ID NO: 31884 - protein, 251 aa, Homo sapiens
  Payload ID: 6242
  Gene Symbol: FGF23
  Gene Name: fibroblast growth factor 23
  Uniprot ID: Q9GZV9
  ENSP ID: ENSP00000237837
MLGARLRLWVCALCSVCSMSVLRAYPNASPLLGSSWGGLIHLYTATARNSYHLQIHKNGHVDGAPHQTIYSALMIRSEDAGFVVITGVMSRRYLCMDFRGNIFGSHYFDPENCRFQHQTLENGYDVYHSPQYHFLVSLGRAKRAFLPGMNPPPYSQFLSRRNEIPLIHFNTPIPRRHTRSAEDDSERDPLNVLKPRARMTPAPASCSQELPSAEDNSPMASDPLGVVRGGRVNTHAGGTGPEGCRPFAKFI

SEQ ID NO: 31885 - protein, 239 aa, Homo sapiens
  Payload ID: 6243
  Gene Symbol: FGF3
  Gene Name: fibroblast growth factor 3
  Uniprot ID: P11487
  ENSP ID: ENSP00000334122
MGLIWLLLLSLLEPGWPAAGPGARLRRDAGGRGGVYEHLGGAPRRRKLYCATKYHLQLHPSGRVNGSLENSAYSILEITAVEVGIVAIRGLFSGRYLAMNKRGRLYASEHYSAECEFVERIHELGYNTYASRLYRTVSSTPGARRQPSAERLWYVSVNGKGRPRRGFKTRRTQKSSLFLPRVLDHRDHEMVRQLQSGLPRPPGKGVQPRRRRQKQSPDNLEPSHVQASRLGSQLEASAH

SEQ ID NO: 31886 - protein, 206 aa, Homo sapiens
  Payload ID: 6244
  Gene Symbol: FGF4
  Gene Name: fibroblast growth factor 4
  Uniprot ID: P08620
  ENSP ID: ENSP00000168712
MSGPGTAAVALLPAVLLALLAPWAGRGGAAAPTAPNGTLEAELERRWESLVALSLARLPVAAQPKEAAVQSGAGDYLLGIKRLRRLYCNVGIGFHLQALPDGRIGGAHADTRDSLLELSPVERGVVSIFGVASRFFVAMSSKGKLYGSPFFTDECTFKEILLPNNYNAYESYKYPGMFIALSKNGKTKKGNRVSPTMKVTHFLPRL

SEQ ID NO: 31887 - protein, 268 aa, Homo sapiens
  Payload ID: 6245
  Gene Symbol: FGF5
  Gene Name: fibroblast growth factor 5
  Uniprot ID: P12034
  ENSP ID: ENSP00000311697
MSLSFLLLLFFSHLILSAWAHGEKRLAPKGQPGPAATDRNPRGSSSRQSSSSAMSSSSASSSPAASLGSQGSGLEQSSFQWSPSGRRTGSLYCRVGIGFHLQIYPDGKVNGSHEANMLSVLEIFAVSQGIVGIRGVFSNKFLAMSKKGKLHASAKFTDDCKFRERFQENSYNTYASAIHRTEKTGREWYVALNKRGKAKRGCSPRVKPQHISTHFLPRFKQSEQPELSFTVTVPEKKKPPSPIKPKIPLSAPRKNTNSVKYRLKFRFG

SEQ ID NO: 31888 - protein, 123 aa, Homo sapiens
  Payload ID: 6245
  Gene Symbol: FGF5
  Gene Name: fibroblast growth factor 5
  Uniprot ID: P12034
  ENSP ID: ENSP00000398353
MSLSFLLLLFFSHLILSAWAHGEKRLAPKGQPGPAATDRNPRGSSSRQSSSSAMSSSSASSSPAASLGSQGSGLEQSSFQWSPSGRRTGSLYCRVGIGFHLQIYPDGKVNGSHEANMLSQVHR

SEQ ID NO: 31889 - protein, 119 aa, Homo sapiens
  Payload ID: 6245
  Gene Symbol: FGF5
  Gene Name: fibroblast growth factor 5
  ENSP ID: ENSP00000423903
NPRGSSSRQSSSSAMSSSSASSSPAASLGSQGSGLEQSSFQWSPSGRRTGSLYCRVGIGFHLQIYPDGKVNGSHEANMLSVLEIFAVSQGIVGIRGVFSNKFLAMSKKGKLHASNTLET

SEQ ID NO: 31890 - protein, 208 aa, Homo sapiens
  Payload ID: 6246
  Gene Symbol: FGF6
  Gene Name: fibroblast growth factor 6
  Uniprot ID: P10767
  ENSP ID: ENSP00000228837
MALGQKLFITMSRGAGRLQGTLWALVFLGILVGMVVPSPAGTRANNTLLDSRGWGTLLSRSRAGLAGEIAGVNWESGYLVGIKRQRRLYCNVGIGFHLQVLPDGRISGTHEENPYSLLEISTVERGVVSLFGVRSALFVAMNSKGRLYATPSFQEECKFRETLLPNNYNAYESDLYQGTYIALSKYGRVKRGSKVSPIMTVTHFLPRI

SEQ ID NO: 31891 - protein, 31 aa, Homo sapiens
  Payload ID: 6246
  Gene Symbol: FGF6
  Gene Name: fibroblast growth factor 6
  ENSP ID: ENSP00000445479
TVERGVVSLFGVRSALFVAMNSKGRLYATVK

SEQ ID NO: 31892 - protein, 194 aa, Homo sapiens
  Payload ID: 6247
  Gene Symbol: FGF7
  Gene Name: fibroblast growth factor 7
  Uniprot ID: P21781
  ENSP ID: ENSP00000267843
MHKWILTWILPTLLYRSCFHIICLVGTISLACNDMTPEQMATNVNCSSPERHTRSYDYMEGGDIRVRRLFCRTQWYLRIDKRGKVKGTQEMKNNYNIMEIRTVAVGIVAIKGVESEFYLAMNKEGKLYAKKECNEDCNFKELILENHYNTYASAKWTHNGGEMFVALNQKGIPVRGKKTKKEQKTAHFLPMAIT

SEQ ID NO: 31893 - protein, 194 aa, Homo sapiens; identical to SEQ ID NO: 31892
  Payload ID: 6247
  Gene Symbol: FGF7
  Gene Name: fibroblast growth factor 7
  Uniprot ID: P21781
  ENSP ID: ENSP00000453048

SEQ ID NO: 31894 - protein, 122 aa, Homo sapiens
  Payload ID: 6247
  Gene Symbol: FGF7
  Gene Name: fibroblast growth factor 7
  ENSP ID: ENSP00000453980
MEGGDIRVRRLFCRTQWYLRIDKRGKVKGTQEMKNNYNIMEIRTVAVGIVAIKGVESEFYLAMNKEGKLYAKKECNEDCNFKELILENHYNTYASAKWTHNGGEMFVALNQKGIPVRGKKTK

SEQ ID NO: 31895 - protein, 97 aa, Homo sapiens
  Payload ID: 6247
  Gene Symbol: FGF7
  Gene Name: fibroblast growth factor 7
  Uniprot ID: P21781
  ENSP ID: ENSP00000454205
MHKWILTWILPTLLYRSCFHIICLVGTISLACNDMTPEQMATNVNCSSPERHTRSYDYMEGGDIRVRRLFCRTQWYLRIDKRGKVKGTQEMKNNYSK

SEQ ID NO: 31896 - protein, 194 aa, Homo sapiens; identical to SEQ ID NO: 31892
  Payload ID: 6247
  Gene Symbol: FGF7
  Gene Name: fibroblast growth factor 7
  Uniprot ID: P21781
  ENSP ID: ENSP00000478148

SEQ ID NO: 31897 - protein, 244 aa, Homo sapiens
  Payload ID: 6248
  Gene Symbol: FGF8
  Gene Name: fibroblast growth factor 8 (androgen-induced)
  Uniprot ID: P55075
  ENSP ID: ENSP00000321797
MGSPRSALSCLLLHLLVLCLQAQEGPGRGPALGRELASLFRAGREPQGVSQQVTVQSSPNFTQHVREQSLVTDQLSRRLIRTYQLYSRTSGKHVQVLANKRINAMAEDGDPFAKLIVETDTFGSRVRVRGAETGLYICMNKKGKLIAKSNGKGKDCVFTEIVLENNYTALQNAKYEGWYMAFTRKGRPRKGSKTRQHQREVHFMKRLPRGHHTTEQSLRFEFLNYPPFTRSLRGSQRTWAPEPR

SEQ ID NO: 31898 - protein, 215 aa, Homo sapiens
  Payload ID: 6248
  Gene Symbol: FGF8
  Gene Name: fibroblast growth factor 8 (androgen-induced)
  Uniprot ID: P55075
  ENSP ID: ENSP00000321945
MGSPRSALSCLLLHLLVLCLQAQVTVQSSPNFTQHVREQSLVTDQLSRRLIRTYQLYSRTSGKHVQVLANKRINAMAEDGDPFAKLIVETDTFGSRVRVRGAETGLYICMNKKGKLIAKSNGKGKDCVFTEIVLENNYTALQNAKYEGWYMAFTRKGRPRKGSKTRQHQREVHFMKRLPRGHHTTEQSLRFEFLNYPPFTRSLRGSQRTWAPEPR

SEQ ID NO: 31899 - protein, 233 aa, Homo sapiens
  Payload ID: 6248
  Gene Symbol: FGF8
  Gene Name: fibroblast growth factor 8 (androgen-induced)
  Uniprot ID: P55075
  ENSP ID: ENSP00000340039
MGSPRSALSCLLLHLLVLCLQAQEGPGRGPALGRELASLFRAGREPQGVSQQHVREQSLVTDQLSRRLIRTYQLYSRTSGKHVQVLANKRINAMAEDGDPFAKLIVETDTFGSRVRVRGAETGLYICMNKKGKLIAKSNGKGKDCVFTEIVLENNYTALQNAKYEGWYMAFTRKGRPRKGSKTRQHQREVHFMKRLPRGHHTTEQSLRFEFLNYPPFTRSLRGSQRTWAPEPR

SEQ ID NO: 31900 - protein, 204 aa, Homo sapiens
  Payload ID: 6248
  Gene Symbol: FGF8
  Gene Name: fibroblast growth factor 8 (androgen-induced)
  Uniprot ID: P55075
  ENSP ID: ENSP00000344306
MGSPRSALSCLLLHLLVLCLQAQHVREQSLVTDQLSRRLIRTYQLYSRTSGKHVQVLANKRINAMAEDGDPFAKLIVETDTFGSRVRVRGAETGLYICMNKKGKLIAKSNGKGKDCVFTEIVLENNYTALQNAKYEGWYMAFTRKGRPRKGSKTRQHQREVHFMKRLPRGHHTTEQSLRFEFLNYPPFTRSLRGSQRTWAPEPR

SEQ ID NO: 31901 - protein, 37 aa, Homo sapiens
  Payload ID: 6248
  Gene Symbol: FGF8
  Gene Name: fibroblast growth factor 8 (androgen-induced)
  ENSP ID: ENSP00000473299
MGSPRSALSCLLLHLLVLCLQAQVRRGARRRGPGAPV

SEQ ID NO: 31902 - protein, 140 aa, Homo sapiens
  Payload ID: 6248
  Gene Symbol: FGF8
  Gene Name: fibroblast growth factor 8 (androgen-induced)
  ENSP ID: ENSP00000484420
MAEDGDPFAKLIVETDTFGSRVRVRGAETGLYICMNKKGKLIAKSNGKGKDCVFTEIVLENNYTALQNAKYEGWYMAFTRKGRPRKGSKTRQHQREVHFMKRLPRGHHTTEQSLRFEFLNYPPFTRSLRGSQRTWAPEPR

SEQ ID NO: 31903 - protein, 208 aa, Homo sapiens
  Payload ID: 6249
  Gene Symbol: FGF9
  Gene Name: fibroblast growth factor 9
  Uniprot ID: P31371
  ENSP ID: ENSP00000371790
MAPLGEVGNYFGVQDAVPFGNVPVLPVDSPVLLSDHLGQSEAGGLPRGPAVTDLDHLKGILRRRQLYCRTGFHLEIFPNGTIQGTRKDHSRFGILEFISIAVGLVSIRGVDSGLYLGMNEKGELYGSEKLTQECVFREQFEENWYNTYSSNLYKHVDTGRRYYVALNKDGTPREGTRTKRHQKFTHFLPRPVDPDKVPELYKDILSQS

SEQ ID NO: 31904 - protein, 234 aa, Homo sapiens [sequence omitted]

SEQ ID NO: 31905 - protein, 223 aa, Homo sapiens
  Payload ID: 6251
  Gene Symbol: FGFBP2
  Gene Name: fibroblast growth factor binding protein 2
  Uniprot ID: Q9BYJ0
  ENSP ID: ENSP00000259989
MKFVPCLLLVTLSCLGTLGQAPRQKQGSTGEEFHFQTGGRDSCTMRPSSLGQGAGEVWLRVDCRNTDQTYWCEYRGQPSMCQAFAADPKPYWNQALQELRRLHHACQGAPVLRPSVCREAGPQAHMQQVTSSLKGSPEPNQQPEAGTPSLRPKATVKLTEATQLGKDSMEELGKAKPTTRPTAKPTQPGPRPGGNEEAKKKAWEHCWKPFQALCAFLISFFRG

SEQ ID NO: 31906 - protein, 258 aa, Homo sapiens
  Payload ID: 6252
  Gene Symbol: FGFBP3
  Gene Name: fibroblast growth factor binding protein 3
  Uniprot ID: Q8TAT2
  ENSP ID: ENSP00000339067
MTPPKLRASLSPSLLLLLSGCLLAAARREKGAASNVAEPVPGPTGGSSGRFLSPEQHACSWQLLLPAPEAAAGSELALRCQSPDGARHQCAYRGHPERCAAYAARRAHFWKQVLGGLRKKRRPCHDPAPLQARLCAGKKGHGAELRLVPRASPPARPTVAGFAGESKPRARNRGRTRERASGPAAGTPPPQSAPPKENPSERKTNEGKRKAALVPNEERPMGTGPDPDGLDGNAELTETYCAEKWHSLCNFFVNFWNG

SEQ ID NO: 31907 - protein, 731 aa, Homo sapiens
  Payload ID: 6253
  Gene Symbol: FGFR1
  Gene Name: fibroblast growth factor receptor 1
  Uniprot ID: P11362
  ENSP ID: ENSP00000327229
MWSWKCLLFWAVLVTATLCTARPSPTLPEQDALPSSEDDDDDDDSSSEEKETDNTKPNPVAPYWTSPEKMEKKLHAVPAAKTVKFKCPSSGTPNPTLRWLKNGKEFKPDHRIGGYKVRYATWSIIMDSVVPSDKGNYTCIVENEYGSINHTYQLDVVERSPHRPILQAGLPANKTVALGSNVEFMCKVYSDPQPHIQWLKHIEVNGSKIGPDNLPYVQILKTAGVNTTDKEMEVLHLRNVSFEDAGEYTCLAGNSIGLSHHSAWLTVLEALEERPAVMTSPLYLEIIIYCTGAFLISCMVGSVIVYKMKSGTKKSDFHSQMAVHKLAKSIPLRRQVTVSADSSASMNSGVLLVRPSRLSSSGTPMLAGVSEYELPEDPRWELPRDRLVLGKPLGEGCFGQVVLAEAIGLDKDKPNRVTKVAVKMLKSDATEKDLSDLISEMEMMKMIGKHKNIINLLGACTQDGPLYVIVEYASKGNLREYLQARRPPGLEYCYNPSHNPEEQLSSKDLVSCAYQVARGMEYLASKKCIHRDLAARNVLVTEDNVMKIADFGLARDIHHIDYYKKTTNGRLPVKWMAPEALFDRIYTHQSDVWSFGVLLWEIFTLGGSPYPGVPVEELFKLLKEGHRMDKPSNCTNELYMMMRDCWHAVPSQRPTFKQLVEDLDRIVALTSNQEYLDLSMPLDQYSPSFPDTRSSTCSSGEDSVFSHEPLPEEPCLPRHPAQLANGGLKRR

SEQ ID NO: 31908 - protein, 812 aa, Homo sapiens
  Payload ID: 6253
  Gene Symbol: FGFR1
  Gene Name: fibroblast growth factor receptor 1
  Uniprot ID: P11362
  ENSP ID: ENSP00000337247
MAAVTRDFGEMLLHSGRVLPAEAQPWGAPVEVESFLVHPGDLLQLRCRLRDDVQSINWLRDGVQLAESNRTRITGEEVEVQDSVPADSGLYACVTSSPSGSDTTYFSVNVSDALPSSEDDDDDDDSSSEEKETDNTKPNRMPVAPYWTSPEKMEKKLHAVPAAKTVKFKCPSSGTPNPTLRWLKNGKEFKPDHRIGGYKVRYATWSIIMDSVVPSDKGNYTCIVENEYGSINHTYQLDVVERSPHRPILQAGLPANKTVALGSNVEFMCKVYSDPQPHIQWLKHIEVNGSKIGPDNLPYVQILKTAGVNTTDKEMEVLHLRNVSFEDAGEYTCLAGNSIGLSHHSAWLTVLEALEERPAVMTSPLYLEIIIYCTGAFLISCMVGSVIVYKMKSGTKKSDFHSQMAVHKLAKSIPLRRQVSADSSASMNSGVLLVRPSRLSSSGTPMLAGVSEYELPEDPRWELPRDRLVLGKPLGEGCFGQVVLAEAIGLDKDKPNRVTKVAVKMLKSDATEKDLSDLISEMEMMKMIGKHKNIINLLGACTQDGPLYVIVEYASKGNLREYLQARRPPGLEYCYNPSHNPEEQLSSKDLVSCAYQVARGMEYLASKKCIHRDLAARNVLVTEDNVMKIADFGLARDIHHIDYYKKTTNGRLPVKWMAPEALFDRIYTHQSDVWSFGVLLWEIFTLGGSPYPGVPVEELFKLLKEGHRMDKPSNCTNELYMMMRDCWHAVPSQRPTFKQLVEDLDRIVALTSNQEYLDLSMPLDQYSPSFPDTRSSTCSSGEDSVFSHEPLPEEPCLPRHPAQLANGGLKRR

SEQ ID NO: 31909 - protein, 367 aa, Homo sapiens
  Payload ID: 6253
  Gene Symbol: FGFR1
  Gene Name: fibroblast growth factor receptor 1
  ENSP ID: ENSP00000340636
MWSWKCLLFWAVLVTATLCTARPSPTLPEQAQPWGAPVEVESFLVHPGDLLQLRCRLRDDVQSINWLRDGVQLAESNRTRITGEEVEVQDSVPADSGLYACVTSSPSGSDTTYFSVNVSVPIDALPSSEDDDDDDDSSSEEKETDNTKPNPVAPYWTSPEKMEKKLHAVPAAKTVKFKCPSSGTPNPTLRWLKNGKEFKPDHRIGGYKVRYATWSIIMDSVVPSDKGNYTCIVENEYGSINHTYQLDVVERSPHRPILQAGLPANKTVALGSNVEFMCKVYSDPQPHIQWLKHIEVNGSKIGPDNLPYVQILKHSGINSSDAEVLTLFNVTEAQSGEYVCKVSNYIGEANQSAWLTVTRPVAKDCWS

SEQ ID NO: 31910 - protein, 733 aa, Homo sapiens
  Payload ID: 6253
  Gene Symbol: FGFR1
  Gene Name: fibroblast growth factor receptor 1
  Uniprot ID: P11362
  ENSP ID: ENSP00000348537
MWSWKCLLFWAVLVTATLCTARPSPTLPEQDALPSSEDDDDDDDSSSEEKETDNTKPNRMPVAPYWTSPEKMEKKLHAVPAAKTVKFKCPSSGTPNPTLRWLKNGKEFKPDHRIGGYKVRYATWSIIMDSVVPSDKGNYTCIVENEYGSINHTYQLDVVERSPHRPILQAGLPANKTVALGSNVEFMCKVYSDPQPHIQWLKHIEVNGSKIGPDNLPYVQILKTAGVNTTDKEMEVLHLRNVSFEDAGEYTCLAGNSIGLSHHSAWLTVLEALEERPAVMTSPLYLEIIIYCTGAFLISCMVGSVIVYKMKSGTKKSDFHSQMAVHKLAKSIPLRRQVTVSADSSASMNSGVLLVRPSRLSSSGTPMLAGVSEYELPEDPRWELPRDRLVLGKPLGEGCFGQVVLAEAIGLDKDKPNRVTKVAVKMLKSDATEKDLSDLISEMEMMKMIGKHKNIINLLGACTQDGPLYVIVEYASKGNLREYLQARRPPGLEYCYNPSHNPEEQLSSKDLVSCAYQVARGMEYLASKKCIHRDLAARNVLVTEDNVMKIADFGLARDIHHIDYYKKTTNGRLPVKWMAPEALFDRIYTHQSDVWSFGVLLWEIFTLGGSPYPGVPVEELFKLLKEGHRMDKPSNCTNELYMMMRDCWHAVPSQRPTFKQLVEDLDRIVALTSNQEYLDLSMPLDQYSPSFPDTRSSTCSSGEDSVFSHEPLPEEPCLPRHPAQLANGGLKRR

SEQ ID NO: 31911 - protein, 820 aa, Homo sapiens
  Payload ID: 6253
  Gene Symbol: FGFR1
  Gene Name: fibroblast growth factor receptor 1
  Uniprot ID: P11362
  ENSP ID: ENSP00000380280
MWSWKCLLFWAVLVTATLCTARPSPTLPEQAQPWGAPVEVESFLVHPGDLLQLRCRLRDDVQSINWLRDGVQLAESNRTRITGEEVEVQDSVPADSGLYACVTSSPSGSDTTYFSVNVSDALPSSEDDDDDDDSSSEEKETDNTKPNPVAPYWTSPEKMEKKLHAVPAAKTVKFKCPSSGTPNPTLRWLKNGKEFKPDHRIGGYKVRYATWSIIMDSVVPSDKGNYTCIVENEYGSINHTYQLDVVERSPHRPILQAGLPANKTVALGSNVEFMCKVYSDPQPHIQWLKHIEVNGSKIGPDNLPYVQILKTAGVNTTDKEMEVLHLRNVSFEDAGEYTCLAGNSIGLSHHSAWLTVLEALEERPAVMTSPLYLEIIIYCTGAFLISCMVGSVIVYKMKSGTKKSDFHSQMAVHKLAKSIPLRRQVTVSADSSASMNSGVLLVRPSRLSSSGTPMLAGVSEYELPEDPRWELPRDRLVLGKPLGEGCFGQVVLAEAIGLDKDKPNRVTKVAVKMLKSDATEKDLSDLISEMEMMKMIGKHKNIINLLGACTQDGPLYVIVEYASKGNLREYLQARRPPGLEYCYNPSHNPEEQLSSKDLVSCAYQVARGMEYLASKKCIHRDLAARNVLVTEDNVMKIADFGLARDIHHIDYYKKTTNGRLPVKWMAPEALFDRIYTHQSDVWSFGVLLWEIFTLGGSPYPGVPVEELFKLLKEGHRMDKPSNCTNELYMMMRDCWHAVPSQRPTFKQLVEDLDRIVALTSNQEYLDLSMPLDQYSPSFPDTRSSTCSSGEDSVFSHEPLPEEPCLPRHPAQLANGGLKRR

SEQ ID NO: 31912 - protein, 733 aa, Homo sapiens
  Payload ID: 6253
  Gene Symbol: FGFR1
  Gene Name: fibroblast growth factor receptor 1
  ENSP ID: ENSP00000380292
MWSWKCLLFWAVLVTATLCTARPSPTLPEQDALPSSEDDDDDDDSSSEEKETDNTKPNPVAPYWTSPEKMEKKLHAVPAAKTVKFKCPSSGTPNPTLRWLKNGKEFKPDHRIGGYKVRYATWSIIMDSVVPSDKGNYTCIVENEYGSINHTYQLDVVERSPHRPILQAGLPANKTVALGSNVEFMCKVYSDPQPHIQWLKHIEVNGSKIGPDNLPYVQILKHSGINSSDAEVLTLFNVTEAQSGEYVCKVSNYIGEANQSAWLTVTRPVAKALEERPAVMTSPLYLEIIIYCTGAFLISCMVGSVIVYKMKSGTKKSDFHSQMAVHKLAKSIPLRRQVTVSADSSASMNSGVLLVRPSRLSSSGTPMLAGVSEYELPEDPRWELPRDRLVLGKPLGEGCFGQVVLAEAIGLDKDKPNRVTKVAVKMLKSDATEKDLSDLISEMEMMKMIGKHKNIINLLGACTQDGPLYVIVEYASKGNLREYLQARRPPGLEYCYNPSHNPEEQLSSKDLVSCAYQVARGMEYLASKKCIHRDLAARNVLVTEDNVMKIADFGLARDIHHIDYYKKTTNGRLPVKWMAPEALFDRIYTHQSDVWSFGVLLWEIFTLGGSPYPGVPVEELFKLLKEGHRMDKPSNCTNELYMMMRDCWHAVPSQRPTFKQLVEDLDRIVALTSNQEYLDLSMPLDQYSPSFPDTRSSTCSSGEDSVFSHEPLPEEPCLPRHPAQLANGGLKRR

SEQ ID NO: 31913 - protein, 820 aa, Homo sapiens; identical to SEQ ID NO: 31911
  Payload ID: 6253
  Gene Symbol: FGFR1
  Gene Name: fibroblast growth factor receptor 1
  Uniprot ID: P11362
  ENSP ID: ENSP00000380297

SEQ ID NO: 31914 - protein, 820 aa, Homo sapiens; identical to SEQ ID NO: 31911
  Payload ID: 6253
  Gene Symbol: FGFR1
  Gene Name: fibroblast growth factor receptor 1
  Uniprot ID: P11362
  ENSP ID: ENSP00000380302

SEQ ID NO: 31915 - protein, 54 aa, Homo sapiens
  Payload ID: 6253
  Gene Symbol: FGFR1
  Gene Name: fibroblast growth factor receptor 1
  ENSP ID: ENSP00000392645
MWSWKCLLFWAVLVTATLCTARPSPTLPEQDALPSSEDDDDDDDSSSEEKETDN

SEQ ID NO: 31916 - protein, 853 aa, Homo sapiens
  Payload ID: 6253
  Gene Symbol: FGFR1
  Gene Name: fibroblast growth factor receptor 1
  Uniprot ID: P11362
  ENSP ID: ENSP00000393312
MEARVSLKRRIELTVEYPWRCGALSPTSNCRTGMWSWKCLLFWAVLVTATLCTARPSPTLPEQAQPWGAPVEVESFLVHPGDLLQLRCRLRDDVQSINWLRDGVQLAESNRTRITGEEVEVQDSVPADSGLYACVTSSPSGSDTTYFSVNVSDALPSSEDDDDDDDSSSEEKETDNTKPNPVAPYWTSPEKMEKKLHAVPAAKTVKFKCPSSGTPNPTLRWLKNGKEFKPDHRIGGYKVRYATWSIIMDSVVPSDKGNYTCIVENEYGSINHTYQLDVVERSPHRPILQAGLPANKTVALGSNVEFMCKVYSDPQPHIQWLKHIEVNGSKIGPDNLPYVQILKTAGVNTTDKEMEVLHLRNVSFEDAGEYTCLAGNSIGLSHHSAWLTVLEALEERPAVMTSPLYLEIIIYCTGAFLISCMVGSVIVYKMKSGTKKSDFHSQMAVHKLAKSIPLRRQVTVSADSSASMNSGVLLVRPSRLSSSGTPMLAGVSEYELPEDPRWELPRDRLVLGKPLGEGCFGQVVLAEAIGLDKDKPNRVTKVAVKMLKSDATEKDLSDLISEMEMMKMIGKHKNIINLLGACTQDGPLYVIVEYASKGNLREYLQARRPPGLEYCYNPSHNPEEQLSSKDLVSCAYQVARGMEYLASKKCIHRDLAARNVLVTEDNVMKIADFGLARDIHHIDYYKKTTNGRLPVKWMAPEALFDRIYTHQSDVWSFGVLLWEIFTLGGSPYPGVPVEELFKLLKEGHRMDKPSNCTNELYMMMRDCWHAVPSQRPTFKQLVEDLDRIVALTSNQEYLDLSMPLDQYSPSFPDTRSSTCSSGEDSVFSHEPLPEEPCLPRHPAQLANGGLKRR

SEQ ID NO: 31917 - protein, 1 aa, Homo sapiens
  Payload ID: 6253
  Gene Symbol: FGFR1
  Gene Name: fibroblast growth factor receptor 1
  ENSP ID: ENSP00000398318
M

SEQ ID NO: 31918 - protein, 822 aa, Homo sapiens [sequence omitted]

SEQ ID NO: 31919 - protein, 106 aa, Homo sapiens
  Payload ID: 6253
  Gene Symbol: FGFR1
  Gene Name: fibroblast growth factor receptor 1
  ENSP ID: ENSP00000400708
MWSWKCLLFWAVLVTATLCTARPSPTLPEQAQPWGAPVEVESFLVHPGDLLQLRCRLRDDVQSINWLRDGVQLAESNRTRITGEEVEVQDSVPADSGLYACVTSSP

SEQ ID NO: 31920 - protein, 820 aa, Homo sapiens
  Payload ID: 6253
  Gene Symbol: FGFR1
  Gene Name: fibroblast growth factor receptor 1
  Uniprot ID: P11362
  ENSP ID: ENSP00000432972
MWSWKCLLFWAVLVTATLCTARPSPTLPEQAQPWGAPVEVESFLVHPGDLLQLRCRLRDDVQSINWLRDGVQLAESNRTRITGEEVEVQDSVPADSGLYACVTSSPSGSDTTYFSVNVSDALPSSEDDDDDDDSSSEEKETDNTKPNRMPVAPYWTSPEKMEKKLHAVPAAKTVKFKCPSSGTPNPTLRWLKNGKEFKPDHRIGGYKVRYATWSIIMDSVVPSDKGNYTCIVENEYGSINHTYQLDVVERSPHRPILQAGLPANKTVALGSNVEFMCKVYSDPQPHIQWLKHIEVNGSKIGPDNLPYVQILKTAGVNTTDKEMEVLHLRNVSFEDAGEYTCLAGNSIGLSHHSAWLTVLEALEERPAVMTSPLYLEIIIYCTGAFLISCMVGSVIVYKMKSGTKKSDFHSQMAVHKLAKSIPLRRQVSADSSASMNSGVLLVRPSRLSSSGTPMLAGVSEYELPEDPRWELPRDRLVLGKPLGEGCFGQVVLAEAIGLDKDKPNRVTKVAVKMLKSDATEKDLSDLISEMEMMKMIGKHKNIINLLGACTQDGPLYVIVEYASKGNLREYLQARRPPGLEYCYNPSHNPEEQLSSKDLVSCAYQVARGMEYLASKKCIHRDLAARNVLVTEDNVMKIADFGLARDIHHIDYYKKTTNGRLPVKWMAPEALFDRIYTHQSDVWSFGVLLWEIFTLGGSPYPGVPVEELFKLLKEGHRMDKPSNCTNELYMMMRDCWHAVPSQRPTFKQLVEDLDRIVALTSNQEYLDLSMPLDQYSPSFPDTRSSTCSSGEDSVFSHEPLPEEPCLPRHPAQLANGGLKRR

SEQ ID NO: 31921 - protein, 150 aa, Homo sapiens
  Payload ID: 6253
  Gene Symbol: FGFR1
  Gene Name: fibroblast growth factor receptor 1
  Uniprot ID: P11362
  ENSP ID: ENSP00000433163
MWSWKCLLFWAVLVTATLCTARPSPTLPEQAQPWGAPVEVESFLVHPGDLLQLRCRLRDDVQSINWLRDGVQLAESNRTRITGEEVEVQDSVPADSGLYACVTSSPSGSDTTYFSVNVSACPDLQEAKWCSASFHSITPLPFGLGTRLSD

SEQ ID NO: 31922 - protein, 145 aa, Homo sapiens
  Payload ID: 6253
  Gene Symbol: FGFR1
  Gene Name: fibroblast growth factor receptor 1
  ENSP ID: ENSP00000433569
MWSWKCLLFWAVLVTATLCTARPSPTLPEQDALPSSEDDDDDDDSSSEEKETDNTKPNPVAPYWTSPEKMEKKLHAVPAAKTVKFKCPSSGTPNPTLRWLKNGKEFKPDHRIGGYKVRYATWSIIMDSVVPSDKGNYTCIVENEY

SEQ ID NO: 31923 - protein, 85 aa, Homo sapiens
  Payload ID: 6253
  Gene Symbol: FGFR1
  Gene Name: fibroblast growth factor receptor 1
  ENSP ID: ENSP00000434473
MWSWKCLLFWAVLVTATLCTARPSPTLPEQDALPSSEDDDDDDDSSSEEKETDNTKPNPVAPYWTSPEKMEKKLHAVPAAKTVKF

SEQ ID NO: 31924 - protein, 298 aa, Homo sapiens
  Payload ID: 6253
  Gene Symbol: FGFR1
  Gene Name: fibroblast growth factor receptor 1
  ENSP ID: ENSP00000434712
MWSWKCLLFWAVLVTATLCTARPSPTLPEQAQPWGAPVEVESFLVHPGDLLQLRCRLRDDVQSINWLRDGVQLAESNRTRITGEEVEVQDSVPADSGLYACVTSSPSGSDTTYFSVNVSDALPSSEDDDDDDDSSSEEKETDNTKPNRMPVAPYWTSPEKMEKKLHAVPAAKTVKFKCPSSGTPNPTLRWLKNGKEFKPDHRIGGYKVRYATWSIIMDSVVPSDKGNYTCIVENEYGSINHTYQLDVVERSPHRPILQAGLPANKTVALGSNVEFMCKVYSDPQPHIQWLKHIEVNGS

SEQ ID NO: 31925 - protein, 134 aa, Homo sapiens
  Payload ID: 6253
  Gene Symbol: FGFR1
  Gene Name: fibroblast growth factor receptor 1
  ENSP ID: ENSP00000434800
VSCAYQVARGMEYLASKKCIHRDLAARNVLVTEDNVMKIADFGLARDIHHIDYYKKTTNGRLPVKWMAPEALFDRIYTHQSDVWSFGVLLWEIFTLGGSPYPGVPVEELFKLLKEGHRMDKPSNCTNELPAAGT

SEQ ID NO: 31926 - protein, 139 aa, Homo sapiens
  Payload ID: 6253
  Gene Symbol: FGFR1
  Gene Name: fibroblast growth factor receptor 1
  ENSP ID: ENSP00000434869
MEKKLHAVPAAKTVKFKCPSSGTPNPTLRWLKNGKEFKPDHRIGGYKVRYATWSIIMDSVVPSDKGNYTCIVENEYGSINHTYQLDVVERSPHRPILQAGLPANKTVALGSNVEFMCKVYSDPQPHIQWLKHIEVNGSK

SEQ ID NO: 31927 - protein, 61 aa, Homo sapiens
  Payload ID: 6253
  Gene Symbol: FGFR1
  Gene Name: fibroblast growth factor receptor 1
  ENSP ID: ENSP00000435254
MWSWKCLLFWAVLVTATLCTARPSPTLPEQACPDLQEAKWCSASFHSITPLPFGLGTRLSD

SEQ ID NO: 31928 - protein, 142 aa, Homo sapiens
  Payload ID: 6253
  Gene Symbol: FGFR1
  Gene Name: fibroblast growth factor receptor 1
  ENSP ID: ENSP00000435283
MWSWKCLLFWAVLVTATLCTARPSPTLPEQDALPSSEDDDDDDDSSSEEKETDNTKPNRMPVAPYWTSPEKMEKKLHAVPAAKTVKFKCPSSGTPNPTLRWLKNGKEFKPDHRIGGYKVRYATWSIIMDSVVPSDKGNYTCI

SEQ ID NO: 31929 - protein, 228 aa, Homo sapiens
  Payload ID: 6253
  Gene Symbol: FGFR1
  Gene Name: fibroblast growth factor receptor 1
  ENSP ID: ENSP00000484553
MWSWKCLLFWAVLVTATLCTARPSPTLPEQDALPSSEDDDDDDDSSSEEKETDNTKPNPVAPYWTSPEKMEKKLHAVPAAKTVKFKCPSSGTPNPTLRWLKNGKEFKPDHRIGGYKVRYATWSIIMDSVVPSDKGNYTCIVENEYGSINHTYQLDVVERSPHRPILQAGLPANKTVALGSNVEFMCKVYSDPQPHIQWLKHIEVNGSKIGPDNLPYVQILKPWKRGRQ

SEQ ID NO: 31930 - protein, 819 aa, Homo sapiens
  Payload ID: 6254
  Gene Symbol: FGFR2
  Gene Name: fibroblast growth factor receptor 2
  Uniprot ID: P21802
  ENSP ID: ENSP00000263451
MVSWGRFICLVVVTMATLSLARPSFSLVEDTTLEPEEPPTKYQISQPEVYVAAPGESLEVRCLLKDAAVISWTKDGVHLGPNNRTVLIGEYLQIKGATPRDSGLYACTASRTVDSETWYFMVNVTDAISSGDDEDDTDGAEDFVSENSNNKRAPYWTNTEKMEKRLHAVPAANTVKFRCPAGGNPMPTMRWLKNGKEFKQEHRIGGYKVRNQHWSLIMESVVPSDKGNYTCVVENEYGSINHTYHLDVVERSPHRPILQAGLPANASTVVGGDVEFVCKVYSDAQPHIQWIKHVEKNGSKYGPDGLPYLKVLKAAGVNTTDKEIEVLYIRNVTFEDAGEYTCLAGNSIGISFHSAWLTVLPAPGREKEITASPDYLEIAIYCIGVFLIACMVVTVILCRMKNTTKKPDFSSQPAVHKLTKRIPLRRQVSAESSSSMNSNTPLVRITTRLSSTADTPMLAGVSEYELPEDPKWEFPRDKLTLGKPLGEGCFGQVVMAEAVGIDKDKPKEAVTVAVKMLKDDATEKDLSDLVSEMEMMKMIGKHKNIINLLGACTQDGPLYVIVEYASKGNLREYLRARRPPGMEYSYDINRVPEEQMTFKDLVSCTYQLARGMEYLASQKCIHRDLAARNVLVTENNVMKIADFGLARDINNIDYYKKTTNGRLPVKWMAPEALFDRVYTHQSDVWSFGVLMWEIFTLGGSPYPGIPVEELFKLLKEGHRMDKPANCTNELYMMMRDCWHAVPSQRPTFKQLVEDLDRILTLTTNEEYLDLSQPLEQYSPSYPDTRSSCSSGDDSVFSPDPMPYEPCLPQYPHINGSVKT

SEQ ID NO: 31931 - protein, 821 aa, Homo sapiens
  Payload ID: 6254
  Gene Symbol: FGFR2
  Gene Name: fibroblast growth factor receptor 2
  ENSP ID: ENSP00000309878
MVSWGRFICLVVVTMATLSLARPSFSLVEDTTLEPEEPPTKYQISQPEVYVAAPGESLEVRCLLKDAAVISWTKDGVHLGPNNRTVLIGEYLQIKGATPRDSGLYACTASRTVDSETWYFMVNVTDAISSGDDEDDTDGAEDFVSENSNNKRAPYWTNTEKMEKRLHAVPAANTVKFRCPAGGNPMPTMRWLKNGKEFKQEHRIGGYKVRNQHWSLIMESVVPSDKGNYTCVVENEYGSINHTYHLDVVERSPHRPILQAGLPANASTVVGGDVEFVCKVYSDAQPHIQWIKHVEKNGSKYGPDGLPYLKVLKVFAAGVNTTDKEIEVLYIRNVTFEDAGEYTCLAGNSIGISFHSAWLTVLPAPGREKEITASPDYLEIAIYCIGVFLIACMVVTVILCRMKNTTKKPDFSSQPAVHKLTKRIPLRRQVSAESSSSMNSNTPLVRITTRLSSTADTPMLAGVSEYELPEDPKWEFPRDKLTLGKPLGEGCFGQVVMAEAVGIDKDKPKEAVTVAVKMLKDDATEKDLSDLVSEMEMMKMIGKHKNIINLLGACTQDGPLYVIVEYASKGNLREYLRARRPPGMEYSYDINRVPEEQMTFKDLVSCTYQLARGMEYLASQKCIHRDLAARNVLVTENNVMKIADFGLARDINNIDYYKKTTNGRLPVKWMAPEALFDRVYTHQSDVWSFGVLMWEIFTLGGSPYPGIPVEELFKLLKEGHRMDKPANCTNELYMMMRDCWHAVPSQRPTFKQLVEDLDRILTLTTNEEYLDLSQPLEQYSPSYPDTRSSCSSGDDSVFSPDPMPYEPCLPQYPHINGSVKT

SEQ ID NO: 31932 - protein, 669 aa, Homo sapiens
  Payload ID: 6254
  Gene Symbol: FGFR2
  Gene Name: fibroblast growth factor receptor 2
  ENSP ID: ENSP00000337665
MVSWGRFICLVVVTMATLSLARPSFSLVEDTTLEPEDAISSGDDEDDTDGAEDFVSENSNNKRAPYWTNTEKMEKRLHAVPAANTVKFRCPAGGNPMPTMRWLKNGKEFKQEHRIGGYKVRNQHWSLIMESVVPSDKGNYTCVVENEYGSINHTYHLDVVERSPHRPILQAGLPANASTVVGGDVEFVCKVYSDAQPHIQWIKHVEKNGSKYGPDGLPYLKVLKAAGVNTTDKEIEVLYIRNVTFEDAGEYTCLAGNSIGISFHSAWLTVLPAPGREKEITASPDYLEIAIYCIGVFLIACMVVTVILCRMKNTTKKPDFSSQPAVHKLTKRIPLRRQVSAESSSSMNSNTPLVRITTRLSSTADTPMLAGVSEYELPEDPKWEFPRDKLTLGKPLGEGCFGQVVMAEAVGIDKDKPKEAVTVAVKMLKDDATEKDLSDLVSEMEMMKMIGKHKNIINLLGACTQDGPLYVIVEYASKGNLREYLRARRPPGMEYSYDINRVPEEQMTFKDLVSCTYQLARGMEYLASQKCIHRDLAARNVLVTENNVMKIADFGLARDINNIDYYKKTTNGRLPVKWMAPEALFDRVYTHQSDVWSFGVLMWEIFTLGGSPYPGIPVEELFKLLKEGHRMDKPANCTNELYMMMRDCWHAVPSQRPTFKQLVEDLDRI

SEQ ID NO: 31933 - protein, 704 aa, Homo sapiens
  Payload ID: 6254
  Gene Symbol: FGFR2
  Gene Name: fibroblast growth factor receptor 2
  Uniprot ID: P21802
  ENSP ID: ENSP00000348559
MVSWGRFICLVVVTMATLSLARPSFSLVEDTTLEPEGAPYWTNTEKMEKRLHAVPAANTVKFRCPAGGNPMPTMRWLKNGKEFKQEHRIGGYKVRNQHWSLIMESVVPSDKGNYTCVVENEYGSINHTYHLDVVERSPHRPILQAGLPANASTVVGGDVEFVCKVYSDAQPHIQWIKHVEKNGSKYGPDGLPYLKVLKAAGVNTTDKEIEVLYIRNVTFEDAGEYTCLAGNSIGISFHSAWLTVLPAPGREKEITASPDYLEIAIYCIGVFLIACMVVTVILCRMKNTTKKPDFSSQPAVHKLTKRIPLRRQVSAESSSSMNSNTPLVRITTRLSSTADTPMLAGVSEYELPEDPKWEFPRDKLTLGKPLGEGCFGQVVMAEAVGIDKDKPKEAVTVAVKMLKDDATEKDLSDLVSEMEMMKMIGKHKNIINLLGACTQDGPLYVIVEYASKGNLREYLRARRPPGMEYSYDINRVPEEQMTFKDLVSCTYQLARGMEYLASQKCIHRDLAARNVLVTENNVMKIADFGLARDINNIDYYKKTTNGRLPVKWMAPEALFDRVYTHQSDVWSFGVLMWEIFTLGGSPYPGIPVEELFKLLKEGHRMDKPANCTNELYMMMRDCWHAVPSQRPTFKQLVEDLDRILTLTTNEEYLDLSQPLEQYSPSYPDTRSSCSSGDDSVFSPDPMPYEPCLPQYPHINGSVKT

SEQ ID NO: 31934 - protein, 707 aa, Homo sapiens
  Payload ID: 6254
  Gene Symbol: FGFR2
  Gene Name: fibroblast growth factor receptor 2
  Uniprot ID: P21802
  ENSP ID: ENSP00000350166
MVSWGRFICLVVVTMATLSLARPSFSLVEDTTLEPEDAISSGDDEDDTDGAEDFVSENSNNKRAPYWTNTEKMEKRLHAVPAANTVKFRCPAGGNPMPTMRWLKNGKEFKQEHRIGGYKVRNQHWSLIMESVVPSDKGNYTCVVENEYGSINHTYHLDVVERSPHRPILQAGLPANASTVVGGDVEFVCKVYSDAQPHIQWIKHVEKNGSKYGPDGLPYLKVLKAAGVNTTDKEIEVLYIRNVTFEDAGEYTCLAGNSIGISFHSAWLTVLPAPGREKEITASPDYLEIAIYCIGVFLIACMVVTVILCRMKNTTKKPDFSSQPAVHKLTKRIPLRRQVTVSAESSSSMNSNTPLVRITTRLSSTADTPMLAGVSEYELPEDPKWEFPRDKLTLGKPLGEGCFGQVVMAEAVGIDKDKPKEAVTVAVKMLKDDATEKDLSDLVSEMEMMKMIGKHKNIINLLGACTQDGPLYVIVEYASKGNLREYLRARRPPGMEYSYDINRVPEEQMTFKDLVSCTYQLARGMEYLASQKCIHRDLAARNVLVTENNVMKIADFGLARDINNIDYYKKTTNGRLPVKWMAPEALFDRVYTHQSDVWSFGVLMWEIFTLGGSPYPGIPVEELFKLLKEGHRMDKPANCTNELYMMMRDCWHAVPSQRPTFKQLVEDLDRILTLTTNEEEKKVSGAVDCHKPPCNPSHLPCVLAVDQ

SEQ ID NO: 31935 - protein, 821 aa, Homo sapiens
  Payload ID: 6254
  Gene Symbol: FGFR2
  Gene Name: fibroblast growth factor receptor 2
  Uniprot ID: P21802
  ENSP ID: ENSP00000351276
MVSWGRFICLVVVTMATLSLARPSFSLVEDTTLEPEEPPTKYQISQPEVYVAAPGESLEVRCLLKDAAVISWTKDGVHLGPNNRTVLIGEYLQIKGATPRDSGLYACTASRTVDSETWYFMVNVTDAISSGDDEDDTDGAEDFVSENSNNKRAPYWTNTEKMEKRLHAVPAANTVKFRCPAGGNPMPTMRWLKNGKEFKQEHRIGGYKVRNQHWSLIMESVVPSDKGNYTCVVENEYGSINHTYHLDVVERSPHRPILQAGLPANASTVVGGDVEFVCKVYSDAQPHIQWIKHVEKNGSKYGPDGLPYLKVLKAAGVNTTDKEIEVLYIRNVTFEDAGEYTCLAGNSIGISFHSAWLTVLPAPGREKEITASPDYLEIAIYCIGVFLIACMVVTVILCRMKNTTKKPDFSSQPAVHKLTKRIPLRRQVTVSAESSSSMNSNTPLVRITTRLSSTADTPMLAGVSEYELPEDPKWEFPRDKLTLGKPLGEGCFGQVVMAEAVGIDKDKPKEAVTVAVKMLKDDATEKDLSDLVSEMEMMKMIGKHKNIINLLGACTQDGPLYVIVEYASKGNLREYLRARRPPGMEYSYDINRVPEEQMTFKDLVSCTYQLARGMEYLASQKCIHRDLAARNVLVTENNVMKIADFGLARDINNIDYYKKTTNGRLPVKWMAPEALFDRVYTHQSDVWSFGVLMWEIFTLGGSPYPGIPVEELFKLLKEGHRMDKPANCTNELYMMMRDCWHAVPSQRPTFKQLVEDLDRILTLTTNEEYLDLSQPLEQYSPSYPDTRSSCSSGDDSVFSPDPMPYEPCLPQYPHINGSVKT

SEQ ID NO: 31936 - protein, 254 aa, Homo sapiens
  Payload ID: 6254
  Gene Symbol: FGFR2
  Gene Name: fibroblast growth factor receptor 2
  Uniprot ID: P21802
  ENSP ID: ENSP00000352309
MVSWGRFICLVVVTMATLSLARPSFSLVEDTTLEPEEPPTKYQISQPEVYVAAPGESLEVRCLLKDAAVISWTKDGVHLGPNNRTVLIGEYLQIKGATPRDSGLYACTASRTVDSETWYFMVNVTDAISSGDDEDDTDGAEDFVSENSNNKRAPYWTNTEKMEKRLHAVPAANTVKFRCPAGGNPMPTMRWLKNGKEFKQEHRIGGYKVRNQHWSLIMESVVPSDKGNYTCVVENEYGSINHTYHLDVVGSQGL

SEQ ID NO: 31937 - protein, 680 aa, Homo sapiens
  Payload ID: 6254
  Gene Symbol: FGFR2
  Gene Name: fibroblast growth factor receptor 2
  Uniprot ID: P21802
  ENSP ID: ENSP00000353262
MVSWGRFICLVVVTMATLSLARPSFSLVEDTTLEPEDAISSGDDEDDTDGAEDFVSENSNNKRAPYWTNTEKMEKRLHAVPAANTVKFRCPAGGNPMPTMRWLKNGKEFKQEHRIGGYKVRNQHWSLIMESVVPSDKGNYTCVVENEYGSINHTYHLDVVERSPHRPILQAGLPANASTVVGGDVEFVCKVYSDAQPHIQWIKHVEKNGSKYGPDGLPYLKVLKHSGINSSNAEVLALFNVTEADAGEYICKVSNYIGQANQSAWLTVLPKQQAPGREKEITASPDYLEIAIYCIGVFLIACMVVTVILCRMKNTTKKPDFSSQPAVHKLTKRIPLRRQVTVSAESSSSMNSNTPLVRITTRLSSTADTPMLAGVSEYELPEDPKWEFPRDKLTLGKPLGEGCFGQVVMAEAVGIDKDKPKEAVTVAVKMLKDDATEKDLSDLVSEMEMMKMIGKHKNIINLLGACTQDGPLYVIVEYASKGNLREYLRARRPPGMEYSYDINRVPEEQMTFKDLVSCTYQLARGMEYLASQKCIHRDLAARNVLVTENNVMKIADFGLARDINNIDYYKKTTNGRLPVKWMAPEALFDRVYTHQSDVWSFGVLMWEIFTLGGSPYPGIPVEELFKLLKEGHRMDKPANCTNELYMMMRDCWHAVPSQRPTFKQLVEDLDRILTLTTNEI

SEQ ID NO: 31938 - protein, 769 aa, Homo sapiens
  Payload ID: 6254
  Gene Symbol: FGFR2
  Gene Name: fibroblast growth factor receptor 2
  Uniprot ID: P21802
  ENSP ID: ENSP00000358052
MVSWGRFICLVVVTMATLSLARPSFSLVEDTTLEPEEPPTKYQISQPEVYVAAPGESLEVRCLLKDAAVISWTKDGVHLGPNNRTVLIGEYLQIKGATPRDSGLYACTASRTVDSETWYFMVNVTDAISSGDDEDDTDGAEDFVSENSNNKRAPYWTNTEKMEKRLHAVPAANTVKFRCPAGGNPMPTMRWLKNGKEFKQEHRIGGYKVRNQHWSLIMESVVPSDKGNYTCVVENEYGSINHTYHLDVVERSPHRPILQAGLPANASTVVGGDVEFVCKVYSDAQPHIQWIKHVEKNGSKYGPDGLPYLKVLKHSGINSSNAEVLALFNVTEADAGEYICKVSNYIGQANQSAWLTVLPKQQAPGREKEITASPDYLEIAIYCIGVFLIACMVVTVILCRMKNTTKKPDFSSQPAVHKLTKRIPLRRQVTVSAESSSSMNSNTPLVRITTRLSSTADTPMLAGVSEYELPEDPKWEFPRDKLTLGKPLGEGCFGQVVMAEAVGIDKDKPKEAVTVAVKMLKDDATEKDLSDLVSEMEMMKMIGKHKNIINLLGACTQDGPLYVIVEYASKGNLREYLRARRPPGMEYSYDINRVPEEQMTFKDLVSCTYQLARGMEYLASQKCIHRDLAARNVLVTENNVMKIADFGLARDINNIDYYKKTTNGRLPVKWMAPEALFDRVYTHQSDVWSFGVLMWEIFTLGGSPYPGIPVEELFKLLKEGHRMDKPANCTNELYMMMRDCWHAVPSQRPTFKQLVEDLDRILTLTTNEI

SEQ ID NO: 31939 - protein, 768 aa, Homo sapiens
  Payload ID: 6254
  Gene Symbol: FGFR2
  Gene Name: fibroblast growth factor receptor 2
  Uniprot ID: P21802
  ENSP ID: ENSP00000358054
MVSWGRFICLVVVTMATLSLARPSFSLVEDTTLEPEEPPTKYQISQPEVYVAAPGESLEVRCLLKDAAVISWTKDGVHLGPNNRTVLIGEYLQIKGATPRDSGLYACTASRTVDSETWYFMVNVTDAISSGDDEDDTDGAEDFVSENSNNKRAPYWTNTEKMEKRLHAVPAANTVKFRCPAGGNPMPTMRWLKNGKEFKQEHRIGGYKVRNQHWSLIMESVVPSDKGNYTCVVENEYGSINHTYHLDVVERSPHRPILQAGLPANASTVVGGDVEFVCKVYSDAQPHIQWIKHVEKNGSKYGPDGLPYLKVLKHSGINSSNAEVLALFNVTEADAGEYICKVSNYIGQANQSAWLTVLPKQQAPGREKEITASPDYLEIAIYCIGVFLIACMVVTVILCRMKNTTKKPDFSSQPAVHKLTKRIPLRRQVTVSAESSSSMNSNTPLVRITTRLSSTADTPMLAGVSEYELPEDPKWEFPRDKLTLGKPLGEGCFGQVVMAEAVGIDKDKPKEAVTVAVKMLKDDATEKDLSDLVSEMEMMKMIGKHKNIINLLGACTQDGPLYVIVEYASKGNLREYLRARRPPGMEYSYDINRVPEEQMTFKDLVSCTYQLARGMEYLASQKCIHRDLAARNVLVTENNVMKIADFGLARDINNIDYYKKTTNGRLPVKWMAPEALFDRVYTHQSDVWSFGVLMWEIFTLGGSPYPGIPVEELFKLLKEGHRMDKPANCTNELYMMMRDCWHAVPSQRPTFKQLVEDLDRILTLTTNE

SEQ ID NO: 31940 - protein, 707 aa, Homo sapiens
  Payload ID: 6254
  Gene Symbol: FGFR2
  Gene Name: fibroblast growth factor receptor 2
  ENSP ID: ENSP00000358055
MVSWGRFICLVVVTMATLSLARPSFSLVEDTTLEPEGAPYWTNTEKMEKRLHAVPAANTVKFRCPAGGNPMPTMRWLKNGKEFKQEHRIGGYKVRNQHWSLIMESVVPSDKGNYTCVVENEYGSINHTYHLDVVERSPHRPILQAGLPANASTVVGGDVEFVCKVYSDAQPHIQWIKHVEKNGSKYGPDGLPYLKVLKHSGINSSNAEVLALFNVTEADAGEYICKVSNYIGQANQSAWLTVLPKQQAPGREKEITASPDYLEIAIYCIGVFLIACMVVTVILCRMKNTTKKPDFSSQPAVHKLTKRIPLRRQVTVSAESSSSMNSNTPLVRITTRLSSTADTPMLAGVSEYELPEDPKWEFPRDKLTLGKPLGEGCFGQVVMAEAVGIDKDKPKEAVTVAVKMLKDDATEKDLSDLVSEMEMMKMIGKHKNIINLLGACTQDGPLYVIVEYASKGNLREYLRARRPPGMEYSYDINRVPEEQMTFKDLVSCTYQLARGMEYLASQKCIHRDLAARNVLVTENNVMKIADFGLARDINNIDYYKKTTNGRLPVKWMAPEALFDRVYTHQSDVWSFGVLMWEIFTLGGSPYPGIPVEELFKLLKEGHRMDKPANCTNELYMMMRDCWHAVPSQRPTFKQLVEDLDRILTLTTNEEYLDLSQPLEQYSPSYPDTRSSCSSGDDSVFSPDPMPYEPCLPQYPHINGSVKT

SEQ ID NO: 31941 - protein, 705 aa, Homo sapiens
  Payload ID: 6254
  Gene Symbol: FGFR2
  Gene Name: fibroblast growth factor receptor 2
  Uniprot ID: P21802
  ENSP ID: ENSP00000358056
MVSWGRFICLVVVTMATLSLARPSFSLVEDTTLEPEEPPTKYQISQPEVYVAAPGESLEVRCLLKDAAVISWTKDGVHLGPNNRTVLIGEYLQIKGATPRDSGLYACTASRTVDSETWYFMVNVTDAISSGDDEDDTDGAEDFVSENSNNKRAPYWTNTEKMEKRLHAVPAANTVKFRCPAGGNPMPTMRWLKNGKEFKQEHRIGGYKVRNQHWSLIMESVVPSDKGNYTCVVENEYGSINHTYHLDVVERSPHRPILQAGLPANASTVVGGDVEFVCKVYSDAQPHIQWIKHVEKNGSKYGPDGLPYLKVLKVSAESSSSMNSNTPLVRITTRLSSTADTPMLAGVSEYELPEDPKWEFPRDKLTLGKPLGEGCFGQVVMAEAVGIDKDKPKEAVTVAVKMLKDDATEKDLSDLVSEMEMMKMIGKHKNIINLLGACTQDGPLYVIVEYASKGNLREYLRARRPPGMEYSYDINRVPEEQMTFKDLVSCTYQLARGMEYLASQKCIHRDLAARNVLVTENNVMKIADFGLARDINNIDYYKKTTNGRLPVKWMAPEALFDRVYTHQSDVWSFGVLMWEIFTLGGSPYPGIPVEELFKLLKEGHRMDKPANCTNELYMMMRDCWHAVPSQRPTFKQLVEDLDRILTLTTNEEYLDLSQPLEQYSPSYPDTRSSCSSGDDSVFSPDPMPYEPCLPQYPHINGSVKT

SEQ ID NO: 31942 - protein, 709 aa, Homo sapiens
  Payload ID: 6254
  Gene Symbol: FGFR2
  Gene Name: fibroblast growth factor receptor 2
  Uniprot ID: P21802
  ENSP ID: ENSP00000358057
MVSWGRFICLVVVTMATLSLARPSFSLVEDTTLEPEEPPTKYQISQPEVYVAAPGESLEVRCLLKDAAVISWTKDGVHLGPNNRTVLIGEYLQIKGATPRDSGLYACTASRTVDSETWYFMVNVTDAISSGDDEDDTDGAEDFVSENSNNKRAPYWTNTEKMEKRLHAVPAANTVKFRCPAGGNPMPTMRWLKNGKEFKQEHRIGGYKVRNQHWSLIMESVVPSDKGNYTCVVENEYGSINHTYHLDVVAPGREKEITASPDYLEIAIYCIGVFLIACMVVTVILCRMKNTTKKPDFSSQPAVHKLTKRIPLRRQVTVSAESSSSMNSNTPLVRITTRLSSTADTPMLAGVSEYELPEDPKWEFPRDKLTLGKPLGEGCFGQVVMAEAVGIDKDKPKEAVTVAVKMLKDDATEKDLSDLVSEMEMMKMIGKHKNIINLLGACTQDGPLYVIVEYASKGNLREYLRARRPPGMEYSYDINRVPEEQMTFKDLVSCTYQLARGMEYLASQKCIHRDLAARNVLVTENNVMKIADFGLARDINNIDYYKKTTNGRLPVKWMAPEALFDRVYTHQSDVWSFGVLMWEIFTLGGSPYPGIPVEELFKLLKEGHRMDKPANCTNELYMMMRDCWHAVPSQRPTFKQLVEDLDRILTLTTNEEYLDLSQPLEQYSPSYPDTRSSCSSGDDSVFSPDPMPYEPCLPQYPHINGSVKT

SEQ ID NO: 31943 - protein, 371 aa, Homo sapiens
  Payload ID: 6254
  Gene Symbol: FGFR2
  Gene Name: fibroblast growth factor receptor 2
  ENSP ID: ENSP00000404219
FSSQPAVHKLTKRIPLRRQVTVSAESSSSMNSNTPLVRITTRLSSTADTPMLAGVSEYELPEDPKWEFPRDKLTLGKPLGEGCFGQVVMAEAVGIDKDKPKEAVTVAVKMLKDDATEKDLSDLVSEMEMMKMIGKHKNIINLLGACTQDGPLYVIVEYASKGNLREYLRARRPPGMEYSYDINRVPEEQMTFKDLVSCTYQLARGMEYLASQKCIHRDLAARNVLVTENNVMKIADFGLARDINNIDYYKKTTNGRLPVKWMAPEALFDRVYTHQSDVWSFGVLMWEIFTLGGSPYPGIPVEELFKLLKEGHRMDKPANCTNELNTWTSANLSNSIHLVTLTQEVLVLQEMILFFLQTPCLTNHAFLSIHT

SEQ ID NO: 31944 - protein, 822 aa, Homo sapiens
  Payload ID: 6254
  Gene Symbol: FGFR2
  Gene Name: fibroblast growth factor receptor 2
  Uniprot ID: P21802
  ENSP ID: ENSP00000410294
MVSWGRFICLVVVTMATLSLARPSFSLVEDTTLEPEEPPTKYQISQPEVYVAAPGESLEVRCLLKDAAVISWTKDGVHLGPNNRTVLIGEYLQIKGATPRDSGLYACTASRTVDSETWYFMVNVTDAISSGDDEDDTDGAEDFVSENSNNKRAPYWTNTEKMEKRLHAVPAANTVKFRCPAGGNPMPTMRWLKNGKEFKQEHRIGGYKVRNQHWSLIMESVVPSDKGNYTCVVENEYGSINHTYHLDVVERSPHRPILQAGLPANASTVVGGDVEFVCKVYSDAQPHIQWIKHVEKNGSKYGPDGLPYLKVLKHSGINSSNAEVLALFNVTEADAGEYICKVSNYIGQANQSAWLTVLPKQQAPGREKEITASPDYLEIAIYCIGVFLIACMVVTVILCRMKNTTKKPDFSSQPAVHKLTKRIPLRRQVTVSAESSSSMNSNTPLVRITTRLSSTADTPMLAGVSEYELPEDPKWEFPRDKLTLGKPLGEGCFGQVVMAEAVGIDKDKPKEAVTVAVKMLKDDATEKDLSDLVSEMEMMKMIGKHKNIINLLGACTQDGPLYVIVEYASKGNLREYLRARRPPGMEYSYDINRVPEEQMTFKDLVSCTYQLARGMEYLASQKCIHRDLAARNVLVTENNVMKIADFGLARDINNIDYYKKTTNGRLPVKWMAPEALFDRVYTHQSDVWSFGVLMWEIFTLGGSPYPGIPVEELFKLLKEGHRMDKPANCTNELYMMMRDCWHAVPSQRPTFKQLVEDLDRILTLTTNEEYLDLSQPLEQYSPSYPDTRSSCSSGDDSVFSPDPMPYEPCLPQYPHINGSVKT

SEQ ID NO: 31945 - protein, 593 aa, Homo sapiens
  Payload ID: 6254
  Gene Symbol: FGFR2
  Gene Name: fibroblast growth factor receptor 2
  ENSP ID: ENSP00000474011
MCLNKTKQLFGVAKRLPFWRKERSPHRPILQAGLPANASTVVGGDVEFVCKVYSDAQPHIQWIKHVEKNGSKYGPDGLPYLKVLKAAGVNTTDKEIEVLYIRNVTFEDAGEYTCLAGNSIGISFHSAWLTVLPAPGREKEITASPDYLEIAIYCIGVFLIACMVVTVILCRMKNTTKKPDFSSQPAVHKLTKRIPLRRQVTVSAESSSSMNSNTPLVRITTRLSSTADTPMLAGVSEYELPEDPKWEFPRDKLTLGKPLGEGCFGQVVMAEAVGIDKDKPKEAVTVAVKMLKDDATEKDLSDLVSEMEMMKMIGKHKNIINLLGACTQDGPLYVIVEYASKGNLREYLRARRPPGMEYSYDINRVPEEQMTFKDLVSCTYQLARGMEYLASQKCIHRDLAARNVLVTENNVMKIADFGLARDINNIDYYKKTTNGRLPVKWMAPEALFDRVYTHQSDVWSFGVLMWEIFTLGGSPYPGIPVEELFKLLKEGHRMDKPANCTNELYMMMRDCWHAVPSQRPTFKQLVEDLDRILTLTTNEEYLDLSQPLEQYSPSYPDTRSSCSSGDDSVFSPDPMPYEPCLPQYPHINGSVKT

SEQ ID NO: 31946 - protein, 251 aa, Homo sapiens
  Payload ID: 6254
  Gene Symbol: FGFR2
  Gene Name: fibroblast growth factor receptor 2
  ENSP ID: ENSP00000474109
MVSWGRFICLVVVTMATLSLARPSFSLVEDTTLEPEGAPYWTNTEKMEKRLHAVPAANTVKFRCPAGGNPMPTMRWLKNGKEFKQEHRIGGYKVRNQHWSLIMESVVPSDKGNYTCVVENEYGSINHTYHLDVVERSPHRPILQAGLPANASTVVGGDVEFVCKVYSDAQPHIQWIKHVEKNGSKYGPDGLPYLKVLKHSGINSSNAEVLALFNVTEADAGEYICKVSNYIGQANQSAWLTVLPKQQGRRC

SEQ ID NO: 31947 - protein, 136 aa, Homo sapiens
  Payload ID: 6254
  Gene Symbol: FGFR2
  Gene Name: fibroblast growth factor receptor 2
  ENSP ID: ENSP00000481464
  MOD_RES (1)..(1): Any amino acid
XSLARPSFSLVEDTTLEPEEPPTKYQISQPEVYVAAPGESLEVRCLLKDAAVISWTKDGVHLGPNNRTVLIGEYLQIKGATPRDSGLYACTASRTVDSETWYFMVNVTDAISSGDDEDDTDGAEDFVSENSNNKSK

SEQ ID NO: 31948 - protein, 732 aa, Homo sapiens
  Payload ID: 6254
  Gene Symbol: FGFR2
  Gene Name: fibroblast growth factor receptor 2
  ENSP ID: ENSP00000484154
MVSWGRFICLVVVTMATLSLARPSFSLVEDTTLEPEDAISSGDDEDDTDGAEDFVSENSNNKRAPYWTNTEKMEKRLHAVPAANTVKFRCPAGGNPMPTMRWLKNGKEFKQEHRIGGYKVRNQHWSLIMESVVPSDKGNYTCVVENEYGSINHTYHLDVVERSPHRPILQAGLPANASTVVGGDVEFVCKVYSDAQPHIQWIKHVEKNGSKYGPDGLPYLKVLKAAGVNTTDKEIEVLYIRNVTFEDAGEYTCLAGNSIGISFHSAWLTVLPAPGREKEITASPDYLEIAIYCIGVFLIACMVVTVILCRMKNTTKKPDFSSQPAVHKLTKRIPLRRQVTVSAESSSSMNSNTPLVRITTRLSSTADTPMLAGVSEYELPEDPKWEFPRDKLTLGKPLGEGCFGQVVMAEAVGIDKDKPKEAVTVAVKMLKDDATEKDLSDLVSEMEMMKMIGKHKNIINLLGACTQDGPLYVIVEYASKGNLREYLRARRPPGMEYSYDINRVPEEQMTFKDLVSCTYQLARGMEYLASQKCIHRDLAARNVLVTENNVMKIADFGLARDINNIDYYKKTTNGRLPVKWMAPEALFDRVYTHQSDVWSFGVLMWEIFTLGGSPYPGIPVEELFKLLKEGHRMDKPANCTNELYMMMRDCWHAVPSQRPTFKQLVEDLDRILTLTTNEEYLDLSQPLEQYSPSYPDTRSSCSSGDDSVFSPDPMPYEPCLPQYPHINGSVKT

SEQ ID NO: 31949 - protein, 64 aa, Homo sapiens
  Payload ID: 6254
  Gene Symbol: FGFR2
  Gene Name: fibroblast growth factor receptor 2
  ENSP ID: ENSP00000484892
MVSWGRFICLVVVTMATLSLARPSFSLVEDTTLEPEDAISSGDDEDDTDGAEDFVSENSNNKSK

SEQ ID NO: 31950 - protein, 694 aa, Homo sapiens
  Payload ID: 6255
  Gene Symbol: FGFR3
  Gene Name: fibroblast growth factor receptor 3
  Uniprot ID: P22607
  ENSP ID: ENSP00000231803
MGAPACALALCVAVAIVAGASSESLGTEQRVVGRAAEVPGPEPGQQEQLVFGSGDAVELSCPPPGGGPMGPTVWVKDGTGLVPSERVLVGPQRLQVLNASHEDSGAYSCRQRLTQRVLCHFSVRVTDAPSSGDDEDGEDEAEDTGVDTGAPYWTRPERMDKKLLAVPAANTVRFRCPAAGNPTPSISWLKNGREFRGEHRIGGIKLRHQQWSLVMESVVPSDRGNYTCVVENKFGSIRQTYTLDVLERSPHRPILQAGLPANQTAVLGSDVEFHCKVYSDAQPHIQWLKHVEVNGSKVGPDGTPYVTVLKVSLESNASMSSNTPLVRIARLSSGEGPTLANVSELELPADPKWELSRARLTLGKPLGEGCFGQVVMAEAIGIDKDRAAKPVTVAVKMLKDDATDKDLSDLVSEMEMMKMIGKHKNIINLLGACTQGGPLYVLVEYAAKGNLREFLRARRPPGLDYSFDTCKPPEEQLTFKDLVSCAYQVARGMEYLASQKCIHRDLAARNVLVTEDNVMKIADFGLARDVHNLDYYKKTTNGRLPVKWMAPEALFDRVYTHQSDVWSFGVLLWEIFTLGGSPYPGIPVEELFKLLKEGHRMDKPANCTHDLYMIMRECWHAAPSQRPTFKQLVEDLDRVLTVTSTDEYLDLSAPFEQYSPGGQDTPSSSSSGDDSVFAHDLLPPAPPSSGGSRT

SEQ ID NO: 31951 - protein, 806 aa, Homo sapiens
  Payload ID: 6255
  Gene Symbol: FGFR3
  Gene Name: fibroblast growth factor receptor 3
  Uniprot ID: P22607
  ENSP ID: ENSP00000260795
MGAPACALALCVAVAIVAGASSESLGTEQRVVGRAAEVPGPEPGQQEQLVFGSGDAVELSCPPPGGGPMGPTVWVKDGTGLVPSERVLVGPQRLQVLNASHEDSGAYSCRQRLTQRVLCHFSVRVTDAPSSGDDEDGEDEAEDTGVDTGAPYWTRPERMDKKLLAVPAANTVRFRCPAAGNPTPSISWLKNGREFRGEHRIGGIKLRHQQWSLVMESVVPSDRGNYTCVVENKFGSIRQTYTLDVLERSPHRPILQAGLPANQTAVLGSDVEFHCKVYSDAQPHIQWLKHVEVNGSKVGPDGTPYVTVLKTAGANTTDKELEVLSLHNVTFEDAGEYTCLAGNSIGFSHHSAWLVVLPAEEELVEADEAGSVYAGILSYGVGFFLFILVVAAVTLCRLRSPPKKGLGSPTVHKISRFPLKRQVSLESNASMSSNTPLVRIARLSSGEGPTLANVSELELPADPKWELSRARLTLGKPLGEGCFGQVVMAEAIGIDKDRAAKPVTVAVKMLKDDATDKDLSDLVSEMEMMKMIGKHKNIINLLGACTQGGPLYVLVEYAAKGNLREFLRARRPPGLDYSFDTCKPPEEQLTFKDLVSCAYQVARGMEYLASQKCIHRDLAARNVLVTEDNVMKIADFGLARDVHNLDYYKKTTNGRLPVKWMAPEALFDRVYTHQSDVWSFGVLLWEIFTLGGSPYPGIPVEELFKLLKEGHRMDKPANCTHDLYMIMRECWHAAPSQRPTFKQLVEDLDRVLTVTSTDEYLDLSAPFEQYSPGGQDTPSSSSSGDDSVFAHDLLPPAPPSSGGSRT

SEQ ID NO: 31952 - protein, 808 aa, Homo sapiens
  Payload ID: 6255
  Gene Symbol: FGFR3
  Gene Name: fibroblast growth factor receptor 3
  Uniprot ID: P22607
  ENSP ID: ENSP00000339824
MGAPACALALCVAVAIVAGASSESLGTEQRVVGRAAEVPGPEPGQQEQLVFGSGDAVELSCPPPGGGPMGPTVWVKDGTGLVPSERVLVGPQRLQVLNASHEDSGAYSCRQRLTQRVLCHFSVRVTDAPSSGDDEDGEDEAEDTGVDTGAPYWTRPERMDKKLLAVPAANTVRFRCPAAGNPTPSISWLKNGREFRGEHRIGGIKLRHQQWSLVMESVVPSDRGNYTCVVENKFGSIRQTYTLDVLERSPHRPILQAGLPANQTAVLGSDVEFHCKVYSDAQPHIQWLKHVEVNGSKVGPDGTPYVTVLKSWISESVEADVRLRLANVSERDGGEYLCRATNFIGVAEKAFWLSVHGPRAAEEELVEADEAGSVYAGILSYGVGFFLFILVVAAVTLCRLRSPPKKGLGSPTVHKISRFPLKRQVSLESNASMSSNTPLVRIARLSSGEGPTLANVSELELPADPKWELSRARLTLGKPLGEGCFGQVVMAEAIGIDKDRAAKPVTVAVKMLKDDATDKDLSDLVSEMEMMKMIGKHKNIINLLGACTQGGPLYVLVEYAAKGNLREFLRARRPPGLDYSFDTCKPPEEQLTFKDLVSCAYQVARGMEYLASQKCIHRDLAARNVLVTEDNVMKIADFGLARDVHNLDYYKKTTNGRLPVKWMAPEALFDRVYTHQSDVWSFGVLLWEIFTLGGSPYPGIPVEELFKLLKEGHRMDKPANCTHDLYMIMRECWHAAPSQRPTFKQLVEDLDRVLTVTSTDEYLDLSAPFEQYSPGGQDTPSSSSSGDDSVFAHDLLPPAPPSSGGSRT

SEQ ID NO: 31953 - protein, 694 aa, Homo sapiens; identical to SEQ ID NO: 31950
  Payload ID: 6255
  Gene Symbol: FGFR3
  Gene Name: fibroblast growth factor receptor 3
  Uniprot ID: P22607
  ENSP ID: ENSP00000412903

SEQ ID NO: 31954 - protein, 806 aa, Homo sapiens; identical to SEQ ID NO: 31951
  Payload ID: 6255
  Gene Symbol: FGFR3
  Gene Name: fibroblast growth factor receptor 3
  Uniprot ID: P22607
  ENSP ID: ENSP00000414914

SEQ ID NO: 31955 - protein, 792 aa, Homo sapiens
  Payload ID: 6255
  Gene Symbol: FGFR3
  Gene Name: fibroblast growth factor receptor 3
  ENSP ID: ENSP00000420533
MGAPACALALCVAVAIVAGASSESLGTEQRVVGRAAEVPGPEPGQQEQLVFGSGDAVELSCPPPGGGPMGPTVWVKDGTGLVPSERVLVGPQRLQVLNASHEDSGAYSCRQRLTQRVLCHFSVRVTDAPSSGDDEDGEDEAEDTGVDTGAPYWTRPERMDKKLLAVPAANTVRFRCPAAGNPTPSISWLKNGREFRGEHRIGGIKLRHQQWSLVMESVVPSDRGNYTCVVENKFGSIRQTYTLDVLERSPHRPILQAGLPANQTAVLGSDVEFHCKVYSDAQPHIQWLKHVEVNGSKVGPDGTPYVTVLKTAGANTTDKELEVLSLHNVTFEDAGEYTCLAGNSIGFSHHSAWLVVLPAEEELVEADEAGSVYAGILSYGVGFFLFILVVAAVTLCRLRSPPKKGLGSPTVHKISRFPLKRQQVSLESNASMSSNTPLVRIARLSSGEGPTLANVSELELPADPKWELSRARLTLGKPLGEGCFGQVVMAEAIGIDKDRAAKPVTVAVKMLKDDATDKDLSDLVSEMEMMKMIGKHKNIINLLGACTQGGPLYVLVEYAAKGNLREFLRARRPPGLDYSFDTCKPPEEQLTFKDLVSCAYQVARGMEYLASQKCIHRDLAARNVLVTEDNVMKIADFGLARDVHNLDYYKKTTNLVLWGPALGDLHAGGLPVPRHPCGGALQAAEGGPPHGQARQLHTRPVHDHAGVLACRALPEAHLQAAGGGPGPCPYRDVHRRVPGPVGAFRAVLPGWPGHPQLQLLRGRLRVCPRPAAPGPTQQWGLADVKGHWSPTM

SEQ ID NO: 31956 - protein, 112 aa, Homo sapiens
  Payload ID: 6255
  Gene Symbol: FGFR3
  Gene Name: fibroblast growth factor receptor 3
  ENSP ID: ENSP00000427289
NPTPSISWLKNGREFRGEHRIGGIKLRHQQWSLVMESVVPSDRGNYTCVVENKFGSIRQTYTLDVLERSPHRPILQAGLPANQTAVLGSDVEFHCKTAGANTTDKELEVLSL

SEQ ID NO: 31957 - protein, 364 aa, Homo sapiens
  Payload ID: 6255
  Gene Symbol: FGFR3
  Gene Name: fibroblast growth factor receptor 3
  ENSP ID: ENSP00000479472
MGAPACALALCVAVAIVAGASSESLGTEQRVVGRAAEVPGPEPGQQEQLVFGSGDAVELSCPPPGGGPMGPTVWVKDGTGLVPSERVLVGPQRLQVLNASHEDSGAYSCRQRLTQRVLCHFSVRVTDAPSSGDDEDGEDEAEDTGVDTGAPYWTRPERMDKKLLAVPAANTVRFRCPAAGNPTPSISWLKNGREFRGEHRIGGIKLRHQQWSLVMESVVPSDRGNYTCVVENKFGSIRQTYTLDVLERSPHRPILQAGLPANQTAVLGSDVEFHCKVYSDAQPHIQWLKHVEVNGSKVGPDGTPYVTVLKSWISESVEADVRLRLANVSERDGGEYLCRATNFIGVAEKAFWLSVHGPRADGGR

SEQ ID NO: 31958 - protein, 802 aa, Homo sapiens
  Payload ID: 6256
  Gene Symbol: FGFR4
  Gene Name: fibroblast growth factor receptor 4
  Uniprot ID: P22455
  ENSP ID: ENSP00000292408
MRLLLALLGVLLSVPGPPVLSLEASEEVELEPCLAPSLEQQEQELTVALGQPVRLCCGRAERGGHWYKEGSRLAPAGRVRGWRGRLEIASFLPEDAGRYLCLARGSMIVLQNLTLITGDSLTSSNDDEDPKSHRDPSNRHSYPQQAPYWTHPQRMEKKLHAVPAGNTVKFRCPAAGNPTPTIRWLKDGQAFHGENRIGGIRLRHQHWSLVMESVVPSDRGTYTCLVENAVGSIRYNYLLDVLERSPHRPILQAGLPANTTAVVGSDVELLCKVYSDAQPHIQWLKHIVINGSSFGADGFPYVQVLKTADINSSEVEVLYLRNVSAEDAGEYTCLAGNSIGLSYQSAWLTVLPEEDPTWTAAAPEARYTDIILYASGSLALAVLLLLAGLYRGQALHGRHPRPPATVQKLSRFPLARQFSLESGSSGKSSSSLVRGVRLSSSGPALLAGLVSLDLPLDPLWEFPRDRLVLGKPLGEGCFGQVVRAEAFGMDPARPDQASTVAVKMLKDNASDKDLADLVSEMEVMKLIGRHKNIINLLGVCTQEGPLYVIVECAAKGNLREFLRARRPPGPDLSPDGPRSSEGPLSFPVLVSCAYQVARGMQYLESRKCIHRDLAARNVLVTEDNVMKIADFGLARGVHHIDYYKKTSNGRLPVKWMAPEALFDRVYTHQSDVWSFGILLWEIFTLGGSPYPGIPVEELFSLLREGHRMDRPPHCPPELYGLMRECWHAAPSQRPTFKQLVEALDKVLLAVSEEYLDLRLTFGPYSPSGGDASSTCSSSDSVFSHDPLPLGSSSFPFGSGVQT

SEQ ID NO: 31959 - protein, 762 aa, Homo sapiens
  Payload ID: 6256
  Gene Symbol: FGFR4
  Gene Name: fibroblast growth factor receptor 4
  Uniprot ID: P22455
  ENSP ID: ENSP00000377254
MRLLLALLGVLLSVPGPPVLSLEASEEVELEPCLAPSLEQQEQELTVALGQPVRLCCGRAERGGHWYKEGSRLAPAGRVRGWRGRLEIASFLPEDAGRYLCLARGSMIVLQNLTLITGDSLTSSNDDEDPKSHRDPSNRHSYPQQAPYWTHPQRMEKKLHAVPAGNTVKFRCPAAGNPTPTIRWLKDGQAFHGENRIGGIRLRHQHWSLVMESVVPSDRGTYTCLVENAVGSIRYNYLLDVLERSPHRPILQAGLPANTTAVVGSDVELLCKVYSDAQPHIQWLKHIVINGSSFGADGFPYVQVLKTADINSSEVEVLYLRNVSAEDAGEYTCLAGNSIGLSYQSAWLTVLPGTGRIPHLTCDSLTPAGRTKSPTLQFSLESGSSGKSSSSLVRGVRLSSSGPALLAGLVSLDLPLDPLWEFPRDRLVLGKPLGEGCFGQVVRAEAFGMDPARPDQASTVAVKMLKDNASDKDLADLVSEMEVMKLIGRHKNIINLLGVCTQEGPLYVIVECAAKGNLREFLRARRPPGPDLSPDGPRSSEGPLSFPVLVSCAYQVARGMQYLESRKCIHRDLAARNVLVTEDNVMKIADFGLARGVHHIDYYKKTSNGRLPVKWMAPEALFDRVYTHQSDVWSFGILLWEIFTLGGSPYPGIPVEELFSLLREGHRMDRPPHCPPELYGLMRECWHAAPSQRPTFKQLVEALDKVLLAVSEEYLDLRLTFGPYSPSGGDASSTCSSSDSVFSHDPLPLGSSSFPFGSGVQT

SEQ ID NO: 31960 - protein, 734 aa, Homo sapiens
  Payload ID: 6256
  Gene Symbol: FGFR4
  Gene Name: fibroblast growth factor receptor 4
  ENSP ID: ENSP00000377259
MRLLLALLGVLLSVPGPPVLSLEASEEVELEPCLAPSLEQQEQELTVALGQPVRLCCGRAERGGHWYKEGSRLAPAGRVRGWRGRLEIASFLPEDAGRYLCLARGSMIVLQNLTLITGDSLTSSNDDEDPKSHRDPSNRHSYPQQAPYWTHPQRMEKKLHAVPAGNTVKFRCPAAGNPTPTIRWLKDGQAFHGENRIGGIRLRHQHWSLVMESVVPSDRGTYTCLVENAVGSIRYNYLLDVLERSPHRPILQAGLPANTTAVVGSDVELLCKVYSDAQPHIQWLKHIVINGSSFGADGFPYVQVLKTADINSSEVEVLYLRNVSAEDAGEYTCLAGNSIGLSYQSAWLTVLPEEDPTWTAAAPEASSPWSQALPASQAHPWYEACVSPPAAPPCSPASLVLGKPLGEGCFGQVVRAEAFGMDPARPDQASTVAVKMLKDNASDKDLADLVSEMEVMKLIGRHKNIINLLGVCTQEGPLYVIVECAAKGNLREFLRARRPPGPDLSPDGPRSSEGPLSFPVLVSCAYQVARGMQYLESRKCIHRDLAARNVLVTEDNVMKIADFGLARGVHHIDYYKKTSNGRLPVKWMAPEALFDRVYTHQSDVWSFGILLWEIFTLGGSPYPGIPVEELFSLLREGHRMDRPPHCPPELYGLMRECWHAAPSQRPTFKQLVEALDKVLLAVSEEYLDLRLTFGPYSPSGGDASSTCSSSDSVFSHDPLPLGSSSFPFGSGVQT

SEQ ID NO: 31961 - protein, 72 aa, Homo sapiens
  Payload ID: 6256
  Gene Symbol: FGFR4
  Gene Name: fibroblast growth factor receptor 4
  ENSP ID: ENSP00000395164
MRLLLALLGVLLSVPGPPVLSLEASEEVELASIHLSLCLRERTGLAGRRALSWAAELVSPAWLPAWSSKSRS

SEQ ID NO: 31962 - protein, 108 aa, Homo sapiens
  Payload ID: 6256
  Gene Symbol: FGFR4
  Gene Name: fibroblast growth factor receptor 4
  ENSP ID: ENSP00000422889
MRLLLALLGVLLSVPGPPVLSLEASEEVELEPCLAPSLEQQEQELTVALGQPVRLCCGRAERGGHWYKEGSRLAPAGRVRGWRGRLEIASFLPEDAGRYLCLARGSMI

SEQ ID NO: 31963 - protein, 280 aa, Homo sapiens
  Payload ID: 6256
  Gene Symbol: FGFR4
  Gene Name: fibroblast growth factor receptor 4
  ENSP ID: ENSP00000424670
  MOD_RES (1)..(1): Any amino acid
XRYTDIILYASGSLALAVLLLLAGLYRGQALHGRHPRPPATVQKLSRFPLARQSGSSGKSSSSLVRGVRLSSSGPALLAGLVSLDLPLDPLWEFPRDRLVLGKPLGEGCFGQVVRAEAFGMDPARPDQASTVAVKMLKDNASDKDLADLVSEMEVMKLIGRHKNIINLLGVCTQEGPLYVIVECAAKGNLREFLRARRPPGPDLSPDGPRSSEGPLSFPVLVSCAYQVARGMQYLESRKCIHRDLAARNVLVTEDNVMKIADFGLARGVHHIDYYKKTSN

SEQ ID NO: 31964 - protein, 201 aa, Homo sapiens
  Payload ID: 6256
  Gene Symbol: FGFR4
  Gene Name: fibroblast growth factor receptor 4
  ENSP ID: ENSP00000424905
MRLLLALLGVLLSVPGPPVLSLEASEEVELEPCLAPSLEQQEQELTVALGQPVRLCCGRAERGGHWYKEGSRLAPAGRVRGWRGRLEIASFLPEDAGRYLCLARGSMIVLQNLTLITGDSLTSSNDDEDPKSHRDPSNRHSYPQQAPYWTHPQRMEKKLHAVPAGNTVKFRCPAAGNPTPTIRWLKDGQAFHGENRIGGIR

SEQ ID NO: 31965 - protein, 802 aa, Homo sapiens; identical to SEQ ID NO: 31958
  Payload ID: 6256
  Gene Symbol: FGFR4
  Gene Name: fibroblast growth factor receptor 4
  Uniprot ID: P22455
  ENSP ID: ENSP00000424960

SEQ ID NO: 31966 - protein, 114 aa, Homo sapiens
  Payload ID: 6256
  Gene Symbol: FGFR4
  Gene Name: fibroblast growth factor receptor 4
  ENSP ID: ENSP00000426492
MRLLLALLGVLLSVPGPPVLSLEASEEVELEPCLAPSLEQQEQELTVALGQPVRLCCGRAERGGHWYKEGSRLAPAGRVRGWRGRLEIASFLPEDAGRYLCLARGSMIVLQNLT

SEQ ID NO: 31967 - protein, 87 aa, Homo sapiens
  Payload ID: 6256
  Gene Symbol: FGFR4
  Gene Name: fibroblast growth factor receptor 4
  ENSP ID: ENSP00000427222
MRLLLALLGVLLSVPGPPVLSLEASEEVELEPCLAPSLEQQEQELTVALGQPVRLCCGRAERGGHWYKEGSRLAPAGRVRGWRGRLE

SEQ ID NO: 31968 - protein, 508 aa, Homo sapiens
  Payload ID: 6257
  Gene Symbol: FRS2
  Gene Name: fibroblast growth factor receptor substrate 2
  Uniprot ID: Q8WU20
  ENSP ID: ENSP00000381083
MGSCCSCPDKDTVPDNHRNKFKVINVDDDGNELGSGIMELTDTELILYTRKRDSVKWHYLCLRRYGYDSNLFSFESGRRCQTGQGIFAFKCARAEELFNMLQEIMQNNSINVVEEPVVERNNHQTELEVPRTPRTPTTPGFAAQNLPNGYPRYPSFGDASSHPSSRHPSVGSARLPSVGEESTHPLLVAEEQVHTYVNTTGVQEERKNRTSVHVPLEARVSNAESSTPKEEPSSIEDRDPQILLEPEGVKFVLGPTPVQKQLMEKEKLEQLGRDQVSGSGANNTEWDTGYDSDERRDAPSVNKLVYENINGLSIPSASGVRRGRLTSTSTSDTQNINNSAQRRTALLNYENLPSLPPVWEARKLSRDEDDNLGPKTPSLNGYHNNLDPMHNYVNTENVTVPASAHKIEYSRRRDCTPTVFNFDIRRPSLEHRQLNYIQVDLEGGSDSDNPQTPKTPTTPLPQTPTRRTELYAVIDIERTAAMSNLQKALPRDDGTSRKTRHNSTDLPM

SEQ ID NO: 31969 - protein, 31 aa, Homo sapiens
  Payload ID: 6257
  Gene Symbol: FRS2
  Gene Name: fibroblast growth factor receptor substrate 2
  ENSP ID: ENSP00000447007
MELTDTELILYTRKRDSVKWHYLCLRRYGYD

SEQ ID NO: 31970 - protein, 508 aa, Homo sapiens; identical to SEQ ID NO: 31968
  Payload ID: 6257
  Gene Symbol: FRS2
  Gene Name: fibroblast growth factor receptor substrate 2
  Uniprot ID: Q8WU20
  ENSP ID: ENSP00000447241

SEQ ID NO: 31971 - protein, 36 aa, Homo sapiens
  Payload ID: 6257
  Gene Symbol: FRS2
  Gene Name: fibroblast growth factor receptor substrate 2
  ENSP ID: ENSP00000447724
MGSCCSCPDKDTVPDNHRNKFKVINVDDDGNELGSG

SEQ ID NO: 31972 - protein, 91 aa, Homo sapiens
  Payload ID: 6257
  Gene Symbol: FRS2
  Gene Name: fibroblast growth factor receptor substrate 2
  ENSP ID: ENSP00000447804
MGSCCSCPDKDTVPDNHRNKFKVINVDDDGNELGSGIMELTDTELILYTRKRDSVKWHYLCLRRYGYDSNLFSFESGRRCQTGQGIFAFKC

SEQ ID NO: 31973 - protein, 10 aa, Homo sapiens
  Payload ID: 6257
  Gene Symbol: FRS2
  Gene Name: fibroblast growth factor receptor substrate 2
  ENSP ID: ENSP00000447978
MGSCCSCPDK

SEQ ID NO: 31974 - protein, 40 aa, Homo sapiens
  Payload ID: 6257
  Gene Symbol: FRS2
  Gene Name: fibroblast growth factor receptor substrate 2
  ENSP ID: ENSP00000449105
MGSCCSCPDKDTVPDNHRNKFKVINVDDDGNELGSGIMEL

SEQ ID NO: 31975 - protein, 33 aa, Homo sapiens
  Payload ID: 6257
  Gene Symbol: FRS2
  Gene Name: fibroblast growth factor receptor substrate 2
  ENSP ID: ENSP00000449111
MGSCCSCPDKDTVPDNHRNKFKVINVDDDGNEL

SEQ ID NO: 31976 - protein, 183 aa, Homo sapiens
  Payload ID: 6257
  Gene Symbol: FRS2
  Gene Name: fibroblast growth factor receptor substrate 2
  ENSP ID: ENSP00000449432
MGSCCSCPDKDTVPDNHRNKFKVINVDDDGNELGSGIMELTDTELILYTRKRDSVKWHYLCLRRYGYDSNLFSFESGRRCQTGQGIFAFKCARAEELFNMLQEIMQNNSINVVEEPVVERNNHQTELEVPRTPRTPTTPGFAAQNLPNGYPRYPSFGDASSHPSSRHPSVGSARLPSVGEEST

SEQ ID NO: 31977 - protein, 12 aa, Homo sapiens
  Payload ID: 6257
  Gene Symbol: FRS2
  Gene Name: fibroblast growth factor receptor substrate 2
  ENSP ID: ENSP00000450000
MGSCCSCPDKDT

SEQ ID NO: 31978 - protein, 508 aa, Homo sapiens; identical to SEQ ID NO: 31968
  Payload ID: 6257
  Gene Symbol: FRS2
  Gene Name: fibroblast growth factor receptor substrate 2
  Uniprot ID: Q8WU20
  ENSP ID: ENSP00000450048

SEQ ID NO: 31979 - protein, 492 aa, Homo sapiens
  Payload ID: 6258
  Gene Symbol: FRS3
  Gene Name: fibroblast growth factor receptor substrate 3
  Uniprot ID: O43559
  ENSP ID: ENSP00000259748
MGSCCSCLNRDSVPDNHPTKFKVTNVDDEGVELGSGVMELTQSELVLHLHRREAVRWPYLCLRRYGYDSNLFSFESGRRCQTGQGIFAFKCSRAEEIFNLLQDLMQCNSINVMEEPVIITRNSHPAELDLPRAPQPPNALGYTVSSFSNGCPGEGPRFSAPRRLSTSSLRHPSLGEESTHALIAPDEQSHTYVNTPASEDDHRRGRHCLQPLPEGQAPFLPQARGPDQRDPQVFLQPGQVKFVLGPTPARRHMVKCQGLCPSLHDPPHHNNNNEAPSECPAQPKCTYENVTGGLWRGAGWRLSPEEPGWNGLAHRRAALLHYENLPPLPPVWESQAQQLGGEAGDDGDSRDGLTPSSNGFPDGEEDETPLQKPTSTRAAIRSHGSFPVPLTRRRGSPRVFNFDFRRPGPEPPRQLNYIQVELKGWGGDRPKGPQNPSSPQAPMPTTHPARSSDSYAVIDLKKTVAMSNLQRALPRDDGTARKTRHNSTDLPL

SEQ ID NO: 31980 - protein, 492 aa, Homo sapiens; identical to SEQ ID NO: 31979
  Payload ID: 6258
  Gene Symbol: FRS3
  Gene Name: fibroblast growth factor receptor substrate 3
  Uniprot ID: O43559
  ENSP ID: ENSP00000362109

SEQ ID NO: 31981 - protein, 147 aa, Homo sapiens
  Payload ID: 6258
  Gene Symbol: FRS3
  Gene Name: fibroblast growth factor receptor substrate 3
  ENSP ID: ENSP00000396715
METPRRARSPVSPQFPGQAGCSDTMGSCCSCLNRDSVPDNHPTKFKVTNVDDEGVELGSGVMELTQSELVLHLHRREAVRWPYLCLRRYGYDSNLFSFESGRRCQTGQGIFAFKCSRAEEIFNLLQDLMQCNSINVMEEPVIITRNS

SEQ ID NO: 31982 - protein, 36 aa, Homo sapiens
  Payload ID: 6258
  Gene Symbol: FRS3
  Gene Name: fibroblast growth factor receptor substrate 3
  ENSP ID: ENSP00000413214
MGSCCSCLNRDSVPDNHPTKFKVTNVDDEGVELGSG

SEQ ID NO: 31983 - protein, 504 aa, Homo sapiens
  Payload ID: 6259
  Gene Symbol: FGFRL1
  Gene Name: fibroblast growth factor receptor-like 1
  Uniprot ID: Q8N441
  ENSP ID: ENSP00000264748
MTPSPLLLLLLPPLLLGAFPPAAAARGPPKMADKVVPRQVARLGRTVRLQCPVEGDPPPLTMWTKDGRTIHSGWSRFRVLPQGLKVKQVEREDAGVYVCKATNGFGSLSVNYTLVVLDDISPGKESLGPDSSSGGQEDPASQQWARPRFTQPSKMRRRVIARPVGSSVRLKCVASGHPRPDITWMKDDQALTRPEAAEPRKKKWTLSLKNLRPEDSGKYTCRVSNRAGAINATYKVDVIQRTRSKPVLTGTHPVNTTVDFGGTTSFQCKVRSDVKPVIQWLKRVEYGAEGRHNSTIDVGGQKFVVLPTGDVWSRPDGSYLNKLLITRARQDDAGMYICLGANTMGYSFRSAFLTVLPDPKPPGPPVASSSSATSLPWPVVIGIPAGAVFILGTLLLWLCQAQKKPCTPAPAPPLPGHRPPGTARDRSGDKDLPSLAALSAGPGVGLCEEHGSPAAPQHLLGPGPVAGPKLYPKLYTDIHTHTHTHSHTHSHVEGKVHQHIHYQC

SEQ ID NO: 31984 - protein, 504 aa, Homo sapiens; identical to SEQ ID NO: 31983
  Payload ID: 6259
  Gene Symbol: FGFRL1
  Gene Name: fibroblast growth factor receptor-like 1
  Uniprot ID: Q8N441
  ENSP ID: ENSP00000381498

SEQ ID NO: 31985 - protein, 504 aa, Homo sapiens; identical to SEQ ID NO: 31983
  Payload ID: 6259
  Gene Symbol: FGFRL1
  Gene Name: fibroblast growth factor receptor-like 1
  Uniprot ID: Q8N441
  ENSP ID: ENSP00000423091

SEQ ID NO: 31986 - protein, 152 aa, Homo sapiens
  Payload ID: 6259
  Gene Symbol: FGFRL1
  Gene Name: fibroblast growth factor receptor-like 1
  ENSP ID: ENSP00000424037
MTPSPLLLLLLPPLLLGAFPPAAAARGPPKMADKVVPRQVARLGRTVRLQCPVEGDPPPLTMWTKDGRTIHSGWSRFRVLPQGLKVKQVEREDAGVYVCKATNGFGSLSVNYTLVVLDDISPGKESLGPDSSSGGQEDPASQQWARPRFTQP

SEQ ID NO: 31987 - protein, 504 aa, Homo sapiens; identical to SEQ ID NO: 31983
  Payload ID: 6259
  Gene Symbol: FGFRL1
  Gene Name: fibroblast growth factor receptor-like 1
  Uniprot ID: Q8N441
  ENSP ID: ENSP00000425025

SEQ ID NO: 31988 - protein, 80 aa, Homo sapiens
  Payload ID: 6259
  Gene Symbol: FGFRL1
  Gene Name: fibroblast growth factor receptor-like 1
  ENSP ID: ENSP00000426740
MTPSPLLLLLLPPLLLGAFPPAAAARGPPKMADKVVPRQVARLGRTVRLQCPVEGDPPPLTMWTKDGRTIHSGWSRFRVL

SEQ ID NO: 31989 - protein, 376 aa, Homo sapiens
  Payload ID: 6260
  Gene Symbol: FMOD
  Gene Name: fibromodulin
  Uniprot ID: Q06828
  ENSP ID: ENSP00000347041
MQWTSLLLLAGLFSLSQAQYEDDPHWWFHYLRSQQSTYYDPYDPYPYETYEPYPYGVDEGPAYTYGSPSPPDPRDCPQECDCPPNFPTAMYCDNRNLKYLPFVPSRMKYVYFQNNQITSIQEGVFDNATGLLWIALHGNQITSDKVGRKVFSKLRHLERLYLDHNNLTRMPGPLPRSLRELHLDHNQISRVPNNALEGLENLTALYLQHNEIQEVGSSMRGLRSLILLDLSYNHLRKVPDGLPSALEQLYMEHNNVYTVPDSYFRGAPKLLYVRLSHNSLTNNGLASNTFNSSSLLELDLSYNQLQKIPPVNTNLENLYLQGNRINEFSISSFCTVVDVVNFSKLQVLRLDGNEIKRSAMPADAPLCLRLASLIEI

SEQ ID NO: 31990 - protein, 2446 aa, Homo sapiens
  Payload ID: 6261
  Gene Symbol: FN1
  Gene Name: fibronectin 1
  Uniprot ID: P02751
  ENSP ID: ENSP00000323534
MLRGPGPGLLLLAVQCLGTAVPSTGASKSKRQAQQMVQPQSPVAVSQSKPGCYDNGKHYQINQQWERTYLGNALVCTCYGGSRGFNCESKPEAEETCFDKYTGNTYRVGDTYERPKDSMIWDCTCIGAGRGRISCTIANRCHEGGQSYKIGDTWRRPHETGGYMLECVCLGNGKGEWTCKPIAEKCFDHAAGTSYVVGETWEKPYQGWMMVDCTCLGEGSGRITCTSRNRCNDQDTRTSYRIGDTWSKKDNRGNLLQCICTGNGRGEWKCERHTSVQTTSSGSGPFTDVRAAVYQPQPHPQPPPYGHCVTDSGVVYSVGMQWLKTQGNKQMLCTCLGNGVSCQETAVTQTYGGNSNGEPCVLPFTYNGRTFYSCTTEGRQDGHLWCSTTSNYEQDQKYSFCTDHTVLVQTRGGNSNGALCHFPFLYNNHNYTDCTSEGRRDNMKWCGTTQNYDADQKFGFCPMAAHEEICTTNEGVMYRIGDQWDKQHDMGHMMRCTCVGNGRGEWTCIAYSQLRDQCIVDDITYNVNDTFHKRHEEGHMLNCTCFGQGRGRWKCDPVDQCQDSETGTFYQIGDSWEKYVHGVRYQCYCYGRGIGEWHCQPLQTYPSSSGPVEVFITETPSQPNSHPIQWNAPQPSHISKYILRWRPKNSVGRWKEATIPGHLNSYTIKGLKPGVVYEGQLISIQQYGHQEVTRFDFTTTSTSTPVTSNTVTGETTPFSPLVATSESVTEITASSFVVSWVSASDTVSGFRVEYELSEEGDEPQYLDLPSTATSVNIPDLLPGRKYIVNVYQISEDGEQSLILSTSQTTAPDAPPDTTVDQVDDTSIVVRWSRPQAPITGYRIVYSPSVEGSSTELNLPETANSVTLSDLQPGVQYNITIYAVEENQESTPVVIQQETTGTPRSDTVPSPRDLQFVEVTDVKVTIMWTPPESAVTGYRVDVIPVNLPGEHGQRLPISRNTFAEVTGLSPGVTYYFKVFAVSHGRESKPLTAQQTTKLDAPTNLQFVNETDSTVLVRWTPPRAQITGYRLTVGLTRRGQPRQYNVGPSVSKYPLRNLQPASEYTVSLVAIKGNQESPKATGVFTTLQPGSSIPPYNTEVTETTIVITWTPAPRIGFKLGVRPSQGGEAPREVTSDSGSIVVSGLTPGVEYVYTIQVLRDGQERDAPIVNKVVTPLSPPTNLHLEANPDTGVLTVSWERSTTPDITGYRITTTPTNGQQGNSLEEVVHADQSSCTFDNLSPGLEYNVSVYTVKDDKESVPISDTIIPEVPQLTDLSFVDITDSSIGLRWTPLNSSTIIGYRITVVAAGEGIPIFEDFVDSSVGYYTVTGLEPGIDYDISVITLINGGESAPTTLTQQTAVPPPTDLRFTNIGPDTMRVTWAPPPSIDLTNFLVRYSPVKNEEDVAELSISPSDNAVVLTNLLPGTEYVVSVSSVYEQHESTPLRGRQKTGLDSPTGIDFSDITANSFTVHWIAPRATITGYRIRHHPEHFSGRPREDRVPHSRNSITLTNLTPGTEYVVSIVALNGREESPLLIGQQSTVSDVPRDLEVVAATPTSLLISWDAPAVTVRYYRITYGETGGNSPVQEFTVPGSKSTATISGLKPGVDYTITVYAVTGRGDSPASSKPISINYRTEIDKPSQMQVTDVQDNSISVKWLPSSSPVTGYRVTTTPKNGPGPTKTKTAGPDQTEMTIEGLQPTVEYVVSVYAQNPSGESQPLVQTAVTNIDRPKGLAFTDVDVDSIKIAWESPQGQVSRYRVTYSSPEDGIHELFPAPDGEEDTAELQGLRPGSEYTVSVVALHDDMESQPLIGTQSTAIPAPTDLKFTQVTPTSLSAQWTPPNVQLTGYRVRVTPKEKTGPMKEINLAPDSSSVVVSGLMVATKYEVSVYALKDTLTSRPAQGVVTTLENVSPPRRARVTDATETTITISWRTKTETITGFQVDAVPANGQTPIQRTIKPDVRSYTITGLQPGTDYKIYLYTLNDNARSSPVVIDASTAIDAPSNLRFLATTPNSLLVSWQPPRARITGYIIKYEKPGSPPREVVPRPRPGVTEATITGLEPGTEYTIYVIALKNNQKSEPLIGRKKTDELPQLVTLPHPNLHGPEILDVPSTVQKTPFVTHPGYDTGNGIQLPGTSGQQPSVGQQMIFEEHGFRRTTPPTTATPIRHRPRPYPPNVGQEALSQTTISWAPFQDTSEYIISCHPVGTDEEPLQFRVPGTSTSATLTGLTRGATYNVIVEALKDQQRHKVREEVVTVGNSVNEGLNQPTDDSCFDPYTVSHYAVGDEWERMSESGFKLLCQCLGFGSGHFRCDSSRWCHDNGVNYKIGEKWDRQGENGQMMSCTCLGNGKGEFKCDPHEATCYDDGKTYHVGEQWQKEYLGAICSCTCFGGQRGWRCDNCRRPGGEPSPEGTTGQSYNQYSQRYHQRTNTNVNCPIECFMPLDVQADREDSRE

SEQ ID NO: 31991 - protein, 2355 aa, Homo sapiens
  Payload ID: 6261
  Gene Symbol: FN1
  Gene Name: fibronectin 1
  Uniprot ID: P02751
  ENSP ID: ENSP00000338200
MLRGPGPGLLLLAVQCLGTAVPSTGASKSKRQAQQMVQPQSPVAVSQSKPGCYDNGKHYQINQQWERTYLGNALVCTCYGGSRGFNCESKPEAEETCFDKYTGNTYRVGDTYERPKDSMIWDCTCIGAGRGRISCTIANRCHEGGQSYKIGDTWRRPHETGGYMLECVCLGNGKGEWTCKPIAEKCFDHAAGTSYVVGETWEKPYQGWMMVDCTCLGEGSGRITCTSRNRCNDQDTRTSYRIGDTWSKKDNRGNLLQCICTGNGRGEWKCERHTSVQTTSSGSGPFTDVRAAVYQPQPHPQPPPYGHCVTDSGVVYSVGMQWLKTQGNKQMLCTCLGNGVSCQETAVTQTYGGNSNGEPCVLPFTYNGRTFYSCTTEGRQDGHLWCSTTSNYEQDQKYSFCTDHTVLVQTRGGNSNGALCHFPFLYNNHNYTDCTSEGRRDNMKWCGTTQNYDADQKFGFCPMAAHEEICTTNEGVMYRIGDQWDKQHDMGHMMRCTCVGNGRGEWTCIAYSQLRDQCIVDDITYNVNDTFHKRHEEGHMLNCTCFGQGRGRWKCDPVDQCQDSETGTFYQIGDSWEKYVHGVRYQCYCYGRGIGEWHCQPLQTYPSSSGPVEVFITETPSQPNSHPIQWNAPQPSHISKYILRWRPKNSVGRWKEATIPGHLNSYTIKGLKPGVVYEGQLISIQQYGHQEVTRFDFTTTSTSTPVTSNTVTGETTPFSPLVATSESVTEITASSFVVSWVSASDTVSGFRVEYELSEEGDEPQYLDLPSTATSVNIPDLLPGRKYIVNVYQISEDGEQSLILSTSQTTAPDAPPDTTVDQVDDTSIVVRWSRPQAPITGYRIVYSPSVEGSSTELNLPETANSVTLSDLQPGVQYNITIYAVEENQESTPVVIQQETTGTPRSDTVPSPRDLQFVEVTDVKVTIMWTPPESAVTGYRVDVIPVNLPGEHGQRLPISRNTFAEVTGLSPGVTYYFKVFAVSHGRESKPLTAQQTTKLDAPTNLQFVNETDSTVLVRWTPPRAQITGYRLTVGLTRRGQPRQYNVGPSVSKYPLRNLQPASEYTVSLVAIKGNQESPKATGVFTTLQPGSSIPPYNTEVTETTIVITWTPAPRIGFKLGVRPSQGGEAPREVTSDSGSIVVSGLTPGVEYVYTIQVLRDGQERDAPIVNKVVTPLSPPTNLHLEANPDTGVLTVSWERSTTPDITGYRITTTPTNGQQGNSLEEVVHADQSSCTFDNLSPGLEYNVSVYTVKDDKESVPISDTIIPAVPPPTDLRFTNIGPDTMRVTWAPPPSIDLTNFLVRYSPVKNEEDVAELSISPSDNAVVLTNLLPGTEYVVSVSSVYEQHESTPLRGRQKTGLDSPTGIDFSDITANSFTVHWIAPRATITGYRIRHHPEHFSGRPREDRVPHSRNSITLTNLTPGTEYVVSIVALNGREESPLLIGQQSTVSDVPRDLEVVAATPTSLLISWDAPAVTVRYYRITYGETGGNSPVQEFTVPGSKSTATISGLKPGVDYTITVYAVTGRGDSPASSKPISINYRTEIDKPSQMQVTDVQDNSISVKWLPSSSPVTGYRVTTTPKNGPGPTKTKTAGPDQTEMTIEGLQPTVEYVVSVYAQNPSGESQPLVQTAVTNIDRPKGLAFTDVDVDSIKIAWESPQGQVSRYRVTYSSPEDGIHELFPAPDGEEDTAELQGLRPGSEYTVSVVALHDDMESQPLIGTQSTAIPAPTDLKFTQVTPTSLSAQWTPPNVQLTGYRVRVTPKEKTGPMKEINLAPDSSSVVVSGLMVATKYEVSVYALKDTLTSRPAQGVVTTLENVSPPRRARVTDATETTITISWRTKTETITGFQVDAVPANGQTPIQRTIKPDVRSYTITGLQPGTDYKIYLYTLNDNARSSPVVIDASTAIDAPSNLRFLATTPNSLLVSWQPPRARITGYIIKYEKPGSPPREVVPRPRPGVTEATITGLEPGTEYTIYVIALKNNQKSEPLIGRKKTDELPQLVTLPHPNLHGPEILDVPSTVQKTPFVTHPGYDTGNGIQLPGTSGQQPSVGQQMIFEEHGFRRTTPPTTATPIRHRPRPYPPNVGQEALSQTTISWAPFQDTSEYIISCHPVGTDEEPLQFRVPGTSTSATLTGLTRGATYNVIVEALKDQQRHKVREEVVTVGNSVNEGLNQPTDDSCFDPYTVSHYAVGDEWERMSESGFKLLCQCLGFGSGHFRCDSSRWCHDNGVNYKIGEKWDRQGENGQMMSCTCLGNGKGEFKCDPHEATCYDDGKTYHVGEQWQKEYLGAICSCTCFGGQRGWRCDNCRRPGGEPSPEGTTGQSYNQYSQRYHQRTNTNVNCPIECFMPLDVQADREDSRE

SEQ ID NO: 31992 - protein, 2477 aa, Homo sapiens
  Payload ID: 6261
  Gene Symbol: FN1
  Gene Name: fibronectin 1
  Uniprot ID: P02751
  ENSP ID: ENSP00000346839
MLRGPGPGLLLLAVQCLGTAVPSTGASKSKRQAQQMVQPQSPVAVSQSKPGCYDNGKHYQINQQWERTYLGNALVCTCYGGSRGFNCESKPEAEETCFDKYTGNTYRVGDTYERPKDSMIWDCTCIGAGRGRISCTIANRCHEGGQSYKIGDTWRRPHETGGYMLECVCLGNGKGEWTCKPIAEKCFDHAAGTSYVVGETWEKPYQGWMMVDCTCLGEGSGRITCTSRNRCNDQDTRTSYRIGDTWSKKDNRGNLLQCICTGNGRGEWKCERHTSVQTTSSGSGPFTDVRAAVYQPQPHPQPPPYGHCVTDSGVVYSVGMQWLKTQGNKQMLCTCLGNGVSCQETAVTQTYGGNSNGEPCVLPFTYNGRTFYSCTTEGRQDGHLWCSTTSNYEQDQKYSFCTDHTVLVQTRGGNSNGALCHFPFLYNNHNYTDCTSEGRRDNMKWCGTTQNYDADQKFGFCPMAAHEEICTTNEGVMYRIGDQWDKQHDMGHMMRCTCVGNGRGEWTCIAYSQLRDQCIVDDITYNVNDTFHKRHEEGHMLNCTCFGQGRGRWKCDPVDQCQDSETGTFYQIGDSWEKYVHGVRYQCYCYGRGIGEWHCQPLQTYPSSSGPVEVFITETPSQPNSHPIQWNAPQPSHISKYILRWRPKNSVGRWKEATIPGHLNSYTIKGLKPGVVYEGQLISIQQYGHQEVTRFDFTTTSTSTPVTSNTVTGETTPFSPLVATSESVTEITASSFVVSWVSASDTVSGFRVEYELSEEGDEPQYLDLPSTATSVNIPDLLPGRKYIVNVYQISEDGEQSLILSTSQTTAPDAPPDTTVDQVDDTSIVVRWSRPQAPITGYRIVYSPSVEGSSTELNLPETANSVTLSDLQPGVQYNITIYAVEENQESTPVVIQQETTGTPRSDTVPSPRDLQFVEVTDVKVTIMWTPPESAVTGYRVDVIPVNLPGEHGQRLPISRNTFAEVTGLSPGVTYYFKVFAVSHGRESKPLTAQQTTKLDAPTNLQFVNETDSTVLVRWTPPRAQITGYRLTVGLTRRGQPRQYNVGPSVSKYPLRNLQPASEYTVSLVAIKGNQESPKATGVFTTLQPGSSIPPYNTEVTETTIVITWTPAPRIGFKLGVRPSQGGEAPREVTSDSGSIVVSGLTPGVEYVYTIQVLRDGQERDAPIVNKVVTPLSPPTNLHLEANPDTGVLTVSWERSTTPDITGYRITTTPTNGQQGNSLEEVVHADQSSCTFDNLSPGLEYNVSVYTVKDDKESVPISDTIIPEVPQLTDLSFVDITDSSIGLRWTPLNSSTIIGYRITVVAAGEGIPIFEDFVDSSVGYYTVTGLEPGIDYDISVITLINGGESAPTTLTQQTAVPPPTDLRFTNIGPDTMRVTWAPPPSIDLTNFLVRYSPVKNEEDVAELSISPSDNAVVLTNLLPGTEYVVSVSSVYEQHESTPLRGRQKTGLDSPTGIDFSDITANSFTVHWIAPRATITGYRIRHHPEHFSGRPREDRVPHSRNSITLTNLTPGTEYVVSIVALNGREESPLLIGQQSTVSDVPRDLEVVAATPTSLLISWDAPAVTVRYYRITYGETGGNSPVQEFTVPGSKSTATISGLKPGVDYTITVYAVTGRGDSPASSKPISINYRTEIDKPSQMQVTDVQDNSISVKWLPSSSPVTGYRVTTTPKNGPGPTKTKTAGPDQTEMTIEGLQPTVEYVVSVYAQNPSGESQPLVQTAVTNIDRPKGLAFTDVDVDSIKIAWESPQGQVSRYRVTYSSPEDGIHELFPAPDGEEDTAELQGLRPGSEYTVSVVALHDDMESQPLIGTQSTAIPAPTDLKFTQVTPTSLSAQWTPPNVQLTGYRVRVTPKEKTGPMKEINLAPDSSSVVVSGLMVATKYEVSVYALKDTLTSRPAQGVVTTLENVSPPRRARVTDATETTITISWRTKTETITGFQVDAVPANGQTPIQRTIKPDVRSYTITGLQPGTDYKIYLYTLNDNARSSPVVIDASTAIDAPSNLRFLATTPNSLLVSWQPPRARITGYIIKYEKPGSPPREVVPRPRPGVTEATITGLEPGTEYTIYVIALKNNQKSEPLIGRKKTDELPQLVTLPHPNLHGPEILDVPSTVQKTPFVTHPGYDTGNGIQLPGTSGQQPSVGQQMIFEEHGFRRTTPPTTATPIRHRPRPYPPNVGEEIQIGHIPREDVDYHLYPHGPGLNPNASTGQEALSQTTISWAPFQDTSEYIISCHPVGTDEEPLQFRVPGTSTSATLTGLTRGATYNVIVEALKDQQRHKVREEVVTVGNSVNEGLNQPTDDSCFDPYTVSHYAVGDEWERMSESGFKLLCQCLGFGSGHFRCDSSRWCHDNGVNYKIGEKWDRQGENGQMMSCTCLGNGKGEFKCDPHEATCYDDGKTYHVGEQWQKEYLGAICSCTCFGGQRGWRCDNCRRPGGEPSPEGTTGQSYNQYSQRYHQRTNTNVNCPIECFMPLDVQADREDSRE

SEQ ID NO: 31993 - protein, 2296 aa, Homo sapiens
  Payload ID: 6261
  Gene Symbol: FN1
  Gene Name: fibronectin 1
  Uniprot ID: P02751
  ENSP ID: ENSP00000348285
MLRGPGPGLLLLAVQCLGTAVPSTGASKSKRQAQQMVQPQSPVAVSQSKPGCYDNGKHYQINQQWERTYLGNALVCTCYGGSRGFNCESKPEAEETCFDKYTGNTYRVGDTYERPKDSMIWDCTCIGAGRGRISCTIANRCHEGGQSYKIGDTWRRPHETGGYMLECVCLGNGKGEWTCKPIAEKCFDHAAGTSYVVGETWEKPYQGWMMVDCTCLGEGSGRITCTSRNRCNDQDTRTSYRIGDTWSKKDNRGNLLQCICTGNGRGEWKCERHTSVQTTSSGSGPFTDVRAAVYQPQPHPQPPPYGHCVTDSGVVYSVGMQWLKTQGNKQMLCTCLGNGVSCQETAVTQTYGGNSNGEPCVLPFTYNGRTFYSCTTEGRQDGHLWCSTTSNYEQDQKYSFCTDHTVLVQTRGGNSNGALCHFPFLYNNHNYTDCTSEGRRDNMKWCGTTQNYDADQKFGFCPMAAHEEICTTNEGVMYRIGDQWDKQHDMGHMMRCTCVGNGRGEWTCIAYSQLRDQCIVDDITYNVNDTFHKRHEEGHMLNCTCFGQGRGRWKCDPVDQCQDSETGTFYQIGDSWEKYVHGVRYQCYCYGRGIGEWHCQPLQTYPSSSGPVEVFITETPSQPNSHPIQWNAPQPSHISKYILRWRPKNSVGRWKEATIPGHLNSYTIKGLKPGVVYEGQLISIQQYGHQEVTRFDFTTTSTSTPVTSNTVTGETTPFSPLVATSESVTEITASSFVVSWVSASDTVSGFRVEYELSEEGDEPQYLDLPSTATSVNIPDLLPGRKYIVNVYQISEDGEQSLILSTSQTTAPDAPPDTTVDQVDDTSIVVRWSRPQAPITGYRIVYSPSVEGSSTELNLPETANSVTLSDLQPGVQYNITIYAVEENQESTPVVIQQETTGTPRSDTVPSPRDLQFVEVTDVKVTIMWTPPESAVTGYRVDVIPVNLPGEHGQRLPISRNTFAEVTGLSPGVTYYFKVFAVSHGRESKPLTAQQTTKLDAPTNLQFVNETDSTVLVRWTPPRAQITGYRLTVGLTRRGQPRQYNVGPSVSKYPLRNLQPASEYTVSLVAIKGNQESPKATGVFTTLQPGSSIPPYNTEVTETTIVITWTPAPRIGFKLGVRPSQGGEAPREVTSDSGSIVVSGLTPGVEYVYTIQVLRDGQERDAPIVNKVVTPLSPPTNLHLEANPDTGVLTVSWERSTTPDITGYRITTTPTNGQQGNSLEEVVHADQSSCTFDNLSPGLEYNVSVYTVKDDKESVPISDTIIPAVPPPTDLRFTNIGPDTMRVTWAPPPSIDLTNFLVRYSPVKNEEDVAELSISPSDNAVVLTNLLPGTEYVVSVSSVYEQHESTPLRGRQKTGLDSPTGIDFSDITANSFTVHWIAPRATITGYRIRHHPEHFSGRPREDRVPHSRNSITLTNLTPGTEYVVSIVALNGREESPLLIGQQSTVSDVPRDLEVVAATPTSLLISWDAPAVTVRYYRITYGETGGNSPVQEFTVPGSKSTATISGLKPGVDYTITVYAVTGRGDSPASSKPISINYRTEIDKPSQMQVTDVQDNSISVKWLPSSSPVTGYRVTTTPKNGPGPTKTKTAGPDQTEMTIEGLQPTVEYVVSVYAQNPSGESQPLVQTAVTTIPAPTDLKFTQVTPTSLSAQWTPPNVQLTGYRVRVTPKEKTGPMKEINLAPDSSSVVVSGLMVATKYEVSVYALKDTLTSRPAQGVVTTLENVSPPRRARVTDATETTITISWRTKTETITGFQVDAVPANGQTPIQRTIKPDVRSYTITGLQPGTDYKIYLYTLNDNARSSPVVIDASTAIDAPSNLRFLATTPNSLLVSWQPPRARITGYIIKYEKPGSPPREVVPRPRPGVTEATITGLEPGTEYTIYVIALKNNQKSEPLIGRKKTDELPQLVTLPHPNLHGPEILDVPSTVQKTPFVTHPGYDTGNGIQLPGTSGQQPSVGQQMIFEEHGFRRTTPPTTATPIRHRPRPYPPNVGEEIQIGHIPREDVDYHLYPHGPGLNPNASTGQEALSQTTISWAPFQDTSEYIISCHPVGTDEEPLQFRVPGTSTSATLTGLTRGATYNVIVEALKDQQRHKVREEVVTVGNSVNEGLNQPTDDSCFDPYTVSHYAVGDEWERMSESGFKLLCQCLGFGSGHFRCDSSRWCHDNGVNYKIGEKWDRQGENGQMMSCTCLGNGKGEFKCDPHEATCYDDGKTYHVGEQWQKEYLGAICSCTCFGGQRGWRCDNCRRPGGEPSPEGTTGQSYNQYSQRYHQRTNTNVNCPIECFMPLDVQADREDSRE

SEQ ID NO: 31994 - protein, 2176 aa, Homo sapiens
  Payload ID: 6261
  Gene Symbol: FN1
  Gene Name: fibronectin 1
  Uniprot ID: P02751
  ENSP ID: ENSP00000350534
MLRGPGPGLLLLAVQCLGTAVPSTGASKSKRQAQQMVQPQSPVAVSQSKPGCYDNGKHYQINQQWERTYLGNALVCTCYGGSRGFNCESKPEAEETCFDKYTGNTYRVGDTYERPKDSMIWDCTCIGAGRGRISCTIANRCHEGGQSYKIGDTWRRPHETGGYMLECVCLGNGKGEWTCKPIAEKCFDHAAGTSYVVGETWEKPYQGWMMVDCTCLGEGSGRITCTSRNRCNDQDTRTSYRIGDTWSKKDNRGNLLQCICTGNGRGEWKCERHTSVQTTSSGSGPFTDVRAAVYQPQPHPQPPPYGHCVTDSGVVYSVGMQWLKTQGNKQMLCTCLGNGVSCQETAVTQTYGGNSNGEPCVLPFTYNGRTFYSCTTEGRQDGHLWCSTTSNYEQDQKYSFCTDHTVLVQTRGGNSNGALCHFPFLYNNHNYTDCTSEGRRDNMKWCGTTQNYDADQKFGFCPMAAHEEICTTNEGVMYRIGDQWDKQHDMGHMMRCTCVGNGRGEWTCIAYSQLRDQCIVDDITYNVNDTFHKRHEEGHMLNCTCFGQGRGRWKCDPVDQCQDSETGTFYQIGDSWEKYVHGVRYQCYCYGRGIGEWHCQPLQTYPSSSGPVEVFITETPSQPNSHPIQWNAPQPSHISKYILRWRPKNSVGRWKEATIPGHLNSYTIKGLKPGVVYEGQLISIQQYGHQEVTRFDFTTTSTSTPVTSNTVTGETTPFSPLVATSESVTEITASSFVVSWVSASDTVSGFRVEYELSEEGDEPQYLDLPSTATSVNIPDLLPGRKYIVNVYQISEDGEQSLILSTSQTTAPDAPPDTTVDQVDDTSIVVRWSRPQAPITGYRIVYSPSVEGSSTELNLPETANSVTLSDLQPGVQYNITIYAVEENQESTPVVIQQETTGTPRSDTVPSPRDLQFVEVTDVKVTIMWTPPESAVTGYRVDVIPVNLPGEHGQRLPISRNTFAEVTGLSPGVTYYFKVFAVSHGRESKPLTAQQTTKLDAPTNLQFVNETDSTVLVRWTPPRAQITGYRLTVGLTRRGQPRQYNVGPSVSKYPLRNLQPASEYTVSLVAIKGNQESPKATGVFTTLQPGSSIPPYNTEVTETTIVITWTPAPRIGFKLGVRPSQGGEAPREVTSDSGSIVVSGLTPGVEYVYTIQVLRDGQERDAPIVNKVVTPLSPPTNLHLEANPDTGVLTVSWERSTTPDITGYRITTTPTNGQQGNSLEEVVHADQSSCTFDNLSPGLEYNVSVYTVKDDKESVPISDTIIPAVPPPTDLRFTNIGPDTMRVTWAPPPSIDLTNFLVRYSPVKNEEDVAELSISPSDNAVVLTNLLPGTEYVVSVSSVYEQHESTPLRGRQKTGLDSPTGIDFSDITANSFTVHWIAPRATITGYRIRHHPEHFSGRPREDRVPHSRNSITLTNLTPGTEYVVSIVALNGREESPLLIGQQSTVSDVPRDLEVVAATPTSLLISWDAPAVTVRYYRITYGETGGNSPVQEFTVPGSKSTATISGLKPGVDYTITVYAVTGRGDSPASSKPISINYRTEIDKPSQMQVTDVQDNSISVKWLPSSSPVTGYRVTTTPKNGPGPTKTKTAGPDQTEMTIEGLQPTVEYVVSVYAQNPSGESQPLVQTAVTTIPAPTDLKFTQVTPTSLSAQWTPPNVQLTGYRVRVTPKEKTGPMKEINLAPDSSSVVVSGLMVATKYEVSVYALKDTLTSRPAQGVVTTLENVSPPRRARVTDATETTITISWRTKTETITGFQVDAVPANGQTPIQRTIKPDVRSYTITGLQPGTDYKIYLYTLNDNARSSPVVIDASTAIDAPSNLRFLATTPNSLLVSWQPPRARITGYIIKYEKPGSPPREVVPRPRPGVTEATITGLEPGTEYTIYVIALKNNQKSEPLIGRKKTGQEALSQTTISWAPFQDTSEYIISCHPVGTDEEPLQFRVPGTSTSATLTGLTRGATYNVIVEALKDQQRHKVREEVVTVGNSVNEGLNQPTDDSCFDPYTVSHYAVGDEWERMSESGFKLLCQCLGFGSGHFRCDSSRWCHDNGVNYKIGEKWDRQGENGQMMSCTCLGNGKGEFKCDPHEATCYDDGKTYHVGEQWQKEYLGAICSCTCFGGQRGWRCDNCRRPGGEPSPEGTTGQSYNQYSQRYHQRTNTNVNCPIECFMPLDVQADREDSRE

SEQ ID NO: 31995 - protein, 2386 aa, Homo sapiens
  Payload ID: 6261
  Gene Symbol: FN1
  Gene Name: fibronectin 1
  Uniprot ID: P02751
  ENSP ID: ENSP00000352696
MLRGPGPGLLLLAVQCLGTAVPSTGASKSKRQAQQMVQPQSPVAVSQSKPGCYDNGKHYQINQQWERTYLGNALVCTCYGGSRGFNCESKPEAEETCFDKYTGNTYRVGDTYERPKDSMIWDCTCIGAGRGRISCTIANRCHEGGQSYKIGDTWRRPHETGGYMLECVCLGNGKGEWTCKPIAEKCFDHAAGTSYVVGETWEKPYQGWMMVDCTCLGEGSGRITCTSRNRCNDQDTRTSYRIGDTWSKKDNRGNLLQCICTGNGRGEWKCERHTSVQTTSSGSGPFTDVRAAVYQPQPHPQPPPYGHCVTDSGVVYSVGMQWLKTQGNKQMLCTCLGNGVSCQETAVTQTYGGNSNGEPCVLPFTYNGRTFYSCTTEGRQDGHLWCSTTSNYEQDQKYSFCTDHTVLVQTRGGNSNGALCHFPFLYNNHNYTDCTSEGRRDNMKWCGTTQNYDADQKFGFCPMAAHEEICTTNEGVMYRIGDQWDKQHDMGHMMRCTCVGNGRGEWTCIAYSQLRDQCIVDDITYNVNDTFHKRHEEGHMLNCTCFGQGRGRWKCDPVDQCQDSETGTFYQIGDSWEKYVHGVRYQCYCYGRGIGEWHCQPLQTYPSSSGPVEVFITETPSQPNSHPIQWNAPQPSHISKYILRWRPKNSVGRWKEATIPGHLNSYTIKGLKPGVVYEGQLISIQQYGHQEVTRFDFTTTSTSTPVTSNTVTGETTPFSPLVATSESVTEITASSFVVSWVSASDTVSGFRVEYELSEEGDEPQYLDLPSTATSVNIPDLLPGRKYIVNVYQISEDGEQSLILSTSQTTAPDAPPDTTVDQVDDTSIVVRWSRPQAPITGYRIVYSPSVEGSSTELNLPETANSVTLSDLQPGVQYNITIYAVEENQESTPVVIQQETTGTPRSDTVPSPRDLQFVEVTDVKVTIMWTPPESAVTGYRVDVIPVNLPGEHGQRLPISRNTFAEVTGLSPGVTYYFKVFAVSHGRESKPLTAQQTTKLDAPTNLQFVNETDSTVLVRWTPPRAQITGYRLTVGLTRRGQPRQYNVGPSVSKYPLRNLQPASEYTVSLVAIKGNQESPKATGVFTTLQPGSSIPPYNTEVTETTIVITWTPAPRIGFKLGVRPSQGGEAPREVTSDSGSIVVSGLTPGVEYVYTIQVLRDGQERDAPIVNKVVTPLSPPTNLHLEANPDTGVLTVSWERSTTPDITGYRITTTPTNGQQGNSLEEVVHADQSSCTFDNLSPGLEYNVSVYTVKDDKESVPISDTIIPAVPPPTDLRFTNIGPDTMRVTWAPPPSIDLTNFLVRYSPVKNEEDVAELSISPSDNAVVLTNLLPGTEYVVSVSSVYEQHESTPLRGRQKTGLDSPTGIDFSDITANSFTVHWIAPRATITGYRIRHHPEHFSGRPREDRVPHSRNSITLTNLTPGTEYVVSIVALNGREESPLLIGQQSTVSDVPRDLEVVAATPTSLLISWDAPAVTVRYYRITYGETGGNSPVQEFTVPGSKSTATISGLKPGVDYTITVYAVTGRGDSPASSKPISINYRTEIDKPSQMQVTDVQDNSISVKWLPSSSPVTGYRVTTTPKNGPGPTKTKTAGPDQTEMTIEGLQPTVEYVVSVYAQNPSGESQPLVQTAVTNIDRPKGLAFTDVDVDSIKIAWESPQGQVSRYRVTYSSPEDGIHELFPAPDGEEDTAELQGLRPGSEYTVSVVALHDDMESQPLIGTQSTAIPAPTDLKFTQVTPTSLSAQWTPPNVQLTGYRVRVTPKEKTGPMKEINLAPDSSSVVVSGLMVATKYEVSVYALKDTLTSRPAQGVVTTLENVSPPRRARVTDATETTITISWRTKTETITGFQVDAVPANGQTPIQRTIKPDVRSYTITGLQPGTDYKIYLYTLNDNARSSPVVIDASTAIDAPSNLRFLATTPNSLLVSWQPPRARITGYIIKYEKPGSPPREVVPRPRPGVTEATITGLEPGTEYTIYVIALKNNQKSEPLIGRKKTDELPQLVTLPHPNLHGPEILDVPSTVQKTPFVTHPGYDTGNGIQLPGTSGQQPSVGQQMIFEEHGFRRTTPPTTATPIRHRPRPYPPNVGEEIQIGHIPREDVDYHLYPHGPGLNPNASTGQEALSQTTISWAPFQDTSEYIISCHPVGTDEEPLQFRVPGTSTSATLTGLTRGATYNVIVEALKDQQRHKVREEVVTVGNSVNEGLNQPTDDSCFDPYTVSHYAVGDEWERMSESGFKLLCQCLGFGSGHFRCDSSRWCHDNGVNYKIGEKWDRQGENGQMMSCTCLGNGKGEFKCDPHEATCYDDGKTYHVGEQWQKEYLGAICSCTCFGGQRGWRCDNCRRPGGEPSPEGTTGQSYNQYSQRYHQRTNTNVNCPIECFMPLDVQADREDSRE

SEQ ID NO: 31996 - protein, 241 aa, Homo sapiens
  Payload ID: 6261
  Gene Symbol: FN1
  Gene Name: fibronectin 1
  ENSP ID: ENSP00000392565
YLYTLNDNARSSPVVIDASTAIDAPSNLRFLATTPNSLLVSWQPPRARITGYIIKYEKPGSPPREVVPRPRPGVTEATITGLEPGTEYTIYVIALKNNQKSEPLIGRKKTVQKTPFVTHPGYDTGNGIQLPGTSGQQPSVGQQMIFEEHGFRRTTPPTTATPIRHRPRPYPPNVGEEIQIGHIPREDVDYHLYPHGPGLNPNASTGQEALSQTTISWAPFQDTSEYIISCHPVGTDEEPLQ

SEQ ID NO: 31997 - protein, 2240 aa, Homo sapiens
  Payload ID: 6261
  Gene Symbol: FN1
  Gene Name: fibronectin 1
  Uniprot ID: P02751
  ENSP ID: ENSP00000394423
MLRGPGPGLLLLAVQCLGTAVPSTGASKSKRQAQQMVQPQSPVAVSQSKPGCYDNGKHYQINQQWERTYLGNALVCTCYGGSRGFNCESKPEAEETCFDKYTGNTYRVGDTYERPKDSMIWDCTCIGAGRGRISCTIANRCHEGGQSYKIGDTWRRPHETGGYMLECVCLGNGKGEWTCKPIAEKCFDHAAGTSYVVGETWEKPYQGWMMVDCTCLGEGSGRITCTSRNRCNDQDTRTSYRIGDTWSKKDNRGNLLQCICTGNGRGEWKCERHTSVQTTSSGSGPFTDVRAAVYQPQPHPQPPPYGHCVTDSGVVYSVGMQWLKTQGNKQMLCTCLGNGVSCQETAVTQTYGGNSNGEPCVLPFTYNGRTFYSCTTEGRQDGHLWCSTTSNYEQDQKYSFCTDHTVLVQTRGGNSNGALCHFPFLYNNHNYTDCTSEGRRDNMKWCGTTQNYDADQKFGFCPMAAHEEICTTNEGVMYRIGDQWDKQHDMGHMMRCTCVGNGRGEWTCIAYSQLRDQCIVDDITYNVNDTFHKRHEEGHMLNCTCFGQGRGRWKCDPVDQCQDSETGTFYQIGDSWEKYVHGVRYQCYCYGRGIGEWHCQPLQTYPSSSGPVEVFITETPSQPNSHPIQWNAPQPSHISKYILRWRPKNSVGRWKEATIPGHLNSYTIKGLKPGVVYEGQLISIQQYGHQEVTRFDFTTTSTSTPVTSNTVTGETTPFSPLVATSESVTEITASSFVVSWVSASDTVSGFRVEYELSEEGDEPQYLDLPSTATSVNIPDLLPGRKYIVNVYQISEDGEQSLILSTSQTTAPDAPPDTTVDQVDDTSIVVRWSRPQAPITGYRIVYSPSVEGSSTELNLPETANSVTLSDLQPGVQYNITIYAVEENQESTPVVIQQETTGTPRSDTVPSPRDLQFVEVTDVKVTIMWTPPESAVTGYRVDVIPVNLPGEHGQRLPISRNTFAEVTGLSPGVTYYFKVFAVSHGRESKPLTAQQTTKLDAPTNLQFVNETDSTVLVRWTPPRAQITGYRLTVGLTRRGQPRQYNVGPSVSKYPLRNLQPASEYTVSLVAIKGNQESPKATGVFTTLQPGSSIPPYNTEVTETTIVITWTPAPRIGFKLGVRPSQGGEAPREVTSDSGSIVVSGLTPGVEYVYTIQVLRDGQERDAPIVNKVVTPLSPPTNLHLEANPDTGVLTVSWERSTTPDITGYRITTTPTNGQQGNSLEEVVHADQSSCTFDNLSPGLEYNVSVYTVKDDKESVPISDTIIPAVPPPTDLRFTNIGPDTMRVTWAPPPSIDLTNFLVRYSPVKNEEDVAELSISPSDNAVVLTNLLPGTEYVVSVSSVYEQHESTPLRGRQKTGLDSPTGIDFSDITANSFTVHWIAPRATITGYRIRHHPEHFSGRPREDRVPHSRNSITLTNLTPGTEYVVSIVALNGREESPLLIGQQSTVSDVPRDLEVVAATPTSLLISWDAPAVTVRYYRITYGETGGNSPVQEFTVPGSKSTATISGLKPGVDYTITVYAVTGRGDSPASSKPISINYRTEIDKPSQMQVTDVQDNSISVKWLPSSSPVTGYRVTTTPKNGPGPTKTKTAGPDQTEMTIEGLQPTVEYVVSVYAQNPSGESQPLVQTAVTTIPAPTDLKFTQVTPTSLSAQWTPPNVQLTGYRVRVTPKEKTGPMKEINLAPDSSSVVVSGLMVATKYEVSVYALKDTLTSRPAQGVVTTLENVSPPRRARVTDATETTITISWRTKTETITGFQVDAVPANGQTPIQRTIKPDVRSYTITGLQPGTDYKIYLYTLNDNARSSPVVIDASTAIDAPSNLRFLATTPNSLLVSWQPPRARITGYIIKYEKPGSPPREVVPRPRPGVTEATITGLEPGTEYTIYVIALKNNQKSEPLIGRKKTVQKTPFVTHPGYDTGNGIQLPGTSGQQPSVGQQMIFEEHGFRRTTPPTTATPIRHRPRPYPPNVGQEALSQTTISWAPFQDTSEYIISCHPVGTDEEPLQFRVPGTSTSATLTGLTRGATYNVIVEALKDQQRHKVREEVVTVGNSVNEGLNQPTDDSCFDPYTVSHYAVGDEWERMSESGFKLLCQCLGFGSGHFRCDSSRWCHDNGVNYKIGEKWDRQGENGQMMSCTCLGNGKGEFKCDPHEATCYDDGKTYHVGEQWQKEYLGAICSCTCFGGQRGWRCDNCRRPGGEPSPEGTTGQSYNQYSQRYHQRTNTNVNCPIECFMPLDVQADREDSRE

SEQ ID NO: 31998 - protein, 657 aa, Homo sapiens
  Payload ID: 6261
  Gene Symbol: FN1
  Gene Name: fibronectin 1
  Uniprot ID: P02751
  ENSP ID: ENSP00000398907
MLRGPGPGLLLLAVQCLGTAVPSTGASKSKRQAQQMVQPQSPVAVSQSKPGCYDNGKHYQINQQWERTYLGNALVCTCYGGSRGFNCESKPEAEETCFDKYTGNTYRVGDTYERPKDSMIWDCTCIGAGRGRISCTIANRCHEGGQSYKIGDTWRRPHETGGYMLECVCLGNGKGEWTCKPIAEKCFDHAAGTSYVVGETWEKPYQGWMMVDCTCLGEGSGRITCTSRNRCNDQDTRTSYRIGDTWSKKDNRGNLLQCICTGNGRGEWKCERHTSVQTTSSGSGPFTDVRAAVYQPQPHPQPPPYGHCVTDSGVVYSVGMQWLKTQGNKQMLCTCLGNGVSCQETAVTQTYGGNSNGEPCVLPFTYNGRTFYSCTTEGRQDGHLWCSTTSNYEQDQKYSFCTDHTVLVQTRGGNSNGALCHFPFLYNNHNYTDCTSEGRRDNMKWCGTTQNYDADQKFGFCPMAAHEEICTTNEGVMYRIGDQWDKQHDMGHMMRCTCVGNGRGEWTCIAYSQLRDQCIVDDITYNVNDTFHKRHEEGHMLNCTCFGQGRGRWKCDPVDQCQDSETGTFYQIGDSWEKYVHGVRYQCYCYGRGIGEWHCQPLQTYPSSSGPVEVFITETPSQPNSHPIQWNAPQPSHISKYILRWRPVSIPPRNLGY

SEQ ID NO: 31999 - protein, 2267 aa, Homo sapiens
  Payload ID: 6261
  Gene Symbol: FN1
  Gene Name: fibronectin 1
  Uniprot ID: P02751
  ENSP ID: ENSP00000399538
MLRGPGPGLLLLAVQCLGTAVPSTGASKSKRQAQQMVQPQSPVAVSQSKPGCYDNGKHYQINQQWERTYLGNALVCTCYGGSRGFNCESKPEAEETCFDKYTGNTYRVGDTYERPKDSMIWDCTCIGAGRGRISCTIANRCHEGGQSYKIGDTWRRPHETGGYMLECVCLGNGKGEWTCKPIAEKCFDHAAGTSYVVGETWEKPYQGWMMVDCTCLGEGSGRITCTSRNRCNDQDTRTSYRIGDTWSKKDNRGNLLQCICTGNGRGEWKCERHTSVQTTSSGSGPFTDVRAAVYQPQPHPQPPPYGHCVTDSGVVYSVGMQWLKTQGNKQMLCTCLGNGVSCQETAVTQTYGGNSNGEPCVLPFTYNGRTFYSCTTEGRQDGHLWCSTTSNYEQDQKYSFCTDHTVLVQTRGGNSNGALCHFPFLYNNHNYTDCTSEGRRDNMKWCGTTQNYDADQKFGFCPMAAHEEICTTNEGVMYRIGDQWDKQHDMGHMMRCTCVGNGRGEWTCIAYSQLRDQCIVDDITYNVNDTFHKRHEEGHMLNCTCFGQGRGRWKCDPVDQCQDSETGTFYQIGDSWEKYVHGVRYQCYCYGRGIGEWHCQPLQTYPSSSGPVEVFITETPSQPNSHPIQWNAPQPSHISKYILRWRPKNSVGRWKEATIPGHLNSYTIKGLKPGVVYEGQLISIQQYGHQEVTRFDFTTTSTSTPVTSNTVTGETTPFSPLVATSESVTEITASSFVVSWVSASDTVSGFRVEYELSEEGDEPQYLDLPSTATSVNIPDLLPGRKYIVNVYQISEDGEQSLILSTSQTTAPDAPPDTTVDQVDDTSIVVRWSRPQAPITGYRIVYSPSVEGSSTELNLPETANSVTLSDLQPGVQYNITIYAVEENQESTPVVIQQETTGTPRSDTVPSPRDLQFVEVTDVKVTIMWTPPESAVTGYRVDVIPVNLPGEHGQRLPISRNTFAEVTGLSPGVTYYFKVFAVSHGRESKPLTAQQTTKLDAPTNLQFVNETDSTVLVRWTPPRAQITGYRLTVGLTRRGQPRQYNVGPSVSKYPLRNLQPASEYTVSLVAIKGNQESPKATGVFTTLQPGSSIPPYNTEVTETTIVITWTPAPRIGFKLGVRPSQGGEAPREVTSDSGSIVVSGLTPGVEYVYTIQVLRDGQERDAPIVNKVVTPLSPPTNLHLEANPDTGVLTVSWERSTTPDITGYRITTTPTNGQQGNSLEEVVHADQSSCTFDNLSPGLEYNVSVYTVKDDKESVPISDTIIPEVPQLTDLSFVDITDSSIGLRWTPLNSSTIIGYRITVVAAGEGIPIFEDFVDSSVGYYTVTGLEPGIDYDISVITLINGGESAPTTLTQQTAVPPPTDLRFTNIGPDTMRVTWAPPPSIDLTNFLVRYSPVKNEEDVAELSISPSDNAVVLTNLLPGTEYVVSVSSVYEQHESTPLRGRQKTGLDSPTGIDFSDITANSFTVHWIAPRATITGYRIRHHPEHFSGRPREDRVPHSRNSITLTNLTPGTEYVVSIVALNGREESPLLIGQQSTVSDVPRDLEVVAATPTSLLISWDAPAVTVRYYRITYGETGGNSPVQEFTVPGSKSTATISGLKPGVDYTITVYAVTGRGDSPASSKPISINYRTEIDKPSQMQVTDVQDNSISVKWLPSSSPVTGYRVTTTPKNGPGPTKTKTAGPDQTEMTIEGLQPTVEYVVSVYAQNPSGESQPLVQTAVTTIPAPTDLKFTQVTPTSLSAQWTPPNVQLTGYRVRVTPKEKTGPMKEINLAPDSSSVVVSGLMVATKYEVSVYALKDTLTSRPAQGVVTTLENVSPPRRARVTDATETTITISWRTKTETITGFQVDAVPANGQTPIQRTIKPDVRSYTITGLQPGTDYKIYLYTLNDNARSSPVVIDASTAIDAPSNLRFLATTPNSLLVSWQPPRARITGYIIKYEKPGSPPREVVPRPRPGVTEATITGLEPGTEYTIYVIALKNNQKSEPLIGRKKTGQEALSQTTISWAPFQDTSEYIISCHPVGTDEEPLQFRVPGTSTSATLTGLTRGATYNVIVEALKDQQRHKVREEVVTVGNSVNEGLNQPTDDSCFDPYTVSHYAVGDEWERMSESGFKLLCQCLGFGSGHFRCDSSRWCHDNGVNYKIGEKWDRQGENGQMMSCTCLGNGKGEFKCDPHEATCYDDGKTYHVGEQWQKEYLGAICSCTCFGGQRGWRCDNCRRPGGEPSPEGTTGQSYNQYSQRYHQRTNTNVNCPIECFMPLDVQADREDSRE

SEQ ID NO: 32000 - protein, 2330 aa, Homo sapiens
  Payload ID: 6261
  Gene Symbol: FN1
  Gene Name: fibronectin 1
  Uniprot ID: P02751
  ENSP ID: ENSP00000410422
MLRGPGPGLLLLAVQCLGTAVPSTGASKSKRQAQQMVQPQSPVAVSQSKPGCYDNGKHYQINQQWERTYLGNALVCTCYGGSRGFNCESKPEAEETCFDKYTGNTYRVGDTYERPKDSMIWDCTCIGAGRGRISCTIANRCHEGGQSYKIGDTWRRPHETGGYMLECVCLGNGKGEWTCKPIAEKCFDHAAGTSYVVGETWEKPYQGWMMVDCTCLGEGSGRITCTSRNRCNDQDTRTSYRIGDTWSKKDNRGNLLQCICTGNGRGEWKCERHTSVQTTSSGSGPFTDVRAAVYQPQPHPQPPPYGHCVTDSGVVYSVGMQWLKTQGNKQMLCTCLGNGVSCQETAVTQTYGGNSNGEPCVLPFTYNGRTFYSCTTEGRQDGHLWCSTTSNYEQDQKYSFCTDHTVLVQTRGGNSNGALCHFPFLYNNHNYTDCTSEGRRDNMKWCGTTQNYDADQKFGFCPMAAHEEICTTNEGVMYRIGDQWDKQHDMGHMMRCTCVGNGRGEWTCIAYSQLRDQCIVDDITYNVNDTFHKRHEEGHMLNCTCFGQGRGRWKCDPVDQCQDSETGTFYQIGDSWEKYVHGVRYQCYCYGRGIGEWHCQPLQTYPSSSGPVEVFITETPSQPNSHPIQWNAPQPSHISKYILRWRPKNSVGRWKEATIPGHLNSYTIKGLKPGVVYEGQLISIQQYGHQEVTRFDFTTTSTSTPVTSNTVTGETTPFSPLVATSESVTEITASSFVVSWVSASDTVSGFRVEYELSEEGDEPQYLDLPSTATSVNIPDLLPGRKYIVNVYQISEDGEQSLILSTSQTTAPDAPPDTTVDQVDDTSIVVRWSRPQAPITGYRIVYSPSVEGSSTELNLPETANSVTLSDLQPGVQYNITIYAVEENQESTPVVIQQETTGTPRSDTVPSPRDLQFVEVTDVKVTIMWTPPESAVTGYRVDVIPVNLPGEHGQRLPISRNTFAEVTGLSPGVTYYFKVFAVSHGRESKPLTAQQTTKLDAPTNLQFVNETDSTVLVRWTPPRAQITGYRLTVGLTRRGQPRQYNVGPSVSKYPLRNLQPASEYTVSLVAIKGNQESPKATGVFTTLQPGSSIPPYNTEVTETTIVITWTPAPRIGFKLGVRPSQGGEAPREVTSDSGSIVVSGLTPGVEYVYTIQVLRDGQERDAPIVNKVVTPLSPPTNLHLEANPDTGVLTVSWERSTTPDITGYRITTTPTNGQQGNSLEEVVHADQSSCTFDNLSPGLEYNVSVYTVKDDKESVPISDTIIPAVPPPTDLRFTNIGPDTMRVTWAPPPSIDLTNFLVRYSPVKNEEDVAELSISPSDNAVVLTNLLPGTEYVVSVSSVYEQHESTPLRGRQKTGLDSPTGIDFSDITANSFTVHWIAPRATITGYRIRHHPEHFSGRPREDRVPHSRNSITLTNLTPGTEYVVSIVALNGREESPLLIGQQSTVSDVPRDLEVVAATPTSLLISWDAPAVTVRYYRITYGETGGNSPVQEFTVPGSKSTATISGLKPGVDYTITVYAVTGRGDSPASSKPISINYRTEIDKPSQMQVTDVQDNSISVKWLPSSSPVTGYRVTTTPKNGPGPTKTKTAGPDQTEMTIEGLQPTVEYVVSVYAQNPSGESQPLVQTAVTNIDRPKGLAFTDVDVDSIKIAWESPQGQVSRYRVTYSSPEDGIHELFPAPDGEEDTAELQGLRPGSEYTVSVVALHDDMESQPLIGTQSTAIPAPTDLKFTQVTPTSLSAQWTPPNVQLTGYRVRVTPKEKTGPMKEINLAPDSSSVVVSGLMVATKYEVSVYALKDTLTSRPAQGVVTTLENVSPPRRARVTDATETTITISWRTKTETITGFQVDAVPANGQTPIQRTIKPDVRSYTITGLQPGTDYKIYLYTLNDNARSSPVVIDASTAIDAPSNLRFLATTPNSLLVSWQPPRARITGYIIKYEKPGSPPREVVPRPRPGVTEATITGLEPGTEYTIYVIALKNNQKSEPLIGRKKTVQKTPFVTHPGYDTGNGIQLPGTSGQQPSVGQQMIFEEHGFRRTTPPTTATPIRHRPRPYPPNVGQEALSQTTISWAPFQDTSEYIISCHPVGTDEEPLQFRVPGTSTSATLTGLTRGATYNVIVEALKDQQRHKVREEVVTVGNSVNEGLNQPTDDSCFDPYTVSHYAVGDEWERMSESGFKLLCQCLGFGSGHFRCDSSRWCHDNGVNYKIGEKWDRQGENGQMMSCTCLGNGKGEFKCDPHEATCYDDGKTYHVGEQWQKEYLGAICSCTCFGGQRGWRCDNCRRPGGEPSPEGTTGQSYNQYSQRYHQRTNTNVNCPIECFMPLDVQADREDSRE

SEQ ID NO: 32001 - protein, 2265 aa, Homo sapiens
  Payload ID: 6261
  Gene Symbol: FN1
  Gene Name: fibronectin 1
  Uniprot ID: P02751
  ENSP ID: ENSP00000415018
MLRGPGPGLLLLAVQCLGTAVPSTGASKSKRQAQQMVQPQSPVAVSQSKPGCYDNGKHYQINQQWERTYLGNALVCTCYGGSRGFNCESKPEAEETCFDKYTGNTYRVGDTYERPKDSMIWDCTCIGAGRGRISCTIANRCHEGGQSYKIGDTWRRPHETGGYMLECVCLGNGKGEWTCKPIAEKCFDHAAGTSYVVGETWEKPYQGWMMVDCTCLGEGSGRITCTSRNRCNDQDTRTSYRIGDTWSKKDNRGNLLQCICTGNGRGEWKCERHTSVQTTSSGSGPFTDVRAAVYQPQPHPQPPPYGHCVTDSGVVYSVGMQWLKTQGNKQMLCTCLGNGVSCQETAVTQTYGGNSNGEPCVLPFTYNGRTFYSCTTEGRQDGHLWCSTTSNYEQDQKYSFCTDHTVLVQTRGGNSNGALCHFPFLYNNHNYTDCTSEGRRDNMKWCGTTQNYDADQKFGFCPMAAHEEICTTNEGVMYRIGDQWDKQHDMGHMMRCTCVGNGRGEWTCIAYSQLRDQCIVDDITYNVNDTFHKRHEEGHMLNCTCFGQGRGRWKCDPVDQCQDSETGTFYQIGDSWEKYVHGVRYQCYCYGRGIGEWHCQPLQTYPSSSGPVEVFITETPSQPNSHPIQWNAPQPSHISKYILRWRPKNSVGRWKEATIPGHLNSYTIKGLKPGVVYEGQLISIQQYGHQEVTRFDFTTTSTSTPVTSNTVTGETTPFSPLVATSESVTEITASSFVVSWVSASDTVSGFRVEYELSEEGDEPQYLDLPSTATSVNIPDLLPGRKYIVNVYQISEDGEQSLILSTSQTTAPDAPPDTTVDQVDDTSIVVRWSRPQAPITGYRIVYSPSVEGSSTELNLPETANSVTLSDLQPGVQYNITIYAVEENQESTPVVIQQETTGTPRSDTVPSPRDLQFVEVTDVKVTIMWTPPESAVTGYRVDVIPVNLPGEHGQRLPISRNTFAEVTGLSPGVTYYFKVFAVSHGRESKPLTAQQTTKLDAPTNLQFVNETDSTVLVRWTPPRAQITGYRLTVGLTRRGQPRQYNVGPSVSKYPLRNLQPASEYTVSLVAIKGNQESPKATGVFTTLQPGSSIPPYNTEVTETTIVITWTPAPRIGFKLGVRPSQGGEAPREVTSDSGSIVVSGLTPGVEYVYTIQVLRDGQERDAPIVNKVVTPLSPPTNLHLEANPDTGVLTVSWERSTTPDITGYRITTTPTNGQQGNSLEEVVHADQSSCTFDNLSPGLEYNVSVYTVKDDKESVPISDTIIPAVPPPTDLRFTNIGPDTMRVTWAPPPSIDLTNFLVRYSPVKNEEDVAELSISPSDNAVVLTNLLPGTEYVVSVSSVYEQHESTPLRGRQKTGLDSPTGIDFSDITANSFTVHWIAPRATITGYRIRHHPEHFSGRPREDRVPHSRNSITLTNLTPGTEYVVSIVALNGREESPLLIGQQSTVSDVPRDLEVVAATPTSLLISWDAPAVTVRYYRITYGETGGNSPVQEFTVPGSKSTATISGLKPGVDYTITVYAVTGRGDSPASSKPISINYRTEIDKPSQMQVTDVQDNSISVKWLPSSSPVTGYRVTTTPKNGPGPTKTKTAGPDQTEMTIEGLQPTVEYVVSVYAQNPSGESQPLVQTAVTTIPAPTDLKFTQVTPTSLSAQWTPPNVQLTGYRVRVTPKEKTGPMKEINLAPDSSSVVVSGLMVATKYEVSVYALKDTLTSRPAQGVVTTLENVSPPRRARVTDATETTITISWRTKTETITGFQVDAVPANGQTPIQRTIKPDVRSYTITGLQPGTDYKIYLYTLNDNARSSPVVIDASTAIDAPSNLRFLATTPNSLLVSWQPPRARITGYIIKYEKPGSPPREVVPRPRPGVTEATITGLEPGTEYTIYVIALKNNQKSEPLIGRKKTDELPQLVTLPHPNLHGPEILDVPSTVQKTPFVTHPGYDTGNGIQLPGTSGQQPSVGQQMIFEEHGFRRTTPPTTATPIRHRPRPYPPNVGQEALSQTTISWAPFQDTSEYIISCHPVGTDEEPLQFRVPGTSTSATLTGLTRGATYNVIVEALKDQQRHKVREEVVTVGNSVNEGLNQPTDDSCFDPYTVSHYAVGDEWERMSESGFKLLCQCLGFGSGHFRCDSSRWCHDNGVNYKIGEKWDRQGENGQMMSCTCLGNGKGEFKCDPHEATCYDDGKTYHVGEQWQKEYLGAICSCTCFGGQRGWRCDNCRRPGGEPSPEGTTGQSYNQYSQRYHQRTNTNVNCPIECFMPLDVQADREDSRE

SEQ ID NO: 32002 - protein, 1103 aa, Homo sapiens
  Payload ID: 6261
  Gene Symbol: FN1
  Gene Name: fibronectin 1
  ENSP ID: ENSP00000416139
LRWTPLNSSTIIGYRITVVAAGEGIPIFEDFVDSSVGYYTVTGLEPGIDYDISVITLINGGESAPTTLTQQTAVPPPTDLRFTNIGPDTMRVTWAPPPSIDLTNFLVRYSPVKNEEDVAELSISPSDNAVVLTNLLPGTEYVVSVSSVYEQHESTPLRGRQKTGLDSPTGIDFSDITANSFTVHWIAPRATITGYRIRHHPEHFSGRPREDRVPHSRNSITLTNLTPGTEYVVSIVALNGREESPLLIGQQSTVSDVPRDLEVVAATPTSLLISWDAPAVTVRYYRITYGETGGNSPVQEFTVPGSKSTATISGLKPGVDYTITVYAVTGRGDSPASSKPISINYRTEIDKPSQMQVTDVQDNSISVKWLPSSSPVTGYRVTTTPKNGPGPTKTKTAGPDQTEMTIEGLQPTVEYVVSVYAQNPSGESQPLVQTAVTTIPAPTDLKFTQVTPTSLSAQWTPPNVQLTGYRVRVTPKEKTGPMKEINLAPDSSSVVVSGLMVATKYEVSVYALKDTLTSRPAQGVVTTLENVSPPRRARVTDATETTITISWRTKTETITGFQVDAVPANGQTPIQRTIKPDVRSYTITGLQPGTDYKIYLYTLNDNARSSPVVIDASTAIDAPSNLRFLATTPNSLLVSWQPPRARITGYIIKYEKPGSPPREVVPRPRPGVTEATITGLEPGTEYTIYVIALKNNQKSEPLIGRKKTDELPQLVTLPHPNLHGPEILDVPSTVQKTPFVTHPGYDTGNGIQLPGTSGQQPSVGQQMIFEEHGFRRTTPPTTATPIRHRPRPYPPNVGEEIQIGHIPREDVDYHLYPHGPGLNPNASTGQEALSQTTISWAPFQDTSEYIISCHPVGTDEEPLQFRVPGTSTSATLTGLTRGATYNVIVEALKDQQRHKVREEVVTVGNSVNEGLNQPTDDSCFDPYTVSHYAVGDEWERMSESGFKLLCQCLGFGSGHFRCDSSRWCHDNGVNYKIGEKWDRQGENGQMMSCTCLGNGKGEFKCDPHEATCYDDGKTYHVGEQWQKEYLGAICSCTCFGGQRGWRCDNCRRPGGEPSPEGTTGQSYNQYSQRYHQRTNTNVNCPIECFMPLDVQADREDSRE

SEQ ID NO: 32003 - protein, 674 aa, Homo sapiens
  Payload ID: 6262
  Gene Symbol: FLRT1
  Gene Name: fibronectin leucine rich transmembrane protein 1
  Uniprot ID: Q9NZU1
  ENSP ID: ENSP00000246841
MVVAHPTATATTTPTATVTATVVMTTATMDLRDWLFLCYGLIAFLTEVIDSTTCPSVCRCDNGFIYCNDRGLTSIPADIPDDATTLYLQNNQINNAGIPQDLKTKVNVQVIYLYENDLDEFPINLPRSLRELHLQDNNVRTIARDSLARIPLLEKLHLDDNSVSTVSIEEDAFADSKQLKLLFLSRNHLSSIPSGLPHTLEELRLDDNRISTIPLHAFKGLNSLRRLVLDGNLLANQRIADDTFSRLQNLTELSLVRNSLAAPPLNLPSAHLQKLYLQDNAISHIPYNTLAKMRELERLDLSNNNLTTLPRGLFDDLGNLAQLLLRNNPWFCGCNLMWLRDWVKARAAVVNVRGLMCQGPEKVRGMAIKDITSEMDECFETGPQGGVANAAAKTTASNHASATTPQGSLFTLKAKRPGLRLPDSNIDYPMATGDGAKTLAIHVKALTADSIRITWKATLPASSFRLSWLRLGHSPAVGSITETLVQGDKTEYLLTALEPKSTYIICMVTMETSNAYVADETPVCAKAETADSYGPTTTLNQEQNAGPMASLPLAGIIGGAVALVFLFLVLGAICWYVHQAGELLTRERAYNRGSRKKDDYMESGTKKDNSILEIRGPGLQMLPINPYRAKEEYVVHTIFPSNGSSLCKATHTIGYGTTRGYRDGGIPDIDYSYT

SEQ ID NO: 32004 - protein, 660 aa, Homo sapiens
  Payload ID: 6263
  Gene Symbol: FLRT2
  Gene Name: fibronectin leucine rich transmembrane protein 2
  Uniprot ID: O43155
  ENSP ID: ENSP00000332879
MGLQTTKWPSHGAFFLKSWLIISLGLYSQVSKLLACPSVCRCDRNFVYCNERSLTSVPLGIPEGVTVLYLHNNQINNAGFPAELHNVQSVHTVYLYGNQLDEFPMNLPKNVRVLHLQENNIQTISRAALAQLLKLEELHLDDNSISTVGVEDGAFREAISLKLLFLSKNHLSSVPVGLPVDLQELRVDENRIAVISDMAFQNLTSLERLIVDGNLLTNKGIAEGTFSHLTKLKEFSIVRNSLSHPPPDLPGTHLIRLYLQDNQINHIPLTAFSNLRKLERLDISNNQLRMLTQGVFDNLSNLKQLTARNNPWFCDCSIKWVTEWLKYIPSSLNVRGFMCQGPEQVRGMAVRELNMNLLSCPTTTPGLPLFTPAPSTASPTTQPPTLSIPNPSRSYTPPTPTTSKLPTIPDWDGRERVTPPISERIQLSIHFVNDTSIQVSWLSLFTVMAYKLTWVKMGHSLVGGIVQERIVSGEKQHLSLVNLEPRSTYRICLVPLDAFNYRAVEDTICSEATTHASYLNNGSNTASSHEQTTSHSMGSPFLLAGLIGGAVIFVLVVLLSVFCWHMHKKGRYTSQKWKYNRGRRKDDYCEAGTKKDNSILEMTETSFQIVSLNNDQLLKGDFRLQPIYTPNGGINYTDCHIPNNMRYCNSSVPDLEHCHT

SEQ ID NO: 32005 - protein, 660 aa, Homo sapiens; identical to SEQ ID NO: 32004
  Payload ID: 6263
  Gene Symbol: FLRT2
  Gene Name: fibronectin leucine rich transmembrane protein 2
  Uniprot ID: O43155
  ENSP ID: ENSP00000451050

SEQ ID NO: 32006 - protein, 649 aa, Homo sapiens
  Payload ID: 6264
  Gene Symbol: FLRT3
  Gene Name: fibronectin leucine rich transmembrane protein 3
  Uniprot ID: Q9NZU0
  ENSP ID: ENSP00000339912
MISAAWSIFLIGTKIGLFLQVAPLSVMAKSCPSVCRCDAGFIYCNDRFLTSIPTGIPEDATTLYLQNNQINNAGIPSDLKNLLKVERIYLYHNSLDEFPTNLPKYVKELHLQENNIRTITYDSLSKIPYLEELHLDDNSVSAVSIEEGAFRDSNYLRLLFLSRNHLSTIPWGLPRTIEELRLDDNRISTISSPSLQGLTSLKRLVLDGNLLNNHGLGDKVFFNLVNLTELSLVRNSLTAAPVNLPGTNLRKLYLQDNHINRVPPNAFSYLRQLYRLDMSNNNLSNLPQGIFDDLDNITQLILRNNPWYCGCKMKWVRDWLQSLPVKVNVRGLMCQAPEKVRGMAIKDLNAELFDCKDSGIVSTIQITTAIPNTVYPAQGQWPAPVTKQPDIKNPKLTKDHQTTGSPSRKTITITVKSVTSDTIHISWKLALPMTALRLSWLKLGHSPAFGSITETIVTGERSEYLVTALEPDSPYKVCMVPMETSNLYLFDETPVCIETETAPLRMYNPTTTLNREQEKEPYKNPNLPLAAIIGGAVALVTIALLALVCWYVHRNGSLFSRNCAYSKGRRRKDDYAEAGTKKDNSILEIRETSFQMLPISNEPISKEEFVIHTIFPPNGMNLYKNNHSESSSNRSYRDSGIPDSDHSHS

SEQ ID NO: 32007 - protein, 649 aa, Homo sapiens; identical to SEQ ID NO: 32006
  Payload ID: 6264
  Gene Symbol: FLRT3
  Gene Name: fibronectin leucine rich transmembrane protein 3
  Uniprot ID: Q9NZU0
  ENSP ID: ENSP00000367292

SEQ ID NO: 32008 - protein, 133 aa, Homo sapiens
  Payload ID: 6265
  Gene Symbol: FANK1
  Gene Name: fibronectin type III and ankyrin repeat domains 1
  ENSP ID: ENSP00000357678
MPPSKPHPPVVGKVTHHSIELYWDLEKKAKRQGPQEQWFRFSIEEEDPKMHTYGIIYTGYATKHVVEGLEPRTLYRFRLKVTSPSGECEYSPLVSVSTTSSIWLGGEPISSEHLHRAVSVNDEDLLVRILQGG

SEQ ID NO: 32009 - protein, 282 aa, Homo sapiens
  Payload ID: 6265
  Gene Symbol: FANK1
  Gene Name: fibronectin type III and ankyrin repeat domains 1
  ENSP ID: ENSP00000357680
MPPSKPHPPVVGKVTHHSIELYWDLEKKAKRQGPQEQWFRFSIEEEDPKMHTYGIIYTGYATKHVVEGLEPRTLYRFRLKVTSPSGECEYSPLVSVSTTSSIWLGGEPISSEHLHRAVSVNDEDLLVRILQGGRVKVDVPNKFGFTALMVAAQKGYTSLMLACYAGHLDVVKYLRRHGASWQARDLGGCTALHWAADGGHCSVIEWMIKDGCEVDVVDTGSGWTPLMRVSAVSGNQRVASLLIDAGANVNVKDRNGKTPLMSVVSLLEERKKKQRPKKSCVC

SEQ ID NO: 32010 - protein, 345 aa, Homo sapiens
  Payload ID: 6265
  Gene Symbol: FANK1
  Gene Name: fibronectin type III and ankyrin repeat domains 1
  Uniprot ID: Q8TC84
  ENSP ID: ENSP00000357682
MEPQKIMPPSKPHPPVVGKVTHHSIELYWDLEKKAKRQGPQEQWFRFSIEEEDPKMHTYGIIYTGYATKHVVEGLEPRTLYRFRLKVTSPSGECEYSPLVSVSTTREPISSEHLHRAVSVNDEDLLVRILQGGRVKVDVPNKFGFTALMVAAQKGYTRLVKILVSNGTDVNLKNGSGKDSLMLACYAGHLDVVKYLRRHGASWQARDLGGCTALHWAADGGHCSVIEWMIKDGCEVDVVDTGSGWTPLMRVSAVSGNQRVASLLIDAGANVNVKDRNGKTPLMVAVLNNHEELVQLLLDKGADASVKNEFGKGVLEMARVFDRQSVVSLLEERKKKQRPKKSCVC

SEQ ID NO: 32011 - protein, 339 aa, Homo sapiens
  Payload ID: 6265
  Gene Symbol: FANK1
  Gene Name: fibronectin type III and ankyrin repeat domains 1
  ENSP ID: ENSP00000357684
MPPSKPHPPVVGKVTHHSIELYWDLEKKAKRQGPQEQWFRFSIEEEDPKMHTYGIIYTGYATKHVVEGLEPRTLYRFRLKVTSPSGECEYSPLVSVSTTREPISSEHLHRAVSVNDEDLLVRILQGGRVKVDVPNKFGFTALMVAAQKGYTRLVKILVSNGTDVNLKNGSGKDSLMLACYAGHLDVVKYLRRHGASWQARDLGGCTALHWAADGGHCSVIEWMIKDGCEVDVVDTGSGWTPLMRVSAVSGNQRVASLLIDAGANVNVKDRNGKTPLMVAVLNNHEELVQLLLDKGADASVKNEFGKGVLEMARVFDRQSVVSLLEERKKKQRPKKSCVC

SEQ ID NO: 32012 - protein, 123 aa, Homo sapiens
  Payload ID: 6265
  Gene Symbol: FANK1
  Gene Name: fibronectin type III and ankyrin repeat domains 1
  ENSP ID: ENSP00000396356
MPPSKPHPPVVGKVTHHSIELYWDLEKKAKRQGPQEQWFRFSIEEEDPKMHTYGIIYTGYATKHVVEGLEPRTLYRFRLKVTSPSGECEYSPLVSVSTTREPISSEHLHRAVSVNDEDLLVRI

SEQ ID NO: 32013 - protein, 199 aa, Homo sapiens
  Payload ID: 6265
  Gene Symbol: FANK1
  Gene Name: fibronectin type III and ankyrin repeat domains 1
  ENSP ID: ENSP00000412737
  MOD_RES (1)..(1): Any amino acid
XEPISSEHLHRAVSVNDEDLLVRILQGGRVKVDVPNKFGFTALMVAAQKGYTRLVKILVSNGTDVNLKNGSGKDSLMLACYAGHLDVVKYLRRHGASWQARDLGGCTALHWAADGGHCSVIEWMIKDGCEVDVVDTGSGWTPLMRVSAVSGNQRVASLLIDAGANVNVKDRNGKTPLMSVVSLLEERKKKQRPKKSCVC

SEQ ID NO: 32014 - protein, 132 aa, Homo sapiens
  Payload ID: 6265
  Gene Symbol: FANK1
  Gene Name: fibronectin type III and ankyrin repeat domains 1
  ENSP ID: ENSP00000415719
MPPSKPHPPVVGKVTHHSIELYWDLEKKAKRQGPQEQWFRFSIEEEDPKMHTYGIIYTGYATKHVVEGLEPRTLYRFRLKVTSPSGECEYSPLVSVSTTSSIWLGGEPISSEHLHRAVSVNDEDLLVRILQG

SEQ ID NO: 32015 - protein, 496 aa, Homo sapiens
  Payload ID: 6266
  Gene Symbol: FSD1
  Gene Name: fibronectin type III and SPRY domain containing 1
  Uniprot ID: Q9BTV5
  ENSP ID: ENSP00000221856
MEEQREALRKIIKTLAVKNEEIQSFIYSLKQMLLNVEANSAKVQEDLEAEFQSLFSLLEELKEGMLMKIKQDRASRTYELQNQLAACTRALESSEELLETANQTLQAMDSEDFPQAAKQIKDGVTMAPAFRLSLKAKVSDNMSHLMVDFAQERQMLQALKFLPVPSAPVIDLAESLVADNCVTLVWRMPDEDSKIDHYVLEYRRTNFEGPPRLKEDQPWMVIEGIRQTEYTLTGLKFDMKYMNFRVKACNKAVAGEFSEPVTLETPAFMFRLDASTSHQNLRVDDLSVEWDAMGGKVQDIKAREKDGKGRTASPINSPARGTPSPKRMPSGRGGRDRFTAESYTVLGDTLIDGGEHYWEVRYEPDSKAFGVGVAYRSLGRFEQLGKTAASWCLHVNNWLQVSFTAKHANKVKVLDAPVPDCLGVHCDFHQGLLSFYNARTKQVLHTFKTRFTQPLLPAFTVWCGSFQVTTGLQVPSAVRCLQKRGSATSSSNTSLT

SEQ ID NO: 32016 - protein, 126 aa, Homo sapiens
  Payload ID: 6266
  Gene Symbol: FSD1
  Gene Name: fibronectin type III and SPRY domain containing 1
  ENSP ID: ENSP00000469629
  MOD_RES (1)..(1): Any amino acid
XPDSKAFGVGVAYRSLGRFEQLGKTAASWCLHVNNWLQVSFTAKHANKVKVLDAPVPDCLGLLSFYNARTKQVLHTFKTRFTQPLLPAFTVWCGSFQVTTGLQVPSAVRCLQKRGSATSSSNTSLT

SEQ ID NO: 32017 - protein, 65 aa, Homo sapiens
  Payload ID: 6266
  Gene Symbol: FSD1
  Gene Name: fibronectin type III and SPRY domain containing 1
  ENSP ID: ENSP00000472060
MEEQREALRKIIKTLAVKNEEIQSFIYSLKQMLLNVEANSAKVRYEPDSKAFGVGVAYRSLGRFE

SEQ ID NO: 32018 - protein, 176 aa, Homo sapiens
  Payload ID: 6266
  Gene Symbol: FSD1
  Gene Name: fibronectin type III and SPRY domain containing 1
  ENSP ID: ENSP00000472521
  MOD_RES (1)..(1): Any amino acid
XFIYSLKQMLLNVEANSAKVQEDLEAEFQSLFSLLEELKEGMLMKIKQDRASRTYELQNQLAACTRALESSEELLETANQTLQAMDSEDFPQAAKQIKDGVTMAPAFRLSLKAKVSDNMSHLMVDFAQERQMLQALKFLPVPSAPVIDLAESLVPSAVRCLQKRGSATSSSNTSLT

SEQ ID NO: 32019 - protein, 437 aa, Homo sapiens
  Payload ID: 6266
  Gene Symbol: FSD1
  Gene Name: fibronectin type III and SPRY domain containing 1
  ENSP ID: ENSP00000473022
MEEQREALRKIIKTLAVKNEEIQSFIYSLKQMLLNVEANSAKVQEDLEAEFQSLFSLLEELKEGMLMKIKQDRASRTYELQNQLAACTRALESSEELLETANQTLQAMDSEDFPQAAKQIKDGVTMAPAFRLSLKAKVSDNMSHLMVDFAQERQMLQALKFLPVPSAPVIDLAESLVADNCVTLVWRMPDEDSKIDHYVLEYRRTNFEGPPRLKEDQPWMVIEGIRQTEYTLTGLKFDMKYMNFRVKACNKAVAGEFSEPVTLETPAFMFRLDASTSHQNLRVDDLSVEWDAMGGKVQDIKAREKDGKGRTASPINSPARGTPSPKRMPSGRGGRDRFTAESYTVLGDTLIDGGEHYWEVRYEPDSKAFGVGVAYRSLGRFEQLGKTAASWCLHVNNWLQASCPSTMPAPNKCCTLSRPGSHSRCCLLSRYGVAASR

SEQ ID NO: 32020 - protein, 311 aa, Homo sapiens
  Payload ID: 6267
  Gene Symbol: FSD1L
  Gene Name: fibronectin type III and SPRY domain containing 1-like
  ENSP ID: ENSP00000363839
MPEEDNKIDHFILEHRKTNFDGLPRVKDERCWEIIDNIKGTEYTLSGLKFDSKYMNFRVRACNKAVAGEYSDPVTLETKALNFNLDNSSSHLNLKVEDTCVEWDPTGGKGQESKIKGKENKGRSGTPSPKRTSVGSRPPAVRGSRDRFTGESYTVLGDTAIESGQHYWEVKAQKDCKSYSVGVAYKTLGKFDQLGKTNTSWCIHVNNWLQNTFAAKHNNKVKALDVTVPEKIGVFCDFDGGQLSFYDANSKQLLYSFKTKFTQPVLPGFMVWCGGLSLSTGMQVPSAVRTLQKSENGMTGSASSLNNVVTQ

SEQ ID NO: 32021 - protein, 508 aa, Homo sapiens
  Payload ID: 6267
  Gene Symbol: FSD1L
  Gene Name: fibronectin type III and SPRY domain containing 1-like
  ENSP ID: ENSP00000363842
MDSQKEALQRIISTLANKNDEIQNFIDTLHHTLKGVQENSSNILSELDEEFDSLYSILDEVKESMINCIKQEQARKSQELQSQISQCNNALENSEELLEFATRSLDIKEPEEFSKAARQIKDRVTMASAFRLSLKPKVSDNMTHLMVDFSQERQMLQTLKFLPVPKAPEIDPVECLVADNSVTVAWRMPEEDNKIDHFILEHRKTNFDGLPRVKDERCWEIIDNIKGTEYTLSGLKFDSKYMNFRVRACNKAVAGEYSDPVTLETKALNFNLDNSSSHLNLKVEDTCVEWDPTGGKGQESKIKGKENKGSVHVTSLKKHTSGTPSPKRTSVGSRPPAVRGSRDRFTGESYTVLGDTAIESGQHYWEVKAQKDCKSYSVGVAYKTLGKFDQLGKTNTSWCIHVNNWLQNTFAAKHNNKVKALDVTVPEKIGVFCDFDGGQLSFYDANSKQLLYSFKTKFTQPVLPGFMVWCGGLSLSTGMQVPSAVRTLQKSENGMTGSASSLNNVVTQ

SEQ ID NO: 32022 - protein, 509 aa, Homo sapiens
  Payload ID: 6267
  Gene Symbol: FSD1L
  Gene Name: fibronectin type III and SPRY domain containing 1-like
  ENSP ID: ENSP00000378384
MDSQKEALQRIISTLANKNDEIQNFIDTLHHTLKGVQENSSNILSELDEEFDSLYSILDEVKESMINCIKQEQARKSQELQSQISQCNNALENSEELLEFATRSLDIKEPEEFSKAARQIKDRVTMASAFRLSLKPKVSDNMTHLMVDFSQERQMLQTLKFLPVPKAPEIDPVECLVADNSVTVAWRMPEEDNKIDHFILEHRKTNFDGLPRVKDERCWEIIDNIKGTEYTLSGLKFDSKYMNFRVRACNKAVAGEYSDPVTLETKALNFNLDNSSSHLNLKVEDTCVEWDPTGGKGQESKIKGKENKGSVHVTSLKKHTRSGTPSPKRTSVGSRPPAVRGSRDRFTGESYTVLGDTAIESGQHYWEVKAQKDCKSYSVGVAYKTLGKFDQLGKTNTSWCIHVNNWLQNTFAAKHNNKVKALDVTVPEKIGVFCDFDGGQLSFYDANSKQLLYSFKTKFTQPVLPGFMVWCGGLSLSTGMQVPSAVRTLQKSENGMTGSASSLNNVVTQ

SEQ ID NO: 32023 - protein, 530 aa, Homo sapiens
  Payload ID: 6267
  Gene Symbol: FSD1L
  Gene Name: fibronectin type III and SPRY domain containing 1-like
  Uniprot ID: Q9BXM9
  ENSP ID: ENSP00000417492
MDSQKYCFKENENVTVDKACFLISNITIGPESINLQQEALQRIISTLANKNDEIQNFIDTLHHTLKGVQENSSNILSELDEEFDSLYSILDEVKESMINCIKQEQARKSQELQSQISQCNNALENSEELLEFATRSLDIKEPEEFSKAARQIKDRVTMASAFRLSLKPKVSDNMTHLMVDFSQERQMLQTLKFLPVPKAPEIDPVECLVADNSVTVAWRMPEEDNKIDHFILEHRKTNFDGLPRVKDERCWEIIDNIKGTEYTLSGLKFDSKYMNFRVRACNKAVAGEYSDPVTLETKALNFNLDNSSSHLNLKVEDTCVEWDPTGGKGQESKIKGKENKGRSGTPSPKRTSVGSRPPAVRGSRDRFTGESYTVLGDTAIESGQHYWEVKAQKDCKSYSVGVAYKTLGKFDQLGKTNTSWCIHVNNWLQNTFAAKHNNKVKALDVTVPEKIGVFCDFDGGQLSFYDANSKQLLYSFKTKFTQPVLPGFMVWCGGLSLSTGMQVPSAVRTLQKSENGMTGSASSLNNVVTQ

SEQ ID NO: 32024 - protein, 497 aa, Homo sapiens
  Payload ID: 6267
  Gene Symbol: FSD1L
  Gene Name: fibronectin type III and SPRY domain containing 1-like
  ENSP ID: ENSP00000419691
MDSQKEALQRIISTLANKNDEIQNFIDTLHHTLKGVQENSSNILSELDEEFDSLYSILDEVKESMINCIKQEQARKSQELQSQISQCNNALENSEELLEFATRSLDIKEPEEFSKAARQIKDRVTMASAFRLSLKPKVSDNMTHLMVDFSQERQMLQTLKFLPVPKAPEIDPVECLVADNSVTVAWRMPEEDNKIDHFILEHRKTNFDGLPRVKDERCWEIIDNIKGTEYTLSGLKFDSKYMNFRVRACNKAVAGEYSDPVTLETKALNFNLDNSSSHLNLKVEDTCVEWDPTGGKGQESKIKGKENKGSGTPSPKRTSVGSRPPAVRGSRDRFTGESYTVLGDTAIESGQHYWEVKAQKDCKSYSVGVAYKTLGKFDQLGKTNTSWCIHVNNWLQNTFAAKHNNKVKALDVTVPEKIGVFCDFDGGQLSFYDANSKQLLYSFKTKFTQPVLPGFMVWCGGLSLSTGMQVPSAVRTLQKSENGMTGSASSLNNVVTQ

SEQ ID NO: 32025 - protein, 381 aa, Homo sapiens
  Payload ID: 6267
  Gene Symbol: FSD1L
  Gene Name: fibronectin type III and SPRY domain containing 1-like
  ENSP ID: ENSP00000420624
MDSQKYCFKENENVTVDKACFLISNITIGPESINLQQEALQRIISTLANKNDEIQNFIDTLHHTLKGVQENSSNILSELDEEFDSLYSILDEVKESMINCIKQEQARKSQELQSQISQCNNALENSEELLEFATRSLDIKEPEEFSKAARQIKDRVTMASAFRLSLKPKVSDNMTHLMVDFSQERQMLQTLKFLPVPKAPEIDPVECLVADNSVTVAWRMPEEDNKIDHFILEHRKTNFDGLPRVKDERCWEIIDNIKGTEYTLSGLKFDSKYMNFRVRACNKAVAGEYSDPVTLETKALNFNLDNSSSHLNLKVEDTCVEWDPTGGKGQESKIKGKENKGSYKFLKIVFLLSKELLIHFEAVLSEIFLFICMTFTFYLLP

SEQ ID NO: 32026 - protein, 145 aa, Homo sapiens
  Payload ID: 6267
  Gene Symbol: FSD1L
  Gene Name: fibronectin type III and SPRY domain containing 1-like
  Uniprot ID: Q9BXM9
  ENSP ID: ENSP00000487223
MDSQKEALQRIISTLANKNDEIQNFIDTLHHTLKGVQENSSNILSELDEEFDSLYSILDEVKESMINCIKQEQARKSQELQSQISQCNNALENSEELLEFATRSLDIKEPEEFSKVHKNCINTLNKGSCIFKKAFLFFFSFGFLY

SEQ ID NO: 32027 - protein, 749 aa, Homo sapiens
  Payload ID: 6268
  Gene Symbol: FSD2
  Gene Name: fibronectin type III and SPRY domain containing 2
  Uniprot ID: A1L4K1
  ENSP ID: ENSP00000335651
MEEESGEELGLDRSTPKDFHFYHMDLYDSEDRLHLFPEENTRMRKVVQAEMANESRGAGDGKAQRDLQEEVDELVHLYGLEDDHELGDEFVDENIPRTGVSEYPPYMMKRRDPAREQRDWRLSGEAAEAEDLGFGGWGSAGQCQDLREAYRYTHGRASEEYECYVIPEEEDEEEAADVFCVTCKTPIRAFQKVFDEHKEHEVIPLNEALESAKDEIHKNMYKLEKQIIEMENFANHLEEVFITVEENFGKQEQNFESHYNEILETLAQKYEEKIQALGEKKKEKLEALYGQLVSCGENLDTCKELMETIEEMCHEEKVDFIKDAVAMADRLGKFLKTKTDVEISAQPEFEDQTLDFSDVEQLMGSINTIPAPSAPVINPQVPNSATGSSVRVCWSLYSDDTVESYQLSYRPVQDSSPGTDQAEFTVTVKETYCSVTNLVPNTQYEFWVTAHNRAGPSPSSERAVYMTAPSPPIIKTKEIRSCEEAVLICWESGNLNPVDSYTVELTQAESPEASGVTESVVGIPTCESVVQLQPGRSYIIYVRALNMGGPSVRSEPATVHTIGSYFRLNKDTCHPWLTISEDGLTAVRSERRTPARELSPSDTHFTRCVAVMGNLIPVRGHHYWEVEVDEHLDYRVGVAFADVRKQEDLGANCLSWCMRHTFASSRHKYEFLHNRTTPDIRITVPPKKIGILLDYEHSKLSFFNVDLSQHLYTFSCQLHEFVHPCFSLEKPGCLKVHNGISMPKHVTFY

SEQ ID NO: 32028 - protein, 704 aa, Homo sapiens
  Payload ID: 6268
  Gene Symbol: FSD2
  Gene Name: fibronectin type III and SPRY domain containing 2
  Uniprot ID: A1L4K1
  ENSP ID: ENSP00000444078
MEEESGEELGLDRSTPKDFHFYHMDLYDSEDRLHLFPEENTRMRKVVQAEMANESRGAGDGKAQRDLQEEVDELVHLYGLEDDHELGDEFVDENIPRTGVSEYPPYMMKRRDPAREQRDWRLSGEAAEAEDLGFGGWGSAGQCQDLREAYRYTHGRASEEYECYVIPEEEDEEEAADVFCVTCKTPIRAFQKVFDEHKEHEVIPLNEALESAKDEIHKNMYKLEKQIIEMENFANHLEEVFITVEENFGKQEQNFESHYNEILETLAQKYEEKIQALGEKKKEKLEALYGQLVSCGENLDTCKELMETIEEMCHEEKVDFIKDAVAMADRLGKFLKTKTDVEISAQPEFEDQTLDFSDVEQLMGSINTIPAPSAPVINPQVPNSATGSSVRVCWSLYSDDTVESYQLSYRPVQDSSPGTDQAAPSPPIIKTKEIRSCEEAVLICWESGNLNPVDSYTVELTQAESPEASGVTESVVGIPTCESVVQLQPGRSYIIYVRALNMGGPSVRSEPATVHTIGSYFRLNKDTCHPWLTISEDGLTAVRSERRTPARELSPSDTHFTRCVAVMGNLIPVRGHHYWEVEVDEHLDYRVGVAFADVRKQEDLGANCLSWCMRHTFASSRHKYEFLHNRTTPDIRITVPPKKIGILLDYEHSKLSFFNVDLSQHLYTFSCQLHEFVHPCFSLEKPGCLKVHNGISMPKHVTFY

SEQ ID NO: 32029 - protein, 101 aa, Homo sapiens
  Payload ID: 6268
  Gene Symbol: FSD2
  Gene Name: fibronectin type III and SPRY domain containing 2
  ENSP ID: ENSP00000453127
MEEESGEELGLDRSTPKDFHFYHMDLYDSEDRLHLFPEENTRMRKVVQAEMANESRGAGDGKAQRDLQEEVDELVHLYGLEDDHELGDEFVDENIPRTGVS

SEQ ID NO: 32030 - protein, 1894 aa, Homo sapiens
  Payload ID: 6269
  Gene Symbol: FNDC1
  Gene Name: fibronectin type III domain containing 1
  Uniprot ID: Q4ZHG4
  ENSP ID: ENSP00000297267
MAPEAGATLRAPRRLSWAALLLLAALLPVASSAAASVDHPLKPRHVKLLSTKMGLKVTWDPPKDATSRPVEHYNIAYGKSLKSLKYIKVNAETYSFLIEDVEPGVVYFVLLTAENHSGVSRPVYRAESPPGGEWIEIDGFPIKGPGPFNETVTEKEVPNKPLRVRVRSSDDRLSVAWKAPRLSGAKSPRRSRGFLLGYGESGRKMNYVPLTRDERTHEIKKLASESVYVVSLQSMNSQGRSQPVYRAALTKRKISEEDELDVPDDISVRVMSSQSVLVSWVDPVLEKQKKVVASRQYTVRYREKGELARWDYKQIANRRVLIENLIPDTVYEFAVRISQGERDGKWSTSVFQRTPESAPTTAPENLNVWPVNGKPTVVAASWDALPETEGKVKEYILSYAPALKPFGAKSLTYPGDTTSALVDGLQPGERYLFKIRATNRRGLGPHSKAFIVAMPTTSKADVEQNTEDNGKPEKPEPSSPSPRAPASSQHPSVPASPQGRNAKDLLLDLKNKILANGGAPRKPQLRAKKAEELDLQSTEITGEEELGSREDSPMSPSDTQDQKRTLRPPSRHGHSVVAPGRTAVRARMPALPRREGVDKPGFSLATQPRPGAPPSASASPAHHASTQGTSHRPSLPASLNDNDLVDSDEDERAVGSLHPKGAFAQPRPALSPSRQSPSSVLRDRSSVHPGAKPASPARRTPHSGAAEEDSSASAPPSRLSPPHGGSSRLLPTQPHLSSPLSKGGKDGEDAPATNSNAPSRSTMSSSVSSHLSSRTQVSEGAEASDGESHGDGDREDGGRQAEATAQTLRARPASGHFHLLRHKPFAANGRSPSRFSIGRGPRLQPSSSPQSTVPSRAHPRVPSHSDSHPKLSSGIHGDEEDEKPLPATVVNDHVPSSSRQPISRGWEDLRRSPQRGASLHRKEPIPENPKSTGADTHPQGKYSSLASKAQDVQQSTDADTEGHSPKAQPGSTDRHASPARPPAARSQQHPSVPRRMTPGRAPQQQPPPPVATSQHHPGPQSRDAGRSPSQPRLSLTQAGRPRPTSQGRSHSSSDPYTASSRGMLPTALQNQDEDAQGSYDDDSTEVEAQDVRAPAHAARAKEAAASLPKHQQVESPTGAGAGGDHRSQRGHAASPARPSRPGGPQSRARVPSRAAPGKSEPPSKRPLSSKSQQSVSAEDDEEEDAGFFKGGKEDLLSSSVPKWPSSSTPRGGKDADGSLAKEEREPAIALAPRGGSLAPVKRPLPPPPGSSPRASHVPSRLPPRSAATVSPVAGTHPWPQYTTRAPPGHFSTTPMLSLRQRMMHARFRNPLSRQPARPSYRQGYNGRPNVEGKVLPGSNGKPNGQRIINGPQGTKWVVDLDRGLVLNAEGRYLQDSHGNPLRIKLGGDGRTIVDLEGTPVVSPDGLPLFGQGRHGTPLANAQDKPILSLGGKPLVGLEVIKKTTHPPTTTMQPTTTTTPLPTTTTPRPTTATTRRTTTTRRTTTRRPTTTVRTTTRTTTTTTPTPTTPIPTCPPGTLERHDDDGNLIMSSNGIPECYAEEDEFSGLETDTAVPTEEAYVIYDEDYEFETSRPPTTTEPSTTATTPRVIPEEGAISSFPEEEFDLAGRKRFVAPYVTYLNKDPSAPCSLTDALDHFQVDSLDEIIPNDLKKSDLPPQHAPRNITVVAVEGCHSFVIVDWDKATPGDVVTGYLVYSASYEDFIRNKWSTQASSVTHLPIENLKPNTRYYFKVQAQNPHGYGPISPSVSFVTESDNPLLVVRPPGGEPIWIPFAFKHDPSYTDCHGRQYVKRTWYRKFVGVVLCNSLRYKIYLSDNLKDTFYSIGDSWGRGEDHCQFVDSHLDGRTGPQSYVEALPTIQGYYRQYRQEPVRFGNIGFGTPYYYVGWYECGVSIPGKW

SEQ ID NO: 32031 - protein, 1790 aa, Homo sapiens
  Payload ID: 6269
  Gene Symbol: FNDC1
  Gene Name: fibronectin type III domain containing 1
  ENSP ID: ENSP00000333297
  MOD_RES (1)..(1): Any amino acid
XPRHVKLLSTKMGLKVTWDPPKDATSRPVEHYNIAYGKSLKSLKYIKVNAETYSFLIEDVEPGVVYFVLLTAENHSGVSRPVYRAESPPGGEWIEIDGFPIKGPGPFNETVTEKEVPNKPLRVRVRSSDDRLSVAWKAPRLSGAKSPRRSRGFLLGYGESGRKMNYVPLTRDERTHEIKKLASESVYVVSLQSMNSQGRSQPVYRAALTKRKISEEDELDVPDDISVRVMSSQSVLVSWVDPVLEKQKKVVASRQYTVRYREKGELARWDYKQIANRRVLIENLIPDTVYEFAVRISQGERDGKWSTSVFQRTPESAPTTAPENLNVWPVNGKPTVVAASWDALPETEGKVKASKADVEQNTEDNGKPEKPEPSSPSPRAPASSQHPSVPASPQGRNAKDLLLDLKNKILANGGAPRKPQLRAKKAEELDLQSTEITGEEELGSREDSPMSPSDTQDQKRTLRPPSRHGHSVVAPGRTAVRARMPALPRREGVDKPGFSLATQPRPGAPPSASASPAHHASTQGTSHRPSLPASLNDNDLVDSDEDERAVGSLHPKGAFAQPRPALSPSRQSPSSVLRDRSSVHPGAKPASPARRTPHSGAAEEDSSASAPPSRLSPPHGGSSRLLPTQPHLSSPLSKGGKDGEDAPATNSNAPSRSTMSSSVSSHLSSRTQVSEGAEASDGESHGDGDREDGGRQAEATAQTLRARPASGHFHLLRHKPFAANGRSPSRFSIGRGPRLQPSSSPQSTVPSRAHPRVPSHSDSHPKLSSGIHGDEEDEKPLPATVVNDHVPSSSRQPISRGWEDLRRSPQRGASLHRKEPIPENPKSTGADTHPQGKYSSLASKAQDVQQSTDADTEGHSPKAQPGSTDRHASPARPPAARSQQHPSVPRRMTPGRAPQQQPPPPVATSQHHPGPQSRDAGRSPSQPRLSLTQAGRPRPTSQGRSHSSSDPYTASSRGMLPTALQNQDEDAQGSYDDDSTEVEAQDVRAPAHAARAKEAAASLPKHQQVESPTGAGAGGDHRSQRGHAASPARPSRPGGPQSRARVPSRAAPGKSEPPSKRPLSSKSQQSVSAEDDEEEDAGFFKGGKEDLLSSSVPKWPSSSTPRGGKDADGSLAKEEREPAIALAPRGGSLAPVKRPLPPPPGSSPRASHVPSRLPPRSAATVSPVAGTHPWPQYTTRAPPGHFSTTPMLSLRQRMMHARFRNPLSRQPARPSYRQGYNGRPNVEGKVLPGSNGKPNGQRIINGPQGTKWVVDLDRGLVLNAEGRYLQDSHGNPLRIKLGGDGRTIVDLEGTPVVSPDGLPLFGQGRHGTPLANAQDKPILSLGGKPLVGLEVIKKTTHPPTTTMQPTTTTTPLPTTTTPRPTTATTRRTTTTRRTTTRRPTTTVRTTTRTTTTTTPTPTTPIPTCPPGTLERHDDDGNLIMSSNGIPECYAEEDEFSGLETDTAVPTEEAYVIYDEDYEFETSRPPTTTEPSTTATTPRVIPEEGAISSFPEEEFDLAGRKRFVAPYVTYLNKDPSAPCSLTDALDHFQVDSLDEIIPNDLKKSDLPPQHAPRNITVVAVEGCHSFVIVDWDKATPGDVVTGYLVYSASYEDFIRNKWSTQASSVTHLPIENLKPNTRYYFKVQAQNPHGYGPISPSVSFVTESDNPLLVVRPPGGEPIWIPFAFKHDPSYTDCHGRQYVKRTWYRKFVGVVLCNSLRYKIYLSDNLKDTFYSIGDSWGRGEDHCQFVDSHLDGRTGPQSYVEALPTIQGYYRQYRQEPVRFGNIGFGTPYYYVGWYECGVSIPGKW

SEQ ID NO: 32032 - protein, 1142 aa, Homo sapiens
  Payload ID: 6270
  Gene Symbol: FNDC3A
  Gene Name: fibronectin type III domain containing 3A
  Uniprot ID: Q9Y2H6
  ENSP ID: ENSP00000381362
MSGPAQVPMMSPNGSVPPIYVPPGYAPQVIEDNGVRRVVVVPQAPEFHPGSHTVLHRSPHPPLPGFIPVPTMMPPPPRHMYSPVTGAGDMTTQYMPQYQSSQVYGDVDAHSTHGRSNFRDERSSKTYERLQKKLKDRQGTQKDKMSSPPSSPQKCPSPINEHNGLIKGQIAGGINTGSAKIKSGKGKGGTQVDTEIEEKDEETKAFEALLSNIVKPVASDIQARTVVLTWSPPSSLINGETDESSVPELYGYEVLISSTGKDGKYKSVYVGEETNITLNDLKPAMDYHAKVQAEYNSIKGTPSEAEIFTTLSCEPDIPNPPRIANRTKNSLTLQWKAPSDNGSKIQNFVLEWDEGKGNGEFCQCYMGSQKQFKITKLSPAMGCKFRLSARNDYGTSGFSEEVLYYTSGCAPSMPASPVLTKAGITWLSLQWSKPSGTPSDEGISYILEMEEETSGYGFKPKYDGEDLAYTVKNLRRSTKYKFKVIAYNSEGKSNPSEVVEFTTCPDKPGIPVKPSVKGKIHSHSFKITWDPPKDNGGATINKYVVEMAEGSNGNKWEMIYSGATREHLCDRLNPGCFYRLRVYCISDGGQSAVSESLLVQTPAVPPGPCLPPRLQGRPKAKEIQLRWGPPLVDGGSPISCYSVEMSPIEKDEPREVYQGSEVECTVSSLLPGKTYSFRLRAANKMGFGPFSEKCDITTAPGPPDQCKPPQVTCRSATCAQVNWEVPLSNGTDVTEYRLEWGGVEGSMQICYCGPGLSYEIKGLSPATTYYCRVQALSVVGAGPFSEVVACVTPPSVPGIVTCLQEISDDEIENPHYSPSTCLAISWEKPCDHGSEILAYSIDFGDKQSLTVGKVTSYIINNLQPDTTYRIRIQALNSLGAGPFSHMIKLKTKPLPPDPPRLECVAFSHQNLKLKWGEGTPKTLSTDSIQYHLQMEDKNGRFVSLYRGPCHTYKVQRLNESTSYKFCIQACNEAGEGPLSQEYIFTTPKSVPAALKAPKIEKVNDHICEITWECLQPMKGDPVIYSLQVMLGKDSEFKQIYKGPDSSFRYSSLQLNCEYRFRVCAIRQCQDSLGHQDLVGPYSTTVLFISQRTEPPASTNRDTVESTRTRRALSDEQCAAVILVLFAFFSILIAFIIQYFVIK

SEQ ID NO: 32033 - protein, 1198 aa, Homo sapiens
  Payload ID: 6270
  Gene Symbol: FNDC3A
  Gene Name: fibronectin type III domain containing 3A
  Uniprot ID: Q9Y2H6
  ENSP ID: ENSP00000417257
MAEHPPLLDTTQILSSDISLLSAPIVSADGTQQVILVQVNPGEAFTIRREDGQFQCITGPAQVPMMSPNGSVPPIYVPPGYAPQVIEDNGVRRVVVVPQAPEFHPGSHTVLHRSPHPPLPGFIPVPTMMPPPPRHMYSPVTGAGDMTTQYMPQYQSSQVYGDVDAHSTHGRSNFRDERSSKTYERLQKKLKDRQGTQKDKMSSPPSSPQKCPSPINEHNGLIKGQIAGGINTGSAKIKSGKGKGGTQVDTEIEEKDEETKAFEALLSNIVKPVASDIQARTVVLTWSPPSSLINGETDESSVPELYGYEVLISSTGKDGKYKSVYVGEETNITLNDLKPAMDYHAKVQAEYNSIKGTPSEAEIFTTLSCEPDIPNPPRIANRTKNSLTLQWKAPSDNGSKIQNFVLEWDEGKGNGEFCQCYMGSQKQFKITKLSPAMGCKFRLSARNDYGTSGFSEEVLYYTSGCAPSMPASPVLTKAGITWLSLQWSKPSGTPSDEGISYILEMEEETSGYGFKPKYDGEDLAYTVKNLRRSTKYKFKVIAYNSEGKSNPSEVVEFTTCPDKPGIPVKPSVKGKIHSHSFKITWDPPKDNGGATINKYVVEMAEGSNGNKWEMIYSGATREHLCDRLNPGCFYRLRVYCISDGGQSAVSESLLVQTPAVPPGPCLPPRLQGRPKAKEIQLRWGPPLVDGGSPISCYSVEMSPIEKDEPREVYQGSEVECTVSSLLPGKTYSFRLRAANKMGFGPFSEKCDITTAPGPPDQCKPPQVTCRSATCAQVNWEVPLSNGTDVTEYRLEWGGVEGSMQICYCGPGLSYEIKGLSPATTYYCRVQALSVVGAGPFSEVVACVTPPSVPGIVTCLQEISDDEIENPHYSPSTCLAISWEKPCDHGSEILAYSIDFGDKQSLTVGKVTSYIINNLQPDTTYRIRIQALNSLGAGPFSHMIKLKTKPLPPDPPRLECVAFSHQNLKLKWGEGTPKTLSTDSIQYHLQMEDKNGRFVSLYRGPCHTYKVQRLNESTSYKFCIQACNEAGEGPLSQEYIFTTPKSVPAALKAPKIEKVNDHICEITWECLQPMKGDPVIYSLQVMLGKDSEFKQIYKGPDSSFRYSSLQLNCEYRFRVCAIRQCQDSLGHQDLVGPYSTTVLFISQRTEPPASTNRDTVESTRTRRALSDEQCAAVILVLFAFFSILIAFIIQYFVIK

SEQ ID NO: 32034 - protein, 139 aa, Homo sapiens
  Payload ID: 6270
  Gene Symbol: FNDC3A
  Gene Name: fibronectin type III domain containing 3A
  ENSP ID: ENSP00000418703
VGKVTSYIINNLQPDTTYRIRIQALNSLGAGPFSHMIKLKTKPLPPDPPRLECVAFSHQNLKLKWGEGTPKTLSTDSIQYHLQMEDKNGRNIQSKIMGCIQLIDNILGEICMIFNFIEQFKWVCIPIQRTMSYIQSTKT

SEQ ID NO: 32035 - protein, 684 aa, Homo sapiens
  Payload ID: 6270
  Gene Symbol: FNDC3A
  Gene Name: fibronectin type III domain containing 3A
  ENSP ID: ENSP00000420275
MAEHPPLLDTTQILSSDISLLSAPIVSADGTQQVILVQVNPGEAFTIRREDGQFQCITGPAQVPMMSPNGSVPPIYVPPGYAPQVIEDNGVRRVVVVPQAPEFHPGSHTVLHRSPHPPLPGFIPVPTMMPPPPRHMYSPVTGAGDMTTQYMPQYQSSQVYGDVDAHSTHGRSNFRDERSSKTYERLQKKLKDRQGTQKDKMSSPPSSPQKCPSPINEHNGLIKGQIAGGINTGSAKIKSGKGKGGTQVDTEIEEKDEETKAFEALLSNIVKPVASDIQARTVVLTWSPPSSLINGETDESSVPELYGYEVLISSTGKDGKYKSVYVGEETNITLNDLKPAMDYHAKVQAEYNSIKGTPSEAEIFTTLSCEPDIPNPPRIANRTKNSLTLQWKAPSDNGSKIQNFVLEWDEGKGNGEFCQCYMGSQKQFKITKLSPAMGCKFRLSARNDYGTSGFSEEVLYYTSGCAPSMPASPVLTKAGITWLSLQWSKPSGTPSDEGISYILEMEEETSGYGFKPKYDGEDLAYTVKNLRRSTKYKFKVIAYNSEGKSNPSEVVEFTTCPDKPGIPVKPSVKGKIHSHSFKITWDPPKDNGGATINKYVVEMAEGSNGNKWEMIYSGATREHLCDRLNPGCFYRLRVYCISDGGQSAVSESLLVQTPAVPPGPCLPPRLQGRPKAKEIQTPSG

SEQ ID NO: 32036 - protein, 1198 aa, Homo sapiens; identical to SEQ ID NO: 32033
  Payload ID: 6270
  Gene Symbol: FNDC3A
  Gene Name: fibronectin type III domain containing 3A
  Uniprot ID: Q9Y2H6
  ENSP ID: ENSP00000441831

SEQ ID NO: 32037 - protein, 326 aa, Homo sapiens
  Payload ID: 6270
  Gene Symbol: FNDC3A
  Gene Name: fibronectin type III domain containing 3A
  ENSP ID: ENSP00000484320
MAEHPPLLDTTQILSSDISLLSAPIVSADGTQQVILVQVNPGEAFTIRREDGQFQCITGPAQVPMMSPNGSVPPIYVPPGYAPQVIEDNGVRRVVVVPQAPEFHPGSHTVLHRSPHPPLPGFIPVPTMMPPPPRHMYSPVTGAGDMTTQYMPQYQSSQVYGDVDAHSTHGRSNFRDERSSKTYERLQKKLKDRQGTQKDKMSSPPSSPQKCPSPINEHNGLIKGQIAGGINTGSAKIKSGKGKGGTQVDTEIEEKDEETKAFEALLSNIVKPVASDIQARTVVLTWSPPSSLINGETDESSVPELYGYEVLISSTGKDGKYKSVYV

SEQ ID NO: 32038 - protein, 1204 aa, Homo sapiens
  Payload ID: 6271
  Gene Symbol: FNDC3B
  Gene Name: fibronectin type III domain containing 3B
  Uniprot ID: Q53EP0
  ENSP ID: ENSP00000338523
MYVTMMMTDQIPLELPPLLNGEVAMMPHLVNGDAAQQVILVQVNPGETFTIRAEDGTLQCIQGPAEVPMMSPNGSIPPIHVPPGYISQVIEDSTGVRRVVVTPQSPECYPPSYPSAMSPTHHLPPYLTHHPHFIHNSHTAYYPPVTGPGDMPPQFFPQHHLPHTIYGEQEIIPFYGMSTYITREDQYSKPPHKKLKDRQIDRQNRLNSPPSSIYKSSCTTVYNGYGKGHSGGSGGGGSGSGPGIKKTERRARSSPKSNDSDLQEYELEVKRVQDILSGIEKPQVSNIQARAVVLSWAPPVGLSCGPHSGLSFPYSYEVALSDKGRDGKYKIIYSGEELECNLKDLRPATDYHVRVYAMYNSVKGSCSEPVSFTTHSCAPECPFPPKLAHRSKSSLTLQWKAPIDNGSKITNYLLEWDEGKRNSGFRQCFFGSQKHCKLTKLCPAMGYTFRLAARNDIGTSGYSQEVVCYTLGNIPQMPSAPRLVRAGITWVTLQWSKPEGCSPEEVITYTLEIQEDENDNLFHPKYTGEDLTCTVKNLKRSTQYKFRLTASNTEGKSCPSEVLVCTTSPDRPGPPTRPLVKGPVTSHGFSVKWDPPKDNGGSEILKYLLEITDGNSEANQWEVAYSGSATEYTFTHLKPGTLYKLRACCISTGGHSQCSESLPVRTLSIAPGQCRPPRVLGRPKHKEVHLEWDVPASESGCEVSEYSVEMTEPEDVASEVYHGPELECTVGNLLPGTVYRFRVRALNDGGYGPYSDVSEITTAAGPPGQCKAPCISCTPDGCVLVGWESPDSSGADISEYRLEWGEDEESLELIYHGTDTRFEIRDLLPAAQYCCRLQAFNQAGAGPYSELVLCQTPASAPDPVSTLCVLEEEPLDAYPDSPSACLVLNWEEPCNNGSEILAYTIDLGDTSITVGNTTMHVMKDLLPETTYRIRIQAINEIGAGPFSQFIKAKTRPLPPLPPRLECAAAGPQSLKLKWGDSNSKTHAAEDIVYTLQLEDRNKRFISIYRGPSHTYKVQRLTEFTCYSFRIQAASEAGEGPFSETYTFSTTKSVPPTIKAPRVTQLEGNSCEILWETVPSMKGDPVNYILQVLVGRESEYKQVYKGEEATFQISGLQTNTDYRFRVCACRRCLDTSQELSGAFSPSAAFVLQRSEVMLTGDMGSLDDPKMKSMMPTDEQFAAIIVLGFATLSILFAFILQYFLMK

SEQ ID NO: 32039 - protein, 208 aa, Homo sapiens
  Payload ID: 6271
  Gene Symbol: FNDC3B
  Gene Name: fibronectin type III domain containing 3B
  ENSP ID: ENSP00000389064
MFTKEKIWSEVILVQVNPGETFTIRAEDGTLQCIQGPAEVPMMSPNGSIPPIHVPPGYISQVIEDSTGVRRVVVTPQSPECYPPSYPSAMSPTHHLPPYLTHHPHFIHNSHTAYYPPVTGPGDMPPQFFPQHHLPHTIYGEQEIIPFYGMSTYITREDQYSKPPHKKLKDRQIDRQNRLNSPPSSIYKSSCTTVYNGYGKGHSGGSGG

SEQ ID NO: 32040 - protein, 1204 aa, Homo sapiens; identical to SEQ ID NO: 32038
  Payload ID: 6271
  Gene Symbol: FNDC3B
  Gene Name: fibronectin type III domain containing 3B
  Uniprot ID: Q53EP0
  ENSP ID: ENSP00000389094

SEQ ID NO: 32041 - protein, 71 aa, Homo sapiens
  Payload ID: 6271
  Gene Symbol: FNDC3B
  Gene Name: fibronectin type III domain containing 3B
  Uniprot ID: Q53EP0
  ENSP ID: ENSP00000392471
MYVTMMMTDQIPLELPPLLNGEVAMMPHLVNGDAAQQVILVQVNPGETFTIRAEDGTLQCIQDEVVKRACD

SEQ ID NO: 32042 - protein, 71 aa, Homo sapiens; identical to SEQ ID NO: 32041
  Payload ID: 6271
  Gene Symbol: FNDC3B
  Gene Name: fibronectin type III domain containing 3B
  Uniprot ID: Q53EP0
  ENSP ID: ENSP00000408496

SEQ ID NO: 32043 - protein, 1204 aa, Homo sapiens; identical to SEQ ID NO: 32038
  Payload ID: 6271
  Gene Symbol: FNDC3B
  Gene Name: fibronectin type III domain containing 3B
  Uniprot ID: Q53EP0
  ENSP ID: ENSP00000411242

SEQ ID NO: 32044 - protein, 234 aa, Homo sapiens
  Payload ID: 6272
  Gene Symbol: FNDC4
  Gene Name: fibronectin type III domain containing 4
  Uniprot ID: Q9H6D8
  ENSP ID: ENSP00000264703
MPSGCHSSPPSGLRGDMASLVPLSPYLSPTVLLLVSCDLGFVRADRPPSPVNVTVTHLRANSATVSWDVPEGNIVIGYSISQQRQNGPGQRVIREVNTTTRACALWGLAEDSDYTVQVRSIGLRGESPPGPRVHFRTLKGSDRLPSNSSSPGDITVEGLDGERPLQTGEVVIIVVVLLMWAAVIGLFCRQYDIIKDNDSNNNPKEKGKGPEQSPQGRPVGTRQKKSPSINTIDV

SEQ ID NO: 32045 - protein, 212 aa, Homo sapiens
  Payload ID: 6273
  Gene Symbol: FNDC5
  Gene Name: fibronectin type III domain containing 5
  ENSP ID: ENSP00000362570
IHPGSPSAWPPRARAALRLWLGCVCFALVQADSPSAPVNVTVRHLKANSAVVSWDVLEDEVVIGFAISQQKKDVRMLRFIQEVNTTTRSCALWDLEEDTEYIVHVQAISIQGQSPASEPVLFKTPREAEKMASKNKDEVTMKEMGRNQQLRTGEVLIIVVVLFMWAGVIALFCRQYDIIKDNEPNNNKEKTKSASETSTPEHQGGGLLRSKI

SEQ ID NO: 32046 - protein, 153 aa, Homo sapiens
  Payload ID: 6273
  Gene Symbol: FNDC5
  Gene Name: fibronectin type III domain containing 5
  Uniprot ID: Q8NAU1
  ENSP ID: ENSP00000476320
MLRFIQEVNTTTRSCALWDLEEDTEYIVHVQAISIQGQSPASEPVLFKTPREAEKMASKNKDEVTMKEMGRNQQLRTGEVLIIVVVLFMWAGVIALFCRQYDIIKDNEPNNNKEKTKSASETSTPEHQGGGLLRSKVRARPGPGWATLCLMLW

SEQ ID NO: 32047 - protein, 733 aa, Homo sapiens
  Payload ID: 6274
  Gene Symbol: FNDC7
  Gene Name: fibronectin type III domain containing 7
  Uniprot ID: Q5VTL7
  ENSP ID: ENSP00000359034
MAGGRETCLPLIGFILICLKMVASAKSAPEIPTIDQAYSKLSNSITVEWATVPGATSYLLTAEDGDTVIETTVANSPGTVTGLKAATWYEITIRSISAAGRSQASPPKQAKTVLAAPILEVSSPSSDSILVQWEAVYMAIAFSVSIMRANGLGSIWKENTTNTSLTFTSLEAGTLYTIKAYAWNANRIPGDDSTCNQRTSPRAPANIQVSFDSGALKASFSWARAEGAFNYTVMALSDSSELTCSTTFSSCTISSLQCGTEYLISVLASNDAGSSKSSSAMTLKTVACAPGRVTIQEDPPGHLSVAWSSVDLGDYYVVFVKSDDGLEVHCNTSLTQCNFLSECGFTYFISVFVYNKAGQSPLGDIFNYTTAPCCPSDINPVLVSSDRVEIVWSPVRGAELYETKAVDGYNMVECNDTTPACTLSALECDTKYNITVYSFNEVRGSNMSCTPQFITTAPCSPEIKNVSRDAFSMINVHWRSTNDDATYTVTAQGEKGLYQCSSTGESCTMRGLPCGSVFSVTAVAETQAGRSLPSYSVPLETVPCCPTGLTVTQITQSVINVSWTIGRVAQTHVAVLESHTGQSKCHTHQNHCLLGCITCGINYTVTLKAISATGLTADCSYQSYFSGACCPLGVKLYRLGPNGIRIYWQASRGSANYSTDLYGSKGIFTCTPSAGLSFCDVTEIPCGDVYTVMVSPVAKTGLKLTFCPKKIYSVTCSGSTLGMVIYRGKRNEE

SEQ ID NO: 32048 - protein, 499 aa, Homo sapiens
  Payload ID: 6274
  Gene Symbol: FNDC7
  Gene Name: fibronectin type III domain containing 7
  ENSP ID: ENSP00000405986
  MOD_RES (1)..(1): Any amino acid
XEGAFNYTVMALSDSSELTCSTTFSSCTISSLQCGTEYLISVLASNDAGSSKSSSAMTLKTVACAPGRVTIQEDPPGHLSVAWSSVDLGDYYVVFVKSDDGLEVHCNTSLTQCNFLSECGFTYFISVFVYNKAGQSPLGDIFNYTTAPCCPSDINPVLVSSDRVEIVWSPVRGAELYETKAVDGYNMVECNDTTPACTLSALECDTKYNITVYSFNEVRGSNMSCTPQFITTAPCSPEIKNVSRDAFSMINVHWRSTNDDATYTVTAQGEKGLYQCSSTGESCTMRGLPCGSVFSVTAVAETQAGRSLPSYSVPLETVPCCPTGLTVTQITQSVINVSWTIGRVAQTHVAVLESHTGQSKCHTHQNHCLLGCITCGINYTVTLKAISATGLTADCSYQSYFSGACCPLGVKLYRLGPNGIRIYWQASRGSANYSTDLYGSKGIFTCTPSAGLSFCDVTEIPCGDVYTVMVSPVAKTGLKLTFCPKKIYSVIYRGKRNEE

SEQ ID NO: 32049 - protein, 324 aa, Homo sapiens
  Payload ID: 6275
  Gene Symbol: FNDC8
  Gene Name: fibronectin type III domain containing 8
  Uniprot ID: Q8TC99
  ENSP ID: ENSP00000158009
MASEALHQVGDGEEAVLKKENFNMMNALDQLPKPFSNPKSMNRTVTTKGLPLASKGNLVNFLEDDTINLLKPLPVEDSDCSSDETSISAFSSTLLNPIKLAVTQPNSSFFAGMLEGELNKLSFSPMAKNAENEDLALGPCPCPSKSQMATRGLLDLDNPELETETSSTHSESSVVVDLPDTPFIFEHTVNNSTAVISWTYALGKQPVSFYQLLLQEVAKTQENELPEAKNRPWIFNKILGTTVKLMELKPNTCYCLSVRAANTAGVGKWCKPYKFATLATDFSSFPENYPIQITVRRKEPRQKIVSIGPEEMRRLEDLEYLFPC

SEQ ID NO: 32050 - protein, 224 aa, Homo sapiens
  Payload ID: 6276
  Gene Symbol: FNDC9
  Gene Name: fibronectin type III domain containing 9
  Uniprot ID: Q8TBE3
  ENSP ID: ENSP00000310594
MNIEVGNISYTGAIISWSSSEPCLEDYYHIMYRPNWNSIFSGYLRYSFHHEEKVPRTISSVVLEHLAPSTLYFLCISCKKAAFPYRHYCTMFHTLDKSPLAPGSSLVDPQISLWVLMAILLACFTAVLAFICLQFWCVRCHEPRWSYRAGHMEEANGLVRWPEEAPDLGQREEDLQGLPLVEMPRKNSRDGAELDPEANQDAPDAGALQRGGGDPPAILPHCGE

SEQ ID NO: 32051 - protein, 180 aa, Homo sapiens
  Payload ID: 6276
  Gene Symbol: FNDC9
  Gene Name: fibronectin type III domain containing 9
  ENSP ID: ENSP00000429434
MNIEVGNISYTGAIISWSSSEPCLEDYYHIMYRPNWNSIFSGYLRYSFHHEEKVPRTISSVVLEHLAPSTLYFLCISCKKAAFPYRHYCTMFHTLDKSPLAPGSSLVDPQISLWVLMAILLACFTAVLAFICLQFWCVRCHEPRWSYRAGHMEEANGLVRWPEEAPDLGQREEDLQGLPL

SEQ ID NO: 32052 - protein, 460 aa, Homo sapiens
  Payload ID: 6277
  Gene Symbol: FBRS
  Gene Name: fibrosin
  Uniprot ID: Q9HAH7
  ENSP ID: ENSP00000287468
MFEKYPGKMEGLFRHNPYTAFPPAVPGLPPGLPPAVSFGSLQGAFQPKSTNPELPPRLGPVPSGLSQKGTQIPDHFRPPLRKPGKWCAMHVRVAYMILRHQEKMKGDSHKLDFRNDLLPCLPGPYGALPPGQELSHPASLFTATGAVHAAANPFTAAPGAHGPFLSPSTHIDPFGRPTSFASLAALSNGAFGGLGSPTFNSGAVFAQKESPGAPPAFASPPDPWGRLHRSPLTFPAWVRPPEAARTPGSDKERPVERREPSITKEEKDRDLPFSRPQLRVSPATPKARAGEEGPRPTKESVRVKEERKEEAAAAAAAAAAAAAAAAAAATGPQGLHLLFERPRPPPFLGPSPPDRCAGFLEPTWLAAPPRLARPPRFYEAGEELTGPGAVAAARLYGLEPAHPLLYSRLAPPPPPAAAPGTPHLLSKTPPGALLGAPPPLVPAPRPSSPPRGPGPARADR

SEQ ID NO: 32053 - protein, 980 aa, Homo sapiens
  Payload ID: 6277
  Gene Symbol: FBRS
  Gene Name: fibrosin
  ENSP ID: ENSP00000348489
METAAAAAPGPGWAAEGERRRRRCSRRDRDREQRRRRGPGGDAPRALLAAPRGSSSSSSPPPPARPWSSASSGERPGGPRRRRPRPRPRPPRPRARKRPAGSGSRGEEEEEEEEEGGADDGEAEEEPEEEEEEEEDLIDGFAIASFATLEALQKDASLQPPERLEHRLKHSGKRKRGGSSGATGEPGDSSDREPGRPPGDRARKWPNKRRRKEASSRHSLEAGYICDAESDLDERVSDDDLDPSFTVSTSKASGPHGAFNGNCEAKLSVVPKVSGLERSQEQPPGPDPLLVPFPPKEPPPPPVPRPPVSPPAPLPATPSLPPPPQPQLQLRVSPFGLRTSPYGSSLDLSTGSSSRPPPKAPAPPVAQPPPSSSSSSSSSSSASSSSAQLTHRPPTPSLPLPLSTHSFPPPGLRPPPPPHHPSLFSPGPTLPPPPPLLQVPGHPGASAANALSEQDLIGQDLNSRYLNAQGGPEVVGAGGSARPLAFQFHQHNHQHQHTHQHTHQHFTPYPPGLLPPHGPHMFEKYPGKMEGLFRHNPYTAFPPAVPGLPPGLPPAVSFGSLQGAFQPKSTNPELPPRLGPVPSGLSQKGTQIPDHFRPPLRKPGKWCAMHVRVAYMILRHQEKMKGDSHKLDFRNDLLPCLPGPYGALPPGQELSHPASLFTATGAVHAAANPFTAAPGAHGPFLSPSTHIDPFGRPTSFASLAALSNGAFGGLGSPTFNSGAVFAQKESPGAPPAFASPPDPWGRLHRSPLTFPAWVRPPEAARTPGSDKERPVERREPSITKEEKDRDLPFSRPQLRVSPATPKARAGEEGPRPTKESVRVKEERKEEAAAAAAAAAAAAAAAAAAATGPQGLHLLFERPRPPPFLGPSPPDRCAGFLEPTWLAAPPRLARPPRFYEAGEELTGPGAVAAARLYGLEPAHPLLYSRLAPPPPPAAAPGTPHLLSKTPPGALLGAPPPLVPAPRPSSPPRGPGPARADR

SEQ ID NO: 32054 - protein, 210 aa, Homo sapiens
  Payload ID: 6277
  Gene Symbol: FBRS
  Gene Name: fibrosin
  ENSP ID: ENSP00000456204
  MOD_RES (1)..(1): Any amino acid
XDLIDGFAIASFATLEALQKDASLQPPERLEHRLKHSGKRKRGGSSGATGEPGDSSDREPGRPPGDRARKWPNKRRRKEVSDDDLDPSFTVSTSKASGPHGAFNGNCEAKLSVVPKVSGLERSQEQPPGPDPLLVPFPPKEPPPPPVPRPPVSPPAPLPATPSLPPPPQPQLQLRVSPFGLRTSPYGSSLDLSTGRNQGSGVPCTCVWLT

SEQ ID NO: 32055 - protein, 1045 aa, Homo sapiens
  Payload ID: 6278
  Gene Symbol: FBRSL1
  Gene Name: fibrosin-like 1
  Uniprot ID: Q9HCM7
  ENSP ID: ENSP00000396160
MEAKVRPSRRSRAQRDRGRRREAARDARAQSPSSGDEPEPSPGKENAGLRGAPPRGAAPAPRTARPPRRRRRESSSQEEEVIDGFAIASFSTLEALEKDMALKPHERKEKWERRLIKKPRESETCPPAEPSENRRPLEAGSPGQDLEPACDGARKVPLQPSKQMKVTVSKGGDRDSDDDSVLEATSSRDPLSDSSAHAVSGRGYSCDSESGPDDKASVGSEKLFAPGTDKGPALEKSEAKAGPVPKVSGLERSRELSAESFLPTASPAPHAAPCPGPPPGSRANPLVKKEPPAPHRHTPQPPPPQPRGLLPTHVPASLGAFAGHSQAAANGLHGLSRSSSAPLGLGKHVSLSPHGPGPHLSTSHLALRSQAQHQLHAAMFAAPPTLPPPPALPASSLVLPGHPADHELLRQELNTRFLVQSAERPGASLGPGALLRAEFHQHQHTHQHTHQHTHQHQHTFAPFPAGLPPTPPAAPPPFDKYAPKLDSPYFRHSSVSFFPSFPPAIPGLPTLLPHPGPFGSLQGAFQPKVSDPYRAVVKVSTCWEGPWQGRTLVPPGRPRGARDSRSLQKTWVGVAPAPLSASILSQKPGRWCAVHVQIAWQIYRHQQKIKEMQLDPHKLEVGAKLDLFGRPPAPGVFAGFHYPQDLARPLFPSTGAAHPASNPFGPSAHPGSFLPTGPLTDPFSRPSTFGGLGSLSSHAFGGLGSHALAPGGSIFAPKEGSSVHGLPSPHEAWNRLHRAPPSFPAPPPWPKSVDAERVSALTNHDREPDNGKEEQERDLLEKTRLLSRASPATPAGHPVSGLLLRAQSELGRSGAPAEREAEPRVKESRSPAKEEAAKMPARASPPHSKAAPGDVKVKEERGEDEASEPPAGGLHPAPLQLGLGRERLGAPGFAWEPFRGLELPRRAFPAAAPAPGSAALLEPPERPYRDREPHGYSPERLRGELERARAPHLPPAAPALDGALLPSLGALHFPRLSPAALHNGLLARTPPAAAALGAPPPLVTAAGPPTPPGPPRSRTTPLGGLGPGEARDYSPSRNPPEVEAR

SEQ ID NO: 32056 - protein, 825 aa, Homo sapiens
  Payload ID: 6279
  Gene Symbol: FSCB
  Gene Name: fibrous sheath CABYR binding protein
  Uniprot ID: Q5H9T9
  ENSP ID: ENSP00000344579
MVGKSQQTDVIEKKKHMAIPKSSSPKATHRIGNTSGSKGSYSAKAYESIRVSSELQQTWTKRKHGQEMTSKSLQTDTIVEEKKEVKLVEETVVPEEKSADVREAAIELPESVQDVEIPPNIPSVQLKMDRSQQTSRTGYWTMMNIPPVEKVDKEQQTYFSESEIVVISRPDSSSTKSKEDALKHKSSGKIFASEHPEFQPATNSNEEIGQKNISRTSFTQETKKGPPVLLEDELREEVTVPVVQEGSAVKKVASAEIEPPSTEKFPAKIQPPLVEEATAKAEPRPAEETHVQVQPSTEETPDAEAATAVAENSVKVQPPPAEEAPLVEFPAEIQPPSAEESPSVELLAEILPPSAEESPSEEPPAEILPPPAEKSPSVELLGEIRSPSAQKAPIEVQPLPAEGALEEAPAKVEPPTVEETLADVQPLLPEEAPREEARELQLSTAMETPAEEAPTEFQSPLPKETTAEEASAEIQLLAATEPPADETPAEARSPLSEETSAEEAHAEVQSPLAEETTAEEASAEIQLLAAIEAPADETPAEAQSPLSEETSAEEAPAEVQSPSAKGVSIEEAPLELQPPSGEETTAEEASAAIQLLAATEASAEEAPAEVQPPPAEEAPAEVQPPPAEEAPAEVQPPPAEEAPAEVQPPPAEEAPAEVQPPPAEEAPAEVQPPPAEEAPAEVQSLPAEETPIEETLAAVHSPPADDVPAEEASVDKHSPPADLLLTEEFPIGEASAEVSPPPSEQTPEDEALVENVSTEFQSPQVAGIPAVKLGSVVLEGEAKFEEVSKINSVLKDLSNTNDGQAPTLEIESVFHIELKQRPPEL

SEQ ID NO: 32057 - protein, 581 aa, Homo sapiens
  Payload ID: 6280
  Gene Symbol: FSIP1
  Gene Name: fibrous sheath interacting protein 1
  Uniprot ID: Q8NA03
  ENSP ID: ENSP00000280236
MDIIKGNLDGISKPASNSRIRPGSRSSNASLEVLSTEPGSFKVDTASNLNSGKEDHSESSNTENRRTSNDDKQESCSEKIKLAEEGSDEDLDLVQHQIISECSDEPKLKELDSQLQDAIQKMKKLDKILAKKQRREKEIKKQGLEMRIKLWEEIKSAKYSEAWQSKEEMENTKKFLSLTAVSEETVGPSHEEEDTFSSVFHTQIPPEEYEMQMQKLNKDFTCDVERNESLIKSGKKPFSNTEKIELRGKHNQDFIKRNIELAKESRNPVVMVDREKKRLVELLKDLDEKDSGLSSSEGDQSGWVVPVKGYELAVTQHQQLAEIDIKLQELSAASPTISSFSPRLENRNNQKPDRDGERNMEVTPGEKILRNTKEQRDLHNRLREIDEKLKMMKENVLESTSCLSEEQLKCLLDECILKQKSIIKLSSERKKEDIEDVTPVFPQLSRSIISKLLNESETKVQKTEVEDADMLESEECEASKGYYLTKALTGHNMSEALVTEAENMKCLQFSKDVIISDTKDYFMSKTLGIGRLKRPSFLDDPLYGISVSLSSEDQHLKLSSPENTIADEQETKDAAEECKEP

SEQ ID NO: 32058 - protein, 15 aa, Homo sapiens
  Payload ID: 6280
  Gene Symbol: FSIP1
  Gene Name: fibrous sheath interacting protein 1
  ENSP ID: ENSP00000454177
  MOD_RES (1)..(1): Any amino acid
XEQETKDAAEECKEP

SEQ ID NO: 32059 - protein, 6996 aa, Homo sapiens
  Payload ID: 6281
  Gene Symbol: FSIP2
  Gene Name: fibrous sheath interacting protein 2
  ENSP ID: ENSP00000344403
MKFQLWSSQIRPLGPIFPALRALYALARAAPQEATALLGPLPLEAWNAGGGAEVVGLWPFLVRSGQRDNGVLEKESGAGEEGAEGAVPAMELYLGACSKPAKVAVTKTVASVLAADTQQCRDGVHKTHFAGVGPAQLLDLPLGVKLPVIPGSNAVFYTTNFGEKLFRPSYGFNLTDPYCRLLENQYKSLHDPHLKAYYKRKDILKRLKKGGYITSNNKVVCTLRELNKYRQYLTSLKLDFERNYIKEQRILAKQLHNIPENNQIPQHCDVAQVQNWLLKEGTESIKDQERLMRHRYLDMISRKLEQLERTAEEQRLFLMDREERRQREHTRRKLTLRRKIEEEWKTKEMLLLTRMAEDVKREERIEEQQHRNREESDRKKQDLLEKKMAYHLQKMQDTGFNGEDIGKNTFKYRGQDGTHASPKNKKKTSEDIMLVYPAGDQNTYKETHGHTANAAHQRQNSSNNFTKKNSASVVYQADVQDNGINQKRDGMVSKNSSIFDDRGGINISGQGSIISAQVSPTRNFSRVSQAFLDPSKEEKETNADWDGRPTKRSSYLCESGPQAHATDPGIFSSPVYTNMQQNLLQNCLQEKVTSEELNIIIQNVMTWVVATVTSILYPAITKYEKRLQNNTYPVSDDSILSSDSSSFCSTCSEDFTYRSYTSATTKTFQAEPCAFVVDTSVRRPTTPIKPPPAHVEKTVVGKTCHIKGQSIISKHKYNKTNLLYSYPKLRSCKSDSHLLASFETGTKKSKDATTETDSLGSSLHCDKTAKAMDEMKNLKNVFVNFKCYLKGETEVILESILREIMSDLTQAIPSLSSVTAEVFVEQCEREKEILLSNAHIPSVASEIVENMLEKLESAVEKKCVEMFSQDLSVDIKPSLAASDELLTSSNGKPLKNSMPHTLDPMCDIAEDMVHAILEKLMTLVSFKQNEFLHLKDTNKLSCQQHKTDPICMFLQRAGKNKSSLESDEASLIVNEEVQNLISNIFSQSSLVAYIEEAINAILGYIQTELNNERIIASEETVVLLQLLEDILFQLHQEPVNESFQKSRQPRISSPSDTKEKYRLTGTRLSNSPRSGRPFPPINVPGMVLYSDDENEEIDNIVKNVLDSTFKDEKVKSQEQIPNHWFTKGNTCFECKRNIKPPTKPGSRSKAAFHDWELKTEPPSTNHEDILKKKLSSNKDISTFSQDQKHQIEKASENIVTSILKEMLKDISSVPFGHLDSKTGSEASVLVSEKPQGLSHQEWIDQMFSVSEISTVAQEITDSVLNILHKASNYISNTTKSSISSSVHQISLHNSDTEHIVKEAPNKYPLKTWFDSEKKMKYLSLFDVDPEKPPWLKSGKSEPKPVDDINDKIIRTIFKRLKSFICPKLHMGFKSSLRSQLSKYTAKIVNIVLCAIQNELELHKENLNLREIDHTKSLTDKGFFANTDKKLESLVTSIDDDILASPLLTCIYDMLLSSENAHQRSISLSSRKPKSATDSVDVQSILPNRQDKKSFHKYLATPCTHHSVNGGNHIKENAKLQVLERIGETLHEMLSKLLGTHLHSQLSCSQQSREMTNKNQKMAAALQSNIQLISKAILDYILAKLCGVDMDTSFASCGLKAISESLDIDNPSFASIIEKMAKSTKIISSIVSRRVQEDNKEETKSKAKPVAPVSSKTPSTKEMHPNKLKAVASDILNMVFAKLEGFANGHLEILGAINDGNKKSNKIGWEYESTNISRDTHEASFLSALYMHAKKVSSAILKVIQTELNVTSSDLKTSVENPPPETQILKYVVKLILDAVSSDMFNEMESEGGGIETYRYRPTYGSLPGGAESDSFLEDDAYTAKKIIDERSPQREEVKTRSLKQWALEKTLNKIEVKLKEPHISPIAPIIRNILNEIFQSTLINQLNVLSLSHSNFNGMPHNVDEPTPQTSVQFMDKMMDPLLSEADITIVTDNIVRTVFHKLYSAAMTERNVRENRYKTITFSANVSSHEHTYKGKSSVTALDENPCTFQSRFSVADKETKVNLAEDIVQAILTNLETFATSKVKSLFYSQVNFTVPVALPIQQDHSTLSKALSAKDSYSDEQFSCCSVDHTKSGKTNLCQLSLSKLNTYALQVARRNLQGIKQELDKERENPFLTHDIGISESIASQIVNALLDIISRKGKCDKNSSDKEIDLDQQKGVIEKLLNETKYRKVLQLQIQDTIEGILCDIYEKTLFQNNLSFATPTLKCSIADKHSEENSEMFMEGANKIIPKLSVPKSDVILISNDIVNIVLHNLSSAATLVINAKNPTSARLPLTFCDTFPKIDCQQPLKGSKTERKTERFSYSRNQKSAYADDNQITVVEKEDTQKSATDSCEENANFITKTIFKRLESFATERIDSLITLAFQSKEKSFVIPELENCKQNDSIFYDSSQVESDVNVLKISATETILSQELTDFTFVGRREKLGSTIHLSQARLKTYADVIASAILKLIKNDLDLEIQKIYPYQNNILFQENIIVSEIVDSMLKMLDDKRSVKEICFNSKENSNFSQLALSNEILLGHKEKERSTKQSLFTKYPLEQNQMILENKRQIIVLEEIFMRNGESKNKEKGELLIAVEELLNKLYQRVREVTGHLPPLNETANFISNSKIKTSDTTQKNSFQSHINSVANDIVESVLGKMYLVVVTSLYENNKSRTEVEISDHNDSLLMKPLRFRETKQAGKISNSPRYAISQAYSYVDSQNISVMENTLLPYLPLQVKKDLIQMVLNKITNFVSLPLKVSPKDNPKPCFKAHLKTRSKITTLPKFTKKTHLGLSAAKAKSKTKLGPGEKTLKDSRSKTAIGLSHIMSAGDAKNLLDTKLPTSELKIYAKDIIINILETIVKEFGKVKQTKALPSDQIIAAGKIVNTVLQELYVTNNCNLAYPMKSSHLRLSQGNIGTGSLPKQQACFYLENVSSQLEHIFPREGIFKKLFDKWQTESNDKENEKCKLLMIAENVLTEISIKAKELEYSLSLLNLPPLENCESRFYNHFKGASTRAEDTKAQINMFGREIVEMLLEKLQLCFLSQIPTPDSEETLSNSKEHITAKSKYGFPNKHSLSSLPIYNTKTKDQISVGSSNQIVQEIVETVLNMLESFVDLQFKHISKYEFSEIVKMPIENLSSIQQKLLNKKMLPKLQPLKMFSDKSESNTINFKENIQNILLRVHSFHSQLLTYAVNIISDMLAVIKNKLDNEISQMEPSSISILKENIVASEIIGTLMDQCTYFNESLIQNLSRESLFQGAENAYTVNQVELATNMKMFTSKLKEGSLGINPSQVSKTGFVFCSDEDMKEKYRVSSDLPTSVRSSVEDTVKNSEPTKRPDSETMPSCSTRNKVQDHRPRESNFGSFDQTMKGNSYLPEGSFLQKLLRKASDSTEAALKQVLSFIEMGKGENLRVFHYENLKPVVEPNQIQTTISPLKICLAAENIVNTVLSSCGFPSQPHTNENREIMKPFFISKQSSLSEVSGGQKDNEKSLLRMQDKKINYIPEEENENLEASREDSSFLQKLKKKEYPKIETVKEVEAFTFADHEMGSNEVHLIARHVTTSVVTYLKNFETTVFSEEKMSVSTWSRKKYESKQFLRNIYDDSSIYQCCEHLTESVLYHLTSSISDGTKKGREKEKAWEIQEATFSKIISIHSQVFESRSISIGELALCISEIIIKILFNNKIIQADIAQKMVAIPTKYTYCPGIVSGGFDDLFQDLLVGVIHVLSKEIEVDYHFESNVRNKSFSMHRNNSVPLCNKINRQASPRDWQFSTQQIGQLFQKNKLSYLACKLNSLVGNLKTSESKEVVNKVFNIVSDLFSPDECLDTGMDSGKIQRTYFYSSNNEQPNSILTNNLQLSSKSVFLLNVVCEKLIRILLEECTSTAFPDKGSVSEETSAEECQLLKMLQSVEDGKSDYRKGGMDCECLQVDYMSDLLENVAEIDQDLLTSDSMLTIISHSLVKSLMDKLSHSIQQAPESLPFANKHLNYRTREIQSSFIKARKSELIELGQSKSSLELRSYDSNSLTVSLNNPSVVSSKIQAPFNKHCAVKSSSVSPFERQRTKEMDKVAIHNKLHQEGIYAGVYSATFLEGIISELFFNLSMSLWGKNKNITVSWLNEMNTLFVNNVVNEFNNAQVTVLRNAEERLCFPPVHTETVSKIVDSVYYDVLQQYELKVACGNNPVYDNASIAEQITNGILLEILDYKLPSCFKEHLIPHSYYPLKPEIILQKLQSNLTEFTSLPRSSSDYSTMLSHSFLEDVIRRLLSQLIPPPITCSSLGKKYLMSSDFNEMSTCIINKVMSAISKHKIWFTIYDNQYLYTGKNLQKMVDSVYCNILQMSDSLVSIQKSIVSRSPIMIDQIASFIIQEIIENHLQPFLSGEVLCHPRTPLDPVSTIVTQVLSEVIESHRPQKQSPLDIHLDSFVREIVARLLSKIFSPKHNTEIELKNMTQRIVNSINRHFNKAKIHILYDDKEQAFFSFNTDIVDELATSVYRNALKQHGLDLAVDKESEDSGIFVENITNLIVAAISDYLLHPLFSGDFSASTYSNSVAENIVQDILSNISKSTEPSQSVPLYNTLLPYTFLEDMIRVLLSKLFSSASSLVLNRDTQKDISRVNFNDIASNLVSDIRMKVSQHEIRFSKEEEETKFIYSEDDIQHLVDSVFANVVQTSGSQESAVQNITSSNDILIDRIAGFIIKHICQKHLQPFVSGKSLSSSDTYFDDERRQLFYTSVYSSTFLEDVISGVLRKIFHRVVGIVQTKSIRDSEDELFEKAEELIHLITGEFSKAQVSIIDNTEERLCLPPVERDVVKTIVDMVYSKVLQEYEMEVVPNKDFLNDTKTLAARITNIILAEIFDFQIHPDLIANLPFKSHSKLSANVLIQRVQYDISKSRFQRQASTMYTTMLSHSHLEKIVTQLTSQISPLNTSAEQSDTTKSDLSNTVIKLINEIMSIISKHEICIIKYGNKKQSMISAKDIQSMVDSIYADLSHSNIYQSITKDKKSISDIPVSKIASFIIKEIFNHHIQSFLSEDKTLLLAAVDQTYKLKAIDPKQRELSFIVNSSVFLEEVISELLCKILYAFSHNMLVTENPDRVKLKLTRIVTTLVNSIVLEFTTSEILVADNFDKNLCFSERYKEMVQKIVNSVYGKVLDQYKSLIQIHRVIQSDTICFGRKIYYLLLEEIYDYQVQSLVSGELESSSYSYPQADNIIRNVLNIITKDSHALPPYITVLPHSLLEDMVYRLLGHVFPSTHTENELKEKKFPPDDEFVEAASKLTDEIIKEISEHEIRLSMAEDNAESMQLEPIENLVDSICNNILKTSEFQAEVQKDADKKGCSFLSKLAGFIMKEIMYHHLQPFLHGEESSFSDLSDYDHVSELAKSGKEKTQPSLYSATFLEDIIIDLVHKFCSLLIITEDSKKNEMAELDIMGLALKLANSLIREFKKSDIKVLPNAEKMFSFPPIDKETVDKISNFVYEQFIEKCTSHDIQKGDESNIAIGMIAALTQKAISAFRIQPLFSGDWSSTFFSFLNPDNITQRVQHLPQNTFTQISRCAKENQLSLPDQSYKDTSSTPDCKNMMSTLEINRGTMNRKKSFKTKDTSVKKGDIQNPVLSSINAIMKSGMINLTSGLATGVTNKKEVDENKVGICTQKHSENVSKVTSTTTVKSKDTQEPNLSETFNNNEIEKKRNLIPTDKKGKDDEIYTHFSLIIDDTEYEKEVLGSDSEIGYKKKIDNARESSFKKDDKLFQLSSLKSKRNLGTTTDTLEIRIRTSSNEGRRDSPTQTCRDEEHHSDYEHVQNVIENIFEDVLELSSSPEPAYYSKLSYDQSPPGDNVLNVIQEISRDSAQSVTTKKVSSSTNKNISAKEKEEEEREKEKVREEIKSEPSKPDDPQNQRESKPGIFPAKFLEDVITEMVKQLIFSSIPETQIQDRCQNVSDKQNQAKLYDTAMKLINSLLKEFSDAQIKVFRPDKGNQFPGGKVSSVPKVPPRYKEPTTDEAPSSIKIKSADKMPPMHKMMRKPSSDKIPSIDKTLVNKVVHSSVCNILNDYGSQDSIWKNINSNGENLARRLTSAVINEIFQRQVNLIFCDEVSVSACLPLESKDVVKKVQKLAQTASKECQTSSPYTIILPHKFLENVISALFSKIFSTISSTKTKEPEDNLSTELNFLQMKLVSAVATEISQDKYMTIQYVETLQSDDDEIIQLVVQSVYNNLLPQFGSQEIIQNCVTSGCKILSENIVDLVLREVASNQLQSYFCGELTPHQCVEVENIVEKILKDVFQTTDVPLPKPSHADKLSYNIIEEIAVKFLSKLLSIFPKVHKERTKSLETDMQKITSKVLNSVQEFISKSKIKLVPPTKESPTVPVADNATIENIVNSIYTSVLKHSGSYTSVFKDLMGKSNVLSDTIGFLMVNAISNSEFQPQVEEEVSNSELVLEAVKIMEKVIKIIDELKSKEKSSSRKGLTLDAKLLEEVLALFLAKLIRLPSSSSKDEKNLSKTELNKIASQLSKLVTAEISRSSISLIASDPEEHCLNPENTERIYQVVDSVYSNILQQSGTNKEFYYDIKDTNTAFPKKVASLIIDGVSSFPLDTINSTISNADLSGELDVNRIVQKAQEHAFNVIPELEQEKLDQNLSEEESPIKIVPHVGKKPVKIDPKIISEHLAVISIKTQPLEKLKQECLKRTGHSIAELRRASISGRNYSLGSPDLEKRKTERRTSLDKTGRLDVKPLEAVARNSFQNIRKPDITKVELLKDVQSKNDLIVRLVAHDIDQVYLENYIKEERDSDEDEVVLTQTFAKEEGIKVFEDQVKEVKKPIQSKLSPKSTLSTSSLKKFLSLSKCCQTTASANIESTEAISNQVIESKETHVKRAVAELDMATPKTMPETASSSWEEKPQCKKEEKNLVTEPTHYFIHRIMSSSSYNQEDLISSTGEAEDCHSDPSAKILEESSQEQKPEHGNSVKFITIFERSKDVLGSANPSKEVISETPKPDVSKQGSKMLTKMSSTLSKVFSQCNTNISRSSSPAHQDEH

SEQ ID NO: 32060 - protein, 973 aa, Homo sapiens
  Payload ID: 6281
  Gene Symbol: FSIP2
  Gene Name: fibrous sheath interacting protein 2
  ENSP ID: ENSP00000390251
  MOD_RES (1)..(1): Any amino acid
XYQRVREVTGHLPPLNETANFISNSKIKTSDTTQKNSFQSHINSVANDIVESVLGKMYLVVVTSLYENNKSRTEVEISDHNDSLLMKPLRFRETKQAGKISNSPRYAISQAYSYVDSQNISVMENTLLPYLPLQVKKDLIQMVLNKITNFVSLPLKVSPKDNPKPCFKAHLKTRSKITTLPKFTKKTHLGLSAAKAKSKTKLGPGEKTLKDSRSKTAIGLSHIMSAGDAKNLLDTKLPTSELKIYAKDIIINILETIVKEFGKVKQTKALPSDQIIAAGKIVNTVLQELYVTNNCNLAYPMKSSHLRLSQGNIGTGSLPKQQACFYLENVSSQLEHIFPREGIFKKLFDKWQTESNDKENEKCKLLMIAENVLTEISIKAKELEYSLSLLNLPPLENCESRFYNHFKGASTRAEDTKAQINMFGREIVEMLLEKLQLCFLSQIPTPDSEETLSNSKEHITAKSKYGFPNKHSLSSLPIYNTKTKDQISVGSSNQIVQEIVETVLNMLESFVDLQFKHISKYEFSEIVKMPIENLSSIQQKLLNKKMLPKLQPLKMFSDKSESNTINFKENIQNILLRVHSFHSQLLTYAVNIISDMLAVIKNKLDNEISQMEPSSISILKENIVASEIIGTLMDQCTYFNESLIQNLSRESLFQGAENAYTVNQVELATNMKMFTSKLKEGSLGINPSQVSKTGFVFCSDEDMKEKYRVSSDLPTSVRSSVEDTVKNSEPTKRPDSETMPSCSTRNKVQDHRPRESNFGSFDQTMKGNSYLPEGSFLQKLLRKASDSTEAALKQVLSFIEMGKGENLRVFHYENLKPVVEPNQIQTTISPLKICLAAENIVNTVLSSCGFPSQPHTNENREIMKPFFISKQSSLSEVSGGQKDNEKSLLRMQDKKINYIPEEENENLEASREDSSFLQKLKKKEYPKIETVKEVEAFTFADHEMGSNEVHLIARHVTTSVVTYLKNFETTGRC

SEQ ID NO: 32061 - protein, 136 aa, Homo sapiens
  Payload ID: 6281
  Gene Symbol: FSIP2
  Gene Name: fibrous sheath interacting protein 2
  ENSP ID: ENSP00000395888
KDQERLMRHRYLDMISRKLEQLERTAEEQRLFLMDREERRQREHTRRKLTLRRKIEEEWKTKEMLLLTRMAEDVKREERIEEQQHRNREESDRKKQDLLEKKMAYHLQKMQDTGFNGEDIGKNTFKYRGQDGTHGE

SEQ ID NO: 32062 - protein, 6907 aa, Homo sapiens
  Payload ID: 6281
  Gene Symbol: FSIP2
  Gene Name: fibrous sheath interacting protein 2
  Uniprot ID: Q5CZC0
  ENSP ID: ENSP00000401306
MELYLGACSKPAKVAVTKTVASVLAADTQQCRDGVHKTHFAGVGPAQLLDLPLGVKLPVIPGSNAVFYTTNFGEKLFRPSYGFNLTDPYCRLLENQYKSLHDPHLKAYYKRKDILKRLKKGGYITSNNKVVCTLRELNKYRQYLTSLKLDFERNYIKEQRILAKQLHNIPENNQIPQHCDVAQVQNWLLKEGTESIKDQERLMRHRYLDMISRKLEQLERTAEEQRLFLMDREERRQREHTRRKLTLRRKIEEEWKTKEMLLLTRMAEDVKREERIEEQQHRNREESDRKKQDLLEKKMAYHLQKMQDTGFNGEDIGKNTFKYRGQDGTHASPKNKKKTSEDIMLVYPAGDQNTYKETHGHTANAAHQRQNSSNNFTKKNSASVVYQADVQDNGINQKRDGMVSKNSSIFDDRGGINISGQGSIISAQVSPTRNFSRVSQAFLDPSKEEKETNADWDGRPTKRSSYLCESGPQAHATDPGIFSSPVYTNMQQNLLQNCLQEKVTSEELNIIIQNVMTWVVATVTSILYPAITKYEKRLQNNTYPVSDDSILSSDSSSFCSTCSEDFTYRSYTSATTKTFQAEPCAFVVDTSVRRPTTPIKPPPAHVEKTVVGKTCHIKGQSIISKHKYNKTNLLYSYPKLRSCKSDSHLLASFETGTKKSKDATTETDSLGSSLHCDKTAKAMDEMKNLKNVFVNFKCYLKGETEVILESILREIMSDLTQAIPSLSSVTAEVFVEQCEREKEILLSNAHIPSVASEIVENMLEKLESAVEKKCVEMFSQDLSVDIKPSLAASDELLTSSNGKPLKNSMPHTLDPMCDIAEDMVHAILEKLMTLVSFKQNEFLHLKDTNKLSCQQHKTDPICMFLQRAGKNKSSLESDEASLIVNEEVQNLISNIFSQSSLVAYIEEAINAILGYIQTELNNERIIASEETVVLLQLLEDILFQLHQEPVNESFQKSRQPRISSPSDTKEKYRLTGTRLSNSPRSGRPFPPINVPGMVLYSDDENEEIDNIVKNVLDSTFKDEKVKSQEQIPNHWFTKGNTCFECKRNIKPPTKPGSRSKAAFHDWELKTEPPSTNHEDILKKKLSSNKDISTFSQDQKHQIEKASENIVTSILKEMLKDISSVPFGHLDSKTGSEASVLVSEKPQGLSHQEWIDQMFSVSEISTVAQEITDSVLNILHKASNYISNTTKSSISSSVHQISLHNSDTEHIVKEAPNKYPLKTWFDSEKKMKYLSLFDVDPEKPPWLKSGKSEPKPVDDINDKIIRTIFKRLKSFICPKLHMGFKSSLRSQLSKYTAKIVNIVLCAIQNELELHKENLNLREIDHTKSLTDKGFFANTDKKLESLVTSIDDDILASPLLTCIYDMLLSSENAHQRSISLSSRKPKSATDSVDVQSILPNRQDKKSFHKYLATPCTHHSVNGGNHIKENAKLQVLERIGETLHEMLSKLLGTHLHSQLSCSQQSREMTNKNQKMAAALQSNIQLISKAILDYILAKLCGVDMDTSFASCGLKAISESLDIDNPSFASIIEKMAKSTKIISSIVSRRVQEDNKEETKSKAKPVAPVSSKTPSTKEMHPNKLKAVASDILNMVFAKLEGFANGHLEILGAINDGNKKSNKIGWEYESTNISRDTHEASFLSALYMHAKKVSSAILKVIQTELNVTSSDLKTSVENPPPETQILKYVVKLILDAVSSDMFNEMESEGGGIETYRYRPTYGSLPGGAESDSFLEDDAYTAKKIIDERSPQREEVKTRSLKQWALEKTLNKIEVKLKEPHISPIAPIIRNILNEIFQSTLINQLNVLSLSHSNFNGMPHNVDEPTPQTSVQFMDKMMDPLLSEADITIVTDNIVRTVFHKLYSAAMTERNVRENRYKTITFSANVSSHEHTYKGKSSVTALDENPCTFQSRFSVADKETKVNLAEDIVQAILTNLETFATSKVKSLFYSQVNFTVPVALPIQQDHSTLSKALSAKDSYSDEQFSCCSVDHTKSGKTNLCQLSLSKLNTYALQVARRNLQGIKQELDKERENPFLTHDIGISESIASQIVNALLDIISRKGKCDKNSSDKEIDLDQQKGVIEKLLNETKYRKVLQLQIQDTIEGILCDIYEKTLFQNNLSFATPTLKCSIADKHSEENSEMFMEGANKIIPKLSVPKSDVILISNDIVNIVLHNLSSAATLVINAKNPTSARLPLTFCDTFPKIDCQQPLKGSKTERKTERFSYSRNQKSAYADDNQITVVEKEDTQKSATDSCEENANFITKTIFKRLESFATERIDSLITLAFQSKEKSFVIPELENCKQNDSIFYDSSQVESDVNVLKISATETILSQELTDFTFVGRREKLGSTIHLSQARLKTYADVIASAILKLIKNDLDLEIQKIYPYQNNILFQENIIVSEIVDSMLKMLDDKRSVKEICFNSKENSNFSQLALSNEILLGHKEKERSTKQSLFTKYPLEQNQMILENKRQIIVLEEIFMRNGESKNKEKGELLIAVEELLNKLYQRVREVTGHLPPLNETANFISNSKIKTSDTTQKNSFQSHINSVANDIVESVLGKMYLVVVTSLYENNKSRTEVEISDHNDSLLMKPLRFRETKQAGKISNSPRYAISQAYSYVDSQNISVMENTLLPYLPLQVKKDLIQMVLNKITNFVSLPLKVSPKDNPKPCFKAHLKTRSKITTLPKFTKKTHLGLSAAKAKSKTKLGPGEKTLKDSRSKTAIGLSHIMSAGDAKNLLDTKLPTSELKIYAKDIIINILETIVKEFGKVKQTKALPSDQIIAAGKIVNTVLQELYVTNNCNLAYPMKSSHLRLSQGNIGTGSLPKQQACFYLENVSSQLEHIFPREGIFKKLFDKWQTESNDKENEKCKLLMIAENVLTEISIKAKELEYSLSLLNLPPLENCESRFYNHFKGASTRAEDTKAQINMFGREIVEMLLEKLQLCFLSQIPTPDSEETLSNSKEHITAKSKYGFPNKHSLSSLPIYNTKTKDQISVGSSNQIVQEIVETVLNMLESFVDLQFKHISKYEFSEIVKMPIENLSSIQQKLLNKKMLPKLQPLKMFSDKSESNTINFKENIQNILLRVHSFHSQLLTYAVNIISDMLAVIKNKLDNEISQMEPSSISILKENIVASEIIGTLMDQCTYFNESLIQNLSRESLFQGAENAYTVNQVELATNMKMFTSKLKEGSLGINPSQVSKTGFVFCSDEDMKEKYRVSSDLPTSVRSSVEDTVKNSEPTKRPDSETMPSCSTRNKVQDHRPRESNFGSFDQTMKGNSYLPEGSFLQKLLRKASDSTEAALKQVLSFIEMGKGENLRVFHYENLKPVVEPNQIQTTISPLKICLAAENIVNTVLSSCGFPSQPHTNENREIMKPFFISKQSSLSEVSGGQKDNEKSLLRMQDKKINYIPEEENENLEASREDSSFLQKLKKKEYPKIETVKEVEAFTFADHEMGSNEVHLIARHVTTSVVTYLKNFETTVFSEEKMSVSTWSRKKYESKQFLRNIYDDSSIYQCCEHLTESVLYHLTSSISDGTKKGREKEKAWEIQEATFSKIISIHSQVFESRSISIGELALCISEIIIKILFNNKIIQADIAQKMVAIPTKYTYCPGIVSGGFDDLFQDLLVGVIHVLSKEIEVDYHFESNVRNKSFSMHRNNSVPLCNKINRQASPRDWQFSTQQIGQLFQKNKLSYLACKLNSLVGNLKTSESKEVVNKVFNIVSDLFSPDECLDTGMDSGKIQRTYFYSSNNEQPNSILTNNLQLSSKSVFLLNVVCEKLIRILLEECTSTAFPDKGSVSEETSAEECQLLKMLQSVEDGKSDYRKGGMDCECLQVDYMSDLLENVAEIDQDLLTSDSMLTIISHSLVKSLMDKLSHSIQQAPESLPFANKHLNYRTREIQSSFIKARKSELIELGQSKSSLELRSYDSNSLTVSLNNPSVVSSKIQAPFNKHCAVKSSSVSPFERQRTKEMDKVAIHNKLHQEGIYAGVYSATFLEGIISELFFNLSMSLWGKNKNITVSWLNEMNTLFVNNVVNEFNNAQVTVLRNAEERLCFPPVHTETVSKIVDSVYYDVLQQYELKVACGNNPVYDNASIAEQITNGILLEILDYKLPSCFKEHLIPHSYYPLKPEIILQKLQSNLTEFTSLPRSSSDYSTMLSHSFLEDVIRRLLSQLIPPPITCSSLGKKYLMSSDFNEMSTCIINKVMSAISKHKIWFTIYDNQYLYTGKNLQKMVDSVYCNILQMSDSLVSIQKSIVSRSPIMIDQIASFIIQEIIENHLQPFLSGEVLCHPRTPLDPVSTIVTQVLSEVIESHRPQKQSPLDIHLDSFVREIVARLLSKIFSPKHNTEIELKNMTQRIVNSINRHFNKAKIHILYDDKEQAFFSFNTDIVDELATSVYRNALKQHGLDLAVDKESEDSGIFVENITNLIVAAISDYLLHPLFSGDFSASTYSNSVAENIVQDILSNISKSTEPSQSVPLYNTLLPYTFLEDMIRVLLSKLFSSASSLVLNRDTQKDISRVNFNDIASNLVSDIRMKVSQHEIRFSKEEEETKFIYSEDDIQHLVDSVFANVVQTSGSQESAVQNITSSNDILIDRIAGFIIKHICQKHLQPFVSGKSLSSSDTYFDDERRQLFYTSVYSSTFLEDVISGVLRKIFHRVVGIVQTKSIRDSEDELFEKAEELIHLITGEFSKAQVSIIDNTEERLCLPPVERDVVKTIVDMVYSKVLQEYEMEVVPNKDFLNDTKTLAARITNIILAEIFDFQIHPDLIANLPFKSHSKLSANVLIQRVQYDISKSRFQRQASTMYTTMLSHSHLEKIVTQLTSQISPLNTSAEQSDTTKSDLSNTVIKLINEIMSIISKHEICIIKYGNKKQSMISAKDIQSMVDSIYADLSHSNIYQSITKDKKSISDIPVSKIASFIIKEIFNHHIQSFLSEDKTLLLAAVDQTYKLKAIDPKQRELSFIVNSSVFLEEVISELLCKILYAFSHNMLVTENPDRVKLKLTRIVTTLVNSIVLEFTTSEILVADNFDKNLCFSERYKEMVQKIVNSVYGKVLDQYKSLIQIHRVIQSDTICFGRKIYYLLLEEIYDYQVQSLVSGELESSSYSYPQADNIIRNVLNIITKDSHALPPYITVLPHSLLEDMVYRLLGHVFPSTHTENELKEKKFPPDDEFVEAASKLTDEIIKEISEHEIRLSMAEDNAESMQLEPIENLVDSICNNILKTSEFQAEVQKDADKKGCSFLSKLAGFIMKEIMYHHLQPFLHGEESSFSDLSDYDHVSELAKSGKEKTQPSLYSATFLEDIIIDLVHKFCSLLIITEDSKKNEMAELDIMGLALKLANSLIREFKKSDIKVLPNAEKMFSFPPIDKETVDKISNFVYEQFIEKCTSHDIQKGDESNIAIGMIAALTQKAISAFRIQPLFSGDWSSTFFSFLNPDNITQRVQHLPQNTFTQISRCAKENQLSLPDQSYKDTSSTPDCKNMMSTLEINRGTMNRKKSFKTKDTSVKKGDIQNPVLSSINAIMKSGMINLTSGLATGVTNKKEVDENKVGICTQKHSENVSKVTSTTTVKSKDTQEPNLSETFNNNEIEKKRNLIPTDKKGKDDEIYTHFSLIIDDTEYEKEVLGSDSEIGYKKKIDNARESSFKKDDKLFQLSSLKSKRNLGTTTDTLEIRIRTSSNEGRRDSPTQTCRDEEHHSDYEHVQNVIENIFEDVLELSSSPEPAYYSKLSYDQSPPGDNVLNVIQEISRDSAQSVTTKKVSSSTNKNISAKEKEEEEREKEKVREEIKSEPSKPDDPQNQRESKPGIFPAKFLEDVITEMVKQLIFSSIPETQIQDRCQNVSDKQNQAKLYDTAMKLINSLLKEFSDAQIKVFRPDKGNQFPGGKVSSVPKVPPRYKEPTTDEAPSSIKIKSADKMPPMHKMMRKPSSDKIPSIDKTLVNKVVHSSVCNILNDYGSQDSIWKNINSNGENLARRLTSAVINEIFQRQVNLIFCDEVSVSACLPLESKDVVKKVQKLAQTASKECQTSSPYTIILPHKFLENVISALFSKIFSTISSTKTKEPEDNLSTELNFLQMKLVSAVATEISQDKYMTIQYVETLQSDDDEIIQLVVQSVYNNLLPQFGSQEIIQNCVTSGCKILSENIVDLVLREVASNQLQSYFCGELTPHQCVEVENIVEKILKDVFQTTDVPLPKPSHADKLSYNIIEEIAVKFLSKLLSIFPKVHKERTKSLETDMQKITSKVLNSVQEFISKSKIKLVPPTKESPTVPVADNATIENIVNSIYTSVLKHSGSYTSVFKDLMGKSNVLSDTIGFLMVNAISNSEFQPQVEEEVSNSELVLEAVKIMEKVIKIIDELKSKEKSSSRKGLTLDAKLLEEVLALFLAKLIRLPSSSSKDEKNLSKTELNKIASQLSKLVTAEISRSSISLIASDPEEHCLNPENTERIYQVVDSVYSNILQQSGTNKEFYYDIKDTNTAFPKKVASLIIDGVSSFPLDTINSTISNADLSGELDVNRIVQKAQEHAFNVIPELEQEKLDQNLSEEESPIKIVPHVGKKPVKIDPKIISEHLAVISIKTQPLEKLKQECLKRTGHSIAELRRASISGRNYSLGSPDLEKRKTERRTSLDKTGRLDVKPLEAVARNSFQNIRKPDITKVELLKDVQSKNDLIVRLVAHDIDQVYLENYIKEERDSDEDEVVLTQTFAKEEGIKVFEDQVKEVKKPIQSKLSPKSTLSTSSLKKFLSLSKCCQTTASANIESTEAISNQVIESKETHVKRAVAELDMATPKTMPETASSSWEEKPQCKKEEKNLVTEPTHYFIHRIMSSSSYNQEDLISSTGEAEDCHSDPSAKILEESSQEQKPEHGNSVKFITIFERSKDVLGSANPSKEVISETPKPDVSKQGSKMLTKMSSTLSKVFSQCNTNISRSSSPAHQDEH

SEQ ID NO: 32063 - protein, 646 aa, Homo sapiens
  Payload ID: 6281
  Gene Symbol: FSIP2
  Gene Name: fibrous sheath interacting protein 2
  ENSP ID: ENSP00000478995
MVKQLIFSSIPETQIQDRCQNVSDKQNQAKLYDTAMKLINSLLKEFSDAQIKVFRPDKGNQFPGGKVSSVPKVPPRYKEPTTDEAPSSIKIKSADKMPPMHKMMRKPSSDKIPSIDKTLVNKVVHSSVCNILNDYGSQDSIWKNINSNGENLARRLTSAVINEIFQRQVNLIFCDEVSVSACLPLESKDVVKKVQKLAQTASKECQTSSPYTIILPHKFLENVISALFSKIFSTISSTKTKEPEDNLSTELNFLQMKLVSAVATEISQDKYMTIQYVETLQSDDDEIIQLVVQSVYNNLLPQFGSQEIIQNCVTSGCKILSENIVDLVLPKPSHADKLSYNIIEEIAVKFLSKLLSIFPKVHKERTKSLETDMQKITSKVLNSVQEFISKSKIKLVPPTKESPTVPVADNATIENIVNSIYTSVLKHSGSYTSVFKDLMGKSNVLSDTIGFLMVNAISNSEFQPQVEEEVSNSELVLEAVKIMEKVIKIIDELKSKEKSSSRKGLTLDAKLLEEVLALFLAKLIRLPSSSSKDEKNLSKTELNKIASQLSKLVTAEISRSSISLIASDPEEHCLNPENTERIYQVVDSVYSNILQQSGTNKEFYYDIKDTNTAFPKKVASLIIDGVSSFPLIQLTQQFQMLISLES

SEQ ID NO: 32064 - protein, 683 aa, Homo sapiens
  Payload ID: 6282
  Gene Symbol: FBLN1
  Gene Name: fibulin 1
  Uniprot ID: P23142
  ENSP ID: ENSP00000262722
MERAAPSRRVPLPLLLLGGLALLAAGVDADVLLEACCADGHRMATHQKDCSLPYATESKECRMVQEQCCHSQLEELHCATGISLANEQDRCATPHGDNASLEATFVKRCCHCCLLGRAAQAQGQSCEYSLMVGYQCGQVFQACCVKSQETGDLDVGGLQETDKIIEVEEEQEDPYLNDRCRGGGPCKQQCRDTGDEVVCSCFVGYQLLSDGVSCEDVNECITGSHSCRLGESCINTVGSFRCQRDSSCGTGYELTEDNSCKDIDECESGIHNCLPDFICQNTLGSFRCRPKLQCKSGFIQDALGNCIDINECLSISAPCPIGHTCINTEGSYTCQKNVPNCGRGYHLNEEGTRCVDVDECAPPAEPCGKGHRCVNSPGSFRCECKTGYYFDGISRMCVDVNECQRYPGRLCGHKCENTLGSYLCSCSVGFRLSVDGRSCEDINECSSSPCSQECANVYGSYQCYCRRGYQLSDVDGVTCEDIDECALPTGGHICSYRCINIPGSFQCSCPSSGYRLAPNGRNCQDIDECVTGIHNCSINETCFNIQGGFRCLAFECPENYRRSAATRCERLPCHENRECSKLPLRITYYHLSFPTNIQAPAVVFRMGPSSAVPGDSMQLAITGGNEEGFFTTRKVSPHSGVVALTKPVPEPRDLLLTVKMDLSRHGTVSSFVAKLFIFVSAEL

SEQ ID NO: 32065 - protein, 703 aa, Homo sapiens
  Payload ID: 6282
  Gene Symbol: FBLN1
  Gene Name: fibulin 1
  Uniprot ID: P23142
  ENSP ID: ENSP00000331544
MERAAPSRRVPLPLLLLGGLALLAAGVDADVLLEACCADGHRMATHQKDCSLPYATESKECRMVQEQCCHSQLEELHCATGISLANEQDRCATPHGDNASLEATFVKRCCHCCLLGRAAQAQGQSCEYSLMVGYQCGQVFQACCVKSQETGDLDVGGLQETDKIIEVEEEQEDPYLNDRCRGGGPCKQQCRDTGDEVVCSCFVGYQLLSDGVSCEDVNECITGSHSCRLGESCINTVGSFRCQRDSSCGTGYELTEDNSCKDIDECESGIHNCLPDFICQNTLGSFRCRPKLQCKSGFIQDALGNCIDINECLSISAPCPIGHTCINTEGSYTCQKNVPNCGRGYHLNEEGTRCVDVDECAPPAEPCGKGHRCVNSPGSFRCECKTGYYFDGISRMCVDVNECQRYPGRLCGHKCENTLGSYLCSCSVGFRLSVDGRSCEDINECSSSPCSQECANVYGSYQCYCRRGYQLSDVDGVTCEDIDECALPTGGHICSYRCINIPGSFQCSCPSSGYRLAPNGRNCQDIDECVTGIHNCSINETCFNIQGGFRCLAFECPENYRRSAATLQQEKTDTVRCIKSCRPNDVTCVFDPVHTISHTVISLPTFREFTRPEEIIFLRAITPPHPASQANIIFDITEGNLRDSFDIIKRYMDGMTVGVVRQVRPIVGPFHAVLKLEMNYVVGGVVSHRNVVNVHIFVSEYWF

SEQ ID NO: 32066 - protein, 566 aa, Homo sapiens
  Payload ID: 6282
  Gene Symbol: FBLN1
  Gene Name: fibulin 1
  Uniprot ID: P23142
  ENSP ID: ENSP00000342212
MERAAPSRRVPLPLLLLGGLALLAAGVDADVLLEACCADGHRMATHQKDCSLPYATESKECRMVQEQCCHSQLEELHCATGISLANEQDRCATPHGDNASLEATFVKRCCHCCLLGRAAQAQGQSCEYSLMVGYQCGQVFQACCVKSQETGDLDVGGLQETDKIIEVEEEQEDPYLNDRCRGGGPCKQQCRDTGDEVVCSCFVGYQLLSDGVSCEDVNECITGSHSCRLGESCINTVGSFRCQRDSSCGTGYELTEDNSCKDIDECESGIHNCLPDFICQNTLGSFRCRPKLQCKSGFIQDALGNCIDINECLSISAPCPIGHTCINTEGSYTCQKNVPNCGRGYHLNEEGTRCVDVDECAPPAEPCGKGHRCVNSPGSFRCECKTGYYFDGISRMCVDVNECQRYPGRLCGHKCENTLGSYLCSCSVGFRLSVDGRSCEDINECSSSPCSQECANVYGSYQCYCRRGYQLSDVDGVTCEDIDECALPTGGHICSYRCINIPGSFQCSCPSSGYRLAPNGRNCQDIDECVTGIHNCSINETCFNIQGGFRCLAFECPENYRRSAAT

SEQ ID NO: 32067 - protein, 721 aa, Homo sapiens
  Payload ID: 6282
  Gene Symbol: FBLN1
  Gene Name: fibulin 1
  ENSP ID: ENSP00000385521
MERAAPSRRVPLPLLLLGGLALLAAGVDADVLLEACCADGHRMATHQKDCSLPYATESKECRAVGLASLCQDLNGAWAVWKVGRASQAEGTASARAQRRGMVQEQCCHSQLEELHCATGISLANEQDRCATPHGDNASLEATFVKRCCHCCLLGRAAQAQGQSCEYSLMVGYQCGQVFQACCVKSQETGDLDVGGLQETDKIIEVEEEQEDPYLNDRCRGGGPCKQQCRDTGDEVVCSCFVGYQLLSDGVSCEDVNECITGSHSCRLGESCINTVGSFRCQRDSSCGTGYELTEDNSCKDIDECESGIHNCLPDFICQNTLGSFRCRPKLQCKSGFIQDALGNCIDINECLSISAPCPIGHTCINTEGSYTCQKNVPNCGRGYHLNEEGTRCVDVDECAPPAEPCGKGHRCVNSPGSFRCECKTGYYFDGISRMCVDVNECQRYPGRLCGHKCENTLGSYLCSCSVGFRLSVDGRSCEDINECSSSPCSQECANVYGSYQCYCRRGYQLSDVDGVTCEDIDECALPTGGHICSYRCINIPGSFQCSCPSSGYRLAPNGRNCQDIDECVTGIHNCSINETCFNIQGGFRCLAFECPENYRRSAATRCERLPCHENRECSKLPLRITYYHLSFPTNIQAPAVVFRMGPSSAVPGDSMQLAITGGNEEGFFTTRKVSPHSGVVALTKPVPEPRDLLLTVKMDLSRHGTVSSFVAKLFIFVSAEL

SEQ ID NO: 32068 - protein, 601 aa, Homo sapiens
  Payload ID: 6282
  Gene Symbol: FBLN1
  Gene Name: fibulin 1
  Uniprot ID: P23142
  ENSP ID: ENSP00000393812
MERAAPSRRVPLPLLLLGGLALLAAGVDADVLLEACCADGHRMATHQKDCSLPYATESKECRMVQEQCCHSQLEELHCATGISLANEQDRCATPHGDNASLEATFVKRCCHCCLLGRAAQAQGQSCEYSLMVGYQCGQVFQACCVKSQETGDLDVGGLQETDKIIEVEEEQEDPYLNDRCRGGGPCKQQCRDTGDEVVCSCFVGYQLLSDGVSCEDVNECITGSHSCRLGESCINTVGSFRCQRDSSCGTGYELTEDNSCKDIDECESGIHNCLPDFICQNTLGSFRCRPKLQCKSGFIQDALGNCIDINECLSISAPCPIGHTCINTEGSYTCQKNVPNCGRGYHLNEEGTRCVDVDECAPPAEPCGKGHRCVNSPGSFRCECKTGYYFDGISRMCVDVNECQRYPGRLCGHKCENTLGSYLCSCSVGFRLSVDGRSCEDINECSSSPCSQECANVYGSYQCYCRRGYQLSDVDGVTCEDIDECALPTGGHICSYRCINIPGSFQCSCPSSGYRLAPNGRNCQDIDECVTGIHNCSINETCFNIQGGFRCLAFECPENYRRSAATQKSKKGRQNTPAGSSKEDCRVLPWKQGLEDTHLDA

SEQ ID NO: 32069 - protein, 92 aa, Homo sapiens
  Payload ID: 6282
  Gene Symbol: FBLN1
  Gene Name: fibulin 1
  ENSP ID: ENSP00000395329
ALLAAGGRGVPGPPPQLRVPTPSASRSLRVSEPRGLGVRALPCAAPPDCQRRGLGDAPLPHGQLRSSSPPRPGDLFQNRIPPPLKHTVLPQS

SEQ ID NO: 32070 - protein, 183 aa, Homo sapiens
  Payload ID: 6282
  Gene Symbol: FBLN1
  Gene Name: fibulin 1
  ENSP ID: ENSP00000401077
  MOD_RES (1)..(1): Any amino acid
XKRCCHCCLLGRAAQAQGQSCEYSLMVGYQCGQVFQACCVKSQETGDLDVGGLQETDKIIEVEEEQEDPYLNDRCRGGGPCKQQCRDTGDEVVCSCFVGYQLLSDGVSCEDVNECITGSHSCRLGESCINTVGSFRCQRDSSCGTGYELTEDNSCKEYSGILPLPTQATVQEWLYTRCSRQLY

SEQ ID NO: 32071 - protein, 172 aa, Homo sapiens
  Payload ID: 6282
  Gene Symbol: FBLN1
  Gene Name: fibulin 1
  ENSP ID: ENSP00000402963
MERAAPSRRVPLPLLLLGGLALLAAGVDADVLLEACCADGHRMATHQKDCSLPYATESKECRMVQEQCCHSQLEELHCATGISLANEQDRCATPHGDNASLEATFVKRCCHCCLLGRAAQAQGQSCEYSLMVGYQCGQVFQACCVKSQETGDLDVGGLQETGGGPCKQQCRD

SEQ ID NO: 32072 - protein, 65 aa, Homo sapiens
  Payload ID: 6282
  Gene Symbol: FBLN1
  Gene Name: fibulin 1
  ENSP ID: ENSP00000404024
MATHQKDCSLPYATESKECRMVQEQCCHSQLEELHCATGISLANEQDRCATPHGDNASLEATFVK

SEQ ID NO: 32073 - protein, 139 aa, Homo sapiens
  Payload ID: 6282
  Gene Symbol: FBLN1
  Gene Name: fibulin 1
  ENSP ID: ENSP00000414584
MATHQKDCSLPYATESKECRMVQEQCCHSQLEELHCATGISLANEQDRCATPHGDNASLEATFVKRCCHCCLLGRAAQAQGQSCEYSLMVGYQCGQVFQACCVKSQETGDLDVGGLQETDKIIEVEEEQEDPYLNDRCR

SEQ ID NO: 32074 - protein, 181 aa, Homo sapiens
  Payload ID: 6282
  Gene Symbol: FBLN1
  Gene Name: fibulin 1
  ENSP ID: ENSP00000415160
CRMVQEQCCHSQLEELHCATGISLANEQDRCATPHGDNASLEATFVKRCCHCCLLGRAAQAQGQSCEYSLMVGYQCGQVFQACCVKSQETGDLDVGGLQETGGGPCKQQCRDTGDEVVCSCFVGYQLLSDGVSCEDVNECITGSHSCRLGESCINTVGSFRCQRDSSCGTGYELTEDNSCK

SEQ ID NO: 32075 - protein, 189 aa, Homo sapiens
  Payload ID: 6282
  Gene Symbol: FBLN1
  Gene Name: fibulin 1
  ENSP ID: ENSP00000415289
MNSYTRGSRRPSAKAASPAASVTSRVSPSGPGVPVDADVLLEACCADGHRMATHQKDCSLPYATESKECRMVQEQCCHSQLEELHCATGISLANEQDRCATPHGDNASLEATFVKRCCHCCLLGRAAQAQGQSCEYSLMVGYQCGQVFQACCVKSQETGDLDVGGLQETDKIIEVEEEQEDPYLNDRCR

SEQ ID NO: 32076 - protein, 60 aa, Homo sapiens
  Payload ID: 6282
  Gene Symbol: FBLN1
  Gene Name: fibulin 1
  ENSP ID: ENSP00000489422
DITEGNLRDSFDIIKRYMDGMTVAPLLNCHILKDLQSWEMKTVASAILDSDLYSEHFQSS

SEQ ID NO: 32077 - protein, 1184 aa, Homo sapiens
  Payload ID: 6283
  Gene Symbol: FBLN2
  Gene Name: fibulin 2
  Uniprot ID: P98095
  ENSP ID: ENSP00000295760
MVLLWEPAGAWLALGLALALGPSVAAAAPRQDCTGVECPPLENCIEEALEPGACCATCVQQGCACEGYQYYDCLQGGFVRGRVPAGQSYFVDFGSTECSCPPGGGKISCQFMLCPELPPNCIEAVVVADSCPQCGQVGCVHAGHKYAAGHTVHLPPCRACHCPDAGGELICYQLPGCHGNFSDAEEGDPERHYEDPYSYDQEVAEVEAATALGGEVQAGAVQAGAGGPPAALGGGSQPLSTIQAPPWPAVLPRPTAAAALGPPAPVQAKARRVTEDSEEEEEEEEEREEMAVTEQLAAGGHRGLDGLPTTAPAGPSLPIQEERAEAGARAEAGARPEENLILDAQATSRSTGPEGVTHAPSLGKAALVPTQAVPGSPRDPVKPSPHNILSTSLPDAAWIPPTREVPRKPQVLPHSHVEEDTDPNSVHSIPRSSPEGSTKDLIETCCAAGQQWAIDNDECLEIPESGTEDNVCRTAQRHCCVSYLQEKSCMAGVLGAKEGETCGAEDNDSCGISLYKQCCDCCGLGLRVRAEGQSCESNPNLGYPCNHVMLSCCEGEEPLIVPEVRRPPEPAAAPRRVSEAEMAGREALSLGTEAELPNSLPGDDQDECLLLPGELCQHLCINTVGSYHCACFPGFSLQDDGRTCRPEGHPPQPEAPQEPALKSEFSQVASNTIPLPLPQPNTCKDNGPCKQVCSTVGGSAICSCFPGYAIMADGVSCEDINECVTDLHTCSRGEHCVNTLGSFHCYKALTCEPGYALKDGECEDVDECAMGTHTCQPGFLCQNTKGSFYCQARQRCMDGFLQDPEGNCVDINECTSLSEPCRPGFSCINTVGSYTCQRNPLICARGYHASDDGTKCVDVNECETGVHRCGEGQVCHNLPGSYRCDCKAGFQRDAFGRGCIDVNECWASPGRLCQHTCENTLGSYRCSCASGFLLAADGKRCEDVNECEAQRCSQECANIYGSYQCYCRQGYQLAEDGHTCTDIDECAQGAGILCTFRCLNVPGSYQCACPEQGYTMTANGRSCKDVDECALGTHNCSEAETCHNIQGSFRCLRFECPPNYVQVSKTKCERTTCHDFLECQNSPARITHYQLNFQTGLLVPAHIFRIGPAPAFTGDTIALNIIKGNEEGYFGTRRLNAYTGVVYLQRAVLEPRDFALDVEMKLWRQGSVTTFLAKMHIFFTTFAL

SEQ ID NO: 32078 - protein, 109 aa, Homo sapiens
  Payload ID: 6283
  Gene Symbol: FBLN2
  Gene Name: fibulin 2
  ENSP ID: ENSP00000295761
  MOD_RES (1)..(1): Any amino acid
XIDECAQGAGILCTFRCLNVPGSYQCACPEQGYTMTANGRSCKDVDECALGTHNCSEAETCHNIQGSFRCLRFECPPNYVQVSKTWCVPTQAPSGSLHGGPRPWRVPCG

SEQ ID NO: 32079 - protein, 1231 aa, Homo sapiens
  Payload ID: 6283
  Gene Symbol: FBLN2
  Gene Name: fibulin 2
  Uniprot ID: P98095
  ENSP ID: ENSP00000384169
MVLLWEPAGAWLALGLALALGPSVAAAAPRQDCTGVECPPLENCIEEALEPGACCATCVQQGCACEGYQYYDCLQGGFVRGRVPAGQSYFVDFGSTECSCPPGGGKISCQFMLCPELPPNCIEAVVVADSCPQCGQVGCVHAGHKYAAGHTVHLPPCRACHCPDAGGELICYQLPGCHGNFSDAEEGDPERHYEDPYSYDQEVAEVEAATALGGEVQAGAVQAGAGGPPAALGGGSQPLSTIQAPPWPAVLPRPTAAAALGPPAPVQAKARRVTEDSEEEEEEEEEREEMAVTEQLAAGGHRGLDGLPTTAPAGPSLPIQEERAEAGARAEAGARPEENLILDAQATSRSTGPEGVTHAPSLGKAALVPTQAVPGSPRDPVKPSPHNILSTSLPDAAWIPPTREVPRKPQVLPHSHVEEDTDPNSVHSIPRSSPEGSTKDLIETCCAAGQQWAIDNDECLEIPESGTEDNVCRTAQRHCCVSYLQEKSCMAGVLGAKEGETCGAEDNDSCGISLYKQCCDCCGLGLRVRAEGQSCESNPNLGYPCNHVMLSCCEGEEPLIVPEVRRPPEPAAAPRRVSEAEMAGREALSLGTEAELPNSLPGDDQDECLLLPGELCQHLCINTVGSYHCACFPGFSLQDDGRTCRPEGHPPQPEAPQEPALKSEFSQVASNTIPLPLPQPNTCKDNGPCKQVCSTVGGSAICSCFPGYAIMADGVSCEDQDECLMGAHDCSRRQFCVNTLGSFYCVNHTVLCADGYILNAHRKCVDINECVTDLHTCSRGEHCVNTLGSFHCYKALTCEPGYALKDGECEDVDECAMGTHTCQPGFLCQNTKGSFYCQARQRCMDGFLQDPEGNCVDINECTSLSEPCRPGFSCINTVGSYTCQRNPLICARGYHASDDGTKCVDVNECETGVHRCGEGQVCHNLPGSYRCDCKAGFQRDAFGRGCIDVNECWASPGRLCQHTCENTLGSYRCSCASGFLLAADGKRCEDVNECEAQRCSQECANIYGSYQCYCRQGYQLAEDGHTCTDIDECAQGAGILCTFRCLNVPGSYQCACPEQGYTMTANGRSCKDVDECALGTHNCSEAETCHNIQGSFRCLRFECPPNYVQVSKTKCERTTCHDFLECQNSPARITHYQLNFQTGLLVPAHIFRIGPAPAFTGDTIALNIIKGNEEGYFGTRRLNAYTGVVYLQRAVLEPRDFALDVEMKLWRQGSVTTFLAKMHIFFTTFAL

SEQ ID NO: 32080 - protein, 101 aa, Homo sapiens
  Payload ID: 6283
  Gene Symbol: FBLN2
  Gene Name: fibulin 2
  ENSP ID: ENSP00000399224
  MOD_RES (1)..(1): Any amino acid
XVDECALGTHNCSEAETCHNIQGSFRCLRFECPPNYVQVSKTKCERTKWKLARWATAVAGALWVRLGDDLRTRDTRPCWGSWTPLDDPSPKLTFHFMFHCD

SEQ ID NO: 32081 - protein, 1231 aa, Homo sapiens; identical to SEQ ID NO: 32079
  Payload ID: 6283
  Gene Symbol: FBLN2
  Gene Name: fibulin 2
  Uniprot ID: P98095
  ENSP ID: ENSP00000420042

SEQ ID NO: 32082 - protein, 158 aa, Homo sapiens
  Payload ID: 6283
  Gene Symbol: FBLN2
  Gene Name: fibulin 2
  ENSP ID: ENSP00000420164
MVLLWEPAGAWLALGLALALGPSVAAAAPRQDCTGVECPPLENCIEEALEPGACCATCVQQGCACEGYQYYDCLQGGFVRGRVPAGQSYFVDFGSTECSCPPGGGKISCQFMLCPELPPNCIEAVVVADSCPQCGQVGCVHAGHKYAAGHTVHLPPCR

SEQ ID NO: 32083 - protein, 489 aa, Homo sapiens
  Payload ID: 6284
  Gene Symbol: FBLN5
  Gene Name: fibulin 5
  ENSP ID: ENSP00000267620
MPGIKRILTVTILALCLPSPGNAQAQCTNGFDLDRQSGQCLDGVSLSSPRLECNGAISAHCNLCLPGSSDSSASASQVAGITDIDECRTIPEACRGDMMCVNQNGGYLCIPRTNPVYRGPYSNPYSTPYSGPYPAAAPPLSAPNYPTISRPLICRFGYQMDESNQCVDVDECATDSHQCNPTQICINTEGGYTCSCTDGYWLLEGQCLDIDECRYGYCQQLCANVPGSYSCTCNPGFTLNEDGRSCQDVNECATENPCVQTCVNTYGSFICRCDPGYELEEDGVHCSDMDECSFSEFLCQHECVNQPGTYFCSCPPGYILLDDNRSCQDINECEHRNHTCNLQQTCYNLQGGFKCIDPIRCEEPYLRISDNRCMCPAENPGCRDQPFTILYRDMDVVSGRSVPADIFQMQATTRYPGAYYIFQIKSGNEGREFYMRQTGPISATLVMTRPIKGPREIQLDLEMITVNTVINFRGSSVIRLRIYVSQYPF

SEQ ID NO: 32084 - protein, 448 aa, Homo sapiens
  Payload ID: 6284
  Gene Symbol: FBLN5
  Gene Name: fibulin 5
  Uniprot ID: Q9UBX5
  ENSP ID: ENSP00000345008
MPGIKRILTVTILALCLPSPGNAQAQCTNGFDLDRQSGQCLDIDECRTIPEACRGDMMCVNQNGGYLCIPRTNPVYRGPYSNPYSTPYSGPYPAAAPPLSAPNYPTISRPLICRFGYQMDESNQCVDVDECATDSHQCNPTQICINTEGGYTCSCTDGYWLLEGQCLDIDECRYGYCQQLCANVPGSYSCTCNPGFTLNEDGRSCQDVNECATENPCVQTCVNTYGSFICRCDPGYELEEDGVHCSDMDECSFSEFLCQHECVNQPGTYFCSCPPGYILLDDNRSCQDINECEHRNHTCNLQQTCYNLQGGFKCIDPIRCEEPYLRISDNRCMCPAENPGCRDQPFTILYRDMDVVSGRSVPADIFQMQATTRYPGAYYIFQIKSGNEGREFYMRQTGPISATLVMTRPIKGPREIQLDLEMITVNTVINFRGSSVIRLRIYVSQYPF

SEQ ID NO: 32085 - protein, 35 aa, Homo sapiens
  Payload ID: 6284
  Gene Symbol: FBLN5
  Gene Name: fibulin 5
  ENSP ID: ENSP00000450787
MPGIKRILTVTILALCLPSPGNAQQQERWTPVCQP

SEQ ID NO: 32086 - protein, 44 aa, Homo sapiens
  Payload ID: 6284
  Gene Symbol: FBLN5
  Gene Name: fibulin 5
  ENSP ID: ENSP00000451002
MPGIKRILTVTILALCLPSPGNAQAQCTNGFDLDRQSGQCLASL

SEQ ID NO: 32087 - protein, 91 aa, Homo sapiens
  Payload ID: 6284
  Gene Symbol: FBLN5
  Gene Name: fibulin 5
  ENSP ID: ENSP00000451486
MPGIKRILTVTILALCLPSPGNAQAQCTNGFDLDRQSGQCLDIDECRTIPEACRGDMMCVNQNGGYLCIPRTNPVYRGPYSNPYSTPYSGP

SEQ ID NO: 32088 - protein, 453 aa, Homo sapiens
  Payload ID: 6284
  Gene Symbol: FBLN5
  Gene Name: fibulin 5
  ENSP ID: ENSP00000451982
MRSGNCRQRYMILTVTILALCLPSPGNAQAQCTNGFDLDRQSGQCLDIDECRTIPEACRGDMMCVNQNGGYLCIPRTNPVYRGPYSNPYSTPYSGPYPAAAPPLSAPNYPTISRPLICRFGYQMDESNQCVDVDECATDSHQCNPTQICINTEGGYTCSCTDGYWLLEGQCLDIDECRYGYCQQLCANVPGSYSCTCNPGFTLNEDGRSCQDVNECATENPCVQTCVNTYGSFICRCDPGYELEEDGVHCSDMDECSFSEFLCQHECVNQPGTYFCSCPPGYILLDDNRSCQDINECEHRNHTCNLQQTCYNLQGGFKCIDPIRCEEPYLRISDNRCMCPAENPGCRDQPFTILYRDMDVVSGRSVPADIFQMQATTRYPGAYYIFQIKSGNEGREFYMRQTGPISATLVMTRPIKGPREIQLDLEMITVNTVINFRGSSVIRLRIYVSQYPF

SEQ ID NO: 32089 - protein, 261 aa, Homo sapiens
  Payload ID: 6285
  Gene Symbol: FBLN7
  Gene Name: fibulin 7
  ENSP ID: ENSP00000272559
AGSARTLGTARGGHGAGKGLSPTALLPARVASCARSQKAWPLCIIDVNECELYGQEGRPRLCMHACVNTPGSYRCTCPGGYRTLADGKSCEDVDECVGLQPVCPQGTTCINTGGSFQCVSPECPEGSGNVSYVKTSPFQCERNPCPMDSRPCRHLPKTISFHYLSLPSNLKTPITLFRMATASAPGRAGPNSLRFGIVGGNSRGHFVMQRSDRQTGDLILVQNLEGPQTLEVDVDMSEYLDRSFQANHVSKVTIFVSPYDF

SEQ ID NO: 32090 - protein, 439 aa, Homo sapiens
  Payload ID: 6285
  Gene Symbol: FBLN7
  Gene Name: fibulin 7
  Uniprot ID: Q53RD9
  ENSP ID: ENSP00000331411
MVPSSPRALFLLLLILACPEPRASQNCLSKQQLLSAIRQLQQLLKGQETRFAEGIRHMKSRLAALQNSVGRVGPDALPVSCPALNTPADGRKFGSKYLVDHEVHFTCNPGFRLVGPSSVVCLPNGTWTGEQPHCRGISECSSQPCQNGGTCVEGVNQYRCICPPGRTGNRCQHQAQTAAPEGSVAGDSAFSRAPRCAQVERAQHCSCEAGFHLSGAAGDSVCQDVNECELYGQEGRPRLCMHACVNTPGSYRCTCPGGYRTLADGKSCEDVDECVGLQPVCPQGTTCINTGGSFQCVSPECPEGSGNVSYVKTSPFQCERNPCPMDSRPCRHLPKTISFHYLSLPSNLKTPITLFRMATASAPGRAGPNSLRFGIVGGNSRGHFVMQRSDRQTGDLILVQNLEGPQTLEVDVDMSEYLDRSFQANHVSKVTIFVSPYDF

SEQ ID NO: 32091 - protein, 366 aa, Homo sapiens
  Payload ID: 6285
  Gene Symbol: FBLN7
  Gene Name: fibulin 7
  ENSP ID: ENSP00000386295
MVPSSPRALFLLLLILACPEPRASQNCLSKQQLLSAIRQLQQLLKGQETRFAEGIRHMKSRLAALQNSVGRVGPDALPVSCPALNTPADGRKFGSKYLVDHEVHFTCNPGFRLVGPSSVVCLPNGTWTGEQPHCRGISECSSQPCQNGGTCVEGVNQYRCICPPGRTGNRCQHQAQTAAPEGSVAGDSAFSRAPRCAQVERAQHCSCEAGFHLSGAAGDSVCQDVNECELYGQEGRPRLCMHACVNTPGSYRCTCPGGYRTLADGKSCEDVDECVGLQPVCPQGTTCINTGGSFQCVSPECPEGSGNVSYVKTSPLTWRGLRRWRWTSTCRNTWTAPSRPTTCPRSPSLYPPMTSEGTQGHWGVES

SEQ ID NO: 32092 - protein, 305 aa, Homo sapiens
  Payload ID: 6285
  Gene Symbol: FBLN7
  Gene Name: fibulin 7
  Uniprot ID: Q53RD9
  ENSP ID: ENSP00000386822
MVPSSPRALFLLLLILACPEPRASQNCLSKQQLLSAIRQLQQLLKGQETRFAEGIRHMKSRLAALQNSVGRVGPDALPVSCPALNTPADGRKFGSKYLVDHEVHFTCNPGFRLVGPSSVVCLPNGTWTGEQPHCRDVDECVGLQPVCPQGTTCINTGGSFQCVSPECPEGSGNVSYVKTSPFQCERNPCPMDSRPCRHLPKTISFHYLSLPSNLKTPITLFRMATASAPGRAGPNSLRFGIVGGNSRGHFVMQRSDRQTGDLILVQNLEGPQTLEVDVDMSEYLDRSFQANHVSKVTIFVSPYDF

SEQ ID NO: 32093 - protein, 393 aa, Homo sapiens
  Payload ID: 6285
  Gene Symbol: FBLN7
  Gene Name: fibulin 7
  Uniprot ID: Q53RD9
  ENSP ID: ENSP00000387000
MVPSSPRALFLLLLILACPEPRASQNCLSKQQLLSAIRQLQQLLKGQETRFAEGIRHMKSRLAALQNSVGRVGPDALPVSCPALNTPADGRKFGSKYLVDHEVHFTCNPGFRLVGPSSVVCLPNGTWTGEQPHCRGISECSSQPCQNGGTCVEGVNQYRCICPPGRTGNRCQHQAQTDVNECELYGQEGRPRLCMHACVNTPGSYRCTCPGGYRTLADGKSCEDVDECVGLQPVCPQGTTCINTGGSFQCVSPECPEGSGNVSYVKTSPFQCERNPCPMDSRPCRHLPKTISFHYLSLPSNLKTPITLFRMATASAPGRAGPNSLRFGIVGGNSRGHFVMQRSDRQTGDLILVQNLEGPQTLEVDVDMSEYLDRSFQANHVSKVTIFVSPYDF

SEQ ID NO: 32094 - protein, 273 aa, Homo sapiens
  Payload ID: 6285
  Gene Symbol: FBLN7
  Gene Name: fibulin 7
  ENSP ID: ENSP00000388025
RFAEGIRHMKSRLAALQNSVGRVGPDALPGISECSSQPCQNGGTCVEGVNQYRCICPPGRTGNRCQHQAQTAAPEGSVAGDSAFSRAPRCAQVERAQHCSCEAGFHLSGAAGDSVCQDVNECELYGQEGRPRLCMHACVNTPGSYRCTCPGGYRTLADGKSCEDVDECVGLQPVCPQGTTCINTGGSFQCVSPECPEGSGNVSYVKTSPFQCERNPCPMDSRPCRHLPKTISFHYLSLPSNLKTPITLFRMATASAPGRAGPNSLRFGIVGGN

SEQ ID NO: 32095 - protein, 180 aa, Homo sapiens
  Payload ID: 6286
  Gene Symbol: FICD
  Gene Name: FIC domain containing
  ENSP ID: ENSP00000354421
MMLIPMASVMAVTEPKWVSVWSRFLWVTLLSMVLGSLLALLLPLGAVEEQCLAVLKGLYLLRSKPDRAQHAATKCTSPSTELSITSRGATLLVAKTKASPESRRLGSQGGASQNTREWLWGHTDSDCIPPHGWGNRVVPGMLSTHDAAATSSSRPGTQAGHHGFLRRPAQGTAPRMSSAP

SEQ ID NO: 32096 - protein, 458 aa, Homo sapiens
  Payload ID: 6286
  Gene Symbol: FICD
  Gene Name: FIC domain containing
  Uniprot ID: Q9BVA6
  ENSP ID: ENSP00000446479
MMLIPMASVMAVTEPKWVSVWSRFLWVTLLSMVLGSLLALLLPLGAVEEQCLAVLKGLYLLRSKPDRAQHAATKCTSPSTELSITSRGATLLVAKTKASPAGKLEARAALNQALEMKRQGKREKAQKLFMHALKMDPDFVDALTEFGIFSEEDKDIIQADYLYTRALTISPYHEKALVNRDRTLPLVEEIDQRYFSIIDSKVKKVMSIPKGNSALRRVMEETYYHHIYHTVAIEGNTLTLSEIRHILETRYAVPGKSLEEQNEVIGMHAAMKYINTTLVSRIGSVTISDVLEIHRRVLGYVDPVEAGRFRTTQVLVGHHIPPHPQDVEKQMQEFVQWLNSEEAMNLHPVEFAALAHYKLVYIHPFIDGNGRTSRLLMNLILMQAGYPPITIRKEQRSDYYHVLEAANEGDVRPFIRFIAKCTETTLDTLLFATTEYSVALPEAQPNHSGFKETLPVKP

SEQ ID NO: 32097 - protein, 139 aa, Homo sapiens
  Payload ID: 6286
  Gene Symbol: FICD
  Gene Name: FIC domain containing
  ENSP ID: ENSP00000447379
MMLIPMASVMAVTEPKWVSVWSRFLWVTLLSMVLGSLLALLLPLGAVEEQCLAVLKGLYLLRSKPDRAQHAATKCTSPSTELSITSRGATLLVAKTKASPGKTDWPSSSMLVNWIDRHRMCHVLYVGHRGIVNKSALSS

SEQ ID NO: 32098 - protein, 56 aa, Homo sapiens
  Payload ID: 6286
  Gene Symbol: FICD
  Gene Name: FIC domain containing
  ENSP ID: ENSP00000449989
  MOD_RES (1)..(1): Any amino acid
XCLAVLKGLYLLRSKPDRAQHAATKCTSPSTELSITSRGATLLVAKTKASPGKCCT

SEQ ID NO: 32099 - protein, 275 aa, Homo sapiens
  Payload ID: 6287
  Gene Symbol: FCN2
  Gene Name: ficolin (collagen/fibrinogen domain containing lectin) 2
  Uniprot ID: Q15485
  ENSP ID: ENSP00000291741
MELDRAVGVLGAATLLLSFLGMAWALQAADTCPGERGPPGPPGKAGPPGPNGAPGEPQPCLTGPRTCKDLLDRGHFLSGWHTIYLPDCRPLTVLCDMDTDGGGWTVFQRRVDGSVDFYRDWATYKQGFGSRLGEFWLGNDNIHALTAQGTSELRVDLVDFEDNYQFAKYRSFKVADEAEKYNLVLGAFVEGSAGDSLTFHNNQSFSTKDQDNDLNTGNCAVMFQGAWWYKNCHVSNLNGRYLRGTHGSFANGINWKSGKGYNYSYKVSEMKVRPA

SEQ ID NO: 32100 - protein, 313 aa, Homo sapiens
  Payload ID: 6287
  Gene Symbol: FCN2
  Gene Name: ficolin (collagen/fibrinogen domain containing lectin) 2
  Uniprot ID: Q15485
  ENSP ID: ENSP00000291744
MELDRAVGVLGAATLLLSFLGMAWALQAADTCPEVKMVGLEGSDKLTILRGCPGLPGAPGPKGEAGTNGKRGERGPPGPPGKAGPPGPNGAPGEPQPCLTGPRTCKDLLDRGHFLSGWHTIYLPDCRPLTVLCDMDTDGGGWTVFQRRVDGSVDFYRDWATYKQGFGSRLGEFWLGNDNIHALTAQGTSELRVDLVDFEDNYQFAKYRSFKVADEAEKYNLVLGAFVEGSAGDSLTFHNNQSFSTKDQDNDLNTGNCAVMFQGAWWYKNCHVSNLNGRYLRGTHGSFANGINWKSGKGYNYSYKVSEMKVRPA

SEQ ID NO: 32101 - protein, 326 aa, Homo sapiens
  Payload ID: 6288
  Gene Symbol: FCN1
  Gene Name: ficolin (collagen/fibrinogen domain containing) 1
  Uniprot ID: O00602
  ENSP ID: ENSP00000360871
MELSGATMARGLAVLLVLFLHIKNLPAQAADTCPEVKVVGLEGSDKLTILRGCPGLPGAPGPKGEAGVIGERGERGLPGAPGKAGPVGPKGDRGEKGMRGEKGDAGQSQSCATGPRNCKDLLDRGYFLSGWHTIYLPDCRPLTVLCDMDTDGGGWTVFQRRMDGSVDFYRDWAAYKQGFGSQLGEFWLGNDNIHALTAQGSSELRVDLVDFEGNHQFAKYKSFKVADEAEKYKLVLGAFVGGSAGNSLTGHNNNFFSTKDQDNDVSSSNCAEKFQGAWWYADCHASNLNGLYLMGPHESYANGINWSAAKGYKYSYKVSEMKVRPA

SEQ ID NO: 32102 - protein, 360 aa, Homo sapiens
  Payload ID: 6288
  Gene Symbol: FCN1
  Gene Name: ficolin (collagen/fibrinogen domain containing) 1
  ENSP ID: ENSP00000479379
MELSGATMARGLAVLLVLFLHIKNLPAQAADTCPEVKVVGLEGSDKLTILRGCPGLPGAPGPKGEAGVIGERGERGLPGAPGKAGPVGPKGDRGEKGMRGEKGDAGQSQSCATGPRNCKDLLDRGYFLSGWHTIYLPDCRPLTVLCDMDTDGGGWTVFQRRMDGSVDFYRDWAAYKQGFGSQTHSHDAHSCPFAPSSVKPPHAHNLTRGRIMFLNMFTLGQKSFTSFNVCFLNTSGFDHFPVSVARQVFPWNLVSREESGPLFSRWHYRCSGRLSDFCEDFPPPVIDTGRSSPPPPSLPHPPMPHSQHFTLLEKGHFGVQKTLTKKGESLVGTFLLPTTAEFMLWAGWLLGRDKHLALTK

SEQ ID NO: 32103 - protein, 299 aa, Homo sapiens
  Payload ID: 6289
  Gene Symbol: FCN3
  Gene Name: ficolin (collagen/fibrinogen domain containing) 3
  Uniprot ID: O75636
  ENSP ID: ENSP00000270879
MDLLWILPSLWLLLLGGPACLKTQEHPSCPGPRELEASKVVLLPSCPGAPGSPGEKGAPGPQGPPGPPGKMGPKGEPGDPVNLLRCQEGPRNCRELLSQGATLSGWYHLCLPEGRALPVFCDMDTEGGGWLVFQRRQDGSVDFFRSWSSYRAGFGNQESEFWLGNENLHQLTLQGNWELRVELEDFNGNRTFAHYATFRLLGEVDHYQLALGKFSEGTAGDSLSLHSGRPFTTYDADHDSSNSNCAVIVHGAWWYASCYRSNLNGRYAVSEAAAHKYGIDWASGRGVGHPYRRVRMMLR

SEQ ID NO: 32104 - protein, 288 aa, Homo sapiens
  Payload ID: 6289
  Gene Symbol: FCN3
  Gene Name: ficolin (collagen/fibrinogen domain containing) 3
  Uniprot ID: O75636
  ENSP ID: ENSP00000347077
MDLLWILPSLWLLLLGGPACLKTQEHPSCPGPRELEASKVVLLPSCPGAPGSPGEKGAPGPQGPPGPPGKMGPKGEPGPRNCRELLSQGATLSGWYHLCLPEGRALPVFCDMDTEGGGWLVFQRRQDGSVDFFRSWSSYRAGFGNQESEFWLGNENLHQLTLQGNWELRVELEDFNGNRTFAHYATFRLLGEVDHYQLALGKFSEGTAGDSLSLHSGRPFTTYDADHDSSNSNCAVIVHGAWWYASCYRSNLNGRYAVSEAAAHKYGIDWASGRGVGHPYRRVRMMLR

SEQ ID NO: 32105 - protein, 759 aa, Homo sapiens
  Payload ID: 6290
  Gene Symbol: FIGN
  Gene Name: fidgetin
  Uniprot ID: Q5HY92
  ENSP ID: ENSP00000333836
MISSTSVYGLKMQWTPEHAQWPEQHFDITSTTRSPAHKVEAYRGHLQRTYQYAWANDDISALTASNLLKKYAEKYSGILEGPVDRPVLSNYSDTPSGLVNGRKNESEPWQPSLNSEAVYPMNCVPDVITASKAGVSSALPPADVSASIGSSPGVASNLTEPSYSSSTCGSHTVPSLHAGLPSQEYAPGYNGSYLHSTYSSQPAPALPSPHPSPLHSSGLLQPPPPPPPPPALVPGYNGTSNLSSYSYPSASYPPQTAVGSGYSPGGAPPPPSAYLPSGIPAPTPLPPTTVPGYTYQGHGLTPIAPSALTNSSASSLKRKAFYMAGQGDMDSSYGNYSYGQQRSTQSPMYRMPDNSISNTNRGNGFDRSAETSSLAFKPTKQLMSSEQQRKFSSQSSRALTPPSYSTAKNSLGSRSSESFGKYTSPVMSEHGDEHRQLLSHPMQGPGLRAATSSNHSVDEQLKNTDTHLIDLVTNEIITQGPPVDWNDIAGLDLVKAVIKEEVLWPVLRSDAFSGLTALPRSILLFGPRGTGKTLLGRCIASQLGATFFKIAGSGLVAKWLGEAEKIIHASFLVARCRQPSVIFVSDIDMLLSSQVNEEHSPVSRMRTEFLMQLDTVLTSAEDQIVVICATSKPEEIDESLRRYFMKRLLIPLPDSTARHQIIVQLLSQHNYCLNDKEFALLVQRTEGFSGLDVAHLCQEAVVGPLHAMPATDLSAIMPSQLRPVTYQDFENAFCKIQPSISQKELDMYVEWNKMFGCSQ

SEQ ID NO: 32106 - protein, 29 aa, Homo sapiens
  Payload ID: 6290
  Gene Symbol: FIGN
  Gene Name: fidgetin
  ENSP ID: ENSP00000386768
MISSTSVYATWRQCFPAFFIPEADGGKAL

SEQ ID NO: 32107 - protein, 674 aa, Homo sapiens
  Payload ID: 6291
  Gene Symbol: FIGNL1
  Gene Name: fidgetin-like 1
  Uniprot ID: Q6PIW4
  ENSP ID: ENSP00000349356
MQTSSSRSVHLSEWQKNYFAITSGICTGPKADAYRAQILRIQYAWANSEISQVCATKLFKKYAEKYSAIIDSDNVESGLNNYAENILTLAGSQQTDSDKWQSGLSINNVFKMSSVQKMMQAGKKFKDSLLEPALASVVIHKEATVFDLPKFSVCGSSQESDSLPNSAHDRDRTQDFPESNRLKLLQNAQPPMVTNTARTCPTFSAPVGESATAKFHVTPLFGNVKKENHSSAKENIGLNVFLSNQSCFPAACENPQRKSFYGSGTIDALSNPILNKACSKTEDNGPKEDSSLPTFKTAKEQLWVDQQKKYHQPQRASGSSYGGVKKSLGASRSRGILGKFVPPIPKQDGGEQNGGMQCKPYGAGPTEPAHPVDERLKNLEPKMIELIMNEIMDHGPPVNWEDIAGVEFAKATIKEIVVWPMLRPDIFTGLRGPPKGILLFGPPGTGKTLIGKCIASQSGATFFSISASSLTSKWVGEGEKMVRALFAVARCQQPAVIFIDEIDSLLSQRGDGEHESSRRIKTEFLVQLDGATTSSEDRILVVGATNRPQEIDEAARRRLVKRLYIPLPEASARKQIVINLMSKEQCCLSEEEIEQIVQQSDAFSGADMTQLCREASLGPIRSLQTADIATITPDQVRPIAYIDFENAFRTVRPSVSPKDLELYENWNKTFGCGK

SEQ ID NO: 32108 - protein, 674 aa, Homo sapiens; identical to SEQ ID NO: 32107
  Payload ID: 6291
  Gene Symbol: FIGNL1
  Gene Name: fidgetin-like 1
  Uniprot ID: Q6PIW4
  ENSP ID: ENSP00000378924

SEQ ID NO: 32109 - protein, 97 aa, Homo sapiens
  Payload ID: 6291
  Gene Symbol: FIGNL1
  Gene Name: fidgetin-like 1
  ENSP ID: ENSP00000388471
MQTSSSRSVHLSEWQKNYFAITSGICTGPKADAYRAQILRIQYAWANSEISQVCATKLFKKYAEKYSAIIDSDNVESGLNNYAENILTLAGSQQTDS

SEQ ID NO: 32110 - protein, 125 aa, Homo sapiens
  Payload ID: 6291
  Gene Symbol: FIGNL1
  Gene Name: fidgetin-like 1
  ENSP ID: ENSP00000394070
MQTSSSRSVHLSEWQKNYFAITSGICTGPKADAYRAQILRIQYAWANSEISQVCATKLFKKYAEKYSAIIDSDNVESGLNNYAENILTLAGSQQTDSDKWQSGLSINNVFKMSSVQKMMQAGKKF

SEQ ID NO: 32111 - protein, 674 aa, Homo sapiens; identical to SEQ ID NO: 32107
  Payload ID: 6291
  Gene Symbol: FIGNL1
  Gene Name: fidgetin-like 1
  Uniprot ID: Q6PIW4
  ENSP ID: ENSP00000399997

SEQ ID NO: 32112 - protein, 35 aa, Homo sapiens
  Payload ID: 6291
  Gene Symbol: FIGNL1
  Gene Name: fidgetin-like 1
  ENSP ID: ENSP00000402957
MQTSSSRSVHLSEWQKNYFAITSGICTGPKADAYR

SEQ ID NO: 32113 - protein, 102 aa, Homo sapiens
  Payload ID: 6291
  Gene Symbol: FIGNL1
  Gene Name: fidgetin-like 1
  ENSP ID: ENSP00000403012
MQTSSSRSVHLSEWQKNYFAITSGICTGPKADAYRAQILRIQYAWANSEISQVCATKLFKKYAEKYSAIIDSDNVESGLNNYAENILTLAGSQQTDSDKWQS

SEQ ID NO: 32114 - protein, 53 aa, Homo sapiens
  Payload ID: 6291
  Gene Symbol: FIGNL1
  Gene Name: fidgetin-like 1
  ENSP ID: ENSP00000409281
MQTSSSRSVHLSEWQKNYFAITSGICTGPKADAYRAQILRIQYAWANSEISQV

SEQ ID NO: 32115 - protein, 67 aa, Homo sapiens
  Payload ID: 6291
  Gene Symbol: FIGNL1
  Gene Name: fidgetin-like 1
  ENSP ID: ENSP00000409674
MQTSSSRSVHLSEWQKNYFAITSGICTGPKADAYRAQILRIQYAWANSEISQDLNKQIVTSGSLDCQ

SEQ ID NO: 32116 - protein, 674 aa, Homo sapiens; identical to SEQ ID NO: 32107
  Payload ID: 6291
  Gene Symbol: FIGNL1
  Gene Name: fidgetin-like 1
  Uniprot ID: Q6PIW4
  ENSP ID: ENSP00000410811

SEQ ID NO: 32117 - protein, 674 aa, Homo sapiens; identical to SEQ ID NO: 32107
  Payload ID: 6291
  Gene Symbol: FIGNL1
  Gene Name: fidgetin-like 1
  Uniprot ID: Q6PIW4
  ENSP ID: ENSP00000481751

SEQ ID NO: 32118 - protein, 674 aa, Homo sapiens; identical to SEQ ID NO: 32107
  Payload ID: 6291
  Gene Symbol: FIGNL1
  Gene Name: fidgetin-like 1
  Uniprot ID: Q6PIW4
  ENSP ID: ENSP00000483126

SEQ ID NO: 32119 - protein, 674 aa, Homo sapiens; identical to SEQ ID NO: 32107
  Payload ID: 6291
  Gene Symbol: FIGNL1
  Gene Name: fidgetin-like 1
  Uniprot ID: Q6PIW4
  ENSP ID: ENSP00000483543

SEQ ID NO: 32120 - protein, 674 aa, Homo sapiens; identical to SEQ ID NO: 32107
  Payload ID: 6291
  Gene Symbol: FIGNL1
  Gene Name: fidgetin-like 1
  Uniprot ID: Q6PIW4
  ENSP ID: ENSP00000484551

SEQ ID NO: 32121 - protein, 907 aa, Homo sapiens
  Payload ID: 6292
  Gene Symbol: FIG4
  Gene Name: FIG4 phosphoinositide 5-phosphatase
  Uniprot ID: Q92562
  ENSP ID: ENSP00000230124
MPTAAAPIISSVQKLVLYETRARYFLVGSNNAETKYRVLKIDRTEPKDLVIIDDRHVYTQQEVRELLGRLDLGNRTKMGQKGSSGLFRAVSAFGVVGFVRFLEGYYIVLITKRRKMADIGGHAIYKVEDTNMIYIPNDSVRVTHPDEARYLRIFQNVDLSSNFYFSYSYDLSHSLQYNLTVLRMPLEMLKSEMTQNRQESFDIFEDEGLITQGGSGVFGICSEPYMKYVWNGELLDIIKSTVHRDWLLYIIHGFCGQSKLLIYGRPVYVTLIARRSSKFAGTRFLKRGANCEGDVANEVETEQILCDASVMSFTAGSYSSYVQVRGSVPLYWSQDISTMMPKPPITLDQADPFAHVAALHFDQMFQRFGSPIIILNLVKEREKRKHERILSEELVAAVTYLNQFLPPEHTIVYIPWDMAKYTKSKLCNVLDRLNVIAESVVKKTGFFVNRPDSYCSILRPDEKWNELGGCVIPTGRLQTGILRTNCVDCLDRTNTAQFMVGKCALAYQLYSLGLIDKPNLQFDTDAVRLFEELYEDHGDTLSLQYGGSQLVHRVKTYRKIAPWTQHSKDIMQTLSRYYSNAFSDADRQDSINLFLGVFHPTEGKPHLWELPTDFYLHHKNTMRLLPTRRSYTYWWTPEVIKHLPLPYDEVICAVNLKKLIVKKFHKYEEEIDIHNEFFRPYELSSFDDTFCLAMTSSARDFMPKTVGIDPSPFTVRKPDETGKSVLGNKSNREEAVLQRKTAASAPPPPSEEAVSSSSEDDSGTDREEEGSVSQRSTPVKMTDAGDSAKVTENVVQPMKELYGINLSDGLSEEDFSIYSRFVQLGQSQHKQDKNSQQPCSRCSDGVIKLTPISAFSQDNIYEVQPPRVDRKSTEIFQAHIQASQGIMQPLGKEDSSMYREYIRNRYL

SEQ ID NO: 32122 - protein, 139 aa, Homo sapiens
  Payload ID: 6292
  Gene Symbol: FIG4
  Gene Name: FIG4 phosphoinositide 5-phosphatase
  ENSP ID: ENSP00000357937
MGQKGSSGLFRAVSAFGVVGFVRFLEGYYIVLITKRRKMADIGGHAIYKVEDTNMIYIPNDSVRVTHPDEARYLRIFQNVDLSSNFYFSYSYDLSHSLQYNLTVLRMPLEMLKSEMTQNRQESFDIFEDEGLITQGGSG

SEQ ID NO: 32123 - protein, 99 aa, Homo sapiens
  Payload ID: 6292
  Gene Symbol: FIG4
  Gene Name: FIG4 phosphoinositide 5-phosphatase
  ENSP ID: ENSP00000396566
MTSSARDFMPKTVGIDPSPFTVRKPDETGKSVLGNKSNREEAVLQRKTAASAPPPPSEEAVSSSSEDDSGTDREEEGSVSQRSTPVKMTDAGDSAKVTE

SEQ ID NO: 32124 - protein, 136 aa, Homo sapiens
  Payload ID: 6292
  Gene Symbol: FIG4
  Gene Name: FIG4 phosphoinositide 5-phosphatase
  ENSP ID: ENSP00000405660
  MOD_RES (1)..(1): Any amino acid
XLFEELYEDHGDTLSLQYGGSQLVHRVKTYRKIAPWTQHSKDIMQTLSRYYSNAFSDADRQDSINLFLGVFHPTEGKPHLWELPTDFYLHHKNTMRLLPTRRSYTYWWTPEVIKHLPLPYDEGFLARSPANLECSN

SEQ ID NO: 32125 - protein, 237 aa, Homo sapiens
  Payload ID: 6292
  Gene Symbol: FIG4
  Gene Name: FIG4 phosphoinositide 5-phosphatase
  ENSP ID: ENSP00000412156
MRYFLVGSNNAETKYRVLKIDRTEPKDLVIIDDRHVYTQQEVRELLGRLDLGNRTKMGQKGSSGLFRAVSAFGVVGFVRFLEGYYIVLITKRRKMADIGGHAIYKVEDTNMIYIPNDSVRVTHPDEARYLRIFQNVDLSSNFYFSYSYDLSHSLQYNLTVLRMPLEMLKSEMTQNRQESFDIFEDEGLITQGGSGVFGICSEPYMKYVWNGELLDIIKSTVHRDWLLYIIHGFCGQS

SEQ ID NO: 32126 - protein, 4061 aa, Homo sapiens
  Payload ID: 6293
  Gene Symbol: FLG
  Gene Name: filaggrin
  Uniprot ID: P20930
  ENSP ID: ENSP00000357789
MSTLLENIFAIINLFKQYSKKDKNTDTLSKKELKELLEKEFRQILKNPDDPDMVDVFMDHLDIDHNKKIDFTEFLLMVFKLAQAYYESTRKENLPISGHKHRKHSHHDKHEDNKQEENKENRKRPSSLERRNNRKGNKGRSKSPRETGGKRHESSSEKKERKGYSPTHREEEYGKNHHNSSKKEKNKTENTRLGDNRKRLSERLEEKEDNEEGVYDYENTGRMTQKWIQSGHIATYYTIQDEAYDTTDSLLEENKIYERSRSSDGKSSSQVNRSRHENTSQVPLQESRTRKRRGSRVSQDRDSEGHSEDSERHSGSASRNHHGSAWEQSRDGSRHPRSHDEDRASHGHSADSSRQSGTRHAETSSRGQTASSHEQARSSPGERHGSGHQQSADSSRHSATGRGQASSAVSDRGHRGSSGSQASDSEGHSENSDTQSVSGHGKAGLRQQSHQESTRGRSGERSGRSGSSLYQVSTHEQPDSAHGRTGTSTGGRQGSHHEQARDSSRHSASQEGQDTIRGHPGSSRGGRQGSHHEQSVNRSGHSGSHHSHTTSQGRSDASHGQSGSRSASRQTRNEEQSGDGTRHSGSRHHEASSQADSSRHSQVGQGQSSGPRTSRNQGSSVSQDSDSQGHSEDSERWSGSASRNHHGSAQEQSRDGSRHPRSHHEDRAGHGHSADSSRKSGTRHTQNSSSGQAASSHEQARSSAGERHGSRHQLQSADSSRHSGTGHGQASSAVRDSGHRGSSGSQATDSEGHSEDSDTQSVSGHGQAGHHQQSHQESARDRSGERSRRSGSFLYQVSTHKQSESSHGWTGPSTGVRQGSHHEQARDNSRHSASQDGQDTIRGHPGSSRRGRQGSHHEQSVDRSGHSGSHHSHTTSQGRSDASRGQSGSRSASRTTRNEEQSRDGSRHSGSRHHEASSHADISRHSQAGQGQSEGSRTSRRQGSSVSQDSDSEGHSEDSERWSGSASRNHRGSAQEQSRHGSRHPRSHHEDRAGHGHSADSSRQSGTPHAETSSGGQAASSHEQARSSPGERHGSRHQQSADSSRHSGIPRRQASSAVRDSGHWGSSGSQASDSEGHSEESDTQSVSGHGQDGPHQQSHQESARDWSGGRSGRSGSFIYQVSTHEQSESAHGRTRTSTGRRQGSHHEQARDSSRHSASQEGQDTIRAHPGSRRGGRQGSHHEQSVDRSGHSGSHHSHTTSQGRSDASHGQSGSRSASRQTRKDKQSGDGSRHSGSRHHEAASWADSSRHSQVGQEQSSGSRTSRHQGSSVSQDSDSERHSDDSERLSGSASRNHHGSSREQSRDGSRHPGFHQEDRASHGHSADSSRQSGTHHTESSSHGQAVSSHEQARSSPGERHGSRHQQSADSSRHSGIGHRQASSAVRDSGHRGSSGSQVTNSEGHSEDSDTQSVSAHGQAGPHQQSHKESARGQSGESSGRSRSFLYQVSSHEQSESTHGQTAPSTGGRQGSRHEQARNSSRHSASQDGQDTIRGHPGSSRGGRQGSYHEQSVDRSGHSGYHHSHTTPQGRSDASHGQSGPRSASRQTRNEEQSGDGSRHSGSRHHEPSTRAGSSRHSQVGQGESAGSKTSRRQGSSVSQDRDSEGHSEDSERRSESASRNHYGSAREQSRHGSRNPRSHQEDRASHGHSAESSRQSGTRHAETSSGGQAASSQEQARSSPGERHGSRHQQSADSSTDSGTGRRQDSSVVGDSGNRGSSGSQASDSEGHSEESDTQSVSAHGQAGPHQQSHQESTRGQSGERSGRSGSFLYQVSTHEQSESAHGRTGPSTGGRQRSRHEQARDSSRHSASQEGQDTIRGHPGSSRGGRQGSHYEQSVDSSGHSGSHHSHTTSQERSDVSRGQSGSRSVSRQTRNEKQSGDGSRHSGSRHHEASSRADSSRHSQVGQGQSSGPRTSRNQGSSVSQDSDSQGHSEDSERWSGSASRNHLGSAWEQSRDGSRHPGSHHEDRAGHGHSADSSRQSGTRHTESSSRGQAASSHEQARSSAGERHGSHHQLQSADSSRHSGIGHGQASSAVRDSGHRGYSGSQASDSEGHSEDSDTQSVSAQGKAGPHQQSHKESARGQSGESSGRSGSFLYQVSTHEQSESTHGQSAPSTGGRQGSHYDQAQDSSRHSASQEGQDTIRGHPGPSRGGRQGSHQEQSVDRSGHSGSHHSHTTSQGRSDASRGQSGSRSASRKTYDKEQSGDGSRHSGSHHHEASSWADSSRHSLVGQGQSSGPRTSRPRGSSVSQDSDSEGHSEDSERRSGSASRNHHGSAQEQSRDGSRHPRSHHEDRAGHGHSAESSRQSGTHHAENSSGGQAASSHEQARSSAGERHGSHHQQSADSSRHSGIGHGQASSAVRDSGHRGSSGSQASDSEGHSEDSDTQSVSAHGQAGPHQQSHQESTRGRSAGRSGRSGSFLYQVSTHEQSESAHGRTGTSTGGRQGSHHKQARDSSRHSTSQEGQDTIHGHPGSSSGGRQGSHYEQLVDRSGHSGSHHSHTTSQGRSDASHGHSGSRSASRQTRNDEQSGDGSRHSGSRHHEASSRADSSGHSQVGQGQSEGPRTSRNWGSSFSQDSDSQGHSEDSERWSGSASRNHHGSAQEQLRDGSRHPRSHQEDRAGHGHSADSSRQSGTRHTQTSSGGQAASSHEQARSSAGERHGSHHQQSADSSRHSGIGHGQASSAVRDSGHRGYSGSQASDNEGHSEDSDTQSVSAHGQAGSHQQSHQESARGRSGETSGHSGSFLYQVSTHEQSESSHGWTGPSTRGRQGSRHEQAQDSSRHSASQDGQDTIRGHPGSSRGGRQGYHHEHSVDSSGHSGSHHSHTTSQGRSDASRGQSGSRSASRTTRNEEQSGDGSRHSGSRHHEASTHADISRHSQAVQGQSEGSRRSRRQGSSVSQDSDSEGHSEDSERWSGSASRNHHGSAQEQLRDGSRHPRSHQEDRAGHGHSADSSRQSGTRHTQTSSGGQAASSHEQARSSAGERHGSHHQQSADSSRHSGIGHGQASSAVRDSGHRGYSGSQASDNEGHSEDSDTQSVSAHGQAGSHQQSHQESARGRSGETSGHSGSFLYQVSTHEQSESSHGWTGPSTRGRQGSRHEQAQDSSRHSASQYGQDTIRGHPGSSRGGRQGYHHEHSVDSSGHSGSHHSHTTSQGRSDASRGQSGSRSASRTTRNEEQSGDSSRHSVSRHHEASTHADISRHSQAVQGQSEGSRRSRRQGSSVSQDSDSEGHSEDSERWSGSASRNHRGSVQEQSRHGSRHPRSHHEDRAGHGHSADRSRQSGTRHAETSSGGQAASSHEQARSSPGERHGSRHQQSADSSRHSGIPRGQASSAVRDSRHWGSSGSQASDSEGHSEESDTQSVSGHGQAGPHQQSHQESARDRSGGRSGRSGSFLYQVSTHEQSESAHGRTRTSTGRRQGSHHEQARDSSRHSASQEGQDTIRGHPGSSRRGRQGSHYEQSVDRSGHSGSHHSHTTSQGRSDASRGQSGSRSASRQTRNDEQSGDGSRHSWSHHHEASTQADSSRHSQSGQGQSAGPRTSRNQGSSVSQDSDSQGHSEDSERWSGSASRNHRGSAQEQSRDGSRHPTSHHEDRAGHGHSAESSRQSGTHHAENSSGGQAASSHEQARSSAGERHGSHHQQSADSSRHSGIGHGQASSAVRDSGHRGSSGSQASDSEGHSEDSDTQSVSAHGQAGPHQQSHQESTRGRSAGRSGRSGSFLYQVSTHEQSESAHGRAGPSTGGRQGSRHEQARDSSRHSASQEGQDTIRGHPGSRRGGRQGSYHEQSVDRSGHSGSHHSHTTSQGRSDASHGQSGSRSASRETRNEEQSGDGSRHSGSRHHEASTQADSSRHSQSGQGESAGSRRSRRQGSSVSQDSDSEAYPEDSERRSESASRNHHGSSREQSRDGSRHPGSSHRDTASHVQSSPVQSDSSTAKEHGHFSSLSQDSAYHSGIQSRGSPHSSSSYHYQSEGTERQKGQSGLVWRHGSYGSADYDYGESGFRHSQHGSVSYNSNPVVFKERSDICKASAFGKDHPRYYATYINKDPGLCGHSSDISKQLGFSQSQRYYYYE

SEQ ID NO: 32127 - protein, 2391 aa, Homo sapiens
  Payload ID: 6294
  Gene Symbol: FLG2
  Gene Name: filaggrin family member 2
  Uniprot ID: Q5D862
  ENSP ID: ENSP00000373370
MTDLLRSVVTVIDVFYKYTKQDGECGTLSKGELKELLEKELHPVLKNPDDPDTVDVIMHMLDRDHDRRLDFTEFLLMIFKLTMACNKVLSKEYCKASGSKKHRRGHRHQEEESETEEDEEDTPGHKSGYRHSSWSEGEEHGYSSGHSRGTVKCRHGSNSRRLGRQGNLSSSGNQEGSQKRYHRSSCGHSWSGGKDRHGSSSVELRERINKSHISPSRESGEEYESGSGSNSWERKGHGGLSCGLETSGHESNSTQSRIREQKLGSSCSGSGDSGRRSHACGYSNSSGCGRPQNASSSCQSHRFGGQGNQFSYIQSGCQSGIKGGQGHGCVSGGQPSGCGQPESNPCSQSYSQRGYGARENGQPQNCGGQWRTGSSQSSCCGQYGSGGSQSCSNGQHEYGSCGRFSNSSSSNEFSKCDQYGSGSSQSTSFEQHGTGLSQSSGFEQHVCGSGQTCGQHESTSSQSLGYDQHGSSSGKTSGFGQHGSGSGQSSGFGQCGSGSGQSSGFGQHGSVSGQSSGFGQHGSVSGQSSGFGQHESRSRQSSYGQHGSGSSQSSGYGQYGSRETSGFGQHGLGSGQSTGFGQYGSGSGQSSGFGQHGSGSGQSSGFGQHESRSGQSSYGQHSSGSSQSSGYGQHGSRQTSGFGQHGSGSSQSTGFGQYGSGSGQSSGFGQHVSGSGQSSGFGQHESRSGHSSYGQHGFGSSQSSGYGQHGSSSGQTSGFGQHELSSGQSSSFGQHGSGSGQSSGFGQHGSGSGQSSGFGQHESRSGQSSYGQHSSGSSQSSGYGQHGSRQTSGFGQHGSGSSQSTGFGQYGSGSGQSAGFGQHGSGSGQSSGFGQHESRSHQSSYGQHGSGSSQSSGYGQHGSSSGQTSGFGQHRSSSGQYSGFGQHGSGSGQSSGFGQHGTGSGQYSGFGQHESRSHQSSYGQHGSGSSQSSGYGQHGSSSGQTFGFGQHRSGSGQSSGFGQHGSGSGQSSGFGQHESGSGKSSGFGQHESRSSQSNYGQHGSGSSQSSGYGQHGSSSGQTTGFGQHRSSSGQYSGFGQHGSGSDQSSGFGQHGTGSGQSSGFGQYESRSRQSSYGQHGSGSSQSSGYGQHGSNSGQTSGFGQHRPGSGQSSGFGQYGSGSGQSSGFGQHGSGTGKSSGFAQHEYRSGQSSYGQHGTGSSQSSGCGQHESGSGPTTSFGQHVSGSDNFSSSGQHISDSGQSTGFGQYGSGSGQSTGLGQGESQQVESGSTVHGRQETTHGQTINTTRHSQSGQGQSTQTGSRVTRRRRSSQSENSDSEVHSKVSHRHSEHIHTQAGSHYPKSGSTVRRRQGTTHGQRGDTTRHGHSGHGQSTQTGSRTSGRQRFSHSDATDSEVHSGVSHRPHSQEQTHSQAGSQHGESESTVHERHETTYGQTGEATGHGHSGHGQSTQRGSRTTGRRGSGHSESSDSEVHSGGSHRPQSQEQTHGQAGSQHGESGSTVHGRHGTTHGQTGDTTRHAHYHHGKSTQRGSSTTGRRGSGHSESSDSEVHSGGSHTHSGHTHGQSGSQHGESESIIHDRHRITHGQTGDTTRHSYSGHEQTTQTGSRTTGRQRTSHSESTDSEVHSGGSHRPHSREHTYGQAGSQHEEPEFTVHERHGTTHGQIGDTTGHSHSGHGQSTQRGSRTTGRQRSSHSESSDSEVHSGVSHTHTGHTHGQAGSQHGQSESIVPERHGTTHGQTGDTTRHAHYHHGLTTQTGSRTTGRRGSGHSEYSDSEGYSGVSHTHSGHTHGQARSQHGESESIVHERHGTIHGQTGDTTRHAHSGHGQSTQTGSRTTGRRSSGHSEYSDSEGHSGFSQRPHSRGHTHGQAGSQHGESESIVDERHGTTHGQTGDTSGHSQSGHGQSTQSGSSTTGRRRSGHSESSDSEVHSGGSHTHSGHTHSQARSQHGESESTVHKRHQTTHGQTGDTTEHGHPSHGQTIQTGSRTTGRRGSGHSEYSDSEGPSGVSHTHSGHTHGQAGSHYPESGSSVHERHGTTHGQTADTTRHGHSGHGQSTQRGSRTTGRRASGHSEYSDSEGHSGVSHTHSGHAHGQAGSQHGESGSSVHERHGTTHGQTGDTTRHAHSGHGQSTQRGSRTAGRRGSGHSESSDSEVHSGVSHTHSGHTYGQARSQHGESGSAIHGRQGTIHGQTGDTTRHGQSGHGQSTQTGSRTTGRQRSSHSESSDSEVHSEASPTHSGHTHSQAGSRHGQSGSSGHGRQGTTHGQTGDTTRHAHYGYGQSTQRGSRTTGRRGSGHSESSDSEVHSWGSHTHSGHIQGQAGSQQRQPGSTVHGRLETTHGQTGDTTRHGHSGYGQSTQTGSRSSRASHFQSHSSERQRHGSSQVWKHGSYGPAEYDYGHTGYGPSGGSRKSISNSHLSWSTDSTANKQLSRH

SEQ ID NO: 32128 - protein, 1213 aa, Homo sapiens
  Payload ID: 6295
  Gene Symbol: FILIP1
  Gene Name: filamin A interacting protein 1
  Uniprot ID: Q7Z7B0
  ENSP ID: ENSP00000237172
MRSRNQGGESASDGHISCPKPSIIGNAGEKSLSEDAKKKKKSNRKEDDVMASGTVKRHLKTSGECERKTKKSLELSKEDLIQLLSIMEGELQAREDVIHMLKTEKTKPEVLEAHYGSAEPEKVLRVLHRDAILAQEKSIGEDVYEKPISELDRLEEKQKETYRRMLEQLLLAEKCHRRTVYELENEKHKHTDYMNKSDDFTNLLEQERERLKKLLEQEKAYQARKEKENAKRLNKLRDELVKLKSFALMLVDERQMHIEQLGLQSQKVQDLTQKLREEEEKLKAITSKSKEDRQKLLKLEVDFEHKASRFSQEHEEMNAKLANQESHNRQLRLKLVGLTQRIEELEETNKNLQKAEEELQELRDKIAKGECGNSSLMAEVENLRKRVLEMEGKDEEITKTESQCRELRKKLQEEEHHSKELRLEVEKLQKRMSELEKLEEAFSKSKSECTQLHLNLEKEKNLTKDLLNELEVVKSRVKELECSESRLEKAELSLKDDLTKLKSFTVMLVDERKNMMEKIKQEERKVDGLNKNFKVEQGKVMDVTEKLIEESKKLLKLKSEMEEKVYNLTRERDELIGKLKSEEEKSSELSCSVDLLKKRLDGIEEVEREITRGRSRKGSELTCPEDNKIKELTLEIERLKKRLQQLEVVEGDLMKTEDEYDQLEQKFRTEQDKANFLSQQLEEIKHQIAKNKAIEKGEVVSQEAELRHRFRLEEAKSRDLKAEVQALKEKIHELMNKEDQLSQLQVDYSVLQQRFMEEENKNKNMGQEVLNLTKELELSKRYSRALRPSVNGRRMVDVPVTSTGVQTDAVSGEAAEEETPAVFIRKSFQEENHIMSNLRQVGLKKPVERSSVLDRYPPAANELTMRKSWIPWMRKRENGPSITQEKGPRTNSSPGHPGEVVLSPKQGQPLHIRVTPDHENSTATLEITSPTSEEFFSSTTVIPTLGNQKPRITIIPSPNVMPQKQKSGDTTLGPERAMSPVTITTFSREKTPESGRGAFADRPTSPIQIMTVSTSAAPAEIAVSPESQEMPMGRTILKVTPEKQTVPTPVRKYNSNANIITTEDNKIHIHLGSQFKRSPGTSGEGVSPVITVRPVNVTAEKEVSTGTVLRSPRNHLSSRPGASKVTSTITITPVTTSSARGTQSVSGQDGSSQRPTPTRIPMSKGMKAGKPVVAAPGAGNLTKFEPRAETQSMKIELKKSAASSTTSLGGGKG

SEQ ID NO: 32129 - protein, 1114 aa, Homo sapiens
  Payload ID: 6295
  Gene Symbol: FILIP1
  Gene Name: filamin A interacting protein 1
  ENSP ID: ENSP00000359037
MLKTEKTKPEVLEAHYGSAEPEKVLRVLHRDAILAQEKSIGEDVYEKPISELDRLEEKQKETYRRMLEQLLLAEKCHRRTVYELENEKHKHTDYMNKSDDFTNLLEQERERLKKLLEQEKAYQARKEKENAKRLNKLRDELVKLKSFALMLVDERQMHIEQLGLQSQKVQDLTQKLREEEEKLKAITSKSKEDRQKLLKLEVDFEHKASRFSQEHEEMNAKLANQESHNRQLRLKLVGLTQRIEELEETNKNLQKAEEELQELRDKIAKGECGNSSLMAEVENLRKRVLEMEGKDEEITKTESQCRELRKKLQEEEHHSKELRLEVEKLQKRMSELEKLEEAFSKSKSECTQLHLNLEKEKNLTKDLLNELEVVKSRVKELECSESRLEKAELSLKDDLTKLKSFTVMLVDERKNMMEKIKQEERKVDGLNKNFKVEQGKVMDVTEKLIEESKKLLKLKSEMEEKVYNLTRERDELIGKLKSEEEKSSELSCSVDLLKKRLDGIEEVEREITRGRSRKGSELTCPEDNKIKELTLEIERLKKRLQQLEVVEGDLMKTEDEYDQLEQKFRTEQDKANFLSQQLEEIKHQIAKNKAIEKGEVVSQEAELRHRFRLEEAKSRDLKAEVQALKEKIHELMNKEDQLSQLQVDYSVLQQRFMEEENKNKNMGQEVLNLTKELELSKRYSRALRPSVNGRRMVDVPVTSTGVQTDAVSGEAAEEETPAVFIRKSFQEENHIMSNLRQVGLKKPVERSSVLDRYPPAANELTMRKSWIPWMRKRENGPSITQEKGPRTNSSPGHPGEVVLSPKQGQPLHIRVTPDHENSTATLEITSPTSEEFFSSTTVIPTLGNQKPRITIIPSPNVMPQKQKSGDTTLGPERAMSPVTITTFSREKTPESGRGAFADRPTSPIQIMTVSTSAAPAEIAVSPESQEMPMGRTILKVTPEKQTVPTPVRKYNSNANIITTEDNKIHIHLGSQFKRSPGTSGEGVSPVITVRPVNVTAEKEVSTGTVLRSPRNHLSSRPGASKVTSTITITPVTTSSARGTQSVSGQDGSSQRPTPTRIPMSKGMKAGKPVVAAPGAGNLTKFEPRAETQSMKIELKKSAASSTTSLGGGKG

SEQ ID NO: 32130 - protein, 1177 aa, Homo sapiens
  Payload ID: 6295
  Gene Symbol: FILIP1
  Gene Name: filamin A interacting protein 1
  Uniprot ID: Q7Z7B0
  ENSP ID: ENSP00000376728
MRSRNQGGESASDGHISCPKPSIIGNAGEKSLSEDAKKKKKSNRKEDDVMASGTVKRHLKTSGECERKTKKSLELSKEDLIQLLSIMEGELQAREDVIHMLKTEKTKPEVLEAHYGSAEPEKVLRVLHRDAILAQEKSIGEDVYEKPISELDRLEEKQKETYRRMLEQLLLAEKCHRRTVYELENEKHKHTDYMNKSDDFTNLLEQERERLKKLLEQEKAYQARKEKENAKRLNKLRDELVKLKSFALMLVDERQMHIEQLGLQSQKVQDLTQKLREEEEKLKAITSKSKEDRQKLLKLEVDFEHKASRFSQEHEEMNAKLANQESHNRQLRLKLVGLTQRIEELEETNKNLQKAEEELQELRDKIAKGECGNSSLMAEVENLRKRVLEMEGKDEEITKTESQCRELRKKLQEEEHHSKELRLEVEKLQKRMSELEKLEEAFSKSKSECTQLHLNLEKEKNLTKDLLNELEVVKSRVKELECSESRLEKAELSLKDDLTKLKSFTVMLVDERKNMMEKIKQEERKVDGLNKNFKVEQGKVMDVTEKLIEESKKLLKLKSEMEEKVYNLTRERDELIGKLKSEEEKSSELSCSVDLLKKRLDGIEEVEREITRGRSRKGSELTCPEDNKIKELTLEIERLKKRLQQLEVVEGDLMKTEDEYDQLEQKFRTEQDKANFLSQQLEEIKHQIAKNKAIEKGEVVSQEAELRHRFRLEEAKSRDLKAEVQALKEKIHELMNKEDQLSQLQVDYSVLQQRFMEEENKNKNMGQEVLNLTKELELSKRYSRALRPSVNGRRMVDVPVTSTGVQTDAVSGEAAEEETPAVFIRKSFQEENHIMSNLRQVGLKKPVERSSVLDRYPPAANELTMRKSWIPWMRKRENGPSITQEKGPRTNSSPGHPGEVVLSPKQGQPLHIRVTPDHENSTATLEITSPTSEEFFSSTTVIPTLGNQKPRITIIPSPNVMPQKQKSGDTTLGPERAMSPVTITTFSREKTPESGRGAFADRPTSPIQIMTVSTSAAPAEIAVSPESQEMPMGRTILKVTPEKQTVPTPVRKYNSNANIITTEDNKIHIHLGSQFKRSPGTSGEGVSPVITVRPVNVTAEKEVSTGTVLRSPRNHLSSRPGASKVTSTITITPVTTSSARGTQSVSGQDGSSQRPTPTRIPMSKESIIIHQLRMNSR

SEQ ID NO: 32131 - protein, 1133 aa, Homo sapiens
  Payload ID: 6296
  Gene Symbol: FILIP1L
  Gene Name: filamin A interacting protein 1-like
  Uniprot ID: Q4L180
  ENSP ID: ENSP00000327880
MRSRGSDTEGSAQKKFPRHTKGHSFQGPKNMKHRQQDKDSPSESDVILPCPKAEKPHSGNGHQAEDLSRDDLLFLLSILEGELQARDEVIGILKAEKMDLALLEAQYGFVTPKKVLEALQRDAFQAKSTPWQEDIYEKPMNELDKVVEKHKESYRRILGQLLVAEKSRRQTILELEEEKRKHKEYMEKSDEFICLLEQECERLKKLIDQEIKSQEEKEQEKEKRVTTLKEELTKLKSFALMVVDEQQRLTAQLTLQRQKIQELTTNAKETHTKLALAEARVQEEEQKATRLEKELQTQTTKFHQDQDTIMAKLTNEDSQNRQLQQKLAALSRQIDELEETNRSLRKAEEELQDIKEKISKGEYGNAGIMAEVEELRKRVLDMEGKDEELIKMEEQCRDLNKRLERETLQSKDFKLEVEKLSKRIMALEKLEDAFNKSKQECYSLKCNLEKERMTTKQLSQELESLKVRIKELEAIESRLEKTEFTLKEDLTKLKTLTVMFVDERKTMSEKLKKTEDKLQAASSQLQVEQNKVTTVTEKLIEETKRALKSKTDVEEKMYSVTKERDDLKNKLKAEEEKGNDLLSRVNMLKNRLQSLEAIEKDFLKNKLNQDSGKSTTALHQENNKIKELSQEVERLKLKLKDMKAIEDDLMKTEDEYETLERRYANERDKAQFLSKELEHVKMELAKYKLAEKTETSHEQWLFKRLQEEEAKSGHLSREVDALKEKIHEYMATEDLICHLQGDHSVLQKKLNQQENRNRDLGREIENLTKELERYRHFSKSLRPSLNGRRISDPQVFSKEVQTEAVDNEPPDYKSLIPLERAVINGQLYEESENQDEDPNDEGSVLSFKCSQSTPCPVNRKLWIPWMKSKEGHLQNGKMQTKPNANFVQPGDLVLSHTPGQPLHIKVTPDHVQNTATLEITSPTTESPHSYTSTAVIPNCGTPKQRITILQNASITPVKSKTSTEDLMNLEQGMSPITMATFARAQTPESCGSLTPERTMSPIQVLAVTGSASSPEQGRSPEPTEISAKHAIFRVSPDRQSSWQFQRSNSNSSSVITTEDNKIHIHLGSPYMQAVASPVRPASPSAPLQDNRTQGLINGALNKTTNKVTSSITITPTATPLPRQSQITVSNIYN

SEQ ID NO: 32132 - protein, 1135 aa, Homo sapiens
  Payload ID: 6296
  Gene Symbol: FILIP1L
  Gene Name: filamin A interacting protein 1-like
  Uniprot ID: Q4L180
  ENSP ID: ENSP00000346560
MRSRGSDTEGSAQKKFPRHTKGHSFQGPKNMKHRQQDKDSPSESDVILPCPKAEKPHSGNGHQAEDLSRDDLLFLLSILEGELQARDEVIGILKAEKMDLALLEAQYGFVTPKKVLEALQRDAFQAKSTPWQEDIYEKPMNELDKVVEKHKESYRRILGQLLVAEKSRRQTILELEEEKRKHKEYMEKSDEFICLLEQECERLKKLIDQEIKSQEEKEQEKEKRVTTLKEELTKLKSFALMVVDEQQRLTAQLTLQRQKIQELTTNAKETHTKLALAEARVQEEEQKATRLEKELQTQTTKFHQDQDTIMAKLTNEDSQNRQLQQKLAALSRQIDELEETNRSLRKAEEELQDIKEKISKGEYGNAGIMAEVEELRKRVLDMEGKDEELIKMEEQCRDLNKRLERETLQSKDFKLEVEKLSKRIMALEKLEDAFNKSKQECYSLKCNLEKERMTTKQLSQELESLKVRIKELEAIESRLEKTEFTLKEDLTKLKTLTVMFVDERKTMSEKLKKTEDKLQAASSQLQVEQNKVTTVTEKLIEETKRALKSKTDVEEKMYSVTKERDDLKNKLKAEEEKGNDLLSRVNMLKNRLQSLEAIEKDFLKNKLNQDSGKSTTALHQENNKIKELSQEVERLKLKLKDMKAIEDDLMKTEDEYETLERRYANERDKAQFLSKELEHVKMELAKYKLAEKTETSHEQWLFKRLQEEEAKSGHLSREVDALKEKIHEYMATEDLICHLQGDHSVLQKKLNQQENRNRDLGREIENLTKELERYRHFSKSLRPSLNGRRISDPQVFSKEVQTEAVDNEPPDYKSLIPLERAVINGQLYEESENQDEDPNDEGSVLSFKCSQSTPCPVNRKLWIPWMKSKEGHLQNGKMQTKPNANFVQPGDLVLSHTPGQPLHIKVTPDHVQNTATLEITSPTTESPHSYTSTAVIPNCGTPKQRITILQNASITPVKSKTSTEDLMNLEQGMSPITMATFARAQTPESCGSLTPERTMSPIQVLAVTGSASSPEQGRSPEPTEISAKHAIFRVSPDRQSSWQFQRSNSNSSSVITTEDNKIHIHLGSPYMQAVASPVRPASPSAPLQDNRTQGLINGALNKTTNKVTSSITITPTATPLPRQSQITVEPLLLPH

SEQ ID NO: 32133 - protein, 893 aa, Homo sapiens
  Payload ID: 6296
  Gene Symbol: FILIP1L
  Gene Name: filamin A interacting protein 1-like
  Uniprot ID: Q4L180
  ENSP ID: ENSP00000373192
MVVDEQQRLTAQLTLQRQKIQELTTNAKETHTKLALAEARVQEEEQKATRLEKELQTQTTKFHQDQDTIMAKLTNEDSQNRQLQQKLAALSRQIDELEETNRSLRKAEEELQDIKEKISKGEYGNAGIMAEVEELRKRVLDMEGKDEELIKMEEQCRDLNKRLERETLQSKDFKLEVEKLSKRIMALEKLEDAFNKSKQECYSLKCNLEKERMTTKQLSQELESLKVRIKELEAIESRLEKTEFTLKEDLTKLKTLTVMFVDERKTMSEKLKKTEDKLQAASSQLQVEQNKVTTVTEKLIEETKRALKSKTDVEEKMYSVTKERDDLKNKLKAEEEKGNDLLSRVNMLKNRLQSLEAIEKDFLKNKLNQDSGKSTTALHQENNKIKELSQEVERLKLKLKDMKAIEDDLMKTEDEYETLERRYANERDKAQFLSKELEHVKMELAKYKLAEKTETSHEQWLFKRLQEEEAKSGHLSREVDALKEKIHEYMATEDLICHLQGDHSVLQKKLNQQENRNRDLGREIENLTKELERYRHFSKSLRPSLNGRRISDPQVFSKEVQTEAVDNEPPDYKSLIPLERAVINGQLYEESENQDEDPNDEGSVLSFKCSQSTPCPVNRKLWIPWMKSKEGHLQNGKMQTKPNANFVQPGDLVLSHTPGQPLHIKVTPDHVQNTATLEITSPTTESPHSYTSTAVIPNCGTPKQRITILQNASITPVKSKTSTEDLMNLEQGMSPITMATFARAQTPESCGSLTPERTMSPIQVLAVTGSASSPEQGRSPEPTEISAKHAIFRVSPDRQSSWQFQRSNSNSSSVITTEDNKIHIHLGSPYMQAVASPVRPASPSAPLQDNRTQGLINGALNKTTNKVTSSITITPTATPLPRQSQITVSNIYN

SEQ ID NO: 32134 - protein, 255 aa, Homo sapiens
  Payload ID: 6296
  Gene Symbol: FILIP1L
  Gene Name: filamin A interacting protein 1-like
  Uniprot ID: Q4L180
  ENSP ID: ENSP00000381371
MRSRGSDTEGSAQKKFPRHTKGHSFQGPKNMKHRQQDKDSPSESDVILPCPKAEKPHSGNGHQAEDLSRDDLLFLLSILEGELQARDEVIGILKAEKMDLALLEAQYGFVTPKKVLEALQRDAFQAKSTPWQEDIYEKPMNELDKVVEKHKESYRRILGQLLVAEKSRRQTILELEEEKRKHKEYMEKSDEFICLLEQECERWSLALLPRLECNGMILAHCNLCLLGSSDSPASAFQVAGITGTRHHAQLVFVFL

SEQ ID NO: 32135 - protein, 148 aa, Homo sapiens
  Payload ID: 6296
  Gene Symbol: FILIP1L
  Gene Name: filamin A interacting protein 1-like
  ENSP ID: ENSP00000417617
PTEISAKHAIFRVSPDRQSSWQFQRSNSNSSSVITTEDNKIHIHLGSPYMQAVASPVRPASPSAPLQDNRTQGLINGALNKTTNKVTSSITITPTATPLPRQSQITIKEVCKQRIPARIPKPKSTGITKISTKAPTVPMDKPIYQNGC

SEQ ID NO: 32136 - protein, 711 aa, Homo sapiens
  Payload ID: 6296
  Gene Symbol: FILIP1L
  Gene Name: filamin A interacting protein 1-like
  Uniprot ID: Q4L180
  ENSP ID: ENSP00000417774
MALEKLEDAFNKSKQECYSLKCNLEKERMTTKQLSQELESLKVRIKELEAIESRLEKTEFTLKEDLTKLKTLTVMFVDERKTMSEKLKKTEDKLQAASSQLQVEQNKVTTVTEKLIEETKRALKSKTDVEEKMYSVTKERDDLKNKLKAEEEKGNDLLSRVNMLKNRLQSLEAIEKDFLKNKLNQDSGKSTTALHQENNKIKELSQEVERLKLKLKDMKAIEDDLMKTEDEYETLERRYANERDKAQFLSKELEHVKMELAKYKLAEKTETSHEQWLFKRLQEEEAKSGHLSREVDALKEKIHEYMATEDLICHLQGDHSVLQKKLNQQENRNRDLGREIENLTKELERYRHFSKSLRPSLNGRRISDPQVFSKEVQTEAVDNEPPDYKSLIPLERAVINGQLYEESENQDEDPNDEGSVLSFKCSQSTPCPVNRKLWIPWMKSKEGHLQNGKMQTKPNANFVQPGDLVLSHTPGQPLHIKVTPDHVQNTATLEITSPTTESPHSYTSTAVIPNCGTPKQRITILQNASITPVKSKTSTEDLMNLEQGMSPITMATFARAQTPESCGSLTPERTMSPIQVLAVTGSASSPEQGRSPEPTEISAKHAIFRVSPDRQSSWQFQRSNSNSSSVITTEDNKIHIHLGSPYMQAVASPVRPASPSAPLQDNRTQGLINGALNKTTNKVTSSITITPTATPLPRQSQITVEPLLLPH

SEQ ID NO: 32137 - protein, 895 aa, Homo sapiens
  Payload ID: 6296
  Gene Symbol: FILIP1L
  Gene Name: filamin A interacting protein 1-like
  Uniprot ID: Q4L180
  ENSP ID: ENSP00000419642
MVVDEQQRLTAQLTLQRQKIQELTTNAKETHTKLALAEARVQEEEQKATRLEKELQTQTTKFHQDQDTIMAKLTNEDSQNRQLQQKLAALSRQIDELEETNRSLRKAEEELQDIKEKISKGEYGNAGIMAEVEELRKRVLDMEGKDEELIKMEEQCRDLNKRLERETLQSKDFKLEVEKLSKRIMALEKLEDAFNKSKQECYSLKCNLEKERMTTKQLSQELESLKVRIKELEAIESRLEKTEFTLKEDLTKLKTLTVMFVDERKTMSEKLKKTEDKLQAASSQLQVEQNKVTTVTEKLIEETKRALKSKTDVEEKMYSVTKERDDLKNKLKAEEEKGNDLLSRVNMLKNRLQSLEAIEKDFLKNKLNQDSGKSTTALHQENNKIKELSQEVERLKLKLKDMKAIEDDLMKTEDEYETLERRYANERDKAQFLSKELEHVKMELAKYKLAEKTETSHEQWLFKRLQEEEAKSGHLSREVDALKEKIHEYMATEDLICHLQGDHSVLQKKLNQQENRNRDLGREIENLTKELERYRHFSKSLRPSLNGRRISDPQVFSKEVQTEAVDNEPPDYKSLIPLERAVINGQLYEESENQDEDPNDEGSVLSFKCSQSTPCPVNRKLWIPWMKSKEGHLQNGKMQTKPNANFVQPGDLVLSHTPGQPLHIKVTPDHVQNTATLEITSPTTESPHSYTSTAVIPNCGTPKQRITILQNASITPVKSKTSTEDLMNLEQGMSPITMATFARAQTPESCGSLTPERTMSPIQVLAVTGSASSPEQGRSPEPTEISAKHAIFRVSPDRQSSWQFQRSNSNSSSVITTEDNKIHIHLGSPYMQAVASPVRPASPSAPLQDNRTQGLINGALNKTTNKVTSSITITPTATPLPRQSQITVEPLLLPH

SEQ ID NO: 32138 - protein, 837 aa, Homo sapiens
  Payload ID: 6296
  Gene Symbol: FILIP1L
  Gene Name: filamin A interacting protein 1-like
  ENSP ID: ENSP00000419874
MVVDEQQRLTAQLTLQRQKIQELTTNAKETHTKLALAEARVQEEEQKATRLEKELQTQTTKFHQDQDTIMAKLTNEDSQNRQLQQKLAALSRQIDELEETNRSLRKAEEELQDIKEKISKGEYGNAGIMAEVEELRKRVLDMEGKDEELIKMEEQCRDLNKRLERETLQSKDFKLEVEKLSKRIMALEKLEDAFNKSKQECYSLKCNLEKERMTTKQLSQELESLKVRIKELEAIESRLEKTEFTLKEDLTKLKTLTVMFVDERKTMSEKLKKTEDKLQAASSQLQVEQNKVTTVTEKLIEETKRALKSKTDVEEKMYSVTKERDDLKNKLKAEEEKGNDLLSRVNMLKNRLQSLEAIEKDFLKNKLNQDSGKSTTALHQENNKIKELSQEVERLKLKLKDMKAIEDDLMKTEDEYETLERRYANERDKAQFLSKELEHVKMELAKYKLAEKTETSHEQWLFKRLQEEEAKSGHLSREVDALKEKIHEYMATEDLICHLQGDHSVLQKKLNQQENRNRDLGREIENLTKELERYRHFSKSLRPSLNGRRISDPQVFSKEVQTEAVDNEPPDYKSLIPLERAVINGQLYEESENQDEDPNDEGSVLSFKCSQSTPCPVNRKLWIPWMKSKEGHLQNGKMQTKPNANFVQPGDLVLSHTPGQPLHIKVTPDHVQNTATLEITSPTTESPHSYTSTAVIPNCGTPKQRITILQNASITPVKSKTSTEDLMNLEQGMSPITMATFARAQTPESCGSLTPERTMSPIQVLAVTGSASSPEQGRSPEPTEISAKHAIFRVSPDRQSSWQFQRSNSNSSSVITTEDNKIHIHLGSPYMQAVASP

SEQ ID NO: 32139 - protein, 2639 aa, Homo sapiens
  Payload ID: 6297
  Gene Symbol: FLNA
  Gene Name: filamin A, alpha
  Uniprot ID: P21333
  ENSP ID: ENSP00000353467
MSSSHSRAGQSAAGAAPGGGVDTRDAEMPATEKDLAEDAPWKKIQQNTFTRWCNEHLKCVSKRIANLQTDLSDGLRLIALLEVLSQKKMHRKHNQRPTFRQMQLENVSVALEFLDRESIKLVSIDSKAIVDGNLKLILGLIWTLILHYSISMPMWDEEEDEEAKKQTPKQRLLGWIQNKLPQLPITNFSRDWQSGRALGALVDSCAPGLCPDWDSWDASKPVTNAREAMQQADDWLGIPQVITPEEIVDPNVDEHSVMTYLSQFPKAKLKPGAPLRPKLNPKKARAYGPGIEPTGNMVKKRAEFTVETRSAGQGEVLVYVEDPAGHQEEAKVTANNDKNRTFSVWYVPEVTGTHKVTVLFAGQHIAKSPFEVYVDKSQGDASKVTAQGPGLEPSGNIANKTTYFEIFTAGAGTGEVEVVIQDPMGQKGTVEPQLEARGDSTYRCSYQPTMEGVHTVHVTFAGVPIPRSPYTVTVGQACNPSACRAVGRGLQPKGVRVKETADFKVYTKGAGSGELKVTVKGPKGEERVKQKDLGDGVYGFEYYPMVPGTYIVTITWGGQNIGRSPFEVKVGTECGNQKVRAWGPGLEGGVVGKSADFVVEAIGDDVGTLGFSVEGPSQAKIECDDKGDGSCDVRYWPQEAGEYAVHVLCNSEDIRLSPFMADIRDAPQDFHPDRVKARGPGLEKTGVAVNKPAEFTVDAKHGGKAPLRVQVQDNEGCPVEALVKDNGNGTYSCSYVPRKPVKHTAMVSWGGVSIPNSPFRVNVGAGSHPNKVKVYGPGVAKTGLKAHEPTYFTVDCAEAGQGDVSIGIKCAPGVVGPAEADIDFDIIRNDNDTFTVKYTPRGAGSYTIMVLFADQATPTSPIRVKVEPSHDASKVKAEGPGLSRTGVELGKPTHFTVNAKAAGKGKLDVQFSGLTKGDAVRDVDIIDHHDNTYTVKYTPVQQGPVGVNVTYGGDPIPKSPFSVAVSPSLDLSKIKVSGLGEKVDVGKDQEFTVKSKGAGGQGKVASKIVGPSGAAVPCKVEPGLGADNSVVRFLPREEGPYEVEVTYDGVPVPGSPFPLEAVAPTKPSKVKAFGPGLQGGSAGSPARFTIDTKGAGTGGLGLTVEGPCEAQLECLDNGDGTCSVSYVPTEPGDYNINILFADTHIPGSPFKAHVVPCFDASKVKCSGPGLERATAGEVGQFQVDCSSAGSAELTIEICSEAGLPAEVYIQDHGDGTHTITYIPLCPGAYTVTIKYGGQPVPNFPSKLQVEPAVDTSGVQCYGPGIEGQGVFREATTEFSVDARALTQTGGPHVKARVANPSGNLTETYVQDRGDGMYKVEYTPYEEGLHSVDVTYDGSPVPSSPFQVPVTEGCDPSRVRVHGPGIQSGTTNKPNKFTVETRGAGTGGLGLAVEGPSEAKMSCMDNKDGSCSVEYIPYEAGTYSLNVTYGGHQVPGSPFKVPVHDVTDASKVKCSGPGLSPGMVRANLPQSFQVDTSKAGVAPLQVKVQGPKGLVEPVDVVDNADGTQTVNYVPSREGPYSISVLYGDEEVPRSPFKVKVLPTHDASKVKASGPGLNTTGVPASLPVEFTIDAKDAGEGLLAVQITDPEGKPKKTHIQDNHDGTYTVAYVPDVTGRYTILIKYGGDEIPFSPYRVRAVPTGDASKCTVTGAGIGPTIQIGEETVITVDTKAAGKGKVTCTVCTPDGSEVDVDVVENEDGTFDIFYTAPQPGKYVICVRFGGEHVPNSPFQVTALAGDQPSVQPPLRSQQLAPQYTYAQGGQQTWAPERPLVGVNGLDVTSLRPFDLVIPFTIKKGEITGEVRMPSGKVAQPTITDNKDGTVTVRYAPSEAGLHEMDIRYDNMHIPGSPLQFYVDYVNCGHVTAYGPGLTHGVVNKPATFTVNTKDAGEGGLSLAIEGPSKAEISCTDNQDGTCSVSYLPVLPGDYSILVKYNEQHVPGSPFTARVTGDDSMRMSHLKVGSAADIPINISETDLSLLTATVVPPSGREEPCLLKRLRNGHVGISFVPKETGEHLVHVKKNGQHVASSPIPVVISQSEIGDASRVRVSGQGLHEGHTFEPAEFIIDTRDAGYGGLSLSIEGPSKVDINTEDLEDGTCRVTYCPTEPGNYIINIKFADQHVPGSPFSVKVTGEGRVKESITRRRRAPSVANVGSHCDLSLKIPEISIQDMTAQVTSPSGKTHEAEIVEGENHTYCIRFVPAEMGTHTVSVKYKGQHVPGSPFQFTVGPLGEGGAHKVRAGGPGLERAEAGVPAEFSIWTREAGAGGLAIAVEGPSKAEISFEDRKDGSCGVAYVVQEPGDYEVSVKFNEEHIPDSPFVVPVASPSGDARRLTVSSLQESGLKVNQPASFAVSLNGAKGAIDAKVHSPSGALEECYVTEIDQDKYAVRFIPRENGVYLIDVKFNGTHIPGSPFKIRVGEPGHGGDPGLVSAYGAGLEGGVTGNPAEFVVNTSNAGAGALSVTIDGPSKVKMDCQECPEGYRVTYTPMAPGSYLISIKYGGPYHIGGSPFKAKVTGPRLVSNHSLHETSSVFVDSLTKATCAPQHGAPGPGPADASKVVAKGLGLSKAYVGQKSSFTVDCSKAGNNMLLVGVHGPRTPCEEILVKHVGSRLYSVSYLLKDKGEYTLVVKWGDEHIPGSPYRVVVP

SEQ ID NO: 32140 - protein, 2607 aa, Homo sapiens
  Payload ID: 6297
  Gene Symbol: FLNA
  Gene Name: filamin A, alpha
  ENSP ID: ENSP00000358863
MSSSHSRAGQSAAGAAPGGGVDTRDAEMPATEKDLAEDAPWKKIQQNTFTRWCNEHLKCVSKRIANLQTDLSDGLRLIALLEVLSQKKMHRKHNQRPTFRQMQLENVSVALEFLDRESIKLVSIDSKAIVDGNLKLILGLIWTLILHYSISMPMWDEEEDEEAKKQTPKQRLLGWIQNKLPQLPITNFSRDWQSGRALGALVDSCAPGLCPDWDSWDASKPVTNAREAMQQADDWLGIPQVITPEEIVDPNVDEHSVMTYLSQFPKAKLKPGAPLRPKLNPKKARAYGPGIEPTGNMVKKRAEFTVETRSAGQGEVLVYVEDPAGHQEEAKVTANNDKNRTFSVWYVPEVTGTHKVTVLFAGQHIAKSPFEVYVDKSQGDASKVTAQGPGLEPSGNIANKTTYFEIFTAGAGTGEVEVVIQDPMGQKGTVEPQLEARGDSTYRCSYQPTMEGVHTVHVTFAGVPIPRSPYTVTVGQACNPSACRAVGRGLQPKGVRVKETADFKVYTKGAGSGELKVTVKGPKGEERVKQKDLGDGVYGFEYYPMVPGTYIVTITWGGQNIGRSPFEVKVGTECGNQKVRAWGPGLEGGVVGKSADFVVEAIGDDVGTLGFSVEGPSQAKIECDDKGDGSCDVRYWPQEAGEYAVHVLCNSEDIRLSPFMADIRDAPQDFHPDRVKARGPGLEKTGVAVNKPAEFTVDAKHGGKAPLRVQVQDNEGCPVEALVKDNGNGTYSCSYVPRKPVKHTAMVSWGGVSIPNSPFRVNVGAGSHPNKVKVYGPGVAKTGLKAHEPTYFTVDCAEAGQGDVSIGIKCAPGVVGPAEADIDFDIIRNDNDTFTVKYTPRGAGSYTIMVLFADQATPTSPIRVKVEPSHDASKVKAEGPGLSRTGVELGKPTHFTVNAKAAGKGKLDVQFSGLTKGDAVRDVDIIDHHDNTYTVKYTPVQQGPVGVNVTYGGDPIPKSPFSVAVSPSLDLSKIKVSGLGEKVDVGKDQEFTVKSKGAGGQGKVASKIVGPSGAAVPCKVEPGLGADNSVVRFLPREEGPYEVEVTYDGVPVPGSPFPLEAVAPTKPSKVKAFGPGLQGGSAGSPARFTIDTKGAGTGGLGLTVEGPCEAQLECLDNGDGTCSVSYVPTEPGDYNINILFADTHIPGSPFKAHVVPCFDASKVKCSGPGLERATAGEVGQFQVDCSSAGSAELTIEICSEAGLPAEVYIQDHGDGTHTITYIPLCPGAYTVTIKYGGQPVPNFPSKLQVEPAVDTSGVQCYGPGIEGQGVFREATTEFSVDARALTQTGGPHVKARVANPSGNLTETYVQDRGDGMYKVEYTPYEEGLHSVDVTYDGSPVPSSPFQVPVTEGCDPSRVRVHGPGIQSGTTNKPNKFTVETRGAGTGGLGLAVEGPSEAKMSCMDNKDGSCSVEYIPYEAGTYSLNVTYGGHQVPGSPFKVPVHDVTDASKVKCSGPGLSPGMVRANLPQSFQVDTSKAGVAPLQVKVQGPKGLVEPVDVVDNADGTQTVNYVPSREGPYSISVLYGDEEVPRSPFKVKVLPTHDASKVKASGPGLNTTGVPASLPVEFTIDAKDAGEGLLAVQITDPEGKPKKTHIQDNHDGTYTVAYVPDVTGRYTILIKYGGDEIPFSPYRVRAVPTGDASKCTVTGAGIGPTIQIGEETVITVDTKAAGKGKVTCTVCTPDGSEVDVDVVENEDGTFDIFYTAPQPGKYVICVRFGGEHVPNSPFQVTAPERPLVGVNGLDVTSLRPFDLVIPFTIKKGEITGEVRMPSGKVAQPTITDNKDGTVTVRYAPSEAGLHEMDIRYDNMHIPGSPLQFYVDYVNCGHVTAYGPGLTHGVVNKPATFTVNTKDAGEGGLSLAIEGPSKAEISCTDNQDGTCSVSYLPVLPGDYSILVKYNEQHVPGSPFTARVTGDDSMRMSHLKVGSAADIPINISETDLSLLTATVVPPSGREEPCLLKRLRNGHVGISFVPKETGEHLVHVKKNGQHVASSPIPVVISQSEIGDASRVRVSGQGLHEGHTFEPAEFIIDTRDAGYGGLSLSIEGPSKVDINTEDLEDGTCRVTYCPTEPGNYIINIKFADQHVPGSPFSVKVTGEGRVKESITRRRRAPSVANVGSHCDLSLKIPEISIQDMTAQVTSPSGKTHEAEIVEGENHTYCIRFVPAEMGTHTVSVKYKGQHVPGSPFQFTVGPLGEGGAHKVRAGGPGLERAEAGVPAEFSIWTREAGAGGLAIAVEGPSKAEISFEDRKDGSCGVAYVVQEPGDYEVSVKFNEEHIPDSPFVVPVASPSGDARRLTVSSLQESGLKVNQPASFAVSLNGAKGAIDAKVHSPSGALEECYVTEIDQDKYAVRFIPRENGVYLIDVKFNGTHIPGSPFKIRVGEPGHGGDPGLVSAYGAGLEGGVTGNPAEFVVNTSNAGAGALSVTIDGPSKVKMDCQECPEGYRVTYTPMAPGSYLISIKYGGPYHIGGSPFKAKVTGPRLVSNHSLHETSSVFVDSLTKATCAPQHGAPGPGPADASKVVAKGLGLSKAYVGQKSSFTVDCSKAGNNMLLVGVHGPRTPCEEILVKHVGSRLYSVSYLLKDKGEYTLVVKWGDEHIPGSPYRVVVP

SEQ ID NO: 32141 - protein, 2647 aa, Homo sapiens
  Payload ID: 6297
  Gene Symbol: FLNA
  Gene Name: filamin A, alpha
  Uniprot ID: P21333
  ENSP ID: ENSP00000358866
MSSSHSRAGQSAAGAAPGGGVDTRDAEMPATEKDLAEDAPWKKIQQNTFTRWCNEHLKCVSKRIANLQTDLSDGLRLIALLEVLSQKKMHRKHNQRPTFRQMQLENVSVALEFLDRESIKLVSIDSKAIVDGNLKLILGLIWTLILHYSISMPMWDEEEDEEAKKQTPKQRLLGWIQNKLPQLPITNFSRDWQSGRALGALVDSCAPGLCPDWDSWDASKPVTNAREAMQQADDWLGIPQVITPEEIVDPNVDEHSVMTYLSQFPKAKLKPGAPLRPKLNPKKARAYGPGIEPTGNMVKKRAEFTVETRSAGQGEVLVYVEDPAGHQEEAKVTANNDKNRTFSVWYVPEVTGTHKVTVLFAGQHIAKSPFEVYVDKSQGDASKVTAQGPGLEPSGNIANKTTYFEIFTAGAGTGEVEVVIQDPMGQKGTVEPQLEARGDSTYRCSYQPTMEGVHTVHVTFAGVPIPRSPYTVTVGQACNPSACRAVGRGLQPKGVRVKETADFKVYTKGAGSGELKVTVKGPKGEERVKQKDLGDGVYGFEYYPMVPGTYIVTITWGGQNIGRSPFEVKVGTECGNQKVRAWGPGLEGGVVGKSADFVVEAIGDDVGTLGFSVEGPSQAKIECDDKGDGSCDVRYWPQEAGEYAVHVLCNSEDIRLSPFMADIRDAPQDFHPDRVKARGPGLEKTGVAVNKPAEFTVDAKHGGKAPLRVQVQDNEGCPVEALVKDNGNGTYSCSYVPRKPVKHTAMVSWGGVSIPNSPFRVNVGAGSHPNKVKVYGPGVAKTGLKAHEPTYFTVDCAEAGQGDVSIGIKCAPGVVGPAEADIDFDIIRNDNDTFTVKYTPRGAGSYTIMVLFADQATPTSPIRVKVEPSHDASKVKAEGPGLSRTGVELGKPTHFTVNAKAAGKGKLDVQFSGLTKGDAVRDVDIIDHHDNTYTVKYTPVQQGPVGVNVTYGGDPIPKSPFSVAVSPSLDLSKIKVSGLGEKVDVGKDQEFTVKSKGAGGQGKVASKIVGPSGAAVPCKVEPGLGADNSVVRFLPREEGPYEVEVTYDGVPVPGSPFPLEAVAPTKPSKVKAFGPGLQGGSAGSPARFTIDTKGAGTGGLGLTVEGPCEAQLECLDNGDGTCSVSYVPTEPGDYNINILFADTHIPGSPFKAHVVPCFDASKVKCSGPGLERATAGEVGQFQVDCSSAGSAELTIEICSEAGLPAEVYIQDHGDGTHTITYIPLCPGAYTVTIKYGGQPVPNFPSKLQVEPAVDTSGVQCYGPGIEGQGVFREATTEFSVDARALTQTGGPHVKARVANPSGNLTETYVQDRGDGMYKVEYTPYEEGLHSVDVTYDGSPVPSSPFQVPVTEGCDPSRVRVHGPGIQSGTTNKPNKFTVETRGAGTGGLGLAVEGPSEAKMSCMDNKDGSCSVEYIPYEAGTYSLNVTYGGHQVPGSPFKVPVHDVTDASKVKCSGPGLSPGMVRANLPQSFQVDTSKAGVAPLQVKVQGPKGLVEPVDVVDNADGTQTVNYVPSREGPYSISVLYGDEEVPRSPFKVKVLPTHDASKVKASGPGLNTTGVPASLPVEFTIDAKDAGEGLLAVQITDPEGKPKKTHIQDNHDGTYTVAYVPDVTGRYTILIKYGGDEIPFSPYRVRAVPTGDASKCTVTVSIGGHGLGAGIGPTIQIGEETVITVDTKAAGKGKVTCTVCTPDGSEVDVDVVENEDGTFDIFYTAPQPGKYVICVRFGGEHVPNSPFQVTALAGDQPSVQPPLRSQQLAPQYTYAQGGQQTWAPERPLVGVNGLDVTSLRPFDLVIPFTIKKGEITGEVRMPSGKVAQPTITDNKDGTVTVRYAPSEAGLHEMDIRYDNMHIPGSPLQFYVDYVNCGHVTAYGPGLTHGVVNKPATFTVNTKDAGEGGLSLAIEGPSKAEISCTDNQDGTCSVSYLPVLPGDYSILVKYNEQHVPGSPFTARVTGDDSMRMSHLKVGSAADIPINISETDLSLLTATVVPPSGREEPCLLKRLRNGHVGISFVPKETGEHLVHVKKNGQHVASSPIPVVISQSEIGDASRVRVSGQGLHEGHTFEPAEFIIDTRDAGYGGLSLSIEGPSKVDINTEDLEDGTCRVTYCPTEPGNYIINIKFADQHVPGSPFSVKVTGEGRVKESITRRRRAPSVANVGSHCDLSLKIPEISIQDMTAQVTSPSGKTHEAEIVEGENHTYCIRFVPAEMGTHTVSVKYKGQHVPGSPFQFTVGPLGEGGAHKVRAGGPGLERAEAGVPAEFSIWTREAGAGGLAIAVEGPSKAEISFEDRKDGSCGVAYVVQEPGDYEVSVKFNEEHIPDSPFVVPVASPSGDARRLTVSSLQESGLKVNQPASFAVSLNGAKGAIDAKVHSPSGALEECYVTEIDQDKYAVRFIPRENGVYLIDVKFNGTHIPGSPFKIRVGEPGHGGDPGLVSAYGAGLEGGVTGNPAEFVVNTSNAGAGALSVTIDGPSKVKMDCQECPEGYRVTYTPMAPGSYLISIKYGGPYHIGGSPFKAKVTGPRLVSNHSLHETSSVFVDSLTKATCAPQHGAPGPGPADASKVVAKGLGLSKAYVGQKSSFTVDCSKAGNNMLLVGVHGPRTPCEEILVKHVGSRLYSVSYLLKDKGEYTLVVKWGDEHIPGSPYRVVVP

SEQ ID NO: 32142 - protein, 2620 aa, Homo sapiens
  Payload ID: 6297
  Gene Symbol: FLNA
  Gene Name: filamin A, alpha
  ENSP ID: ENSP00000358872
MPATEKDLAEDAPWKKIQQNTFTRWCNEHLKCVSKRIANLQTDLSDGLRLIALLEVLSQKKMHRKHNQRPTFRQMQLENVSVALEFLDRESIKLVSIDSKAIVDGNLKLILGLIWTLILHYSISMPMWDEEEDEEAKKQTPKQRLLGWIQNKLPQLPITNFSRDWQSGRALGALVDSCAPGLCPDWDSWDASKPVTNAREAMQQADDWLGIPQVITPEEIVDPNVDEHSVMTYLSQFPKAKLKPGAPLRPKLNPKKARAYGPGIEPTGNMVKKRAEFTVETRSAGQGEVLVYVEDPAGHQEEAKVTANNDKNRTFSVWYVPEVTGTHKVTVLFAGQHIAKSPFEVYVDKSQGDASKVTAQGPGLEPSGNIANKTTYFEIFTAGAGTGEVEVVIQDPMGQKGTVEPQLEARGDSTYRCSYQPTMEGVHTVHVTFAGVPIPRSPYTVTVGQACNPSACRAVGRGLQPKGVRVKETADFKVYTKGAGSGELKVTVKGPKGEERVKQKDLGDGVYGFEYYPMVPGTYIVTITWGGQNIGRSPFEVKVGTECGNQKVRAWGPGLEGGVVGKSADFVVEAIGDDVGTLGFSVEGPSQAKIECDDKGDGSCDVRYWPQEAGEYAVHVLCNSEDIRLSPFMADIRDAPQDFHPDRVKARGPGLEKTGVAVNKPAEFTVDAKHGGKAPLRVQVQDNEGCPVEALVKDNGNGTYSCSYVPRKPVKHTAMVSWGGVSIPNSPFRVNVGAGSHPNKVKVYGPGVAKTGLKAHEPTYFTVDCAEAGQGDVSIGIKCAPGVVGPAEADIDFDIIRNDNDTFTVKYTPRGAGSYTIMVLFADQATPTSPIRVKVEPSHDASKVKAEGPGLSRTGVELGKPTHFTVNAKAAGKGKLDVQFSGLTKGDAVRDVDIIDHHDNTYTVKYTPVQQGPVGVNVTYGGDPIPKSPFSVAVSPSLDLSKIKVSGLGEKVDVGKDQEFTVKSKGAGGQGKVASKIVGPSGAAVPCKVEPGLGADNSVVRFLPREEGPYEVEVTYDGVPVPGSPFPLEAVAPTKPSKVKAFGPGLQGGSAGSPARFTIDTKGAGTGGLGLTVEGPCEAQLECLDNGDGTCSVSYVPTEPGDYNINILFADTHIPGSPFKAHVVPCFDASKVKCSGPGLERATAGEVGQFQVDCSSAGSAELTIEICSEAGLPAEVYIQDHGDGTHTITYIPLCPGAYTVTIKYGGQPVPNFPSKLQVEPAVDTSGVQCYGPGIEGQGVFREATTEFSVDARALTQTGGPHVKARVANPSGNLTETYVQDRGDGMYKVEYTPYEEGLHSVDVTYDGSPVPSSPFQVPVTEGCDPSRVRVHGPGIQSGTTNKPNKFTVETRGAGTGGLGLAVEGPSEAKMSCMDNKDGSCSVEYIPYEAGTYSLNVTYGGHQVPGSPFKVPVHDVTDASKVKCSGPGLSPGMVRANLPQSFQVDTSKAGVAPLQVKVQGPKGLVEPVDVVDNADGTQTVNYVPSREGPYSISVLYGDEEVPRSPFKVKVLPTHDASKVKASGPGLNTTGVPASLPVEFTIDAKDAGEGLLAVQITDPEGKPKKTHIQDNHDGTYTVAYVPDVTGRYTILIKYGGDEIPFSPYRVRAVPTGDASKCTVTVSIGGHGLGAGIGPTIQIGEETVITVDTKAAGKGKVTCTVCTPDGSEVDVDVVENEDGTFDIFYTAPQPGKYVICVRFGGEHVPNSPFQVTALAGDQPSVQPPLRSQQLAPQYTYAQGGQQTWAPERPLVGVNGLDVTSLRPFDLVIPFTIKKGEITGEVRMPSGKVAQPTITDNKDGTVTVRYAPSEAGLHEMDIRYDNMHIPGSPLQFYVDYVNCGHVTAYGPGLTHGVVNKPATFTVNTKDAGEGGLSLAIEGPSKAEISCTDNQDGTCSVSYLPVLPGDYSILVKYNEQHVPGSPFTARVTGDDSMRMSHLKVGSAADIPINISETDLSLLTATVVPPSGREEPCLLKRLRNGHVGISFVPKETGEHLVHVKKNGQHVASSPIPVVISQSEIGDASRVRVSGQGLHEGHTFEPAEFIIDTRDAGYGGLSLSIEGPSKVDINTEDLEDGTCRVTYCPTEPGNYIINIKFADQHVPGSPFSVKVTGEGRVKESITRRRRAPSVANVGSHCDLSLKIPEISIQDMTAQVTSPSGKTHEAEIVEGENHTYCIRFVPAEMGTHTVSVKYKGQHVPGSPFQFTVGPLGEGGAHKVRAGGPGLERAEAGVPAEFSIWTREAGAGGLAIAVEGPSKAEISFEDRKDGSCGVAYVVQEPGDYEVSVKFNEEHIPDSPFVVPVASPSGDARRLTVSSLQESGLKVNQPASFAVSLNGAKGAIDAKVHSPSGALEECYVTEIDQDKYAVRFIPRENGVYLIDVKFNGTHIPGSPFKIRVGEPGHGGDPGLVSAYGAGLEGGVTGNPAEFVVNTSNAGAGALSVTIDGPSKVKMDCQECPEGYRVTYTPMAPGSYLISIKYGGPYHIGGSPFKAKVTGPRLVSNHSLHETSSVFVDSLTKATCAPQHGAPGPGPADASKVVAKGLGLSKAYVGQKSSFTVDCSKAGNNMLLVGVHGPRTPCEEILVKHVGSRLYSVSYLLKDKGEYTLVVKWGDEHIPGSPYRVVVP

SEQ ID NO: 32143 - protein, 281 aa, Homo sapiens
  Payload ID: 6297
  Gene Symbol: FLNA
  Gene Name: filamin A, alpha
  ENSP ID: ENSP00000397824
LVHVKKNGQHVASSPIPVVISQSEIGDASRVRVSGQGLHEGHTFEPAEFIIDTRDAGYGGLSLSIEGPSKVDINTEDLEDGTCRVTYCPTEPGNYIINIKFADQHVPEISIQDMTAQVTSPSGKTHEAEIVEGENHTYCIRFVPAEMGTHTVSVKYKGQHVPGSPFQFTVGPLGEGGAHKVRAGGPGLERAEAGVPAEFSIWTREAGAGGLAIAVEGPSKAEISFEDRKDGSCGVAYVVQEPGDYEVSVKFNEEHIPDSPFVVPVASPSGDARRLTVSSLQ

SEQ ID NO: 32144 - protein, 232 aa, Homo sapiens
  Payload ID: 6297
  Gene Symbol: FLNA
  Gene Name: filamin A, alpha
  ENSP ID: ENSP00000398215
  MOD_RES (1)..(1): Any amino acid
XKYVICVRFGGEHVPNSPFQVTALAGDQPSVQPPLRSQQLAPQYTYAQGGQQTWAPERPLVGVNGLDVTSLRPFDLVIPFTIKKGEITGEVRMPSGKVAQPTITDNKDGTVTVRYAPSEAGLHEMDIRYDNMHIPGSPLQFYVDYVNCGHVTAYGPGLTHGVVNKPATFTVNTKDAGEGDDSMRMSHLKVGSAADIPINISETDLSLLTATVVPPSGREEPCLLKRLRNGHV

SEQ ID NO: 32145 - protein, 90 aa, Homo sapiens
  Payload ID: 6297
  Gene Symbol: FLNA
  Gene Name: filamin A, alpha
  ENSP ID: ENSP00000405458
  MOD_RES (1)..(1): Any amino acid
XEQHVPGSPFTARVTGDDSMRMSHLKVGSAADIPINISETDLSLLTATVVPPSGREEPCLLKRLRNGHVAMPCVQGFHSCPRRRGSTWCM

SEQ ID NO: 32146 - protein, 604 aa, Homo sapiens
  Payload ID: 6297
  Gene Symbol: FLNA
  Gene Name: filamin A, alpha
  ENSP ID: ENSP00000408921
AAPGGGVDTRDAEMPATEKDLAEDAPWKKIQQNTFTRWCNEHLKCVSKRIANLQTDLSDGLRLIALLEVLSQKKMHRKHNQRPTFRQMQLENVSVALEFLDRESIKLVSIDSKAIVDGNLKLILGLIWTLILHYSISMPMWDEEEDEEAKKQTPKQRLLGWIQNKLPQLPITNFSRDWQSGRALGALVDSCAPGLCPDWDSWDASKPVTNAREAMQQADDWLGIPQVITPEEIVDPNVDEHSVMTYLSQFPKAKLKPGAPLRPKLNPKKARAYGPGIEPTGNMVKKRAEFTVETRSAGQGEVLVYVEDPAGHQEEAKVTANNDKNRTFSVWYVPEVTGTHKVTVLFAGQHIAKSPFEVYVDKSQGDASKVTAQGPGLEPSGNIANKTTYFEIFTAGAGTGEVEVVIQDPMGQKGTVEPQLEARGDSTYRCSYQPTMEGVHTVHVTFAGVPIPRSPYTVTVGQACNPSACRAVGRGLQPKGVRVKETADFKVYTKGAGSGELKVTVKGPRRGAREAEGPGGWRVWLRVLPHGPWNLYRHHHVGWSEHRAQSLRSEGGHRVWQSEGTGLGPWAGGRRRWQVSRLCGGGYRGRRGHAGLLGGRAIAG

SEQ ID NO: 32147 - protein, 2639 aa, Homo sapiens; identical to SEQ ID NO: 32139
  Payload ID: 6297
  Gene Symbol: FLNA
  Gene Name: filamin A, alpha
  Uniprot ID: P21333
  ENSP ID: ENSP00000416926

SEQ ID NO: 32148 - protein, 2315 aa, Homo sapiens
  Payload ID: 6297
  Gene Symbol: FLNA
  Gene Name: filamin A, alpha
  ENSP ID: ENSP00000480593
MPATEKDLAEDAPWKKIQQNTFTRWCNEHLKCVSKRIANLQTDLSDGLRLIALLEVLSQKKMHRKHNQRPTFRQMQLENVSVALEFLDRESIKLVSIDSKAIVDGNLKLILGLIWTLILHYSISMPMWDEEEDEEAKKQTPKQRLLGWIQNKLPQLPITNFSRDWQSGRALGALVDSCAPGLCPDWDSWDASKPVTNAREAMQQADDWLGIPQVITPEEIVDPNVDEHSVMTYLSQFPKAKLKPGAPLRPKLNPKKARAYGPGIEPTGNMVKKRAEFTVETRSAGQGEVLVYVEDPAGHQEEAKVTANNDKNRTFSVWYVPEVTGTHKVTVLFAGQHIAKSPFEVYVDKSQGDASKVTAQGPGLEPSGNIANKTTYFEIFTAGAGTGEVEVVIQDPMGQKGTVEPQLEARGDSTYRCSYQPTMEGVHTVHVTFAGVPIPRSPYTVTVGQACNPSACRAVGRGLQPKGVRVKETADFKVYTKGAGSGELKVTVKGPKGEERVKQKDLGDGVYGFEYYPMVPGTYIVTITWGGQNIGRSPFEVKVGTECGNQKVRAWGPGLEGGVVGKSADFVVEAIGDDVGTLGFSVEGPSQAKIECDDKGDGSCDVRYWPQEAGEYAVHVLCNSEDIRLSPFMADIRDAPQDFHPDRVKARGPGLEKTGVAVNKPAEFTVDAKHGGKAPLRVQVQDNEGCPVEALVKDNGNGTYSCSYVPRKPVKHTAMVSWGGVSIPNSPFRVNVGAGSHPNKVKVYGPGVAKTGLKAHEPTYFTVDCAEAGQGDVSIGIKCAPGVVGPAEADIDFDIIRNDNDTFTVKYTPRGAGSYTIMVLFADQATPTSPIRVKVEPSHDASKVKAEGPGLSRTGVELGKPTHFTVNAKAAGKGKLDVQFSGLTKGDAVRDVDIIDHHDNTYTVKYTPVQQGPVGVNVTYGGDPIPKSPFSVAVSPSLDLSKIKVSGLGEKVDVGKDQEFTVKSKGAGGQGKVASKIVGPSGAAVPCKVEPGLGADNSVVRFLPREEGPYEVEVTYDGVPVPGSPFPLEAVAPTKPSKVKAFGPGLQGGSAGSPARFTIDTKGAGTGGLGLTVEGPCEAQLECLDNGDGTCSVSYVPTEPGDYNINILFADTHIPGSPFKAHVVPCFDASKVKCSGPGLERATAGEVGQFQVDCSSAGSAELTIEICSEAGLPAEVYIQDHGDGTHTITYIPLCPGAYTVTIKYGGQPVPNFPSKLQVEPAVDTSGVQCYGPGIEGQGVFREATTEFSVDARALTQTGGPHVKARVANPSGNLTETYVQDRGDGMYKVEYTPYEEGLHSVDVTYDGSPVPSSPFQVPVTEGCDPSRVRVHGPGIQSGTTNKPNKFTVETRGAGTGGLGLAVEGPSEAKMSCMDNKDGSCSVEYIPYEAGTYSLNVTYGGHQVPGSPFKVPVHDVTDASKVKCSGPGLSPGMVRANLPQSFQVDTSKAGVAPLQVKVQGPKGLVEPVDVVDNADGTQTVNYVPSREGPYSISVLYGDEEVPRSPFKVKVLPTHDASKVKASGPGLNTTGVPASLPVEFTIDAKDAGEGLLAVQITDPEGKPKKTHIQDNHDGTYTVAYVPDVTGRYTILIKYGGDEIPFSPYRVRAVPTGDASKCTVTVSIGGHGLGAGIGPTIQIGEETVITVDTKAAGKGKVTCTVCTPDGSEVDVDVVENEDGTFDIFYTAPQPGKYVICVRFGGEHVPNSPFQVTALAGDQPSVQPPLRSQQLAPQYTYAQGGQQTWAPERPLVGVNGLDVTSLRPFDLVIPFTIKKGEITGEVRMPSGKVAQPTITDNKDGTVTVRYAPSEAGLHEMDIRYDNMHIPGSPLQFYVDYVNCGHVTAYGPGLTHGVVNKPATFTVNTKDAGEGGLSLAIEGPSKAEISCTDNQDGTCSVSYLPVLPGDYSILVKYNEQHVPGSPFTARVTGDDSMRMSHLKVGSAADIPINIAEISFEDRKDGSCGVAYVVQEPGDYEVSVKFNEEHIPDSPFVVPVASPSGDARRLTVSSLQESGLKVNQPASFAVSLNGAKGAIDAKVHSPSGALEECYVTEIDQDKYAVRFIPRENGVYLIDVKFNGTHIPGSPFKIRVGEPGHGGDPGLVSAYGAGLEGGVTGNPAEFVVNTSNAGAGALSVTIDGPSKVKMDCQECPEGYRVTYTPMAPGSYLISIKYGGPYHIGGSPFKAKVTGPRLVSNHSLHETSSVFVDSLTKATCAPQHGAPGPGPADASKVVAKGLGLSKAYVGQKSSFTVDCSKAGNNMLLVGVHGPRTPCEEILVKHVGSRLYSVSYLLKDKGEYTLVVKWGDEHIPGSPYRVVVP

SEQ ID NO: 32149 - protein, 2602 aa, Homo sapiens
  Payload ID: 6298
  Gene Symbol: FLNB
  Gene Name: filamin B, beta
  Uniprot ID: O75369
  ENSP ID: ENSP00000295956
MPVTEKDLAEDAPWKKIQQNTFTRWCNEHLKCVNKRIGNLQTDLSDGLRLIALLEVLSQKRMYRKYHQRPTFRQMQLENVSVALEFLDRESIKLVSIDSKAIVDGNLKLILGLVWTLILHYSISMPVWEDEGDDDAKKQTPKQRLLGWIQNKIPYLPITNFNQNWQDGKALGALVDSCAPGLCPDWESWDPQKPVDNAREAMQQADDWLGVPQVITPEEIIHPDVDEHSVMTYLSQFPKAKLKPGAPLKPKLNPKKARAYGRGIEPTGNMVKQPAKFTVDTISAGQGDVMVFVEDPEGNKEEAQVTPDSDKNKTYSVEYLPKVTGLHKVTVLFAGQHISKSPFEVSVDKAQGDASKVTAKGPGLEAVGNIANKPTYFDIYTAGAGVGDIGVEVEDPQGKNTVELLVEDKGNQVYRCVYKPMQPGPHVVKIFFAGDTIPKSPFVVQVGEACNPNACRASGRGLQPKGVRIRETTDFKVDTKAAGSGELGVTMKGPKGLEELVKQKDFLDGVYAFEYYPSTPGRYSIAITWGGHHIPKSPFEVQVGPEAGMQKVRAWGPGLHGGIVGRSADFVVESIGSEVGSLGFAIEGPSQAKIEYNDQNDGSCDVKYWPKEPGEYAVHIMCDDEDIKDSPYMAFIHPATGGYNPDLVRAYGPGLEKSGCIVNNLAEFTVDPKDAGKAPLKIFAQDGEGQRIDIQMKNRMDGTYACSYTPVKAIKHTIAVVWGGVNIPHSPYRVNIGQGSHPQKVKVFGPGVERSGLKANEPTHFTVDCTEAGEGDVSVGIKCDARVLSEDEEDVDFDIIHNANDTFTVKYVPPAAGRYTIKVLFASQEIPASPFRVKVDPSHDASKVKAEGPGLSKAGVENGKPTHFTVYTKGAGKAPLNVQFNSPLPGDAVKDLDIIDNYDYSHTVKYTPTQQGNMQVLVTYGGDPIPKSPFTVGVAAPLDLSKIKLNGLENRVEVGKDQEFTVDTRGAGGQGKLDVTILSPSRKVVPCLVTPVTGRENSTAKFIPREEGLYAVDVTYDGHPVPGSPYTVEASLPPDPSKVKAHGPGLEGGLVGKPAEFTIDTKGAGTGGLGLTVEGPCEAKIECSDNGDGTCSVSYLPTKPGEYFVNILFEEVHIPGSPFKADIEMPFDPSKVVASGPGLEHGKVGEAGLLSVDCSEAGPGALGLEAVSDSGTKAEVSIQNNKDGTYAVTYVPLTAGMYTLTMKYGGELVPHFPARVKVEPAVDTSRIKVFGPGIEGKDVFREATTDFTVDSRPLTQVGGDHIKAHIANPSGASTECFVTDNADGTYQVEYTPFEKGLHVVEVTYDDVPIPNSPFKVAVTEGCQPSRVQAQGPGLKEAFTNKPNVFTVVTRGAGIGGLGITVEGPSESKINCRDNKDGSCSAEYIPFAPGDYDVNITYGGAHIPGSPFRVPVKDVVDPSKVKIAGPGLGSGVRARVLQSFTVDSSKAGLAPLEVRVLGPRGLVEPVNVVDNGDGTHTVTYTPSQEGPYMVSVKYADEEIPRSPFKVKVLPTYDASKVTASGPGLSSYGVPASLPVDFAIDARDAGEGLLAVQITDQEGKPKRAIVHDNKDGTYAVTYIPDKTGRYMIGVTYGGDDIPLSPYRIRATQTGDASKCLATGPGIASTVKTGEEVGFVVDAKTAGKGKVTCTVLTPDGTEAEADVIENEDGTYDIFYTAAKPGTYVIYVRFGGVDIPNSPFTVMATDGEVTAVEEAPVNACPPGFRPWVTEEAYVPVSDMNGLGFKPFDLVIPFAVRKGEITGEVHMPSGKTATPEIVDNKDGTVTVRYAPTEVGLHEMHIKYMGSHIPESPLQFYVNYPNSGSVSAYGPGLVYGVANKTATFTIVTEDAGEGGLDLAIEGPSKAEISCIDNKDGTCTVTYLPTLPGDYSILVKYNDKHIPGSPFTAKITDDSRRCSQVKLGSAADFLLDISETDLSSLTASIKAPSGRDEPCLLKRLPNNHIGISFIPREVGEHLVSIKKNGNHVANSPVSIMVVQSEIGDARRAKVYGRGLSEGRTFEMSDFIVDTRDAGYGGISLAVEGPSKVDIQTEDLEDGTCKVSYFPTVPGVYIVSTKFADEHVPGSPFTVKISGEGRVKESITRTSRAPSVATVGSICDLNLKIPEINSSDMSAHVTSPSGRVTEAEIVPMGKNSHCVRFVPQEMGVHTVSVKYRGQHVTGSPFQFTVGPLGEGGAHKVRAGGPGLERGEAGVPAEFSIWTREAGAGGLSIAVEGPSKAEITFDDHKNGSCGVSYIAQEPGNYEVSIKFNDEHIPESPYLVPVIAPSDDARRLTVMSLQESGLKVNQPASFAIRLNGAKGKIDAKVHSPSGAVEECHVSELEPDKYAVRFIPHENGVHTIDVKFNGSHVVGSPFKVRVGEPGQAGNPALVSAYGTGLEGGTTGIQSEFFINTTRAGPGTLSVTIEGPSKVKMDCQETPEGYKVMYTPMAPGNYLISVKYGGPNHIVGSPFKAKVTGQRLVSPGSANETSSILVESVTRSSTETCYSAIPKASSDASKVTSKGAGLSKAFVGQKSSFLVDCSKAGSNMLLIGVHGPTTPCEEVSMKHVGNQQYNVTYVVKERGDYVLAVKWGEEHIPGSPFHVTVP

SEQ ID NO: 32150 - protein, 2578 aa, Homo sapiens
  Payload ID: 6298
  Gene Symbol: FLNB
  Gene Name: filamin B, beta
  Uniprot ID: O75369
  ENSP ID: ENSP00000351339
MPVTEKDLAEDAPWKKIQQNTFTRWCNEHLKCVNKRIGNLQTDLSDGLRLIALLEVLSQKRMYRKYHQRPTFRQMQLENVSVALEFLDRESIKLVSIDSKAIVDGNLKLILGLVWTLILHYSISMPVWEDEGDDDAKKQTPKQRLLGWIQNKIPYLPITNFNQNWQDGKALGALVDSCAPGLCPDWESWDPQKPVDNAREAMQQADDWLGVPQVITPEEIIHPDVDEHSVMTYLSQFPKAKLKPGAPLKPKLNPKKARAYGRGIEPTGNMVKQPAKFTVDTISAGQGDVMVFVEDPEGNKEEAQVTPDSDKNKTYSVEYLPKVTGLHKVTVLFAGQHISKSPFEVSVDKAQGDASKVTAKGPGLEAVGNIANKPTYFDIYTAGAGVGDIGVEVEDPQGKNTVELLVEDKGNQVYRCVYKPMQPGPHVVKIFFAGDTIPKSPFVVQVGEACNPNACRASGRGLQPKGVRIRETTDFKVDTKAAGSGELGVTMKGPKGLEELVKQKDFLDGVYAFEYYPSTPGRYSIAITWGGHHIPKSPFEVQVGPEAGMQKVRAWGPGLHGGIVGRSADFVVESIGSEVGSLGFAIEGPSQAKIEYNDQNDGSCDVKYWPKEPGEYAVHIMCDDEDIKDSPYMAFIHPATGGYNPDLVRAYGPGLEKSGCIVNNLAEFTVDPKDAGKAPLKIFAQDGEGQRIDIQMKNRMDGTYACSYTPVKAIKHTIAVVWGGVNIPHSPYRVNIGQGSHPQKVKVFGPGVERSGLKANEPTHFTVDCTEAGEGDVSVGIKCDARVLSEDEEDVDFDIIHNANDTFTVKYVPPAAGRYTIKVLFASQEIPASPFRVKVDPSHDASKVKAEGPGLSKAGVENGKPTHFTVYTKGAGKAPLNVQFNSPLPGDAVKDLDIIDNYDYSHTVKYTPTQQGNMQVLVTYGGDPIPKSPFTVGVAAPLDLSKIKLNGLENRVEVGKDQEFTVDTRGAGGQGKLDVTILSPSRKVVPCLVTPVTGRENSTAKFIPREEGLYAVDVTYDGHPVPGSPYTVEASLPPDPSKVKAHGPGLEGGLVGKPAEFTIDTKGAGTGGLGLTVEGPCEAKIECSDNGDGTCSVSYLPTKPGEYFVNILFEEVHIPGSPFKADIEMPFDPSKVVASGPGLEHGKVGEAGLLSVDCSEAGPGALGLEAVSDSGTKAEVSIQNNKDGTYAVTYVPLTAGMYTLTMKYGGELVPHFPARVKVEPAVDTSRIKVFGPGIEGKDVFREATTDFTVDSRPLTQVGGDHIKAHIANPSGASTECFVTDNADGTYQVEYTPFEKGLHVVEVTYDDVPIPNSPFKVAVTEGCQPSRVQAQGPGLKEAFTNKPNVFTVVTRGAGIGGLGITVEGPSESKINCRDNKDGSCSAEYIPFAPGDYDVNITYGGAHIPGSPFRVPVKDVVDPSKVKIAGPGLGSGVRARVLQSFTVDSSKAGLAPLEVRVLGPRGLVEPVNVVDNGDGTHTVTYTPSQEGPYMVSVKYADEEIPRSPFKVKVLPTYDASKVTASGPGLSSYGVPASLPVDFAIDARDAGEGLLAVQITDQEGKPKRAIVHDNKDGTYAVTYIPDKTGRYMIGVTYGGDDIPLSPYRIRATQTGDASKCLATGPGIASTVKTGEEVGFVVDAKTAGKGKVTCTVLTPDGTEAEADVIENEDGTYDIFYTAAKPGTYVIYVRFGGVDIPNSPFTVMVTEEAYVPVSDMNGLGFKPFDLVIPFAVRKGEITGEVHMPSGKTATPEIVDNKDGTVTVRYAPTEVGLHEMHIKYMGSHIPESPLQFYVNYPNSGSVSAYGPGLVYGVANKTATFTIVTEDAGEGGLDLAIEGPSKAEISCIDNKDGTCTVTYLPTLPGDYSILVKYNDKHIPGSPFTAKITDDSRRCSQVKLGSAADFLLDISETDLSSLTASIKAPSGRDEPCLLKRLPNNHIGISFIPREVGEHLVSIKKNGNHVANSPVSIMVVQSEIGDARRAKVYGRGLSEGRTFEMSDFIVDTRDAGYGGISLAVEGPSKVDIQTEDLEDGTCKVSYFPTVPGVYIVSTKFADEHVPGSPFTVKISGEGRVKESITRTSRAPSVATVGSICDLNLKIPEINSSDMSAHVTSPSGRVTEAEIVPMGKNSHCVRFVPQEMGVHTVSVKYRGQHVTGSPFQFTVGPLGEGGAHKVRAGGPGLERGEAGVPAEFSIWTREAGAGGLSIAVEGPSKAEITFDDHKNGSCGVSYIAQEPGNYEVSIKFNDEHIPESPYLVPVIAPSDDARRLTVMSLQESGLKVNQPASFAIRLNGAKGKIDAKVHSPSGAVEECHVSELEPDKYAVRFIPHENGVHTIDVKFNGSHVVGSPFKVRVGEPGQAGNPALVSAYGTGLEGGTTGIQSEFFINTTRAGPGTLSVTIEGPSKVKMDCQETPEGYKVMYTPMAPGNYLISVKYGGPNHIVGSPFKAKVTGQRLVSPGSANETSSILVESVTRSSTETCYSAIPKASSDASKVTSKGAGLSKAFVGQKSSFLVDCSKAGSNMLLIGVHGPTTPCEEVSMKHVGNQQYNVTYVVKERGDYVLAVKWGEEHIPGSPFHVTVP

SEQ ID NO: 32151 - protein, 195 aa, Homo sapiens
  Payload ID: 6298
  Gene Symbol: FLNB
  Gene Name: filamin B, beta
  ENSP ID: ENSP00000414532
MYTPMAPGNYLISVKYGGPNHIVGSPFKAKVTGQRLVSPGSANETSSILVESVTRSSTETCYSAIPKASSDASKVTSKGAGLSKAFVGQKSSFLVDCSKAGSNMLLIGVHGPTTPCEEVSMKHVGNQQYNVTYVVKERGDYVLAVKWGRNTSLAALFMSQCLKTVFSNPGESSCGCFCCLFVIHFIQSPPACLWG

SEQ ID NO: 32152 - protein, 2591 aa, Homo sapiens
  Payload ID: 6298
  Gene Symbol: FLNB
  Gene Name: filamin B, beta
  Uniprot ID: O75369
  ENSP ID: ENSP00000415599
MPVTEKDLAEDAPWKKIQQNTFTRWCNEHLKCVNKRIGNLQTDLSDGLRLIALLEVLSQKRMYRKYHQRPTFRQMQLENVSVALEFLDRESIKLVSIDSKAIVDGNLKLILGLVWTLILHYSISMPVWEDEGDDDAKKQTPKQRLLGWIQNKIPYLPITNFNQNWQDGKALGALVDSCAPGLCPDWESWDPQKPVDNAREAMQQADDWLGVPQVITPEEIIHPDVDEHSVMTYLSQFPKAKLKPGAPLKPKLNPKKARAYGRGIEPTGNMVKQPAKFTVDTISAGQGDVMVFVEDPEGNKEEAQVTPDSDKNKTYSVEYLPKVTGLHKVTVLFAGQHISKSPFEVSVDKAQGDASKVTAKGPGLEAVGNIANKPTYFDIYTAGAGVGDIGVEVEDPQGKNTVELLVEDKGNQVYRCVYKPMQPGPHVVKIFFAGDTIPKSPFVVQVGEACNPNACRASGRGLQPKGVRIRETTDFKVDTKAAGSGELGVTMKGPKGLEELVKQKDFLDGVYAFEYYPSTPGRYSIAITWGGHHIPKSPFEVQVGPEAGMQKVRAWGPGLHGGIVGRSADFVVESIGSEVGSLGFAIEGPSQAKIEYNDQNDGSCDVKYWPKEPGEYAVHIMCDDEDIKDSPYMAFIHPATGGYNPDLVRAYGPGLEKSGCIVNNLAEFTVDPKDAGKAPLKIFAQDGEGQRIDIQMKNRMDGTYACSYTPVKAIKHTIAVVWGGVNIPHSPYRVNIGQGSHPQKVKVFGPGVERSGLKANEPTHFTVDCTEAGEGDVSVGIKCDARVLSEDEEDVDFDIIHNANDTFTVKYVPPAAGRYTIKVLFASQEIPASPFRVKVDPSHDASKVKAEGPGLSKAGVENGKPTHFTVYTKGAGKAPLNVQFNSPLPGDAVKDLDIIDNYDYSHTVKYTPTQQGNMQVLVTYGGDPIPKSPFTVGVAAPLDLSKIKLNGLENRVEVGKDQEFTVDTRGAGGQGKLDVTILSPSRKVVPCLVTPVTGRENSTAKFIPREEGLYAVDVTYDGHPVPGSPYTVEASLPPDPSKVKAHGPGLEGGLVGKPAEFTIDTKGAGTGGLGLTVEGPCEAKIECSDNGDGTCSVSYLPTKPGEYFVNILFEEVHIPGSPFKADIEMPFDPSKVVASGPGLEHGKVGEAGLLSVDCSEAGPGALGLEAVSDSGTKAEVSIQNNKDGTYAVTYVPLTAGMYTLTMKYGGELVPHFPARVKVEPAVDTSRIKVFGPGIEGKDVFREATTDFTVDSRPLTQVGGDHIKAHIANPSGASTECFVTDNADGTYQVEYTPFEKGLHVVEVTYDDVPIPNSPFKVAVTEGCQPSRVQAQGPGLKEAFTNKPNVFTVVTRGAGIGGLGITVEGPSESKINCRDNKDGSCSAEYIPFAPGDYDVNITYGGAHIPGSPFRVPVKDVVDPSKVKIAGPGLGSGVRARVLQSFTVDSSKAGLAPLEVRVLGPRGLVEPVNVVDNGDGTHTVTYTPSQEGPYMVSVKYADEEIPRSPFKVKVLPTYDASKVTASGPGLSSYGVPASLPVDFAIDARDAGEGLLAVQITDQEGKPKRAIVHDNKDGTYAVTYIPDKTGRYMIGVTYGGDDIPLSPYRIRATQTGDASKCLATGPGIASTVKTGEEVGFVVDAKTAGKGKVTCTVLTPDGTEAEADVIENEDGTYDIFYTAAKPGTYVIYVRFGGVDIPNSPFTVMATDGEVTAVEEAPVTEEAYVPVSDMNGLGFKPFDLVIPFAVRKGEITGEVHMPSGKTATPEIVDNKDGTVTVRYAPTEVGLHEMHIKYMGSHIPESPLQFYVNYPNSGSVSAYGPGLVYGVANKTATFTIVTEDAGEGGLDLAIEGPSKAEISCIDNKDGTCTVTYLPTLPGDYSILVKYNDKHIPGSPFTAKITDDSRRCSQVKLGSAADFLLDISETDLSSLTASIKAPSGRDEPCLLKRLPNNHIGISFIPREVGEHLVSIKKNGNHVANSPVSIMVVQSEIGDARRAKVYGRGLSEGRTFEMSDFIVDTRDAGYGGISLAVEGPSKVDIQTEDLEDGTCKVSYFPTVPGVYIVSTKFADEHVPGSPFTVKISGEGRVKESITRTSRAPSVATVGSICDLNLKIPEINSSDMSAHVTSPSGRVTEAEIVPMGKNSHCVRFVPQEMGVHTVSVKYRGQHVTGSPFQFTVGPLGEGGAHKVRAGGPGLERGEAGVPAEFSIWTREAGAGGLSIAVEGPSKAEITFDDHKNGSCGVSYIAQEPGNYEVSIKFNDEHIPESPYLVPVIAPSDDARRLTVMSLQESGLKVNQPASFAIRLNGAKGKIDAKVHSPSGAVEECHVSELEPDKYAVRFIPHENGVHTIDVKFNGSHVVGSPFKVRVGEPGQAGNPALVSAYGTGLEGGTTGIQSEFFINTTRAGPGTLSVTIEGPSKVKMDCQETPEGYKVMYTPMAPGNYLISVKYGGPNHIVGSPFKAKVTGQRLVSPGSANETSSILVESVTRSSTETCYSAIPKASSDASKVTSKGAGLSKAFVGQKSSFLVDCSKAGSNMLLIGVHGPTTPCEEVSMKHVGNQQYNVTYVVKERGDYVLAVKWGEEHIPGSPFHVTVP

SEQ ID NO: 32153 - protein, 2409 aa, Homo sapiens
  Payload ID: 6298
  Gene Symbol: FLNB
  Gene Name: filamin B, beta
  ENSP ID: ENSP00000418510
MQEHSTRRRSLSLCPDWESWDPQKPVDNAREAMQQADDWLGVPQVITPEEIIHPDVDEHSVMTYLSQFPKAKLKPGAPLKPKLNPKKARAYGRGIEPTGNMVKQPAKFTVDTISAGQGDVMVFVEDPEGNKEEAQVTPDSDKNKTYSVEYLPKVTGLHKVTVLFAGQHISKSPFEVSVDKAQGDASKVTAKGPGLEAVGNIANKPTYFDIYTAGAGVGDIGVEVEDPQGKNTVELLVEDKGNQVYRCVYKPMQPGPHVVKIFFAGDTIPKSPFVVQVGEACNPNACRASGRGLQPKGVRIRETTDFKVDTKAAGSGELGVTMKGPKGLEELVKQKDFLDGVYAFEYYPSTPGRYSIAITWGGHHIPKSPFEVQVGPEAGMQKVRAWGPGLHGGIVGRSADFVVESIGSEVGSLGFAIEGPSQAKIEYNDQNDGSCDVKYWPKEPGEYAVHIMCDDEDIKDSPYMAFIHPATGGYNPDLVRAYGPGLEKSGCIVNNLAEFTVDPKDAGKAPLKIFAQDGEGQRIDIQMKNRMDGTYACSYTPVKAIKHTIAVVWGGVNIPHSPYRVNIGQGSHPQKVKVFGPGVERSGLKANEPTHFTVDCTEAGEGDVSVGIKCDARVLSEDEEDVDFDIIHNANDTFTVKYVPPAAGRYTIKVLFASQEIPASPFRVKVDPSHDASKVKAEGPGLSKAGVENGKPTHFTVYTKGAGKAPLNVQFNSPLPGDAVKDLDIIDNYDYSHTVKYTPTQQGNMQVLVTYGGDPIPKSPFTVGVAAPLDLSKIKLNGLENRVEVGKDQEFTVDTRGAGGQGKLDVTILSPSRKVVPCLVTPVTGRENSTAKFIPREEGLYAVDVTYDGHPVPGSPYTVEASLPPDPSKVKAHGPGLEGGLVGKPAEFTIDTKGAGTGGLGLTVEGPCEAKIECSDNGDGTCSVSYLPTKPGEYFVNILFEEVHIPGSPFKADIEMPFDPSKVVASGPGLEHGKVGEAGLLSVDCSEAGPGALGLEAVSDSGTKAEVSIQNNKDGTYAVTYVPLTAGMYTLTMKYGGELVPHFPARVKVEPAVDTSRIKVFGPGIEGKDVFREATTDFTVDSRPLTQVGGDHIKAHIANPSGASTECFVTDNADGTYQVEYTPFEKGLHVVEVTYDDVPIPNSPFKVAVTEGCQPSRVQAQGPGLKEAFTNKPNVFTVVTRGAGIGGLGITVEGPSESKINCRDNKDGSCSAEYIPFAPGDYDVNITYGGAHIPGSPFRVPVKDVVDPSKVKIAGPGLGSGVRARVLQSFTVDSSKAGLAPLEVRVLGPRGLVEPVNVVDNGDGTHTVTYTPSQEGPYMVSVKYADEEIPRSPFKVKVLPTYDASKVTASGPGLSSYGVPASLPVDFAIDARDAGEGLLAVQITDQEGKPKRAIVHDNKDGTYAVTYIPDKTGRYMIGVTYGGDDIPLSPYRIRATQTGDASKCLATGPGIASTVKTGEEVGFVVDAKTAGKGKVTCTVLTPDGTEAEADVIENEDGTYDIFYTAAKPGTYVIYVRFGGVDIPNSPFTVMVTEEAYVPVSDMNGLGFKPFDLVIPFAVRKGEITGEVHMPSGKTATPEIVDNKDGTVTVRYAPTEVGLHEMHIKYMGSHIPESPLQFYVNYPNSGSVSAYGPGLVYGVANKTATFTIVTEDAGEGGLDLAIEGPSKAEISCIDNKDGTCTVTYLPTLPGDYSILVKYNDKHIPGSPFTAKITDDSRRCSQVKLGSAADFLLDISETDLSSLTASIKAPSGRDEPCLLKRLPNNHIGISFIPREVGEHLVSIKKNGNHVANSPVSIMVVQSEIGDARRAKVYGRGLSEGRTFEMSDFIVDTRDAGYGGISLAVEGPSKVDIQTEDLEDGTCKVSYFPTVPGVYIVSTKFADEHVPGSPFTVKISGEGRVKESITRTSRAPSVATVGSICDLNLKIPEINSSDMSAHVTSPSGRVTEAEIVPMGKNSHCVRFVPQEMGVHTVSVKYRGQHVTGSPFQFTVGPLGEGGAHKVRAGGPGLERGEAGVPAEFSIWTREAGAGGLSIAVEGPSKAEITFDDHKNGSCGVSYIAQEPGNYEVSIKFNDEHIPESPYLVPVIAPSDDARRLTVMSLQESGLKVNQPASFAIRLNGAKGKIDAKVHSPSGAVEECHVSELEPDKYAVRFIPHENGVHTIDVKFNGSHVVGSPFKVRVGEPGQAGNPALVSAYGTGLEGGTTGIQSEFFINTTRAGPGTLSVTIEGPSKVKMDCQETPEGYKVMYTPMAPGNYLISVKYGGPNHIVGSPFKAKVTGQRLVSPGSANETSSILVESVTRSSTETCYSAIPKASSDASKVTSKGAGLSKAFVGQKSSFLVDCSKAGSNMLLIGVHGPTTPCEEVSMKHVGNQQYNVTYVVKERGDYVLAVKWGEEHIPGSPFHVTVP

SEQ ID NO: 32154 - protein, 72 aa, Homo sapiens
  Payload ID: 6298
  Gene Symbol: FLNB
  Gene Name: filamin B, beta
  ENSP ID: ENSP00000419954
FADEHVPGSPFTVKISGEGRVKESITRTSRAPSVATVGSICDLNLKIPGVRVMNCSAQILWGWRVQFHTGSR

SEQ ID NO: 32155 - protein, 135 aa, Homo sapiens
  Payload ID: 6298
  Gene Symbol: FLNB
  Gene Name: filamin B, beta
  ENSP ID: ENSP00000420199
  MOD_RES (1)..(1): Any amino acid
XLAVEGPSKVDIQTEDLEDGTCKVSYFPTVPGVYIVSTKFADEHVPEINSSDMSAHVTSPSGRVTEAEIVPMGKNSHCVRFVPQEMGVHTVSVKYRGQHVTGSPFQFTVGPLGEGGAHKVRAGGPGLERGEAGVP

SEQ ID NO: 32156 - protein, 2633 aa, Homo sapiens
  Payload ID: 6298
  Gene Symbol: FLNB
  Gene Name: filamin B, beta
  Uniprot ID: O75369
  ENSP ID: ENSP00000420213
MPVTEKDLAEDAPWKKIQQNTFTRWCNEHLKCVNKRIGNLQTDLSDGLRLIALLEVLSQKRMYRKYHQRPTFRQMQLENVSVALEFLDRESIKLVSIDSKAIVDGNLKLILGLVWTLILHYSISMPVWEDEGDDDAKKQTPKQRLLGWIQNKIPYLPITNFNQNWQDGKALGALVDSCAPGLCPDWESWDPQKPVDNAREAMQQADDWLGVPQVITPEEIIHPDVDEHSVMTYLSQFPKAKLKPGAPLKPKLNPKKARAYGRGIEPTGNMVKQPAKFTVDTISAGQGDVMVFVEDPEGNKEEAQVTPDSDKNKTYSVEYLPKVTGLHKVTVLFAGQHISKSPFEVSVDKAQGDASKVTAKGPGLEAVGNIANKPTYFDIYTAGAGVGDIGVEVEDPQGKNTVELLVEDKGNQVYRCVYKPMQPGPHVVKIFFAGDTIPKSPFVVQVGEACNPNACRASGRGLQPKGVRIRETTDFKVDTKAAGSGELGVTMKGPKGLEELVKQKDFLDGVYAFEYYPSTPGRYSIAITWGGHHIPKSPFEVQVGPEAGMQKVRAWGPGLHGGIVGRSADFVVESIGSEVGSLGFAIEGPSQAKIEYNDQNDGSCDVKYWPKEPGEYAVHIMCDDEDIKDSPYMAFIHPATGGYNPDLVRAYGPGLEKSGCIVNNLAEFTVDPKDAGKAPLKIFAQDGEGQRIDIQMKNRMDGTYACSYTPVKAIKHTIAVVWGGVNIPHSPYRVNIGQGSHPQKVKVFGPGVERSGLKANEPTHFTVDCTEAGEGDVSVGIKCDARVLSEDEEDVDFDIIHNANDTFTVKYVPPAAGRYTIKVLFASQEIPASPFRVKVDPSHDASKVKAEGPGLSKAGVENGKPTHFTVYTKGAGKAPLNVQFNSPLPGDAVKDLDIIDNYDYSHTVKYTPTQQGNMQVLVTYGGDPIPKSPFTVGVAAPLDLSKIKLNGLENRVEVGKDQEFTVDTRGAGGQGKLDVTILSPSRKVVPCLVTPVTGRENSTAKFIPREEGLYAVDVTYDGHPVPGSPYTVEASLPPDPSKVKAHGPGLEGGLVGKPAEFTIDTKGAGTGGLGLTVEGPCEAKIECSDNGDGTCSVSYLPTKPGEYFVNILFEEVHIPGSPFKADIEMPFDPSKVVASGPGLEHGKVGEAGLLSVDCSEAGPGALGLEAVSDSGTKAEVSIQNNKDGTYAVTYVPLTAGMYTLTMKYGGELVPHFPARVKVEPAVDTSRIKVFGPGIEGKDVFREATTDFTVDSRPLTQVGGDHIKAHIANPSGASTECFVTDNADGTYQVEYTPFEKGLHVVEVTYDDVPIPNSPFKVAVTEGCQPSRVQAQGPGLKEAFTNKPNVFTVVTRGAGIGGLGITVEGPSESKINCRDNKDGSCSAEYIPFAPGDYDVNITYGGAHIPGSPFRVPVKDVVDPSKVKIAGPGLGSGVRARVLQSFTVDSSKAGLAPLEVRVLGPRADDTDSQSWRSPLKALSEFFKGDPKGDFNKTGLVEPVNVVDNGDGTHTVTYTPSQEGPYMVSVKYADEEIPRSPFKVKVLPTYDASKVTASGPGLSSYGVPASLPVDFAIDARDAGEGLLAVQITDQEGKPKRAIVHDNKDGTYAVTYIPDKTGRYMIGVTYGGDDIPLSPYRIRATQTGDASKCLATGPGIASTVKTGEEVGFVVDAKTAGKGKVTCTVLTPDGTEAEADVIENEDGTYDIFYTAAKPGTYVIYVRFGGVDIPNSPFTVMATDGEVTAVEEAPVNACPPGFRPWVTEEAYVPVSDMNGLGFKPFDLVIPFAVRKGEITGEVHMPSGKTATPEIVDNKDGTVTVRYAPTEVGLHEMHIKYMGSHIPESPLQFYVNYPNSGSVSAYGPGLVYGVANKTATFTIVTEDAGEGGLDLAIEGPSKAEISCIDNKDGTCTVTYLPTLPGDYSILVKYNDKHIPGSPFTAKITDDSRRCSQVKLGSAADFLLDISETDLSSLTASIKAPSGRDEPCLLKRLPNNHIGISFIPREVGEHLVSIKKNGNHVANSPVSIMVVQSEIGDARRAKVYGRGLSEGRTFEMSDFIVDTRDAGYGGISLAVEGPSKVDIQTEDLEDGTCKVSYFPTVPGVYIVSTKFADEHVPGSPFTVKISGEGRVKESITRTSRAPSVATVGSICDLNLKIPEINSSDMSAHVTSPSGRVTEAEIVPMGKNSHCVRFVPQEMGVHTVSVKYRGQHVTGSPFQFTVGPLGEGGAHKVRAGGPGLERGEAGVPAEFSIWTREAGAGGLSIAVEGPSKAEITFDDHKNGSCGVSYIAQEPGNYEVSIKFNDEHIPESPYLVPVIAPSDDARRLTVMSLQESGLKVNQPASFAIRLNGAKGKIDAKVHSPSGAVEECHVSELEPDKYAVRFIPHENGVHTIDVKFNGSHVVGSPFKVRVGEPGQAGNPALVSAYGTGLEGGTTGIQSEFFINTTRAGPGTLSVTIEGPSKVKMDCQETPEGYKVMYTPMAPGNYLISVKYGGPNHIVGSPFKAKVTGQRLVSPGSANETSSILVESVTRSSTETCYSAIPKASSDASKVTSKGAGLSKAFVGQKSSFLVDCSKAGSNMLLIGVHGPTTPCEEVSMKHVGNQQYNVTYVVKERGDYVLAVKWGEEHIPGSPFHVTVP

SEQ ID NO: 32157 - protein, 276 aa, Homo sapiens
  Payload ID: 6299
  Gene Symbol: FBLIM1
  Gene Name: filamin binding LIM protein 1
  Uniprot ID: Q8WUP2
  ENSP ID: ENSP00000364920
MASKPEKRVASSVFITLAPPRRDVAVAEEVRQAVCEARRGRPWEAPAPMKTPEAGLAGRPSPWTTPGRAAATVPAAPMQLFNGDICAFCHKTVSPRELAVEAMKRQYHAQCFTCRTCRRQLAGQSFYQKDGRPLCEPCYQDTLERCGKCGEVVRDHIIRALGQAFHPSCFTCVTCARCIGDESFALGSQNEVYCLDDFYRKFAPVCSICENPIIPRDGKDAFKIECMGRNFHENCYRCEDCRILLSVEPTDQGCYPLNNHLFCKPCHVKRSAAGCC

SEQ ID NO: 32158 - protein, 373 aa, Homo sapiens
  Payload ID: 6299
  Gene Symbol: FBLIM1
  Gene Name: filamin binding LIM protein 1
  Uniprot ID: Q8WUP2
  ENSP ID: ENSP00000364921
MASKPEKRVASSVFITLAPPRRDVAVAEEVRQAVCEARRGRPWEAPAPMKTPEAGLAGRPSPWTTPGRAAATVPAAPMQLFNGGCPPPPPVLDGEDVLPDLDLLPPPPPPPPVLLPSEEEAPAPMGASLIADLEQLHLSPPPPPPQAPAEGPSVQPGPLRPMEEELPPPPAEPVEKGASTDICAFCHKTVSPRELAVEAMKRQYHAQCFTCRTCRRQLAGQSFYQKDGRPLCEPCYQDTLERCGKCGEVVRDHIIRALGQAFHPSCFTCVTCARCIGDESFALGSQNEVYCLDDFYRKFAPVCSICENPIIPRDGKDAFKIECMGRNFHENCYRCEDCRILLSVEPTDQGCYPLNNHLFCKPCHVKRSAAGCC

SEQ ID NO: 32159 - protein, 373 aa, Homo sapiens; identical to SEQ ID NO: 32158
  Payload ID: 6299
  Gene Symbol: FBLIM1
  Gene Name: filamin binding LIM protein 1
  Uniprot ID: Q8WUP2
  ENSP ID: ENSP00000364926

SEQ ID NO: 32160 - protein, 17 aa, Homo sapiens
  Payload ID: 6299
  Gene Symbol: FBLIM1
  Gene Name: filamin binding LIM protein 1
  ENSP ID: ENSP00000387595
MASKPEKRVASSVFITL

SEQ ID NO: 32161 - protein, 104 aa, Homo sapiens
  Payload ID: 6299
  Gene Symbol: FBLIM1
  Gene Name: filamin binding LIM protein 1
  ENSP ID: ENSP00000402401
MASKPEKRVASSVFITLAPPRRDVAVAEEVRQAVCEARRGRPWEAPAPMKTPEAGLAGRPSPWTTPGRAAATVPAAPMQLFNGGCPPPPPVLDGEDVLPDLDLL

SEQ ID NO: 32162 - protein, 374 aa, Homo sapiens
  Payload ID: 6299
  Gene Symbol: FBLIM1
  Gene Name: filamin binding LIM protein 1
  Uniprot ID: Q8WUP2
  ENSP ID: ENSP00000416387
MASKPEKRVASSVFITLAPPRRDVAVAEEVRQAVCEARRGRPWEAPAPMKTPEAGLAGRPSPWTTPGRAAATVPAAPMQLFNGGCPPPPPVLDGEDVLPDLDLLPPPPPPPPVLLPSEEEAPAPMGASLIADLEQLHLSPPPPPPQAPAEGPSVQPGPLRPMEEELPPPPAEPVEKGASTDICAFCHKTVSPRELAVEAMKRQYHAQCFTCRTCRRQLAGQSFYQKDGRPLCEPCYQDTLERCGKCGEVVRDHIIRALGQAFHPSCFTCVTCARCIGDESFALGSQNEVYCLDDFYRYEKGLCTGWGAGTGRDPSRVKELSLSPGCWARVSCLLVYYKEYYRAGLGAVAHACNPSTLGGRGGWITRSGDRDHPG

SEQ ID NO: 32163 - protein, 14 aa, Homo sapiens
  Payload ID: 6299
  Gene Symbol: FBLIM1
  Gene Name: filamin binding LIM protein 1
  ENSP ID: ENSP00000421764
MASKPEKRVASSVF

SEQ ID NO: 32164 - protein, 78 aa, Homo sapiens
  Payload ID: 6299
  Gene Symbol: FBLIM1
  Gene Name: filamin binding LIM protein 1
  ENSP ID: ENSP00000421885
MASKPEKRVASSVFITLAPPRRDVAVAEEVRQAVCEARRGRPWEAPAPMKTPEAGLAGRPSPWTTPGRAAATVPAAPM

SEQ ID NO: 32165 - protein, 31 aa, Homo sapiens
  Payload ID: 6299
  Gene Symbol: FBLIM1
  Gene Name: filamin binding LIM protein 1
  ENSP ID: ENSP00000422075
MASKPEKRVASSVFITLAPPRRDVAVAEEVR

SEQ ID NO: 32166 - protein, 30 aa, Homo sapiens
  Payload ID: 6299
  Gene Symbol: FBLIM1
  Gene Name: filamin binding LIM protein 1
  ENSP ID: ENSP00000422862
MASKPEKRVASSVFITLAPPRRDVAVAEEV

SEQ ID NO: 32167 - protein, 34 aa, Homo sapiens
  Payload ID: 6299
  Gene Symbol: FBLIM1
  Gene Name: filamin binding LIM protein 1
  ENSP ID: ENSP00000423471
MASKPEKRVASSVFITLAPPRRDVAVAEEVRQAV

SEQ ID NO: 32168 - protein, 144 aa, Homo sapiens
  Payload ID: 6299
  Gene Symbol: FBLIM1
  Gene Name: filamin binding LIM protein 1
  ENSP ID: ENSP00000424920
MASKPEKRVASSVFITLAPPRRDVAVAEEVRQAVCEARRGRPWEAPAPMKTPEAGLAGRPSPWTTPGRAAATVPAAPMQLFNGDICAFCHKTVSPRELAVEAMKRQYHAQCFTCRTCRRQLAGQSFYQKDGRPLCEPCYQDTLE

SEQ ID NO: 32169 - protein, 144 aa, Homo sapiens
  Payload ID: 6299
  Gene Symbol: FBLIM1
  Gene Name: filamin binding LIM protein 1
  ENSP ID: ENSP00000427052
MASKPEKRVASSVFITLAPPRRDVAVAEEVRQAVCEARRGRPWEAPAPMKTPEAGLAGRPSPWTTPGRAAATVPAAPMQLFNGGCPPPPPVLDGEDVLPDLDLLPPPPPPPPVLLPSEEEAPAPMGASLIADLEQLHLSPPPPP

SEQ ID NO: 32170 - protein, 2725 aa, Homo sapiens
  Payload ID: 6300
  Gene Symbol: FLNC
  Gene Name: filamin C, gamma
  Uniprot ID: Q14315
  ENSP ID: ENSP00000327145
MMNNSGYSDAGLGLGDETDEMPSTEKDLAEDAPWKKIQQNTFTRWCNEHLKCVGKRLTDLQRDLSDGLRLIALLEVLSQKRMYRKFHPRPNFRQMKLENVSVALEFLEREHIKLVSIDSKAIVDGNLKLILGLIWTLILHYSISMPMWEDEDDEDARKQTPKQRLLGWIQNKVPQLPITNFNRDWQDGKALGALVDNCAPGLCPDWEAWDPNQPVENAREAMQQADDWLGVPQVIAPEEIVDPNVDEHSVMTYLSQFPKAKLKPGAPVRSKQLNPKKAIAYGPGIEPQGNTVLQPAHFTVQTVDAGVGEVLVYIEDPEGHTEEAKVVPNNDKDRTYAVSYVPKVAGLHKVTVLFAGQNIERSPFEVNVGMALGDANKVSARGPGLEPVGNVANKPTYFDIYTAGAGTGDVAVVIVDPQGRRDTVEVALEDKGDSTFRCTYRPAMEGPHTVHVAFAGAPITRSPFPVHVSEACNPNACRASGRGLQPKGVRVKEVADFKVFTKGAGSGELKVTVKGPKGTEEPVKVREAGDGVFECEYYPVVPGKYVVTITWGGYAIPRSPFEVQVSPEAGVQKVRAWGPGLETGQVGKSADFVVEAIGTEVGTLGFSIEGPSQAKIECDDKGDGSCDVRYWPTEPGEYAVHVICDDEDIRDSPFIAHILPAPPDCFPDKVKAFGPGLEPTGCIVDKPAEFTIDARAAGKGDLKLYAQDADGCPIDIKVIPNGDGTFRCSYVPTKPIKHTIIISWGGVNVPKSPFRVNVGEGSHPERVKVYGPGVEKTGLKANEPTYFTVDCSEAGQGDVSIGIKCAPGVVGPAEADIDFDIIKNDNDTFTVKYTPPGAGRYTIMVLFANQEIPASPFHIKVDPSHDASKVKAEGPGLNRTGVEVGKPTHFTVLTKGAGKAKLDVQFAGTAKGEVVRDFEIIDNHDYSYTVKYTAVQQGNMAVTVTYGGDPVPKSPFVVNVAPPLDLSKIKVQGLNSKVAVGQEQAFSVNTRGAGGQGQLDVRMTSPSRRPIPCKLEPGGGAEAQAVRYMPPEEGPYKVDITYDGHPVPGSPFAVEGVLPPDPSKVCAYGPGLKGGLVGTPAPFSIDTKGAGTGGLGLTVEGPCEAKIECQDNGDGSCAVSYLPTEPGEYTINILFAEAHIPGSPFKATIRPVFDPSKVRASGPGLERGKVGEAATFTVDCSEAGEAELTIEILSDAGVKAEVLIHNNADGTYHITYSPAFPGTYTITIKYGGHPVPKFPTRVHVQPAVDTSGVKVSGPGVEPHGVLREVTTEFTVDARSLTATGGNHVTARVLNPSGAKTDTYVTDNGDGTYRVQYTAYEEGVHLVEVLYDEVAVPKSPFRVGVTEGCDPTRVRAFGPGLEGGLVNKANRFTVETRGAGTGGLGLAIEGPSEAKMSCKDNKDGSCTVEYIPFTPGDYDVNITFGGRPIPGSPFRVPVKDVVDPGKVKCSGPGLGAGVRARVPQTFTVDCSQAGRAPLQVAVLGPTGVAEPVEVRDNGDGTHTVHYTPATDGPYTVAVKYADQEVPRSPFKIKVLPAHDASKVRASGPGLNASGIPASLPVEFTIDARDAGEGLLTVQILDPEGKPKKANIRDNGDGTYTVSYLPDMSGRYTITIKYGGDEIPYSPFRIHALPTGDASKCLVTVSIGGHGLGACLGPRIQIGQETVITVDAKAAGEGKVTCTVSTPDGAELDVDVVENHDGTFDIYYTAPEPGKYVITIRFGGEHIPNSPFHVLACDPLPHEEEPSEVPQLRQPYAPPRPGARPTHWATEEPVVPVEPMESMLRPFNLVIPFAVQKGELTGEVRMPSGKTARPNITDNKDGTITVRYAPTEKGLHQMGIKYDGNHIPGSPLQFYVDAINSRHVSAYGPGLSHGMVNKPATFTIVTKDAGEGGLSLAVEGPSKAEITCKDNKDGTCTVSYLPTAPGDYSIIVRFDDKHIPGSPFTAKITGDDSMRTSQLNVGTSTDVSLKITESDLSQLTASIRAPSGNEEPCLLKRLPNRHIGISFTPKEVGEHVVSVRKSGKHVTNSPFKILVGPSEIGDASKVRVWGKGLSEGHTFQVAEFIVDTRNAGYGGLGLSIEGPSKVDINCEDMEDGTCKVTYCPTEPGTYIINIKFADKHVPGSPFTVKVTGEGRMKESITRRRQAPSIATIGSTCDLNLKIPGNWFQMVSAQERLTRTFTRSSHTYTRTERTEISKTRGGETKREVRVEESTQVGGDPFPAVFGDFLGRERLGSFGSITRQQEGEASSQDMTAQVTSPSGKVEAAEIVEGEDSAYSVRFVPQEMGPHTVAVKYRGQHVPGSPFQFTVGPLGEGGAHKVRAGGTGLERGVAGVPAEFSIWTREAGAGGLSIAVEGPSKAEIAFEDRKDGSCGVSYVVQEPGDYEVSIKFNDEHIPDSPFVVPVASLSDDARRLTVTSLQETGLKVNQPASFAVQLNGARGVIDARVHTPSGAVEECYVSELDSDKHTIRFIPHENGVHSIDVKFNGAHIPGSPFKIRVGEQSQAGDPGLVSAYGPGLEGGTTGVSSEFIVNTLNAGSGALSVTIDGPSKVQLDCRECPEGHVVTYTPMAPGNYLIAIKYGGPQHIVGSPFKAKVTGPRLSGGHSLHETSTVLVETVTKSSSSRGSSYSSIPKFSSDASKVVTRGPGLSQAFVGQKNSFTVDCSKAGTNMMMVGVHGPKTPCEEVYVKHMGNRVYNVTYTVKEKGDYILIVKWGDESVPGSPFKVKVP

SEQ ID NO: 32171 - protein, 2692 aa, Homo sapiens
  Payload ID: 6300
  Gene Symbol: FLNC
  Gene Name: filamin C, gamma
  Uniprot ID: Q14315
  ENSP ID: ENSP00000344002
MMNNSGYSDAGLGLGDETDEMPSTEKDLAEDAPWKKIQQNTFTRWCNEHLKCVGKRLTDLQRDLSDGLRLIALLEVLSQKRMYRKFHPRPNFRQMKLENVSVALEFLEREHIKLVSIDSKAIVDGNLKLILGLIWTLILHYSISMPMWEDEDDEDARKQTPKQRLLGWIQNKVPQLPITNFNRDWQDGKALGALVDNCAPGLCPDWEAWDPNQPVENAREAMQQADDWLGVPQVIAPEEIVDPNVDEHSVMTYLSQFPKAKLKPGAPVRSKQLNPKKAIAYGPGIEPQGNTVLQPAHFTVQTVDAGVGEVLVYIEDPEGHTEEAKVVPNNDKDRTYAVSYVPKVAGLHKVTVLFAGQNIERSPFEVNVGMALGDANKVSARGPGLEPVGNVANKPTYFDIYTAGAGTGDVAVVIVDPQGRRDTVEVALEDKGDSTFRCTYRPAMEGPHTVHVAFAGAPITRSPFPVHVSEACNPNACRASGRGLQPKGVRVKEVADFKVFTKGAGSGELKVTVKGPKGTEEPVKVREAGDGVFECEYYPVVPGKYVVTITWGGYAIPRSPFEVQVSPEAGVQKVRAWGPGLETGQVGKSADFVVEAIGTEVGTLGFSIEGPSQAKIECDDKGDGSCDVRYWPTEPGEYAVHVICDDEDIRDSPFIAHILPAPPDCFPDKVKAFGPGLEPTGCIVDKPAEFTIDARAAGKGDLKLYAQDADGCPIDIKVIPNGDGTFRCSYVPTKPIKHTIIISWGGVNVPKSPFRVNVGEGSHPERVKVYGPGVEKTGLKANEPTYFTVDCSEAGQGDVSIGIKCAPGVVGPAEADIDFDIIKNDNDTFTVKYTPPGAGRYTIMVLFANQEIPASPFHIKVDPSHDASKVKAEGPGLNRTGVEVGKPTHFTVLTKGAGKAKLDVQFAGTAKGEVVRDFEIIDNHDYSYTVKYTAVQQGNMAVTVTYGGDPVPKSPFVVNVAPPLDLSKIKVQGLNSKVAVGQEQAFSVNTRGAGGQGQLDVRMTSPSRRPIPCKLEPGGGAEAQAVRYMPPEEGPYKVDITYDGHPVPGSPFAVEGVLPPDPSKVCAYGPGLKGGLVGTPAPFSIDTKGAGTGGLGLTVEGPCEAKIECQDNGDGSCAVSYLPTEPGEYTINILFAEAHIPGSPFKATIRPVFDPSKVRASGPGLERGKVGEAATFTVDCSEAGEAELTIEILSDAGVKAEVLIHNNADGTYHITYSPAFPGTYTITIKYGGHPVPKFPTRVHVQPAVDTSGVKVSGPGVEPHGVLREVTTEFTVDARSLTATGGNHVTARVLNPSGAKTDTYVTDNGDGTYRVQYTAYEEGVHLVEVLYDEVAVPKSPFRVGVTEGCDPTRVRAFGPGLEGGLVNKANRFTVETRGAGTGGLGLAIEGPSEAKMSCKDNKDGSCTVEYIPFTPGDYDVNITFGGRPIPGSPFRVPVKDVVDPGKVKCSGPGLGAGVRARVPQTFTVDCSQAGRAPLQVAVLGPTGVAEPVEVRDNGDGTHTVHYTPATDGPYTVAVKYADQEVPRSPFKIKVLPAHDASKVRASGPGLNASGIPASLPVEFTIDARDAGEGLLTVQILDPEGKPKKANIRDNGDGTYTVSYLPDMSGRYTITIKYGGDEIPYSPFRIHALPTGDASKCLVTVSIGGHGLGACLGPRIQIGQETVITVDAKAAGEGKVTCTVSTPDGAELDVDVVENHDGTFDIYYTAPEPGKYVITIRFGGEHIPNSPFHVLATEEPVVPVEPMESMLRPFNLVIPFAVQKGELTGEVRMPSGKTARPNITDNKDGTITVRYAPTEKGLHQMGIKYDGNHIPGSPLQFYVDAINSRHVSAYGPGLSHGMVNKPATFTIVTKDAGEGGLSLAVEGPSKAEITCKDNKDGTCTVSYLPTAPGDYSIIVRFDDKHIPGSPFTAKITGDDSMRTSQLNVGTSTDVSLKITESDLSQLTASIRAPSGNEEPCLLKRLPNRHIGISFTPKEVGEHVVSVRKSGKHVTNSPFKILVGPSEIGDASKVRVWGKGLSEGHTFQVAEFIVDTRNAGYGGLGLSIEGPSKVDINCEDMEDGTCKVTYCPTEPGTYIINIKFADKHVPGSPFTVKVTGEGRMKESITRRRQAPSIATIGSTCDLNLKIPGNWFQMVSAQERLTRTFTRSSHTYTRTERTEISKTRGGETKREVRVEESTQVGGDPFPAVFGDFLGRERLGSFGSITRQQEGEASSQDMTAQVTSPSGKVEAAEIVEGEDSAYSVRFVPQEMGPHTVAVKYRGQHVPGSPFQFTVGPLGEGGAHKVRAGGTGLERGVAGVPAEFSIWTREAGAGGLSIAVEGPSKAEIAFEDRKDGSCGVSYVVQEPGDYEVSIKFNDEHIPDSPFVVPVASLSDDARRLTVTSLQETGLKVNQPASFAVQLNGARGVIDARVHTPSGAVEECYVSELDSDKHTIRFIPHENGVHSIDVKFNGAHIPGSPFKIRVGEQSQAGDPGLVSAYGPGLEGGTTGVSSEFIVNTLNAGSGALSVTIDGPSKVQLDCRECPEGHVVTYTPMAPGNYLIAIKYGGPQHIVGSPFKAKVTGPRLSGGHSLHETSTVLVETVTKSSSSRGSSYSSIPKFSSDASKVVTRGPGLSQAFVGQKNSFTVDCSKAGTNMMMVGVHGPKTPCEEVYVKHMGNRVYNVTYTVKEKGDYILIVKWGDESVPGSPFKVKVP

SEQ ID NO: 32172 - protein, 211 aa, Homo sapiens
  Payload ID: 6301
  Gene Symbol: FIBIN
  Gene Name: fin bud initiation factor homolog (zebrafish)
  Uniprot ID: Q8TAL6
  ENSP ID: ENSP00000321962
MVFLKFFCMSFFCHLCQGYFDGPLYPEMSNGTLHHYFVPDGDYEENDDPEKCQLLFRVSDHRRCSQGEGSQVGSLLSLTLREEFTVLGRQVEDAGRVLEGISKSISYDLDGEESYGKYLRRESHQIGDAYSNSDKSLTELESKFKQGQEQDSRQESRLNEDFLGMLVHTRSLLKETLDISVGLRDKYELLALTIRSHGTRLGRLKNDYLKV

SEQ ID NO: 32173 - protein, 87 aa, Homo sapiens
  Payload ID: 6302
  Gene Symbol: FAU
  Gene Name: Finkel-Biskis-Reilly murine sarcoma virus (FBR-MuSV) ubiquitously expressed
  ENSP ID: ENSP00000279259
MQLFVRAQELHTFEVTGQETVAQIKAHVASLEGIAPEDQVVLLAGAPLEDEATLGQCGVEALTTLEVAGRMLGGGQTGEEEEEDRSG

SEQ ID NO: 32174 - protein, 75 aa, Homo sapiens
  Payload ID: 6302
  Gene Symbol: FAU
  Gene Name: Finkel-Biskis-Reilly murine sarcoma virus (FBR-MuSV) ubiquitously expressed
  ENSP ID: ENSP00000413848
MQLFVRAQELHTFEVTGQETVAQIKAHVASLEGIAPEDQVVLLAGAPLEDEATLGQCGVEALTTLEVAGRMLGGE

SEQ ID NO: 32175 - protein, 133 aa, Homo sapiens
  Payload ID: 6302
  Gene Symbol: FAU
  Gene Name: Finkel-Biskis-Reilly murine sarcoma virus (FBR-MuSV) ubiquitously expressed
  Uniprot ID: P62861
  ENSP ID: ENSP00000431822
MQLFVRAQELHTFEVTGQETVAQIKAHVASLEGIAPEDQVVLLAGAPLEDEATLGQCGVEALTTLEVAGRMLGGKVHGSLARAGKVRGQTPKVAKQEKKKKKTGRAKRRMQYNRRFVNVVPTFGKKKGPNANS

SEQ ID NO: 32176 - protein, 108 aa, Homo sapiens
  Payload ID: 6302
  Gene Symbol: FAU
  Gene Name: Finkel-Biskis-Reilly murine sarcoma virus (FBR-MuSV) ubiquitously expressed
  ENSP ID: ENSP00000433139
MQLFVRAQELHTFEVTGQETVAQIKAHVASLEGIAPEDQVVLLAGAPLEDEATLGQCGVEALTTLEVAGRMLGGKVHGSLARAGKVRGQTPKVAKQEKKKKKTGRAKR

SEQ ID NO: 32177 - protein, 133 aa, Homo sapiens; identical to SEQ ID NO: 32175
  Payload ID: 6302
  Gene Symbol: FAU
  Gene Name: Finkel-Biskis-Reilly murine sarcoma virus (FBR-MuSV) ubiquitously expressed
  Uniprot ID: P62861
  ENSP ID: ENSP00000434440

SEQ ID NO: 32178 - protein, 75 aa, Homo sapiens; identical to SEQ ID NO: 32174
  Payload ID: 6302
  Gene Symbol: FAU
  Gene Name: Finkel-Biskis-Reilly murine sarcoma virus (FBR-MuSV) ubiquitously expressed
  ENSP ID: ENSP00000434680

SEQ ID NO: 32179 - protein, 133 aa, Homo sapiens; identical to SEQ ID NO: 32175
  Payload ID: 6302
  Gene Symbol: FAU
  Gene Name: Finkel-Biskis-Reilly murine sarcoma virus (FBR-MuSV) ubiquitously expressed
  Uniprot ID: P62861
  ENSP ID: ENSP00000435370

SEQ ID NO: 32180 - protein, 98 aa, Homo sapiens
  Payload ID: 6302
  Gene Symbol: FAU
  Gene Name: Finkel-Biskis-Reilly murine sarcoma virus (FBR-MuSV) ubiquitously expressed
  ENSP ID: ENSP00000436110
MQLFVRAQELHTFEVTGQETVAQIKALTTLEVAGRMLGGKVHGSLARAGKVRGQTPKVAKQEKKKKKTGRAKRRMQYNRRFVNVVPTFGKKKGPNANS

SEQ ID NO: 32181 - protein, 152 aa, Homo sapiens
  Payload ID: 6303
  Gene Symbol: FIS1
  Gene Name: fission, mitochondrial 1
  Uniprot ID: Q9Y3D6
  ENSP ID: ENSP00000223136
MEAVLNELVSVEDLLKFEKKFQSEKAAGSVSKSTQFEYAWCLVRSKYNDDIRKGIVLLEELLPKGSKEEQRDYVFYLAVGNYRLKEYEKALKYVRGLLQTEPQNNQAKELERLIDKAMKKDGLVGMAIVGGMALGVAGLAGLIGLAVSKSKS

SEQ ID NO: 32182 - protein, 90 aa, Homo sapiens
  Payload ID: 6303
  Gene Symbol: FIS1
  Gene Name: fission, mitochondrial 1
  ENSP ID: ENSP00000395964
MEAVLNELVSVEDLLVRPGPDRGKGKVGGRVLRRVRAAAQREQGGTAGLRLLPGRGELPAQGIREGLKVRPRVAADRAPEQPGQGTGAAH

SEQ ID NO: 32183 - protein, 46 aa, Homo sapiens
  Payload ID: 6303
  Gene Symbol: FIS1
  Gene Name: fission, mitochondrial 1
  ENSP ID: ENSP00000411442
MEAVLNELVSVEDLLSCCPKGARRNSGITSSTWPWGTTGSRNTRRP

SEQ ID NO: 32184 - protein, 155 aa, Homo sapiens
  Payload ID: 6303
  Gene Symbol: FIS1
  Gene Name: fission, mitochondrial 1
  ENSP ID: ENSP00000413500
MKLERSLKRNFSLRRQQARCPRARSLSTPGAWCGASTMMTSVKASCCSRSCCPKGARRNSGITSSTWPWGTTGSRWTRGHGHRGRHGPGCGGTGRTHRTCCVQVQILKETREPTENAPGGPVHPRCPFPVLPLPPVSILCGLQLISAPLRFVLQP

SEQ ID NO: 32185 - protein, 59 aa, Homo sapiens
  Payload ID: 6303
  Gene Symbol: FIS1
  Gene Name: fission, mitochondrial 1
  ENSP ID: ENSP00000442056
MKLERAAAQREQGGTAGLRLLPGRGELPAQGIREGLKVRPRVAADRAPEQPGQGTGAAH

SEQ ID NO: 32186 - protein, 80 aa, Homo sapiens
  Payload ID: 6303
  Gene Symbol: FIS1
  Gene Name: fission, mitochondrial 1
  ENSP ID: ENSP00000444771
MKLERSLKRNFSLRRQQARCPRARSLSTPGAWCGASTMMTSVKASCCSRSCCPKGARRNSGITSSTWPWGTTGSRNTRRP

SEQ ID NO: 32187 - protein, 404 aa, Homo sapiens
  Payload ID: 6304
  Gene Symbol: FZR1
  Gene Name: fizzy/cell division cycle 20 related 1
  Uniprot ID: Q9UM11
  ENSP ID: ENSP00000321800
MDQDYERRLLRQIVIQNENTMPRVTEMRRTLTPASSPVSSPSKHGDRFIPSRAGANWSVNFHRINENEKSPSQNRKAKDATSDNGKDGLAYSALLKNELLGAGIEKVQDPQTEDRRLQPSTPEKKGLFTVTRLCDLSVEGDSVTSVGWSERGNLVAVGTHKGFVQIWDAAAGKKLSMLEGHTARVGALAWNAEQLSSGSRDRMILQRDIRTPPLQSERRLQGHRQEVCGLKWSTDHQLLASGGNDNKLLVWNHSSLSPVQQYTEHLAAVKAIAWSPHQHGLLASGGGTADRCIRFWNTLTGQPLQCIDTGSQVCNLAWSKHANELVSTHGYSQNQILVWKYPSLTQVAKLTGHSYRVLYLAMSPDGEAIVTGAGDETLRFWNVFSKTRSTKESVSVLNLFTRIR

SEQ ID NO: 32188 - protein, 496 aa, Homo sapiens
  Payload ID: 6304
  Gene Symbol: FZR1
  Gene Name: fizzy/cell division cycle 20 related 1
  Uniprot ID: Q9UM11
  ENSP ID: ENSP00000378529
MDQDYERRLLRQIVIQNENTMPRVTEMRRTLTPASSPVSSPSKHGDRFIPSRAGANWSVNFHRINENEKSPSQNRKAKDATSDNGKDGLAYSALLKNELLGAGIEKVQDPQTEDRRLQPSTPEKKGLFTYSLSTKRSSPDDGNDVSPYSLSPVSNKSQKLLRSPRKPTRKISKIPFKVLDAPELQDDFYLNLVDWSSLNVLSVGLGTCVYLWSACTSQVTRLCDLSVEGDSVTSVGWSERGNLVAVGTHKGFVQIWDAAAGKKLSMLEGHTARVGALAWNAEQLSSGSRDRMILQRDIRTPPLQSERRLQGHRQEVCGLKWSTDHQLLASGGNDNKLLVWNHSSLSPVQQYTEHLAAVKAIAWSPHQHGLLASGGGTADRCIRFWNTLTGQPLQCIDTGSQVCNLAWSKHANELVSTHGYSQNQILVWKYPSLTQVAKLTGHSYRVLYLAMSPDGEAIVTGAGDETLRFWNVFSKTRSTKVKWESVSVLNLFTRIR

SEQ ID NO: 32189 - protein, 493 aa, Homo sapiens
  Payload ID: 6304
  Gene Symbol: FZR1
  Gene Name: fizzy/cell division cycle 20 related 1
  Uniprot ID: Q9UM11
  ENSP ID: ENSP00000410369
MDQDYERRLLRQIVIQNENTMPRVTEMRRTLTPASSPVSSPSKHGDRFIPSRAGANWSVNFHRINENEKSPSQNRKAKDATSDNGKDGLAYSALLKNELLGAGIEKVQDPQTEDRRLQPSTPEKKGLFTYSLSTKRSSPDDGNDVSPYSLSPVSNKSQKLLRSPRKPTRKISKIPFKVLDAPELQDDFYLNLVDWSSLNVLSVGLGTCVYLWSACTSQVTRLCDLSVEGDSVTSVGWSERGNLVAVGTHKGFVQIWDAAAGKKLSMLEGHTARVGALAWNAEQLSSGSRDRMILQRDIRTPPLQSERRLQGHRQEVCGLKWSTDHQLLASGGNDNKLLVWNHSSLSPVQQYTEHLAAVKAIAWSPHQHGLLASGGGTADRCIRFWNTLTGQPLQCIDTGSQVCNLAWSKHANELVSTHGYSQNQILVWKYPSLTQVAKLTGHSYRVLYLAMSPDGEAIVTGAGDETLRFWNVFSKTRSTKESVSVLNLFTRIR

SEQ ID NO: 32190 - protein, 361 aa, Homo sapiens
  Payload ID: 6304
  Gene Symbol: FZR1
  Gene Name: fizzy/cell division cycle 20 related 1
  ENSP ID: ENSP00000467967
MDQDYERRLLRQIVIQNENTMPRVTEMRRTLTPASSPVSSPSKHGDRFIPSRAGANWSVNFHRINENEKSPSQNRKAKDATSDNGKDGLAYSALLKNELLGAGIEKVQDPQTEDRRLQPSTPEKKGLFTYSLSTKRSSPDDGNDVSPYSLSPVSNKSQKLLRSPRKPTRKISKIPFKVLDAPELQDDFYLNLVDWSSLNVLSVGLGTCVYLWSACTSQVTRLCDLSVEGDSVTSVGWSERGNLVAVGTHKGFVQIWDAAAGKKLSMLEGHTARVGALAWNAEQLSSGSRDRMILQRDIRTPPLQSERRLQGHRQEVCGLKWSTDHQLLASGGNDNKDNHCSVSTRAPKCAIWPGPSTPTSW

SEQ ID NO: 32191 - protein, 582 aa, Homo sapiens
  Payload ID: 6305
  Gene Symbol: FKBP10
  Gene Name: FK506 binding protein 10, 65 kDa
  Uniprot ID: Q96AY3
  ENSP ID: ENSP00000317232
MFPAGPPSHSLLRLPLLQLLLLVVQAVGRGLGRASPAGGPLEDVVIERYHIPRACPREVQMGDFVRYHYNGTFEDGKKFDSSYDRNTLVAIVVGVGRLITGMDRGLMGMCVNERRRLIVPPHLGYGSIGLAGLIPPDATLYFDVVLLDVWNKEDTVQVSTLLRPPHCPRMVQDGDFVRYHYNGTLLDGTSFDTSYSKGGTYDTYVGSGWLIKGMDQGLLGMCPGERRKIIIPPFLAYGEKGYGTVIPPQASLVFHVLLIDVHNPKDAVQLETLELPPGCVRRAGAGDFMRYHYNGSLMDGTLFDSSYSRNHTYNTYIGQGYIIPGMDQGLQGACMGERRRITIPPHLAYGENGTGDKIPGSAVLIFNVHVIDFHNPADVVEIRTLSRPSETCNETTKLGDFVRYHYNCSLLDGTQLFTSHDYGAPQEATLGANKVIEGLDTGLQGMCVGERRQLIVPPHLAHGESGARGVPGSAVLLFEVELVSREDGLPTGYLFVWHKDPPANLFEDMDLNKDGEVPPEEFSTFIKAQVSEGKGRLMPGQDPEKTIGDMFQNQDRNQDGKITVDELKLKSDEDEERVHEEL

SEQ ID NO: 32192 - protein, 81 aa, Homo sapiens
  Payload ID: 6305
  Gene Symbol: FKBP10
  Gene Name: FK506 binding protein 10, 65 kDa
  ENSP ID: ENSP00000408232
MGDFVRYHYNGTFEDGKKFDSSYDRNTLVAIVVGVGRLITGMDRGLMGMCVNERRRLIVPPHLGYGSIGLAGLIPPDATLY

SEQ ID NO: 32193 - protein, 386 aa, Homo sapiens
  Payload ID: 6305
  Gene Symbol: FKBP10
  Gene Name: FK506 binding protein 10, 65 kDa
  ENSP ID: ENSP00000416822
  MOD_RES (1)..(1): Any amino acid
XIDVHNPKDAVQLETLELPPGCVRRAGAGDFMRYHYNGSLMDGTLFDSSYSRNHTYNTYIGQGYIIPGMDQGLQGACMGERRRITIPPHLAYGENGTDSIGFLQGSAPLRPFRSGEGQPSLGREGGYGKTEPAYPQDPAVLGASVSSPVKWASHADPQGDKIPGSAVLIFNVHVIDFHNPADVVEIRTLSRPSETCNETTKLGDFVRYHYNCSLLDGTQLFTSHDYGAPQEATLGANKVIEGLDTGLQGMCVGERRQLIVPPHLAHGESGARGVPGSAVLLFEVELVSREDGLPTGYLFVWHKDPPANLFEDMDLNKDGEVPPEEFSTFIKAQVSEGKGRLMPGQDPEKTIGDMFQNQDRNQDGKITVDELKLKSDEDEERVHEEL

SEQ ID NO: 32194 - protein, 171 aa, Homo sapiens
  Payload ID: 6305
  Gene Symbol: FKBP10
  Gene Name: FK506 binding protein 10, 65 kDa
  ENSP ID: ENSP00000466097
MFPAGPPSHSLLRLPLLQLLLLVVQAVGRGLGRASPAGGPLEDVVIERYHIPRACPREVQMGDFVRYHYNGTFEDGKKFDSSYDRNTLVAIVVGVGRLITGMDRGLMGMCVNERRRLIVPPHLGYGSIGLAGLIPPDATLYFDVVLLDVWNKEDTVQVSTLLRPPHCPRMV

SEQ ID NO: 32195 - protein, 147 aa, Homo sapiens
  Payload ID: 6305
  Gene Symbol: FKBP10
  Gene Name: FK506 binding protein 10, 65 kDa
  ENSP ID: ENSP00000466352
MFPAGPPSHSLLRLPLLQLLLLVVQAVGRGLGRASPAGGPLEDVVIERYHIPRACPREVQMGDFVRYHYNGTFEDGKKFDSSGAHSTGCHPLLRCGSAGCVEQGRHRAGEHIAAPAPLPPHGPGRRLCPLPLQWHPAGRHLLRHQLQ

SEQ ID NO: 32196 - protein, 172 aa, Homo sapiens
  Payload ID: 6305
  Gene Symbol: FKBP10
  Gene Name: FK506 binding protein 10, 65 kDa
  ENSP ID: ENSP00000468703
MGDFVRYHYNGTFEDGKKFDSSYDRNTLVAIVVGVGRLITGMDRGLMGMCVNERRRLIVPPHLGYGSIGLAGLIPPDATLYFDVVLLDVWNKEDTVQVSTLLRPPHCPRMVQDGDFVRYHYNGTLLDGTSFDTSYSKGGTYDTYVGSGWLIKGMDQGLLGMCPGERRKIIIP

SEQ ID NO: 32197 - protein, 92 aa, Homo sapiens
  Payload ID: 6306
  Gene Symbol: FKBP11
  Gene Name: FK506 binding protein 11, 19 kDa
  ENSP ID: ENSP00000256680
MTLRPSLLPLHLLLLLLLSAAVCRAEAGLETESPVRTLQVETLGRERDLWKSIRDPCSPIVGGAPRTMCRARCFWRHASHTLHGKLGRWTYY

SEQ ID NO: 32198 - protein, 146 aa, Homo sapiens
  Payload ID: 6306
  Gene Symbol: FKBP11
  Gene Name: FK506 binding protein 11, 19 kDa
  Uniprot ID: Q9NYL4
  ENSP ID: ENSP00000396874
MTLRPSLLPLHLLLLLLLSAAVCRAEAGLETESPVRTLQVETLVEPPEPCAEPAAFGDTLHIHYTGSLVDGRIIDTSLTRDPLVIELGQKQVIPGLEQSLLDMCVGEKRRAIIPSHLAYGKRGFPPSVPGTKDNLMRPPGMTSSSQ

SEQ ID NO: 32199 - protein, 99 aa, Homo sapiens
  Payload ID: 6306
  Gene Symbol: FKBP11
  Gene Name: FK506 binding protein 11, 19 kDa
  ENSP ID: ENSP00000412403
MCVGEKRRAIIPSHLAYGKRGFPPSVPADAVVQYDVELIALIRANYWLKLVKGILPLVGMAMVPALLGLIGYHLYRKANRPKVSKKKLKEEKRNKSKKK

SEQ ID NO: 32200 - protein, 63 aa, Homo sapiens
  Payload ID: 6306
  Gene Symbol: FKBP11
  Gene Name: FK506 binding protein 11, 19 kDa
  ENSP ID: ENSP00000447411
SLTRDPLVIELGQKQVIPGLEQSLLDMCVGWKNSCFGCEDSGGFAEGASAGLRLLAYLSCLWL

SEQ ID NO: 32201 - protein, 182 aa, Homo sapiens
  Payload ID: 6306
  Gene Symbol: FKBP11
  Gene Name: FK506 binding protein 11, 19 kDa
  ENSP ID: ENSP00000447911
MTLRPSLLPLHLLLLLLLSAAVCRAEAGLETESPVRTLQVETLVEPPEPCAEPAAFGDTLHIHYTGSLVDGRIIDTSLTRDPLVIELGQKQVIPGLEQSLLDMCVGEKRRAIIPSHLAYGKRGFPPSVPDGVSLLLPRLECNSAIFTHHNLRHPGSSNSPVSASRVAGITGMRHHDRLILYF

SEQ ID NO: 32202 - protein, 72 aa, Homo sapiens
  Payload ID: 6306
  Gene Symbol: FKBP11
  Gene Name: FK506 binding protein 11, 19 kDa
  ENSP ID: ENSP00000448805
MTLRPSLLPLHLLLLLLLSAAVCRAEAGLETESPVRTLQVETLSDRRWSPQNHVPSPLLLETRFTYTTREAW

SEQ ID NO: 32203 - protein, 201 aa, Homo sapiens
  Payload ID: 6306
  Gene Symbol: FKBP11
  Gene Name: FK506 binding protein 11, 19 kDa
  Uniprot ID: Q9NYL4
  ENSP ID: ENSP00000449751
MTLRPSLLPLHLLLLLLLSAAVCRAEAGLETESPVRTLQVETLVEPPEPCAEPAAFGDTLHIHYTGSLVDGRIIDTSLTRDPLVIELGQKQVIPGLEQSLLDMCVGEKRRAIIPSHLAYGKRGFPPSVPADAVVQYDVELIALIRANYWLKLVKGILPLVGMAMVPALLGLIGYHLYRKANRPKVSKKKLKEEKRNKSKKK

SEQ ID NO: 32204 - protein, 211 aa, Homo sapiens
  Payload ID: 6307
  Gene Symbol: FKBP14
  Gene Name: FK506 binding protein 14, 22 kDa
  Uniprot ID: Q9NWM8
  ENSP ID: ENSP00000222803
MRLFLWNAVLTLFVTSLIGALIPEPEVKIEVLQKPFICHRKTKGGDLMLVHYEGYLEKDGSLFHSTHKHNNGQPIWFTLGILEALKGWDQGLKGMCVGEKRKLIIPPALGYGKEGKGKIPPESTLIFNIDLLEIRNGPRSHESFQEMDLNDDWKLSKDEVKAYLKKEFEKHGAVVNESHHDALVEDIFDKEDEDKDGFISAREFTYKHDEL

SEQ ID NO: 32205 - protein, 89 aa, Homo sapiens
  Payload ID: 6307
  Gene Symbol: FKBP14
  Gene Name: FK506 binding protein 14, 22 kDa
  ENSP ID: ENSP00000403279
  MOD_RES (1)..(1): Any amino acid
XVLQKPFICHRKTKGGDLMLVHYEGYLEKDGSLFHSTHKHNNGQPIWFTLGILEALKGWDQGLKGMCVGEKRKLIIPPALGYGKEGKVF

SEQ ID NO: 32206 - protein, 66 aa, Homo sapiens
  Payload ID: 6307
  Gene Symbol: FKBP14
  Gene Name: FK506 binding protein 14, 22 kDa
  ENSP ID: ENSP00000406270
MRLFLWNAVLTLFVTSLIGALIPEPEVKIEVLQKPFICHRKTKGGDLMLVHYEGYLEKDGSLFHST

SEQ ID NO: 32207 - protein, 1219 aa, Homo sapiens
  Payload ID: 6308
  Gene Symbol: FKBP15
  Gene Name: FK506 binding protein 15, 133kDa
  Uniprot ID: Q5T1M5
  ENSP ID: ENSP00000238256
MFGAGDEDDTDFLSPSGGARLASLFGLDQAAAGHGNEFFQYTAPKQPKKGQGTAATGNQATPKTAPATMSTPTILVATAVHAYRYTNGQYVKQGKFGAAVLGNHTAREYRILLYISQQQPVTVARIHVNFELMVRPNNYSTFYDDQRQNWSIMFESEKAAVEFNKQVCIAKCNSTSSLDAVLSQDLIVADGPAVEVGDSLEVAYTGWLFQNHVLGQVFDSTANKDKLLRLKLGSGKVIKGWEDGMLGMKKGGKRLLIVPPACAVGSEGVIGWTQATDSILVFEVEVRRVKFARDSGSDGHSVSSRDSAAPSPIPGADNLSADPVVSPPTSIPFKSGEPALRTKSNSLSEQLAINTSPDAVKAKLISRMAKMGQPMLPILPPQLDSNDSEIEDVNTLQGGGQPVVTPSVQPSLHPAHPALPQMTSQAPQPSVTGLQAPSAALMQVSSLDSHSAVSGNAQSFQPYAGMQAYAYPQASAVTSQLQPVRPLYPAPLSQPPHFQGSGDMASFLMTEARQHNTEIRMAVSKVADKMDHLMTKVEELQKHSAGNSMLIPSMSVTMETSMIMSNIQRIIQENERLKQEILEKSNRIEEQNDKISELIERNQRYVEQSNLMMEKRNNSLQTATENTQARVLHAEQEKAKVTEELAAATAQVSHLQLKMTAHQKKETELQMQLTESLKETDLLRGQLTKVQAKLSELQETSEQAQSKFKSEKQNRKQLELKVTSLEEELTDLRVEKESLEKNLSERKKKSAQERSQAEEEIDEIRKSYQEELDKLRQLLKKTRVSTDQAAAEQLSLVQAELQTQWEAKCEHLLASAKDEHLQQYQEVCAQRDAYQQKLVQLQEKCLALQAQITALTKQNEQHIKELEKNKSQMSGVEAAASDPSEKVKKIMNQVFQSLRREFELEESYNGRTILGTIMNTIKMVTLQLLNQQEQEKEESSSEEEEEKAEERPRRPSQEQSASASSGQPQAPLNRERPESPMVPSEQVVEEAVPLPPQALTTSQDGHRRKGDSEAEALSEIKDGSLPPELSCIPSHRVLGPPTSIPPEPLGPVSMDSECEESLAASPMAAKPDNPSGKVCVREVAPDGPLQESSTRLSLTSDPEEGDPLALGPESPGEPQPPQLKKDDVTSSTGPHKELSSTEAGSTVAGAALRPSHHSQRSSLSGDEEDELFKGATLKALRPKAQPEEEDEDEVSMKGRPPPTPLFGDDDDDDDIDWLG

SEQ ID NO: 32208 - protein, 497 aa, Homo sapiens
  Payload ID: 6308
  Gene Symbol: FKBP15
  Gene Name: FK506 binding protein 15, 133kDa
  ENSP ID: ENSP00000415733
DVGGDRPWDSGNTQLPPRNPVKANAMFGAGDEDDTDFLSPSGGARLASLFGLDQAAAGHGNEFFQYTAPKQPKKGQGTAATGNQATPKTAPATMSTPTILVATAVHAYRYTNGQYVKQGKFGAAVLGNHTAREYRILLYISQQQPVTVARIHVNFELMVRPNNYSTFYDDQRQNWSIMFESEKAAVEFNKQVCIAKCNSTSSLDAVLSQDLIVADGPAVEVGDSLEVAYTGWLFQNHVLGQVFDSTANKDKLLRLKLGSGKVIKGWEDGMLGMKKGGKRLLIVPPACAVGSEGVIGWTQATDSILVFEVEVRRVKFARDSGSDGHSVSSRDSAAPSPIPGADNLSADPVVSPPTSIPFKSGEPALRTKSNSLSEQLAINTSPDAVKAKLISRMAKMGQPMLPILPPQLDSNDSEIEDVNTLQGGGQPVVTPSVQPSLHPAHPALPQMTSQAPQPSVTGLQAPSAALMQVSSLDSHSAVSGNAQSFQVTFYNRINYIL

SEQ ID NO: 32209 - protein, 1244 aa, Homo sapiens
  Payload ID: 6308
  Gene Symbol: FKBP15
  Gene Name: FK506 binding protein 15, 133kDa
  ENSP ID: ENSP00000416158
DVGGDRPWDSGNTQLPPRNPVKANAMFGAGDEDDTDFLSPSGGARLASLFGLDQAAAGHGNEFFQYTAPKQPKKGQGTAATGNQATPKTAPATMSTPTILVATAVHAYRYTNGQYVKQGKFGAAVLGNHTAREYRILLYISQQQPVTVARIHVNFELMVRPNNYSTFYDDQRQNWSIMFESEKAAVEFNKQVCIAKCNSTSSLDAVLSQDLIVADGPAVEVGDSLEVAYTGWLFQNHVLGQVFDSTANKDKLLRLKLGSGKVIKGWEDGMLGMKKGGKRLLIVPPACAVGSEGVIGWTQATDSILVFEVEVRRVKFARDSGSDGHSVSSRDSAAPSPIPGADNLSADPVVSPPTSIPFKSGEPALRTKSNSLSEQLAINTSPDAVKAKLISRMAKMGQPMLPILPPQLDSNDSEIEDVNTLQGGGQPVVTPSVQPSLHPAHPALPQMTSQAPQPSVTGLQAPSAALMQVSSLDSHSAVSGNAQSFQPYAGMQAYAYPQASAVTSQLQPVRPLYPAPLSQPPHFQGSGDMASFLMTEARQHNTEIRMAVSKVADKMDHLMTKVEELQKHSAGNSMLIPSMSVTMETSMIMSNIQRIIQENERLKQEILEKSNRIEEQNDKISELIERNQRYVEQSNLMMEKRNNSLQTATENTQARVLHAEQEKAKVTEELAAATAQVSHLQLKMTAHQKKETELQMQLTESLKETDLLRGQLTKVQAKLSELQETSEQAQSKFKSEKQNRKQLELKVTSLEEELTDLRVEKESLEKNLSERKKKSAQERSQAEEEIDEIRKSYQEELDKLRQLLKKTRVSTDQAAAEQLSLVQAELQTQWEAKCEHLLASAKDEHLQQYQEVCAQRDAYQQKLVQLQEKCLALQAQITALTKQNEQHIKELEKNKSQMSGVEAAASDPSEKVKKIMNQVFQSLRREFELEESYNGRTILGTIMNTIKMVTLQLLNQQEQEKEESSSEEEEEKAEERPRRPSQEQSASASSGQPQAPLNRERPESPMVPSEQVVEEAVPLPPQALTTSQDGHRRKGDSEAEALSEIKDGSLPPELSCIPSHRVLGPPTSIPPEPLGPVSMDSECEESLAASPMAAKPDNPSGKVCVREVAPDGPLQESSTRLSLTSDPEEGDPLALGPESPGEPQPPQLKKDDVTSSTGPHKELSSTEAGSTVAGAALRPSHHSQRSSLSGDEEDELFKGATLKALRPKAQPEEEDEDEVSMKGRPPPTPLFGDDDDDDDIDWLG

SEQ ID NO: 32210 - protein, 103 aa, Homo sapiens
  Payload ID: 6309
  Gene Symbol: FKBP1A
  Gene Name: FK506 binding protein 1A, 12kDa
  ENSP ID: ENSP00000371134
MPVSVSSGRTFPKRGQTCVVHYTGMLEDGKKFDSSRDRNKPFKFMLGKQEVIRGWEEGVAQMSVGQRAKLTISPDYAYGATGHPGIIPPHATLVFDVELLKLE

SEQ ID NO: 32211 - protein, 108 aa, Homo sapiens
  Payload ID: 6309
  Gene Symbol: FKBP1A
  Gene Name: FK506 binding protein 1A, 12kDa
  Uniprot ID: P62942
  ENSP ID: ENSP00000371138
MGVQVETISPGDGRTFPKRGQTCVVHYTGMLEDGKKFDSSRDRNKPFKFMLGKQEVIRGWEEGVAQMSVGQRAKLTISPDYAYGATGHPGIIPPHATLVFDVELLKLE

SEQ ID NO: 32212 - protein, 103 aa, Homo sapiens; identical to SEQ ID NO: 32210
  Payload ID: 6309
  Gene Symbol: FKBP1A
  Gene Name: FK506 binding protein 1A, 12kDa
  ENSP ID: ENSP00000371143

SEQ ID NO: 32213 - protein, 108 aa, Homo sapiens; identical to SEQ ID NO: 32211
  Payload ID: 6309
  Gene Symbol: FKBP1A
  Gene Name: FK506 binding protein 1A, 12kDa
  Uniprot ID: P62942
  ENSP ID: ENSP00000383003

SEQ ID NO: 32214 - protein, 92 aa, Homo sapiens
  Payload ID: 6309
  Gene Symbol: FKBP1A
  Gene Name: FK506 binding protein 1A, 12kDa
  ENSP ID: ENSP00000409863
MGVQVETISPGDGMLEDGKKFDSSRDRNKPFKFMLGKQEVIRGWEEGVAQMSVGQRAKLTISPDYAYGATGHPGIIPPHATLVFDVELLKLE

SEQ ID NO: 32215 - protein, 97 aa, Homo sapiens
  Payload ID: 6309
  Gene Symbol: FKBP1A
  Gene Name: FK506 binding protein 1A, 12kDa
  ENSP ID: ENSP00000478093
MGVQVETISPGDGRTFPKRGQTCVVHYTDECGSESQTDYISRLCLWCHWAPRHHPTTCHSRLRCGASKTGMTGMASSLSSLFLDLPWRDLVPPDMCT

SEQ ID NO: 32216 - protein, 37 aa, Homo sapiens
  Payload ID: 6309
  Gene Symbol: FKBP1A
  Gene Name: FK506 binding protein 1A, 12kDa
  ENSP ID: ENSP00000480846
MGVQVETISPGDGRTFPKRGQTCVVHYTGGDCILVNE

SEQ ID NO: 32217 - protein, 129 aa, Homo sapiens
  Payload ID: 6309
  Gene Symbol: FKBP1A
  Gene Name: FK506 binding protein 1A, 12kDa
  ENSP ID: ENSP00000482758
MGVQVETISPGDGRTFPKRGQTCVVHYTGMLEDGKKFDSSRDRNKPFKFMLGKQEVIRGWEEGVAQVCSLICFVLLSSIYLLYFFIGGIFIRFKNKKSEKSHPHAIPSDQYPHKKLLLLMFLVLWFKHI

SEQ ID NO: 32218 - protein, 108 aa, Homo sapiens
  Payload ID: 6310
  Gene Symbol: FKBP1B
  Gene Name: FK506 binding protein 1B, 12.6 kDa
  Uniprot ID: P68106
  ENSP ID: ENSP00000370373
MGVEIETISPGDGRTFPKKGQTCVVHYTGMLQNGKKFDSSRDRNKPFKFRIGKQEVIKGFEEGAAQMSLGQRAKLTCTPDVAYGATGHPGVIPPNATLIFDVELLNLE

SEQ ID NO: 32219 - protein, 80 aa, Homo sapiens
  Payload ID: 6310
  Gene Symbol: FKBP1B
  Gene Name: FK506 binding protein 1B, 12.6 kDa
  Uniprot ID: P68106
  ENSP ID: ENSP00000370379
MGVEIETISPGDGRTFPKKGQTCVVHYTGMLQNGKKFDSSRDRNKPFKFRIGKQEVIKGFEEGAAQLGPLSPLPICPHPC

SEQ ID NO: 32220 - protein, 42 aa, Homo sapiens
  Payload ID: 6310
  Gene Symbol: FKBP1B
  Gene Name: FK506 binding protein 1B, 12.6 kDa
  ENSP ID: ENSP00000397444
  MOD_RES (1)..(1): Any amino acid
XPKKGQTCVVHYTASLVGMIKEAWKANSFPLLPARAIHGASF

SEQ ID NO: 32221 - protein, 79 aa, Homo sapiens
  Payload ID: 6310
  Gene Symbol: FKBP1B
  Gene Name: FK506 binding protein 1B, 12.6 kDa
  ENSP ID: ENSP00000406593
MLQNGKKFDSSRDRNKPFKFRIGKQEVIKGFEEGAAQMSLGQRAKLTCTPDVAYGATGHPGVIPPNATLIFDVELLNLE

SEQ ID NO: 32222 - protein, 57 aa, Homo sapiens
  Payload ID: 6310
  Gene Symbol: FKBP1B
  Gene Name: FK506 binding protein 1B, 12.6 kDa
  ENSP ID: ENSP00000416349
MGVEIETISPGDGRTFPKKGQTCVVHYTASLVGMIKEAWKANSFPLLPARAIHGASF

SEQ ID NO: 32223 - protein, 108 aa, Homo sapiens
  Payload ID: 6311
  Gene Symbol: FKBP1C
  Gene Name: FK506 binding protein 1C
  ENSP ID: ENSP00000359693
MGVHVETISPGDWRTFPKRSQTCVMHYTGMLEDGKKFDSSRDRNKPFKFMLGKQEVIRGWEEGVVQMSVGQRAKLTISPDYAYGATGHPGIIPPHATLVFDVELLKLE

SEQ ID NO: 32224 - protein, 142 aa, Homo sapiens
  Payload ID: 6312
  Gene Symbol: FKBP2
  Gene Name: FK506 binding protein 2, 13kDa
  Uniprot ID: P26885
  ENSP ID: ENSP00000310935
MRLSWFRVLTVLSICLSAVATATGAEGKRKLQIGVKKRVDHCPIKSRKGDVLHMHYTGKLEDGTEFDSSLPQNQPFVFSLGTGQVIKGWDQGLLGMCEGEKRKLVIPSELGYGERGAPPKIPGGATLVFEVELLKIERRTEL

SEQ ID NO: 32225 - protein, 142 aa, Homo sapiens; identical to SEQ ID NO: 32224
  Payload ID: 6312
  Gene Symbol: FKBP2
  Gene Name: FK506 binding protein 2, 13kDa
  Uniprot ID: P26885
  ENSP ID: ENSP00000378046

SEQ ID NO: 32226 - protein, 142 aa, Homo sapiens; identical to SEQ ID NO: 32224
  Payload ID: 6312
  Gene Symbol: FKBP2
  Gene Name: FK506 binding protein 2, 13kDa
  Uniprot ID: P26885
  ENSP ID: ENSP00000398147

SEQ ID NO: 32227 - protein, 102 aa, Homo sapiens
  Payload ID: 6312
  Gene Symbol: FKBP2
  Gene Name: FK506 binding protein 2, 13kDa
  ENSP ID: ENSP00000438749
MRLSWFRVLTVLSICLSAVATATGAEGKRKLQIGVKKRVDHCPIKSRKGDVLHMHYTGKLEDGTEFDSSLPQNQPFVFSLGTGQVIKGWDQGLLGMCEGEKR

SEQ ID NO: 32228 - protein, 224 aa, Homo sapiens
  Payload ID: 6313
  Gene Symbol: FKBP3
  Gene Name: FK506 binding protein 3, 25kDa
  Uniprot ID: Q00688
  ENSP ID: ENSP00000216330
MAAAVPQRAWTVEQLRSEQLPKKDIIKFLQEHGSDSFLAEHKLLGNIKNVAKTANKDHLVTAYNHLFETKRFKGTESISKVSEQVKNVKLNEDKPKETKSEETLDEGPPKYTKSVLKKGDKTNFPKKGDVVHCWYTGTLQDGTVFDTNIQTSAKKKKNAKPLSFKVGVGKVIRGWDEALLTMSKGEKARLEIEPEWAYGKKGQPDAKIPPNAKLTFEVELVDID

SEQ ID NO: 32229 - protein, 224 aa, Homo sapiens; identical to SEQ ID NO: 32228
  Payload ID: 6313
  Gene Symbol: FKBP3
  Gene Name: FK506 binding protein 3, 25kDa
  Uniprot ID: Q00688
  ENSP ID: ENSP00000379374

SEQ ID NO: 32230 - protein, 65 aa, Homo sapiens
  Payload ID: 6313
  Gene Symbol: FKBP3
  Gene Name: FK506 binding protein 3, 25kDa
  ENSP ID: ENSP00000452322
MAAAVPQRAWTVEQLRSEQLPKKDIIKFLQEHGSDSAGVQWRDLGSLQPPPPGFKRFSCLCLSSS

SEQ ID NO: 32231 - protein, 459 aa, Homo sapiens
  Payload ID: 6314
  Gene Symbol: FKBP4
  Gene Name: FK506 binding protein 4, 59kDa
  Uniprot ID: Q02790
  ENSP ID: ENSP00000001008
MTAEEMKATESGAQSAPLPMEGVDISPKQDEGVLKVIKREGTGTEMPMIGDRVFVHYTGWLLDGTKFDSSLDRKDKFSFDLGKGEVIKAWDIAIATMKVGEVCHITCKPEYAYGSAGSPPKIPPNATLVFEVELFEFKGEDLTEEEDGGIIRRIQTRGEGYAKPNEGAIVEVALEGYYKDKLFDQRELRFEIGEGENLDLPYGLERAIQRMEKGEHSIVYLKPSYAFGSVGKEKFQIPPNAELKYELHLKSFEKAKESWEMNSEEKLEQSTIVKERGTVYFKEGKYKQALLQYKKIVSWLEYESSFSNEEAQKAQALRLASHLNLAMCHLKLQAFSAAIESCNKALELDSNNEKGLFRRGEAHLAVNDFELARADFQKVLQLYPNNKAAKTQLAVCQQRIRRQLAREKKLYANMFERLAEEENKAKAEASSGDHPTDTEMKEEQKSNTAGSQSQVETEA

SEQ ID NO: 32232 - protein, 84 aa, Homo sapiens
  Payload ID: 6314
  Gene Symbol: FKBP4
  Gene Name: FK506 binding protein 4, 59kDa
  ENSP ID: ENSP00000438491
  MOD_RES (1)..(1): Any amino acid
XVNDFELARADFQKVLQLYPNNKAAKTQLAVCQQRIRRQLAREKKLYANMFERLAEEENKAPWLTPAIPALCRAKVGGSLEPSR

SEQ ID NO: 32233 - protein, 51 aa, Homo sapiens
  Payload ID: 6314
  Gene Symbol: FKBP4
  Gene Name: FK506 binding protein 4, 59kDa
  ENSP ID: ENSP00000439703
MTAEEMKATESGAQSAPLPMEGVDISPKQDEGVLKIIGDLKRLLQRLSCGM

SEQ ID NO: 32234 - protein, 23 aa, Homo sapiens
  Payload ID: 6314
  Gene Symbol: FKBP4
  Gene Name: FK506 binding protein 4, 59kDa
  ENSP ID: ENSP00000442193
  MOD_RES (1)..(1): Any amino acid
XKEEQKSNTAGSQSQIRKPRLRS

SEQ ID NO: 32235 - protein, 86 aa, Homo sapiens
  Payload ID: 6314
  Gene Symbol: FKBP4
  Gene Name: FK506 binding protein 4, 59kDa
  ENSP ID: ENSP00000446368
MPMIGDRVFVHYTGWLLDGTKFDSSLDRKDKFSFDLGKGEVIKAWDIAIATMKVGEVCHITCKPEYAYGSAGSPPKIPPNATLVFE

SEQ ID NO: 32236 - protein, 51 aa, Homo sapiens; identical to SEQ ID NO: 32233
  Payload ID: 6314
  Gene Symbol: FKBP4
  Gene Name: FK506 binding protein 4, 59kDa
  ENSP ID: ENSP00000486800

SEQ ID NO: 32237 - protein, 457 aa, Homo sapiens
  Payload ID: 6315
  Gene Symbol: FKBP5
  Gene Name: FK506 binding protein 5
  Uniprot ID: Q13451
  ENSP ID: ENSP00000349811
MTTDEGAKNNEESPTATVAEQGEDITSKKDRGVLKIVKRVGNGEETPMIGDKVYVHYKGKLSNGKKFDSSHDRNEPFVFSLGKGQVIKAWDIGVATMKKGEICHLLCKPEYAYGSAGSLPKIPSNATLFFEIELLDFKGEDLFEDGGIIRRTKRKGEGYSNPNEGATVEIHLEGRCGGRMFDCRDVAFTVGEGEDHDIPIGIDKALEKMQREEQCILYLGPRYGFGEAGKPKFGIEPNAELIYEVTLKSFEKAKESWEMDTKEKLEQAAIVKEKGTVYFKGGKYMQAVIQYGKIVSWLEMEYGLSEKESKASESFLLAAFLNLAMCYLKLREYTKAVECCDKALGLDSANEKGLYRRGEAQLLMNEFESAKGDFEKVLEVNPQNKAARLQISMCQKKAKEHNERDRRIYANMFKKFAEQDAKEEANKAMGKKTSEGVTNEKGTDSQAMEEEKPEGHV

SEQ ID NO: 32238 - protein, 457 aa, Homo sapiens; identical to SEQ ID NO: 32237
  Payload ID: 6315
  Gene Symbol: FKBP5
  Gene Name: FK506 binding protein 5
  Uniprot ID: Q13451
  ENSP ID: ENSP00000441205

SEQ ID NO: 32239 - protein, 268 aa, Homo sapiens
  Payload ID: 6315
  Gene Symbol: FKBP5
  Gene Name: FK506 binding protein 5
  Uniprot ID: Q13451
  ENSP ID: ENSP00000442340
MTTDEGAKNNEESPTATVAEQGEDITSKKDRGVLKIVKRVGNGEETPMIGDKVYVHYKGKLSNGKKFDSSHDRNEPFVFSLGKGQVIKAWDIGVATMKKGEICHLLCKPEYAYGSAGSLPKIPSNATLFFEIELLDFKGEDLFEDGGIIRRTKRKGEGYSNPNEGATVEIHLEGRCGGRMFDCRDVAFTVGEGEDHDIPIGIDKALEKMQREEQCILYLGPRPKNPGRWIPKKNWSRLPLSKRREPYTSRCVSPYAILSISKNLFKCW

SEQ ID NO: 32240 - protein, 457 aa, Homo sapiens; identical to SEQ ID NO: 32237
  Payload ID: 6315
  Gene Symbol: FKBP5
  Gene Name: FK506 binding protein 5
  Uniprot ID: Q13451
  ENSP ID: ENSP00000444810

SEQ ID NO: 32241 - protein, 327 aa, Homo sapiens
  Payload ID: 6316
  Gene Symbol: FKBP6
  Gene Name: FK506 binding protein 6, 36kDa
  Uniprot ID: O75344
  ENSP ID: ENSP00000252037
MGGSALNQGVLEGDDAPGQSLYERLSQRMLDISGDRGVLKDVIREGAGDLVAPDASVLVKYSGYLEHMDRPFDSNYFRKTPRLMKLGEDITLWGMELGLLSMRRGELARFLFKPNYAYGTLGCPPLIPPNTTVLFEIELLDFLDCAESDKFCALSAEQQDQFPLQKVLKVAATEREFGNYLFRQNRFYDAKVRYKRALLLLRRRSAPPEEQHLVEAAKLPVLLNLSFTYLKLDRPTIALCYGEQALIIDQKNAKALFRCGQACLLLTEYQKARDFLVRAQKEQPFNHDINNELKKLASCYRDYVDKEKEMWHRMFAPCGDGSTAGES

SEQ ID NO: 32242 - protein, 297 aa, Homo sapiens
  Payload ID: 6316
  Gene Symbol: FKBP6
  Gene Name: FK506 binding protein 6, 36kDa
  Uniprot ID: O75344
  ENSP ID: ENSP00000394952
MGGSALNQGVLEGDDAPGQSLYERLSQRMLDISGDRGVLKDVIREGAGDLVAPDASVLDITLWGMELGLLSMRRGELARFLFKPNYAYGTLGCPPLIPPNTTVLFEIELLDFLDCAESDKFCALSAEQQDQFPLQKVLKVAATEREFGNYLFRQNRFYDAKVRYKRALLLLRRRSAPPEEQHLVEAAKLPVLLNLSFTYLKLDRPTIALCYGEQALIIDQKNAKALFRCGQACLLLTEYQKARDFLVRAQKEQPFNHDINNELKKLASCYRDYVDKEKEMWHRMFAPCGDGSTAGES

SEQ ID NO: 32243 - protein, 252 aa, Homo sapiens
  Payload ID: 6316
  Gene Symbol: FKBP6
  Gene Name: FK506 binding protein 6, 36kDa
  ENSP ID: ENSP00000402360
MSASSWPQNGMPPSSLYERLSQRMLDISGDRGVLKDVIREGAGDLVAPDASVLVKYSGYLEHMDRPFDSNYFRKTPRLMKLGEDITLWGMELGLLSMRRGELARFLFKPNYAYGTLGCPPLIPPNTTVLFEIELLDFLDCAESDKFCALSAALLLLRRRSAPPEEQHLVEAAKLPVLLNLSFTYLKLDRPTIALCYGEQALIIDQKNAKALFRCGQACLLLTEYQKARDFLVRAQKEQPFNHDINNELKKLA

SEQ ID NO: 32244 - protein, 199 aa, Homo sapiens
  Payload ID: 6316
  Gene Symbol: FKBP6
  Gene Name: FK506 binding protein 6, 36kDa
  ENSP ID: ENSP00000403908
MGGSALNQGVLEGDDAPGQSLYERLSQRMLDISGDRGVLKDVIREGAGDLVAPDASVLVKYSGYLEHMDRPFDSNYFRKTPRLMKLGEDITLWGMELGLLSMRRGELARFLFKPNYAYGTLGCPPLIPPNTTVLFEIELLDFLDCAESDKFCALSAEQQDQFPLQKVLKVAATEREFGNYLFRQNRFYDAKAPCWVCCG

SEQ ID NO: 32245 - protein, 101 aa, Homo sapiens
  Payload ID: 6316
  Gene Symbol: FKBP6
  Gene Name: FK506 binding protein 6, 36kDa
  ENSP ID: ENSP00000415891
MGGSALNQGVLEGDDAPGQSLYERLSQRMLDISGDRGVLKDVIREGAGDLVAPDASVLVKYSGYLEHMDRPFDSNYFRKTPRLMKLGEGRFRVGAGEEGIV

SEQ ID NO: 32246 - protein, 322 aa, Homo sapiens
  Payload ID: 6316
  Gene Symbol: FKBP6
  Gene Name: FK506 binding protein 6, 36kDa
  Uniprot ID: O75344
  ENSP ID: ENSP00000416277
MSASSWPQNGMPPSSLYERLSQRMLDISGDRGVLKDVIREGAGDLVAPDASVLVKYSGYLEHMDRPFDSNYFRKTPRLMKLGEDITLWGMELGLLSMRRGELARFLFKPNYAYGTLGCPPLIPPNTTVLFEIELLDFLDCAESDKFCALSAEQQDQFPLQKVLKVAATEREFGNYLFRQNRFYDAKVRYKRALLLLRRRSAPPEEQHLVEAAKLPVLLNLSFTYLKLDRPTIALCYGEQALIIDQKNAKALFRCGQACLLLTEYQKARDFLVRAQKEQPFNHDINNELKKLASCYRDYVDKEKEMWHRMFAPCGDGSTAGES

SEQ ID NO: 32247 - protein, 127 aa, Homo sapiens
  Payload ID: 6317
  Gene Symbol: FKBP7
  Gene Name: FK506 binding protein 7
  ENSP ID: ENSP00000233092
MPKTMHFLFRFIVFFYLWGLFTAQRQKKEESTEEVKIEVLHRPENCSKTSKKGDLLNAHYDGYLAKDGSKFYCSRTQNEGHPKWFVLGVGQVIKGLDIAMTDMCPGEKRKVVIPPSFAYGKEGYGST

SEQ ID NO: 32248 - protein, 67 aa, Homo sapiens
  Payload ID: 6317
  Gene Symbol: FKBP7
  Gene Name: FK506 binding protein 7
  ENSP ID: ENSP00000389914
  MOD_RES (1)..(1): Any amino acid
XGYLAKDGSKFYCSRTQNEGHPKWFVLGVGQVIKGLDIAMTDMCPGEKRKVVIPPSFAYGKEGYGST

SEQ ID NO: 32249 - protein, 86 aa, Homo sapiens
  Payload ID: 6317
  Gene Symbol: FKBP7
  Gene Name: FK506 binding protein 7
  ENSP ID: ENSP00000398869
MPKTMHFLFRFIVFFYLWGLFTAQRQKKEESTEEVKIEVLHRPENCSKTSKKGDLLNAHYDGYLAKDGSKFYCSRRQDSTGCYIDF

SEQ ID NO: 32250 - protein, 74 aa, Homo sapiens
  Payload ID: 6317
  Gene Symbol: FKBP7
  Gene Name: FK506 binding protein 7
  ENSP ID: ENSP00000403801
MPKTMHFLFRFIVFFYLWGLFTAQRQKKEESTEEVKIEVLHRPENCSKTSKKGDLLNAHYDGYLAKDGSKFYCR

SEQ ID NO: 32251 - protein, 222 aa, Homo sapiens
  Payload ID: 6317
  Gene Symbol: FKBP7
  Gene Name: FK506 binding protein 7
  Uniprot ID: Q9Y680
  ENSP ID: ENSP00000413152
MPKTMHFLFRFIVFFYLWGLFTAQRQKKEESTEEVKIEVLHRPENCSKTSKKGDLLNAHYDGYLAKDGSKFYCSRTQNEGHPKWFVLGVGQVIKGLDIAMTDMCPGEKRKVVIPPSFAYGKEGYAEGKIPPDATLIFEIELYAVTKGPRSIETFKQIDMDNDRQLSKAEINLYLQREFEKDEKPRDKSYQDAVLEDIFKKNDHDGDGFISPKEYNVYQHDEL

SEQ ID NO: 32252 - protein, 221 aa, Homo sapiens
  Payload ID: 6317
  Gene Symbol: FKBP7
  Gene Name: FK506 binding protein 7
  Uniprot ID: Q9Y680
  ENSP ID: ENSP00000415486
MPKTMHFLFRFIVFFYLWGLFTAQRQKKEESTEEVKIEVLHRPENCSKTSKKGDLLNAHYDGYLAKDGSKFYCSRTQNEGHPKWFVLGVGQVIKGLDIAMTDMCPGEKRKVVIPPSFAYGKEGYEGKIPPDATLIFEIELYAVTKGPRSIETFKQIDMDNDRQLSKAEINLYLQREFEKDEKPRDKSYQDAVLEDIFKKNDHDGDGFISPKEYNVYQHDEL

SEQ ID NO: 32253 - protein, 412 aa, Homo sapiens
  Payload ID: 6318
  Gene Symbol: FKBP8
  Gene Name: FK506 binding protein 8, 38kDa
  Uniprot ID: Q14318
  ENSP ID: ENSP00000222308
MASCAEPSEPSAPLPAGVPPLEDFEVLDGVEDAEGEEEEEEEEEEEDDLSELPPLEDMGQPPAEEAEQPGALAREFLAAMEPEPAPAPAPEEWLDILGNGLLRKKTLVPGPPGSSRPVKGQVVTVHLQTSLENGTRVQEEPELVFTLGDCDVIQALDLSVPLMDVGETAMVTADSKYCYGPQGRSPYIPPHAALCLEVTLKTAVDGPDLEMLTGQERVALANRKRECGNAHYQRADFVLAANSYDLAIKAITSSAKVDMTFEEEAQLLQLKVKCLNNLAASQLKLDHYRAALRSCSLVLEHQPDNIKALFRKGKVLAQQGEYSEAIPILRAALKLEPSNKTIHAELSKLVKKHAAQRSTETALYRKMLGNPSRLPAKCPGKGAWSIPWKWLFGATAVALGGVALSVVIAARN

SEQ ID NO: 32254 - protein, 249 aa, Homo sapiens
  Payload ID: 6318
  Gene Symbol: FKBP8
  Gene Name: FK506 binding protein 8, 38kDa
  ENSP ID: ENSP00000441267
MASCAEPSEPSAPLPAGVPPLEDFEVLDGVEDAEGEEEEEEEEEEEDDLSELPPLEDMGQPPAEEAEQPGALAREFLAAMEPEPAPAPAPEEWLDILVDMTFEEEAQLLQLKVKCLNNLAASQLKLDHYRAALRSCSLVLEHQPDNIKALFRKGKVLAQQGEYSEAIPILRAALKLEPSNKTIHAELSKLVKKHAAQRSTETALYRKMLGNPSRLPAKCPGKGAWSIPWKWLFGATAVALGGVALSVVI

SEQ ID NO: 32255 - protein, 413 aa, Homo sapiens
  Payload ID: 6318
  Gene Symbol: FKBP8
  Gene Name: FK506 binding protein 8, 38kDa
  Uniprot ID: Q14318
  ENSP ID: ENSP00000471700
MASCAEPSEPSAPLPAGVPPLEDFEVLDGVEDAEGEEEEEEEEEEEDDLSELPPLEDMGQPPAEEAEQPGALAREFLAAMEPEPAPAPAPEEWLDILGNGLLRKKTLVPGPPGSSRPVKGQVVTVHLQTSLENGTRVQEEPELVFTLGDCDVIQALDLSVPLMDVGETAMVTADSKYCYGPQGSRSPYIPPHAALCLEVTLKTAVDGPDLEMLTGQERVALANRKRECGNAHYQRADFVLAANSYDLAIKAITSSAKVDMTFEEEAQLLQLKVKCLNNLAASQLKLDHYRAALRSCSLVLEHQPDNIKALFRKGKVLAQQGEYSEAIPILRAALKLEPSNKTIHAELSKLVKKHAAQRSTETALYRKMLGNPSRLPAKCPGKGAWSIPWKWLFGATAVALGGVALSVVIAARN

SEQ ID NO: 32256 - protein, 163 aa, Homo sapiens
  Payload ID: 6318
  Gene Symbol: FKBP8
  Gene Name: FK506 binding protein 8, 38kDa
  ENSP ID: ENSP00000472043
MASCAEPSEPSAPLPAGVPPLEDFEVLDGVEDAEGEEEEEEEEEEEDDLSELPPLEDMGQPPAEEAEQPGALAREFLAAMEPEPAPAPAPEEWLDILGNGLLRKKTLVPGPPGSSRPVKGQVVTVHLQTSLENGTRVQEEPELVFTLGDCDVIQALDLSVPLM

SEQ ID NO: 32257 - protein, 167 aa, Homo sapiens
  Payload ID: 6318
  Gene Symbol: FKBP8
  Gene Name: FK506 binding protein 8, 38kDa
  ENSP ID: ENSP00000472087
MASCAEPSEPSAPLPAGVPPLEDFEVLDGVEDAEGEEEEEEEEEEEDDLSELPPLEDMGQPPAEEAEQPGALAREFLAAMEPEPAPAPAPEEWLDILGNGLLRKKTLVPGPPGSSRPVKGQVVTVHLQTSLENGTRVQEEPELVFTLGDCDVIQALDLSVPLMDVGE

SEQ ID NO: 32258 - protein, 412 aa, Homo sapiens; identical to SEQ ID NO: 32253
  Payload ID: 6318
  Gene Symbol: FKBP8
  Gene Name: FK506 binding protein 8, 38kDa
  Uniprot ID: Q14318
  ENSP ID: ENSP00000472302

SEQ ID NO: 32259 - protein, 257 aa, Homo sapiens
  Payload ID: 6318
  Gene Symbol: FKBP8
  Gene Name: FK506 binding protein 8, 38kDa
  ENSP ID: ENSP00000472643
MASCAEPSEPSAPLPAGVPPLEDFEVLDGVEDAEGEEEEEEEEEEEDDLSELPPLEDMGQPPAEEAEQPGALAREFLAAMEPEPAPAPAPEEWLDILGNGLLRKKTLVPGPPGSSRPVKGQVVTVHLQTSLENGTRVQEEPELVFTLGDCDVIQALDLSVPLMDVGETAMVTADSKYCYGPQGSRSPYIPPHAALCLEVTLKTAVDGPDLEMLTGQERVALANRKRECGNAHYQRADFVLAANSYDLAIKAITSSAK

SEQ ID NO: 32260 - protein, 204 aa, Homo sapiens
  Payload ID: 6318
  Gene Symbol: FKBP8
  Gene Name: FK506 binding protein 8, 38kDa
  ENSP ID: ENSP00000472731
MASCAEPSEPSAPLPAGVPPLEDFEVLDGVEDAEGEEEEEEEEEEEDDLSELPPLEDMGQPPAEEAEQPGALAREFLAAMEPEPAPAPAPEEWLDILGNGLLRKKTLVPGPPGSSRPVKGQVVTVHLQTSLENGTRVQEEPELVFTLGDCDVIQALDLSVPLMDVGETAMVTADSKYCYGPQGSRSPYIPPHAALCLEVTLKTA

SEQ ID NO: 32261 - protein, 116 aa, Homo sapiens
  Payload ID: 6318
  Gene Symbol: FKBP8
  Gene Name: FK506 binding protein 8, 38kDa
  ENSP ID: ENSP00000472921
MASCAEPSEPSAPLPAGVPPLEDFEVLDGVEDAEGEEEEEEEEEEEDDLSELPPLEDMGQPPAEEAEQPGALAREFLAAMEPEPAPAPAPEEWLDILGPGSQCPTHGRGGDGHGHC

SEQ ID NO: 32262 - protein, 182 aa, Homo sapiens
  Payload ID: 6318
  Gene Symbol: FKBP8
  Gene Name: FK506 binding protein 8, 38kDa
  ENSP ID: ENSP00000475588
  MOD_RES (1)..(1): Any amino acid
XGPDLEMLTGQERVALANRKRECGNAHYQRADFVLAANSYDLAIKAITSSAKVDMTFEEEAQLLQLKVKCLNNLAASQLKLDHYRAALRSCSLVLEHQPDNIKALFRKGKTIHAELSKLVKKHAAQRSTETALYRKMLGNPSRLPAKCPGKGAWSIPWKWLFGATAVALGGVALSVVIAARN

SEQ ID NO: 32263 - protein, 103 aa, Homo sapiens
  Payload ID: 6318
  Gene Symbol: FKBP8
  Gene Name: FK506 binding protein 8, 38kDa
  ENSP ID: ENSP00000475895
  MOD_RES (1)..(1): Any amino acid
XSQLKLDHYRAALRSCSLVLEHQPDNIKALFRKGKVLAQQGEYSEAIPILRAALKLEPSNKLPLPSADDPRRALKAGEEACGAAEHGDRLVPENAGQPQPAAC

SEQ ID NO: 32264 - protein, 413 aa, Homo sapiens; identical to SEQ ID NO: 32255
  Payload ID: 6318
  Gene Symbol: FKBP8
  Gene Name: FK506 binding protein 8, 38kDa
  Uniprot ID: Q14318
  ENSP ID: ENSP00000476767

SEQ ID NO: 32265 - protein, 23 aa, Homo sapiens
  Payload ID: 6318
  Gene Symbol: FKBP8
  Gene Name: FK506 binding protein 8, 38kDa
  ENSP ID: ENSP00000477278
MASCAEPSEPSAPLPAGVPPLED

SEQ ID NO: 32266 - protein, 570 aa, Homo sapiens
  Payload ID: 6319
  Gene Symbol: FKBP9
  Gene Name: FK506 binding protein 9, 63 kDa
  Uniprot ID: O95302
  ENSP ID: ENSP00000242209
MAFRGWRPPPPPLLLLLLWVTGQAAPVAGLGSDAELQIERRFVPDECPRTVRSGDFVRYHYVGTFPDGQKFDSSYDRDSTFNVFVGKGQLITGMDQALVGMCVNERRFVKIPPKLAYGNEGVSGVIPPNSVLHFDVLLMDIWNSEDQVQIHTYFKPPSCPRTIQVSDFVRYHYNGTFLDGTLFDSSHNRMKTYDTYVGIGWLIPGMDKGLLGMCVGEKRIITIPPFLAYGEDGDGKDIPGQASLVFDVALLDLHNPKDSISIENKVVPENCERISQSGDFLRYHYNGTLLDGTLFDSSYSRNRTFDTYIGQGYVIPGMDEGLLGVCIGEKRRIVVPPHLGYGEEGRGNIPGSAVLVFDIHVIDFHNPSDSISITSHYKPPDCSVLSKKGDYLKYHYNASLLDGTLLDSTWNLGKTYNIVLGSGQVVLGMDMGLREMCVGEKRTVIIPPHLGYGEAGVDGEVPGSAVLVFDIELLELVAGLPEGYMFIWNGEVSPNLFEEIDKDGNGEVLLEEFSEYIHAQVASGKGKLAPGFDAELIVKNMFTNQDRNGDGKVTAEEFKLKDQEAKHDEL

SEQ ID NO: 32267 - protein, 225 aa, Homo sapiens
  Payload ID: 6319
  Gene Symbol: FKBP9
  Gene Name: FK506 binding protein 9, 63 kDa
  ENSP ID: ENSP00000391034
MAGKDIPGQASLVFDVALLDLHNPKDSISIENKVVPENCERISQSGDFLRYHYNGTLLDGTLFDSSYSRNRTFDTYIGQGYVIPGMDEGLLGVCIGEKRRIVVPPHLGYGEEGRGNIPGSAVLVFDIHVIDFHNPSDSISITSHYKPPDCSVLSKKGDYLKYHYNASLLDGTLLDSTWNLGKTYNIVLGSGQVVLGMDMGLREMCVGEKRTVIIPPHLGYGEAGV

SEQ ID NO: 32268 - protein, 623 aa, Homo sapiens
  Payload ID: 6319
  Gene Symbol: FKBP9
  Gene Name: FK506 binding protein 9, 63 kDa
  Uniprot ID: O95302
  ENSP ID: ENSP00000439250
MAFRGWRPPPPPLLLLLLWVTGQAAPVAGLGSDAELQIERRFVPDECPRTVRSGDFVRYHYVGTFPDGQKFDSRYWDTAEDKADKSPCPQVRVGVNTSPSCRLKQKGVGIYWKDLQFLVRVQNHGLSYDRDSTFNVFVGKGQLITGMDQALVGMCVNERRFVKIPPKLAYGNEGVSGVIPPNSVLHFDVLLMDIWNSEDQVQIHTYFKPPSCPRTIQVSDFVRYHYNGTFLDGTLFDSSHNRMKTYDTYVGIGWLIPGMDKGLLGMCVGEKRIITIPPFLAYGEDGDGKDIPGQASLVFDVALLDLHNPKDSISIENKVVPENCERISQSGDFLRYHYNGTLLDGTLFDSSYSRNRTFDTYIGQGYVIPGMDEGLLGVCIGEKRRIVVPPHLGYGEEGRGNIPGSAVLVFDIHVIDFHNPSDSISITSHYKPPDCSVLSKKGDYLKYHYNASLLDGTLLDSTWNLGKTYNIVLGSGQVVLGMDMGLREMCVGEKRTVIIPPHLGYGEAGVDGEVPGSAVLVFDIELLELVAGLPEGYMFIWNGEVSPNLFEEIDKDGNGEVLLEEFSEYIHAQVASGKGKLAPGFDAELIVKNMFTNQDRNGDGKVTAEEFKLKDQEAKHDEL

SEQ ID NO: 32269 - protein, 338 aa, Homo sapiens
  Payload ID: 6319
  Gene Symbol: FKBP9
  Gene Name: FK506 binding protein 9, 63 kDa
  Uniprot ID: O95302
  ENSP ID: ENSP00000441317
MAGKDIPGQASLVFDVALLDLHNPKDSISIENKVVPENCERISQSGDFLRYHYNGTLLDGTLFDSSYSRNRTFDTYIGQGYVIPGMDEGLLGVCIGEKRRIVVPPHLGYGEEGRGNIPGSAVLVFDIHVIDFHNPSDSISITSHYKPPDCSVLSKKGDYLKYHYNASLLDGTLLDSTWNLGKTYNIVLGSGQVVLGMDMGLREMCVGEKRTVIIPPHLGYGEAGVDGEVPGSAVLVFDIELLELVAGLPEGYMFIWNGEVSPNLFEEIDKDGNGEVLLEEFSEYIHAQVASGKGKLAPGFDAELIVKNMFTNQDRNGDGKVTAEEFKLKDQEAKHDEL

SEQ ID NO: 32270 - protein, 349 aa, Homo sapiens
  Payload ID: 6320
  Gene Symbol: FKBPL
  Gene Name: FK506 binding protein like
  Uniprot ID: Q9UIM3
  ENSP ID: ENSP00000364298
METPPVNTIGEKDTSQPQQEWEKNLRENLDSVIQIRQQPRDPPTETLELEVSPDPASQILEHTQGAEKLVAELEGDSHKSHGSTSQMPEALQASDLWYCPDGSFVKKIVIRGHGLDKPKLGSCCRVLALGFPFGSGPPEGWTELTMGVGPWREETWGELIEKCLESMCQGEEAELQLPGHSGPPVRLTLASFTQGRDSWELETSEKEALAREERARGTELFRAGNPEGAARCYGRALRLLLTLPPPGPPERTVLHANLAACQLLLGQPQLAAQSCDRVLEREPGHLKALYRRGVAQAALGNLEKATADLKKVLAIDPKNRAAQEELGKVVIQGKNQDAGLAQGLRKMFG

SEQ ID NO: 32271 - protein, 349 aa, Homo sapiens; identical to SEQ ID NO: 32270
  Payload ID: 6320
  Gene Symbol: FKBPL
  Gene Name: FK506 binding protein like
  Uniprot ID: Q9UIM3
  ENSP ID: ENSP00000397530

SEQ ID NO: 32272 - protein, 349 aa, Homo sapiens; identical to SEQ ID NO: 32270
  Payload ID: 6320
  Gene Symbol: FKBPL
  Gene Name: FK506 binding protein like
  Uniprot ID: Q9UIM3
  ENSP ID: ENSP00000398812

SEQ ID NO: 32273 - protein, 349 aa, Homo sapiens
  Payload ID: 6320
  Gene Symbol: FKBPL
  Gene Name: FK506 binding protein like
  Uniprot ID: Q9UIM3
  ENSP ID: ENSP00000412439
METPPVNTIGEKDTSQPQQEWEKNLRENLDSVIQIRQQPRDPPTETLELEVSPDPASQILEHTQGAEKLVAELEGDSHKSHGSTSQMPETLQASDLWYCPDGSFVKKIVIRGHGLDKPKLGSCCRVLALGFPFGSGPPEGWTELTMGVGPWREETWGELIEKCLESMCQGEEAELQLPGHSGPPVRLTLASFTQGRDSWELETSEKEALAREERARGTELFRAGNPEGAARCYGRALRLLLTLPPPGPPERTVLHANLAACQLLLGQPQLAAQSCDRVLEREPGHLKALYRRGVAQAALGNLEKATADLKKVLAIDPKNRAAQEELGKVVIQGKNQDAGLAQGLRKMFG

SEQ ID NO: 32274 - protein, 380 aa, Homo sapiens
  Payload ID: 6321
  Gene Symbol: FEN1
  Gene Name: flap structure-specific endonuclease 1
  Uniprot ID: P39748
  ENSP ID: ENSP00000305480
MGIQGLAKLIADVAPSAIRENDIKSYFGRKVAIDASMSIYQFLIAVRQGGDVLQNEEGETTSHLMGMFYRTIRMMENGIKPVYVFDGKPPQLKSGELAKRSERRAEAEKQLQQAQAAGAEQEVEKFTKRLVKVTKQHNDECKHLLSLMGIPYLDAPSEAEASCAALVKAGKVYAAATEDMDCLTFGSPVLMRHLTASEAKKLPIQEFHLSRILQELGLNQEQFVDLCILLGSDYCESIRGIGPKRAVDLIQKHKSIEEIVRRLDPNKYPVPENWLHKEAHQLFLEPEVLDPESVELKWSEPNEEELIKFMCGEKQFSEERIRSGVKRLSKSRQGSTQGRLDDFFKVTGSLSSAKRKEPEPKGSTKKKAKTGAAGKFKRGK

SEQ ID NO: 32275 - protein, 165 aa, Homo sapiens
  Payload ID: 6321
  Gene Symbol: FEN1
  Gene Name: flap structure-specific endonuclease 1
  ENSP ID: ENSP00000445692
MGIQGLAKLIADVAPSAIRENDIKSYFGRKVAIDASMSIYQFLIAVRQGGDVLQNEEGETTSHLMGMFYRTIRMMENGIKPVYVFDGKPPQLKSGELAKRSERRAEAEKQLQQAQAAGAEQEVEKFTKRLVKVTKQHNDECKHLLSLMGIPYLDAPSEAEASCAA

SEQ ID NO: 32276 - protein, 154 aa, Homo sapiens
  Payload ID: 6321
  Gene Symbol: FEN1
  Gene Name: flap structure-specific endonuclease 1
  ENSP ID: ENSP00000460402
  MOD_RES (1)..(1): Any amino acid
XLTASEAKKLPIQEFHLSRILQELGLNQEQFVDLCILLGSDYCESIRGIGPKRAVDLIQKHKSIEEIVRRLDPNKYPVPENWLHKEAHQLFLEPEVLDPESVELKWSEPNEEELIKFMCGEKQFSEERIRSGVKRLSKSRQGSTQGRLDDFFKP

SEQ ID NO: 32277 - protein, 587 aa, Homo sapiens
  Payload ID: 6322
  Gene Symbol: FLAD1
  Gene Name: flavin adenine dinucleotide synthetase 1
  Uniprot ID: Q8NFF5
  ENSP ID: ENSP00000292180
MGWDLGTRLFQRQEQRSRLSRIWLEKTRVFLEGSTRTPALPHCLFWLLQVPSTQDPLFPGYGPQCPVDLAGPPCLRPLFGGLGGYWRALQRGREGRTMTSRASELSPGRSVTAGIIIVGDEILKGHTQDTNTFFLCRTLRSLGVQVCRVSVVPDEVATIAAEVTSFSNRFTHVLTAGGIGPTHDDVTFEAVAQAFGDELKPHPKLEAATKALGGEGWEKLSLVPSSARLHYGTDPCTGQPFRFPLVSVRNVYLFPGIPELLRRVLEGMKGLFQNPAVQFHSKELYVAADEASIAPILAEAQAHFGRRLGLGSYPDWGSNYYQVKLTLDSEEEGPLEECLAYLTARLPQGSLVPYMPNAVEQASEAVYKLAESGSSLGKKVAGALQTIETSLAQYSLTQLCVGFNGGKDCTALLHLFHAAVQRKLPDVPNPLQILYIRSISPFPELEQFLQDTIKRYNLQMLEAEGSMKQALGELQARHPQLEAVLMGTRRTDPYSCSLCPFSPTDPGWPAFMRINPLLDWTYRDIWDFLRQLFVPYCILYDRGYTSLGSRENTVRNPALKCLSPGGHPTYRPAYLLENEEEERNSRT

SEQ ID NO: 32278 - protein, 170 aa, Homo sapiens
  Payload ID: 6322
  Gene Symbol: FLAD1
  Gene Name: flavin adenine dinucleotide synthetase 1
  ENSP ID: ENSP00000295530
MKGLFQNPAVQFHSKELYVAADEASIAPILAEAQAHFGRRLGLGSYPDWGSNYYQVKLTLDSEEEGPLEECLAYLTARLPQGSLVPYMPNAVEQASEAVYKLAESGNYLMFQTPSRSCISAASPLSLSWNSFYRTLSREQAIPENQIASPPSEAKGAEEPWMGPFPGQQG

SEQ ID NO: 32279 - protein, 490 aa, Homo sapiens
  Payload ID: 6322
  Gene Symbol: FLAD1
  Gene Name: flavin adenine dinucleotide synthetase 1
  Uniprot ID: Q8NFF5
  ENSP ID: ENSP00000317296
MTSRASELSPGRSVTAGIIIVGDEILKGHTQDTNTFFLCRTLRSLGVQVCRVSVVPDEVATIAAEVTSFSNRFTHVLTAGGIGPTHDDVTFEAVAQAFGDELKPHPKLEAATKALGGEGWEKLSLVPSSARLHYGTDPCTGQPFRFPLVSVRNVYLFPGIPELLRRVLEGMKGLFQNPAVQFHSKELYVAADEASIAPILAEAQAHFGRRLGLGSYPDWGSNYYQVKLTLDSEEEGPLEECLAYLTARLPQGSLVPYMPNAVEQASEAVYKLAESGSSLGKKVAGALQTIETSLAQYSLTQLCVGFNGGKDCTALLHLFHAAVQRKLPDVPNPLQILYIRSISPFPELEQFLQDTIKRYNLQMLEAEGSMKQALGELQARHPQLEAVLMGTRRTDPYSCSLCPFSPTDPGWPAFMRINPLLDWTYRDIWDFLRQLFVPYCILYDRGYTSLGSRENTVRNPALKCLSPGGHPTYRPAYLLENEEEERNSRT

SEQ ID NO: 32280 - protein, 128 aa, Homo sapiens
  Payload ID: 6322
  Gene Symbol: FLAD1
  Gene Name: flavin adenine dinucleotide synthetase 1
  ENSP ID: ENSP00000357413
MLEAEGSMKQALGELQARHPQLEAVLMGTRRTDPYSCSLCPFSPTDPGWPAFMRINPLLDWTYRDIWDFLRQLFVPYCILYDRGYTSLGSRENTVRNPALKCLSPGGHPTYRPAYLLENEEEERNSRT

SEQ ID NO: 32281 - protein, 294 aa, Homo sapiens
  Payload ID: 6322
  Gene Symbol: FLAD1
  Gene Name: flavin adenine dinucleotide synthetase 1
  Uniprot ID: Q8NFF5
  ENSP ID: ENSP00000357416
MQPSSSTPPLHPYSTDGLIFPFNPQGHTQDTNTFFLCRTLRSLGVQVCRVSVVPDEVATIAAEVTSFSNRFTHVLTAGGIGPTHDDVTFEAVAQAFGDELKPHPKLEAATKALGGEGWEKLSLVPSSARLHYGTDPCTGQPFRFPLVSVRNVYLFPGIPELLRRVLEGMKGLFQNPAVQFHSKELYVAADEASIAPILAEAQAHFGRRLGLGSYPDWGSNYYQVKLTLDSEEEGPLEECLAYLTARLPQGSLVPYMPNAVEQASEAVYKLAESGRDLMEEGHYAQSHWWHPRSQ

SEQ ID NO: 32282 - protein, 446 aa, Homo sapiens
  Payload ID: 6322
  Gene Symbol: FLAD1
  Gene Name: flavin adenine dinucleotide synthetase 1
  Uniprot ID: Q8NFF5
  ENSP ID: ENSP00000357417
MTSRASELSPGRSVTAGIIIVGDEILKGHTQDTNTFFLCRTLRSLGVQVCRVSVVPDEVATIAAEVTSFSNRFTHVLTAGGIGPTHDDVTFEAVAQAFGDELKPHPKLEAATKALGGEGWEKLSLVPSSARLHYGTDPCTGQPFRFPLVSVRNVYLFPGIPELLRRVLEGMKGLFQNPAVQFHSKELYVAADEASIAPILAEAQAHFGRRLGLGSYPDWGSNYYQVKLTLDSEEEGPLEECLAYLTARLPQGSLVPYMPNAVEQASEAVYKLAESGSSLGKKVAGALQTIETSLAQYSLTQLCVGFNGGKDCTALLHLFHAAVQRKLPDVPNPLQILYIRSISPFPELEQFLQDTIKRYNLQMLEAEGSMKQALGELQARHPQLEAVLMGTRRTDPYSCSLCPFSPTDPGWPAFMRINPLLDWTYRDIWDFLRQLFVPYCILYDRG

SEQ ID NO: 32283 - protein, 456 aa, Homo sapiens
  Payload ID: 6322
  Gene Symbol: FLAD1
  Gene Name: flavin adenine dinucleotide synthetase 1
  ENSP ID: ENSP00000357418
MGWDLGTRLFQRQEQRSRLSRIWLEKTRVFLEGSTRTPALPHCLFWLLQVPSTQDPLFPGYGPQCPVDLAGPPCLRPLFGGLGGYWRALQRGREGRTMTSRASELSPGRSVTAGIIIVGDEILKGHTQDTNTFFLCRTLRSLGVQVCRVSVVPDEVATIAAEVTSFSNRFTHVLTAGGIGPTHDDVTFEAVAQAFGDELKPHPKLEAATKALGGEGWEKLSLVPSSARLHYGTDPCTGQPFRFPLVSVRNVYLFPGIPELLRRVLEGMKGLFQNPAVQFHSKELYVAADEASIAPILAEAQAHFGRRLGLGSYPDWGSNYYQVKLTLDSEEEGPLEECLAYLTARLPQGSLVPYMPNAVEQASEAVYKLAESGSSLGKKVAGALQTIETSLAQYSLTQLCVGFNGGKDCTALLHLFHAAVQRKLPDVPNPLQILYIRSISPFPELEQFLQDTIKRY

SEQ ID NO: 32284 - protein, 532 aa, Homo sapiens
  Payload ID: 6323
  Gene Symbol: FMO1
  Gene Name: flavin containing monooxygenase 1
  Uniprot ID: Q01740
  ENSP ID: ENSP00000346901
MAKRVAIVGAGVSGLASIKCCLEEGLEPTCFERSDDLGGLWRFTEHVEEGRASLYKSVVSNSCKEMSCYSDFPFPEDYPNYVPNSQFLEYLKMYANHFDLLKHIQFKTKVCSVTKCSDSAVSGQWEVVTMHEEKQESAIFDAVMVCTGFLTNPYLPLDSFPGINAFKGQYFHSRQYKHPDIFKDKRVLVIGMGNSGTDIAVEASHLAEKVFLSTTGGGWVISRIFDSGYPWDMVFMTRFQNMLRNSLPTPIVTWLMERKINNWLNHANYGLIPEDRTQLKEFVLNDELPGRIITGKVFIRPSIKEVKENSVIFNNTSKEEPIDIIVFATGYTFAFPFLDESVVKVEDGQASLYKYIFPAHLQKPTLAIIGLIKPLGSMIPTGETQARWAVRVLKGVNKLPPPSVMIEEINARKENKPSWFGLCYCKALQSDYITYIDELLTYINAKPNLFSMLLTDPHLALTVFFGPCSPYQFRLTGPGKWEGARNAIMTQWDRTFKVIKARVVQESPSPFESFLKVFSFLALLVAIFLIFL

SEQ ID NO: 32285 - protein, 532 aa, Homo sapiens; identical to SEQ ID NO: 32284
  Payload ID: 6323
  Gene Symbol: FMO1
  Gene Name: flavin containing monooxygenase 1
  Uniprot ID: Q01740
  ENSP ID: ENSP00000356724

SEQ ID NO: 32286 - protein, 469 aa, Homo sapiens
  Payload ID: 6323
  Gene Symbol: FMO1
  Gene Name: flavin containing monooxygenase 1
  Uniprot ID: Q01740
  ENSP ID: ENSP00000385543
MAKRVAIVGAGVSGLASIKCCLEEGLEPTCFERSDDLGGLWRFTTKVCSVTKCSDSAVSGQWEVVTMHEEKQESAIFDAVMVCTGFLTNPYLPLDSFPGINAFKGQYFHSRQYKHPDIFKDKRVLVIGMGNSGTDIAVEASHLAEKVFLSTTGGGWVISRIFDSGYPWDMVFMTRFQNMLRNSLPTPIVTWLMERKINNWLNHANYGLIPEDRTQLKEFVLNDELPGRIITGKVFIRPSIKEVKENSVIFNNTSKEEPIDIIVFATGYTFAFPFLDESVVKVEDGQASLYKYIFPAHLQKPTLAIIGLIKPLGSMIPTGETQARWAVRVLKGVNKLPPPSVMIEEINARKENKPSWFGLCYCKALQSDYITYIDELLTYINAKPNLFSMLLTDPHLALTVFFGPCSPYQFRLTGPGKWEGARNAIMTQWDRTFKVIKARVVQESPSPFESFLKVFSFLALLVAIFLIFL

SEQ ID NO: 32287 - protein, 208 aa, Homo sapiens
  Payload ID: 6323
  Gene Symbol: FMO1
  Gene Name: flavin containing monooxygenase 1
  ENSP ID: ENSP00000406982
MAKRVAIVGAGVSGLASIKCCLEEGLEPTCFERSDDLGGLWRFTEHVEEGRASLYKSVVSNSCKEMSCYSDFPFPEDYPNYVPNSQFLEYLKMYANHFDLLKHIQFKTKVCSVTKCSDSAVSGQWEVVTMHEEKQESAIFDAVMVCTGFLTNPYLPLDSFPGINAFKGQYFHSRQYKHPDIFKDKRVLVIGMGNSGTDIAVEASHLAE

SEQ ID NO: 32288 - protein, 532 aa, Homo sapiens; identical to SEQ ID NO: 32284
  Payload ID: 6323
  Gene Symbol: FMO1
  Gene Name: flavin containing monooxygenase 1
  Uniprot ID: Q01740
  ENSP ID: ENSP00000481732

SEQ ID NO: 32289 - protein, 535 aa, Homo sapiens [sequence omitted]

SEQ ID NO: 32290 - protein, 153 aa, Homo sapiens
  Payload ID: 6324
  Gene Symbol: FMO2
  Gene Name: flavin containing monooxygenase 2 (non-functional)
  ENSP ID: ENSP00000487002
TQPREKTILSKRRCQKAKTKENVEDGRASIYQSVVTNTSKEMSCFSDFPMPEDFPNFLHNSKLLEYFRIFAKKFDLLKYIQFQTTVLSVRKCPDFSSSGQWKVVTQSNGKEQSAVFDAVMVCSGHHILPHIPLKSFPGFYQHQAWHLGHEPYL

SEQ ID NO: 32291 - protein, 131 aa, Homo sapiens
  Payload ID: 6324
  Gene Symbol: FMO2
  Gene Name: flavin containing monooxygenase 2 (non-functional)
  ENSP ID: ENSP00000487216
MAKKVAVIGAGVSGLISLKCCVDEGLEPTCFERTEDIGGVWRFKENVEDGRASIYQSVVTNTSKEMSCFSDFPMPEDFPNFLHNSKLLEYFRIFAKKFDLLKYIQFQTTVLSVRKCPDFSSSGQWKVVTQS

SEQ ID NO: 32292 - protein, 532 aa, Homo sapiens
  Payload ID: 6325
  Gene Symbol: FMO3
  Gene Name: flavin containing monooxygenase 3
  Uniprot ID: P31513
  ENSP ID: ENSP00000356729
MGKKVAIIGAGVSGLASIRSCLEEGLEPTCFEKSNDIGGLWKFSDHAEEGRASIYKSVFSNSSKEMMCFPDFPFPDDFPNFMHNSKIQEYIIAFAKEKNLLKYIQFKTFVSSVNKHPDFATTGQWDVTTERDGKKESAVFDAVMVCSGHHVYPNLPKESFPGLNHFKGKCFHSRDYKEPGVFNGKRVLVVGLGNSGCDIATELSRTAEQVMISSRSGSWVMSRVWDNGYPWDMLLVTRFGTFLKNNLPTAISDWLYVKQMNARFKHENYGLMPLNGVLRKEPVFNDELPASILCGIVSVKPNVKEFTETSAIFEDGTIFEGIDCVIFATGYSFAYPFLDESIIKSRNNEIILFKGVFPPLLEKSTIAVIGFVQSLGAAIPTVDLQSRWAAQVIKGTCTLPSMEDMMNDINEKMEKKRKWFGKSETIQTDYIVYMDELSSFIGAKPNIPWLFLTDPKLAMEVYFGPCSPYQFRLVGPGQWPGARNAILTQWDRSLKPMQTRVVGRLQKPCFFFHWLKLFAIPILLIAVFLVLT

SEQ ID NO: 32293 - protein, 48 aa, Homo sapiens
  Payload ID: 6325
  Gene Symbol: FMO3
  Gene Name: flavin containing monooxygenase 3
  ENSP ID: ENSP00000476963
MGKKVAIIGAGVSGLASIRSCLEEGLEPTCFEKSNDIGGLWKFSRSHE

SEQ ID NO: 32294 - protein, 218 aa, Homo sapiens
  Payload ID: 6325
  Gene Symbol: FMO3
  Gene Name: flavin containing monooxygenase 3
  ENSP ID: ENSP00000477451
MGKKVAIIGAGVSGLASIRSCLEEGLEPTCFEKSNDIGGLWKFSDHAEEGRASIYKSVFSNSSKEMMCFPDFPFPDDFPNFMHNSKIQEYIIAFAKEKNLLKYIQFKTFVSSVNKHPDFATTGQWDVTTERDGKKESAVFDAVMVCSGHHVYPNLPDYKEPGVFNGKRVLVVGLGNSGCDIATELSRTAEQVMISSRSGSWVMSRVWDNGYPWDMLLV

SEQ ID NO: 32295 - protein, 558 aa, Homo sapiens
  Payload ID: 6326
  Gene Symbol: FMO4
  Gene Name: flavin containing monooxygenase 4
  Uniprot ID: P31512
  ENSP ID: ENSP00000356723
MAKKVAVIGAGVSGLSSIKCCVDEDLEPTCFERSDDIGGLWKFTESSKDGMTRVYKSLVTNVCKEMSCYSDFPFHEDYPNFMNHEKFWDYLQEFAEHFDLLKYIQFKTTVCSITKRPDFSETGQWDVVTETEGKQNRAVFDAVMVCTGHFLNPHLPLEAFPGIHKFKGQILHSQEYKIPEGFQGKRVLVIGLGNTGGDIAVELSRTAAQVLLSTRTGTWVLGRSSDWGYPYNMMVTRRCCSFIAQVLPSRFLNWIQERKLNKRFNHEDYGLSITKGKKAKFIVNDELPNCILCGAITMKTSVIEFTETSAVFEDGTVEENIDVVIFTTGYTFSFPFFEEPLKSLCTKKIFLYKQVFPLNLERATLAIIGLIGLKGSILSGTELQARWVTRVFKGLCKIPPSQKLMMEATEKEQLIKRGVFKDTSKDKFDYIAYMDDIAACIGTKPSIPLLFLKDPRLAWEVFFGPCTPYQYRLMGPGKWDGARNAILTQWDRTLKPLKTRIVPDSSKPASMSHYLKAWGAPVLLASLLLICKSSLFLKLVRDKLQDRMSPYLVSLWRG

SEQ ID NO: 32296 - protein, 533 aa, Homo sapiens
  Payload ID: 6327
  Gene Symbol: FMO5
  Gene Name: flavin containing monooxygenase 5
  Uniprot ID: P49326
  ENSP ID: ENSP00000254090
MTKKRIAVIGGGVSGLSSIKCCVEEGLEPVCFERTDDIGGLWRFQENPEEGRASIYKSVIINTSKEMMCFSDYPIPDHYPNFMHNAQVLEYFRMYAKEFDLLKYIRFKTTVCSVKKQPDFATSGQWEVVTESEGKKEMNVFDGVMVCTGHHTNAHLPLESFPGIEKFKGQYFHSRDYKNPEGFTGKRVIIIGIGNSGGDLAVEISQTAKQVFLSTRRGAWILNRVGDYGYPADVLFSSRLTHFIWKICGQSLANKYLEKKINQRFDHEMFGLKPKHRALSQHPTLNDDLPNRIISGLVKVKGNVKEFTETAAIFEDGSREDDIDAVIFATGYSFDFPFLEDSVKVVKNKISLYKKVFPPNLERPTLAIIGLIQPLGAIMPISELQGRWATQVFKGLKTLPSQSEMMAEISKAQEEIDKRYVESQRHTIQGDYIDTMEELADLVGVRPNLLSLAFTDPKLALHLLLGPCTPIHYRVQGPGKWDGARKAILTTDDRIRKPLMTRVVERSSSMTSTMTIGKFMLALAFFAIIIAYF

SEQ ID NO: 32297 - protein, 285 aa, Homo sapiens
  Payload ID: 6327
  Gene Symbol: FMO5
  Gene Name: flavin containing monooxygenase 5
  Uniprot ID: P49326
  ENSP ID: ENSP00000358277
MTKKRIAVIGGGVSGLSSIKCCVEEGLEPVCFERTDDIGGLWRFQENPEEGRASIYKSVIINTSKEMMCFSDYPIPDHYPNFMHNAQVLEYFRMYAKEFDLLKYIRFKTTVCSVKKQPDFATSGQWEVVTESEGKKEMNVFDGVMVCTGHHTNAHLPLESFPGIEKFKGQYFHSRDYKNPEGFTGKRVIIIGIGNSGGDLAVEISQTAKQVFLSTRRGAWILNRVGDYGYPADVLFSSRLTHFIWKICGQSLANKYLEKKINQRFDHEMFGLKPKHRSKDIALTE

SEQ ID NO: 32298 - protein, 464 aa, Homo sapiens
  Payload ID: 6327
  Gene Symbol: FMO5
  Gene Name: flavin containing monooxygenase 5
  Uniprot ID: P49326
  ENSP ID: ENSP00000416011
MTKKRIAVIGGGVSGLSSIKCCVEEGLEPVCFERTDDIGGLWRFQENPEEGRASIYKSVIINTSKEMMCFSDYPIPDHYPNFMHNAQVLEYFRMYAKEFDLLKYIRFKTTVCSVKKQPDFATSGQWEVVTESEGKKEMNVFDGVMVCTGHHTNAHLPLESFPGIEKFKGQYFHSRDYKNPEGFTGKRVIIIGIGNSGGDLAVEISQTAKQVFLSTRRGAWILNRVGDYGYPADVLFSSRLTHFIWKICGQSLANKYLEKKINQRFDHEMFGLKPKHRALSQHPTLNDDLPNRIISGLVKVKGNVKEFTETAAIFEDGSREDDIDAVIFATGYSFDFPFLEDSVKVVKNKISLYKKVFPPNLERPTLAIIGLIQPLGAIMPISELQGRWATQVFKGLKTLPSQSEMMAEISKAQEEIDKSLTMRKTSDKPKLKNILQIPDYLKTVKIINKESLRNCPGIKGPKET

SEQ ID NO: 32299 - protein, 145 aa, Homo sapiens
  Payload ID: 6327
  Gene Symbol: FMO5
  Gene Name: flavin containing monooxygenase 5
  ENSP ID: ENSP00000432569
MTKKRIAVIGGGVSGLSSIKCCVEEGLEPVCFERTDDIGGLWRFQENPEEGRASIYKSVIINTSKEMMCFSDYPIPDHYPNFMHNAQVLEYFRMYAKEFDLLKYIRFKTTVCSVKKQPDFATSGQWEVVTESEGKKEMNVFDGVM

SEQ ID NO: 32300 - protein, 278 aa, Homo sapiens
  Payload ID: 6327
  Gene Symbol: FMO5
  Gene Name: flavin containing monooxygenase 5
  ENSP ID: ENSP00000433742
MTKKRIAVIGGGVSGLSSIKCCVEEGLEPVCFERTDDIGGLWRFQENPEEGRASIYKSVIINTSKEMMCFSDYPIPDHYPNFMHNAQVLEYFRMYAKEFDLLKYIRFKTTVCSVKKQPDFATSGQWEVVTESEGKKEMNVFDGVMVCTGHHTNAHLPLESFPGIEKFKGQYFHSRDYKNPEGFTGKRVIIIGIGNSGGDLAVEISQTAKQVFLSTRRGAWILNRVGDYGYPADVLFSSRLTHFIWKICGQSLANKYLEKKINQRFDHEMFGLKPKHRL

SEQ ID NO: 32301 - protein, 192 aa, Homo sapiens
  Payload ID: 6327
  Gene Symbol: FMO5
  Gene Name: flavin containing monooxygenase 5
  ENSP ID: ENSP00000436429
MTKKRIAVIGGGVSGLSSIKCCVEEGLEPVCFERTDDIGGLWRFQENPEEGRASIYKSVIINTSKEMMCFSDYPIPDHYPNFMHNAQVLEYFRMYAKEFDLLKYIRFKTTVCSVKKQPDFATSGQWEVVTESEGKKEMNVFDGVMVCTGHHTNAHLPLESFPGIEKFKGQYFHSRDYKNPEGFTGKRVIIIG

SEQ ID NO: 32302 - protein, 464 aa, Homo sapiens; identical to SEQ ID NO: 32298
  Payload ID: 6327
  Gene Symbol: FMO5
  Gene Name: flavin containing monooxygenase 5
  Uniprot ID: P49326
  ENSP ID: ENSP00000462062

SEQ ID NO: 32303 - protein, 386 aa, Homo sapiens
  Payload ID: 6328
  Gene Symbol: FLI1
  Gene Name: Fli-1 proto-oncogene, ETS transcription factor
  Uniprot ID: Q01543
  ENSP ID: ENSP00000281428
MEGGLAGERARESPVDCSVSKCSKLVGGGESNPMNYNSYMDEKNGPPPPNMTTNERRVIVPADPTLWTQEHVRQWLEWAIKEYSLMEIDTSFFQNMDGKELCKMNKEDFLRATTLYNTEVLLSHLSYLRESSLLAYNTTSHTDQSSRLSVKEDPSYDSVRRGAWGNNMNSGLNKSPPLGGAQTISKNTEQRPQPDPYQILGPTSSRLANPGSGQIQLWQFLLELLSDSANASCITWEGTNGEFKMTDPDEVARRWGERKSKPNMNYDKLSRALRYYYDKNIMTKVHGKRYAYKFDFHGIAQALQPHPTESSMYKYPSDISYMPSYHAHQQKVNFVPPHPSSMPVTSSSFFGAASQYWTSPTGGIYPNPNVPRHPNTHVPSHLGSYY

SEQ ID NO: 32304 - protein, 259 aa, Homo sapiens
  Payload ID: 6328
  Gene Symbol: FLI1
  Gene Name: Fli-1 proto-oncogene, ETS transcription factor
  Uniprot ID: Q01543
  ENSP ID: ENSP00000339627
MDPGSLLAYNTTSHTDQSSRLSVKEDPSYDSVRRGAWGNNMNSGLNKSPPLGGAQTISKNTEQRPQPDPYQILGPTSSRLANPGSGQIQLWQFLLELLSDSANASCITWEGTNGEFKMTDPDEVARRWGERKSKPNMNYDKLSRALRYYYDKNIMTKVHGKRYAYKFDFHGIAQALQPHPTESSMYKYPSDISYMPSYHAHQQKVNFVPPHPSSMPVTSSSFFGAASQYWTSPTGGIYPNPNVPRHPNTHVPSHLGSYY

SEQ ID NO: 32305 - protein, 82 aa, Homo sapiens
  Payload ID: 6328
  Gene Symbol: FLI1
  Gene Name: Fli-1 proto-oncogene, ETS transcription factor
  ENSP ID: ENSP00000399985
MDGTIKEALSVVSDDQSLFDSAYGAAAHLPKADMTASGSPDYGQPHKINPLPPQQEWINQPVRVNVKREYDHMNGSRRQLPH

SEQ ID NO: 32306 - protein, 419 aa, Homo sapiens
  Payload ID: 6328
  Gene Symbol: FLI1
  Gene Name: Fli-1 proto-oncogene, ETS transcription factor
  Uniprot ID: Q01543
  ENSP ID: ENSP00000432950
MTASGSPDYGQPHKINPLPPQQEWINQPVRVNVKREYDHMNGSRESPVDCSVSKCSKLVGGGESNPMNYNSYMDEKNGPPPPNMTTNERRVIVPADPTLWTQEHVRQWLEWAIKEYSLMEIDTSFFQNMDGKELCKMNKEDFLRATTLYNTEVLLSHLSYLRESSLLAYNTTSHTDQSSRLSVKEDPSYDSVRRGAWGNNMNSGLNKSPPLGGAQTISKNTEQRPQPDPYQILGPTSSRLANPGSGQIQLWQFLLELLSDSANASCITWEGTNGEFKMTDPDEVARRWGERKSKPNMNYDKLSRALRYYYDKNIMTKVHGKRYAYKFDFHGIAQALQPHPTESSMYKYPSDISYMPSYHAHQQKVNFVPPHPSSMPVTSSSFFGAASQYWTSPTGGIYPNPNVPRHPNTHVPSHLGSYY

SEQ ID NO: 32307 - protein, 452 aa, Homo sapiens
  Payload ID: 6328
  Gene Symbol: FLI1
  Gene Name: Fli-1 proto-oncogene, ETS transcription factor
  Uniprot ID: Q01543
  ENSP ID: ENSP00000433488
MDGTIKEALSVVSDDQSLFDSAYGAAAHLPKADMTASGSPDYGQPHKINPLPPQQEWINQPVRVNVKREYDHMNGSRESPVDCSVSKCSKLVGGGESNPMNYNSYMDEKNGPPPPNMTTNERRVIVPADPTLWTQEHVRQWLEWAIKEYSLMEIDTSFFQNMDGKELCKMNKEDFLRATTLYNTEVLLSHLSYLRESSLLAYNTTSHTDQSSRLSVKEDPSYDSVRRGAWGNNMNSGLNKSPPLGGAQTISKNTEQRPQPDPYQILGPTSSRLANPGSGQIQLWQFLLELLSDSANASCITWEGTNGEFKMTDPDEVARRWGERKSKPNMNYDKLSRALRYYYDKNIMTKVHGKRYAYKFDFHGIAQALQPHPTESSMYKYPSDISYMPSYHAHQQKVNFVPPHPSSMPVTSSSFFGAASQYWTSPTGGIYPNPNVPRHPNTHVPSHLGSYY

SEQ ID NO: 32308 - protein, 106 aa, Homo sapiens
  Payload ID: 6328
  Gene Symbol: FLI1
  Gene Name: Fli-1 proto-oncogene, ETS transcription factor
  ENSP ID: ENSP00000476428
MTASGSPDYGQPHKINPLPPQQEWINQPVRVNVKREYDHMNGSRESPVDCSVSKCSKLVGGGESNPMNYNSYMDEKNGPPPPNMTTNERRVIVPADPTLWTQEHVR

SEQ ID NO: 32309 - protein, 49 aa, Homo sapiens
  Payload ID: 6328
  Gene Symbol: FLI1
  Gene Name: Fli-1 proto-oncogene, ETS transcription factor
  ENSP ID: ENSP00000477262
MTASGSPDYGQPHKINPLPPQQEWINQPVRVNVKREYDHMNGSRFTAGL

SEQ ID NO: 32310 - protein, 1269 aa, Homo sapiens
  Payload ID: 6329
  Gene Symbol: FLII
  Gene Name: flightless I actin binding protein
  Uniprot ID: Q13045
  ENSP ID: ENSP00000324573
MEATGVLPFVRGVDLSGNDFKGGYFPENVKAMTSLRWLKLNRTGLCYLPEELAALQKLEHLSVSHNNLTTLHGELSSLPSLRAIVARANSLKNSGVPDDIFKLDDLSVLDLSHNQLTECPRELENAKNMLVLNLSHNSIDTIPNQLFINLTDLLYLDLSENRLESLPPQMRRLVHLQTLVLNGNPLLHAQLRQLPAMTALQTLHLRSTQRTQSNLPTSLEGLSNLADVDLSCNDLTRVPECLYTLPSLRRLNLSSNQITELSLCIDQWVHVETLNLSRNQLTSLPSAICKLSKLKKLYLNSNKLDFDGLPSGIGKLTNLEEFMAANNNLELVPESLCRCPKLRKLVLNKNHLVTLPEAIHFLTEIEVLDVRENPNLVMPPKPADRAAEWYNIDFSLQNQLRLAGASPATVAAAAAAGSGPKDPMARKMRLRRRKDSAQDDQAKQVLKGMSDVAQEKNKKQEESADARAPSGKVRRWDQGLEKPRLDYSEFFTEDVGQLPGLTIWQIENFVPVLVEEAFHGKFYEADCYIVLKTFLDDSGSLNWEIYYWIGGEATLDKKACSAIHAVNLRNYLGAECRTVREEMGDESEEFLQVFDNDISYIEGGTASGFYTVEDTHYVTRMYRVYGKKNIKLEPVPLKGTSLDPRFVFLLDRGLDIYVWRGAQATLSSTTKARLFAEKINKNERKGKAEITLLVQGQELPEFWEALGGEPSEIKKHVPEDFWPPQPKLYKVGLGLGYLELPQINYKLSVEHKQRPKVELMPRMRLLQSLLDTRCVYILDCWSDVFIWLGRKSPRLVRAAALKLGQELCGMLHRPRHATVSRSLEGTEAQVFKAKFKNWDDVLTVDYTRNAEAVLQSPGLSGKVKRDAEKKDQMKADLTALFLPRQPPMSLAEAEQLMEEWNEDLDGMEGFVLEGKKFARLPEEEFGHFYTQDCYVFLCRYWVPVEYEEEEKKEDKEEKAEGKEGEEATAEAEEKQPEEDFQCIVYFWQGREASNMGWLTFTFSLQKKFESLFPGKLEVVRMTQQQENPKFLSHFKRKFIIHRGKRKAVQGAQQPSLYQIRTNGSALCTRCIQINTDSSLLNSEFCFILKVPFESEDNQGIVYAWVGRASDPDEAKLAEDILNTMFDTSYSKQVINEGEEPENFFWVGIGAQKPYDDDAEYMKHTRLFRCSNEKGYFAVTEKCSDFCQDDLADDDIMLLDNGQEVYMWVGTQTSQVEIKLSLKACQVYIQHMRSKEHERPRRLRLVRKGNEQHAFTRCFHAWSAFCKALA

SEQ ID NO: 32311 - protein, 1214 aa, Homo sapiens
  Payload ID: 6329
  Gene Symbol: FLII
  Gene Name: flightless I actin binding protein
  Uniprot ID: Q13045
  ENSP ID: ENSP00000438536
MEATGVLPFVRGVDLSGNDFKGGYFPENVKAMTSLRWLKLNRTGLCYLPEELAALQKLEHLSVSHNNLTTLHGELSSLPSLRAIVARANSLKNSGVPDDIFKLDDLSVLDLSHNQLTECPRELENAKNMLVLNLSHNRQLPAMTALQTLHLRSTQRTQSNLPTSLEGLSNLADVDLSCNDLTRVPECLYTLPSLRRLNLSSNQITELSLCIDQWVHVETLNLSRNQLTSLPSAICKLSKLKKLYLNSNKLDFDGLPSGIGKLTNLEEFMAANNNLELVPESLCRCPKLRKLVLNKNHLVTLPEAIHFLTEIEVLDVRENPNLVMPPKPADRAAEWYNIDFSLQNQLRLAGASPATVAAAAAGSGPKDPMARKMRLRRRKDSAQDDQAKQVLKGMSDVAQEKNKKQEESADARAPSGKVRRWDQGLEKPRLDYSEFFTEDVGQLPGLTIWQIENFVPVLVEEAFHGKFYEADCYIVLKTFLDDSGSLNWEIYYWIGGEATLDKKACSAIHAVNLRNYLGAECRTVREEMGDESEEFLQVFDNDISYIEGGTASGFYTVEDTHYVTRMYRVYGKKNIKLEPVPLKGTSLDPRFVFLLDRGLDIYVWRGAQATLSSTTKARLFAEKINKNERKGKAEITLLVQGQELPEFWEALGGEPSEIKKHVPEDFWPPQPKLYKVGLGLGYLELPQINYKLSVEHKQRPKVELMPRMRLLQSLLDTRCVYILDCWSDVFIWLGRKSPRLVRAAALKLGQELCGMLHRPRHATVSRSLEGTEAQVFKAKFKNWDDVLTVDYTRNAEAVLQSPGLSGKVKRDAEKKDQMKADLTALFLPRQPPMSLAEAEQLMEEWNEDLDGMEGFVLEGKKFARLPEEEFGHFYTQDCYVFLCRYWVPVEYEEEEKKEDKEEKAEGKEGEEATAEAEEKQPEEDFQCIVYFWQGREASNMGWLTFTFSLQKKFESLFPGKLEVVRMTQQQENPKFLSHFKRKFIIHRGKRKAVQGAQQPSLYQIRTNGSALCTRCIQINTDSSLLNSEFCFILKVPFESEDNQGIVYAWVGRASDPDEAKLAEDILNTMFDTSYSKQVINEGEEPENFFWVGIGAQKPYDDDAEYMKHTRLFRCSNEKGYFAVTEKCSDFCQDDLADDDIMLLDNGQEVYMWVGTQTSQVEIKLSLKACQVYIQHMRSKEHERPRRLRLVRKGNEQHAFTRCFHAWSAFCKALA

SEQ ID NO: 32312 - protein, 51 aa, Homo sapiens
  Payload ID: 6329
  Gene Symbol: FLII
  Gene Name: flightless I actin binding protein
  ENSP ID: ENSP00000462293
MEATGVLPFVRGVDLSGNDFKMVRVGSVAPQRLPWAGGAIEGGEQGLCASP

SEQ ID NO: 32313 - protein, 700 aa, Homo sapiens
  Payload ID: 6329
  Gene Symbol: FLII
  Gene Name: flightless I actin binding protein
  ENSP ID: ENSP00000462314
MEATGVLPFVRGVDLSGNDFKGGYFPENVKAMTSLRWLKLNRTGLCYLPEELAALQKLEHLSVSHNNLTTLHGELSSLPSLRAIVARANSLKNSGVPDDIFKLDDLSVLDLSHNQLTECPRELENAKNMLVLNLSHNSIDTIPNQLFINLTDLLYLDLSENRLESLPPQMRRLVHLQTLVLNGNPLLHAQLRQLPAMTALQTLHLRSTQRTQSNLPTSLEGLSNLADVDLSCNDLTRVPECLYTLPSLRRLNLSSNQITELSLCIDQWVHVETLNLSRNQLTSLPSAICKLSKLKKLYLNSNKLDFDGLPSGIGKLTNLEEFMAANNNLELVPESLCRCPKLRKLVLNKNHLVTLPEAIHFLTEIEVLDVRENPNLVMPPKPADRAAEWYNIDFSLQNQLRLAGASPATVAAAAAGSGPKDPMARKMRLRRRKDSAQDDQAKQVLKGMSDVAQEKNKKQEESADARAPSGKVRRWDQGLEKPRLDYSEFFTEDVGQLPGLTIWQIENFVPVLVEEAFHGKFYEADCYIVLKTFLDDSGSLNWEIYYWIGGEATLDKKACSAIHAVNLRNYLGAECRTVREEMGDESEEFLQVFDNDISYIEGGTASGFYTVEDTHYVTRMYRVYGKKNIKLEPVPLKGTSLDPRNMSGRAGCAWSARAMSSTPLPAASTPGAPSARPWPKTGWHSPRLGEEEEGASSTVC

SEQ ID NO: 32314 - protein, 29 aa, Homo sapiens
  Payload ID: 6329
  Gene Symbol: FLII
  Gene Name: flightless I actin binding protein
  ENSP ID: ENSP00000462797
PPQMRRLVHLQTLVLNGNPLLHAQLRSQR

SEQ ID NO: 32315 - protein, 1258 aa, Homo sapiens
  Payload ID: 6329
  Gene Symbol: FLII
  Gene Name: flightless I actin binding protein
  Uniprot ID: Q13045
  ENSP ID: ENSP00000463534
MDLRGLRPVPGGYFPENVKAMTSLRWLKLNRTGLCYLPEELAALQKLEHLSVSHNNLTTLHGELSSLPSLRAIVARANSLKNSGVPDDIFKLDDLSVLDLSHNQLTECPRELENAKNMLVLNLSHNSIDTIPNQLFINLTDLLYLDLSENRLESLPPQMRRLVHLQTLVLNGNPLLHAQLRQLPAMTALQTLHLRSTQRTQSNLPTSLEGLSNLADVDLSCNDLTRVPECLYTLPSLRRLNLSSNQITELSLCIDQWVHVETLNLSRNQLTSLPSAICKLSKLKKLYLNSNKLDFDGLPSGIGKLTNLEEFMAANNNLELVPESLCRCPKLRKLVLNKNHLVTLPEAIHFLTEIEVLDVRENPNLVMPPKPADRAAEWYNIDFSLQNQLRLAGASPATVAAAAAAGSGPKDPMARKMRLRRRKDSAQDDQAKQVLKGMSDVAQEKNKKQEESADARAPSGKVRRWDQGLEKPRLDYSEFFTEDVGQLPGLTIWQIENFVPVLVEEAFHGKFYEADCYIVLKTFLDDSGSLNWEIYYWIGGEATLDKKACSAIHAVNLRNYLGAECRTVREEMGDESEEFLQVFDNDISYIEGGTASGFYTVEDTHYVTRMYRVYGKKNIKLEPVPLKGTSLDPRFVFLLDRGLDIYVWRGAQATLSSTTKARLFAEKINKNERKGKAEITLLVQGQELPEFWEALGGEPSEIKKHVPEDFWPPQPKLYKVGLGLGYLELPQINYKLSVEHKQRPKVELMPRMRLLQSLLDTRCVYILDCWSDVFIWLGRKSPRLVRAAALKLGQELCGMLHRPRHATVSRSLEGTEAQVFKAKFKNWDDVLTVDYTRNAEAVLQSPGLSGKVKRDAEKKDQMKADLTALFLPRQPPMSLAEAEQLMEEWNEDLDGMEGFVLEGKKFARLPEEEFGHFYTQDCYVFLCRYWVPVEYEEEEKKEDKEEKAEGKEGEEATAEAEEKQPEEDFQCIVYFWQGREASNMGWLTFTFSLQKKFESLFPGKLEVVRMTQQQENPKFLSHFKRKFIIHRGKRKAVQGAQQPSLYQIRTNGSALCTRCIQINTDSSLLNSEFCFILKVPFESEDNQGIVYAWVGRASDPDEAKLAEDILNTMFDTSYSKQVINEGEEPENFFWVGIGAQKPYDDDAEYMKHTRLFRCSNEKGYFAVTEKCSDFCQDDLADDDIMLLDNGQEVYMWVGTQTSQVEIKLSLKACQVYIQHMRSKEHERPRRLRLVRKGNEQHAFTRCFHAWSAFCKALA

SEQ ID NO: 32316 - protein, 185 aa, Homo sapiens
  Payload ID: 6329
  Gene Symbol: FLII
  Gene Name: flightless I actin binding protein
  ENSP ID: ENSP00000463675
NLTDLLYLDLSENRLESLPPQMRRLVHLQTLVLNGNPLLHAQLRQLPAMTALQTLHLRSTQRTQSNLPTSLEAKLAEDILNTMFDTSYSKQVINEGEEPENFFWVGIGAQKPYDDDAEYMKHTRLFRCSNEKGYFAVTEKCSDFCQDDLADDDIMLLDNGQEVYMWVGTQTSQVEIKLSLKACQV

SEQ ID NO: 32317 - protein, 279 aa, Homo sapiens
  Payload ID: 6329
  Gene Symbol: FLII
  Gene Name: flightless I actin binding protein
  ENSP ID: ENSP00000463838
PDDIFKLDDLSVLDLSHNQLTECPRELENAKNMLVLNLSHNSENRLESLPPQMRRLVHLQTLVLNGNPLLHAQLRQLPAMTALQTLHLRSTQRTQSNLPTSLEGLSNLADVDLSCNDLTRVPECLYTLPSLRRLNLSSNQITELSLCIDQWVHVETLNLSRNQLTSLPSAICKLSKLKKLYLNSNKLDFDGLPSGIGKLTNLEEFMAANNNLELVPESLCRCPKLRKLVLNKNHLVTLPEAIHFLTEIEVLDVRENPNLVMPPKPADRAAEWYNIDFSL

SEQ ID NO: 32318 - protein, 117 aa, Homo sapiens
  Payload ID: 6329
  Gene Symbol: FLII
  Gene Name: flightless I actin binding protein
  ENSP ID: ENSP00000463902
LDLSENRLESLPPQMRRLVHLQTLVLNGNPLLHAQLRQLPAMTALQTLHLRSTQRTQSNLPTSLEGLSNLADVDLSCNDLTRVPECLYTLPSLRRLNLSSNQITELSLCIDHQPFAS

SEQ ID NO: 32319 - protein, 23 aa, Homo sapiens
  Payload ID: 6329
  Gene Symbol: FLII
  Gene Name: flightless I actin binding protein
  ENSP ID: ENSP00000465202
  MOD_RES (1)..(1): Any amino acid
XNTMFDTSYSKQVLQREGLLCSD

SEQ ID NO: 32320 - protein, 133 aa, Homo sapiens
  Payload ID: 6329
  Gene Symbol: FLII
  Gene Name: flightless I actin binding protein
  ENSP ID: ENSP00000467199
MTSLRWLKLNRTGLCYLPEELAALQKLEHLSVSHNNLTTLHGELSSLPSLRAIVARANSLKNSGVPDDIFKLDDLSVLDLSHNQLTECPRELENAKNMLVLNLSHNSIDTIPNQLFINLTDLLYLDLSENRLE

SEQ ID NO: 32321 - protein, 99 aa, Homo sapiens
  Payload ID: 6329
  Gene Symbol: FLII
  Gene Name: flightless I actin binding protein
  ENSP ID: ENSP00000467212
MTSLRWLKLNRTGLCYLPEELAALQKLEHLSVSHNNLTTLHGELSSLPSLRAIVARANSLKNSGVPDDIFKLDDLSVLDLSHNQLTECPRELENAKNML

SEQ ID NO: 32322 - protein, 207 aa, Homo sapiens
  Payload ID: 6329
  Gene Symbol: FLII
  Gene Name: flightless I actin binding protein
  ENSP ID: ENSP00000468045
VPFESEDNQGIVYAWVGRASDPDEAKLAEDILNTMFDTSYSKQVINEGEEPENFFWVGIGAQKPYDDDAEYMKHTRLFRCSNEKGYFAVTEKCSDFCQDDLADDDIMLLDNGQEVYMWVGTQTSQVEIKLSLKACQVIWVEGGPRWACGQGRVITQGSLSPCQVYIQHMRSKEHERPRRLRLVRKGNEQHAFTRCFHAWSAFCKALA

SEQ ID NO: 32323 - protein, 51 aa, Homo sapiens; identical to SEQ ID NO: 32312
  Payload ID: 6329
  Gene Symbol: FLII
  Gene Name: flightless I actin binding protein
  ENSP ID: ENSP00000486754

SEQ ID NO: 32324 - protein, 427 aa, Homo sapiens
  Payload ID: 6330
  Gene Symbol: FLOT1
  Gene Name: flotillin 1
  Uniprot ID: O75955
  ENSP ID: ENSP00000365569
MFFTCGPNEAMVVSGFCRSPPVMVAGGRVFVLPCIQQIQRISLNTLTLNVKSEKVYTRHGVPISVTGIAQVKIQGQNKEMLAAACQMFLGKTEAEIAHIALETLEGHQRAIMAHMTVEEIYKDRQKFSEQVFKVASSDLVNMGISVVSYTLKDIHDDQDYLHSLGKARTAQVQKDARIGEAEAKRDAGIREAKAKQEKVSAQYLSEIEMAKAQRDYELKKAAYDIEVNTRRAQADLAYQLQVAKTKQQIEEQRVQVQVVERAQQVAVQEQEIARREKELEARVRKPAEAERYKLERLAEAEKSQLIMQAEAEAASVRMRGEAEAFAIGARARAEAEQMAKKAEAFQLYQEAAQLDMLLEKLPQVAEEISGPLTSANKITLVSSGSGTMGAAKVTGEVLDILTRLPESVERLTGVSISQVNHKPLRTA

SEQ ID NO: 32325 - protein, 427 aa, Homo sapiens; identical to SEQ ID NO: 32324
  Payload ID: 6330
  Gene Symbol: FLOT1
  Gene Name: flotillin 1
  Uniprot ID: O75955
  ENSP ID: ENSP00000372873

SEQ ID NO: 32326 - protein, 427 aa, Homo sapiens; identical to SEQ ID NO: 32324
  Payload ID: 6330
  Gene Symbol: FLOT1
  Gene Name: flotillin 1
  Uniprot ID: O75955
  ENSP ID: ENSP00000373056

SEQ ID NO: 32327 - protein, 238 aa, Homo sapiens
  Payload ID: 6330
  Gene Symbol: FLOT1
  Gene Name: flotillin 1
  ENSP ID: ENSP00000388032
MRPWWSPVKIQGQNKEMLAAACQMFLGKTEAEIAHIALETLEGHQRAIMAHMTVEEIYKDRQKFSEQVFKVASSDLVNMGISVVSYTLKDIHDDQDYLHSLGKARTAQVQKDARIGEAEAKRDAGIREAKAKQEKVSAQYLSEIEMAKAQRDYELKKAAYDIEVNTRRAQADLAYQLQVAKTKQQIEEQRVQVQVVERAQQVAVQEQEIARREKELEARVRKPAEAERYKLERLAEAE

SEQ ID NO: 32328 - protein, 60 aa, Homo sapiens
  Payload ID: 6330
  Gene Symbol: FLOT1
  Gene Name: flotillin 1
  ENSP ID: ENSP00000388104
VAKTKQQIEEQRVQVQVVERAQQVAVQEQEIARREKELEARVRKPAEAERYKLERLAEAE

SEQ ID NO: 32329 - protein, 82 aa, Homo sapiens
  Payload ID: 6330
  Gene Symbol: FLOT1
  Gene Name: flotillin 1
  ENSP ID: ENSP00000388153
DYLHSLGKARTAQVQKDARIGEAEAKRDAGIREAKAKQEKVSAQYLSEIEMAKAQRDYELKKAAYDIEVNTRRAQADLAYQL

SEQ ID NO: 32330 - protein, 147 aa, Homo sapiens
  Payload ID: 6330
  Gene Symbol: FLOT1
  Gene Name: flotillin 1
  ENSP ID: ENSP00000388517
MRPWWSPVKIQGQNKEMLAAACQMFLGKTEAEIAHIALETLEGHQRAIMAHMTVEEIYKDRQKFSEQVFKVASSDLVNMGISVVSYTLKDIHDDQDYLHSLGKARTAQVQKDARIGEAEAKRDAGIREAKAKQEKVSAQYLSEIEMA

SEQ ID NO: 32331 - protein, 427 aa, Homo sapiens; identical to SEQ ID NO: 32324
  Payload ID: 6330
  Gene Symbol: FLOT1
  Gene Name: flotillin 1
  Uniprot ID: O75955
  ENSP ID: ENSP00000388861

SEQ ID NO: 32332 - protein, 192 aa, Homo sapiens
  Payload ID: 6330
  Gene Symbol: FLOT1
  Gene Name: flotillin 1
  ENSP ID: ENSP00000389138
MFFTCGPNEAMVVSGFCRSPPVMVAGGRVFVLPCIQQIQRISLNTLTLNVKSEKVKIQGQNKEMLAAACQMFLGKTEAEIAHIALETLEGHQRAIMAHMTVEEIYKDRQKFSEQVFKVASSDLVNMGISVVSYTLKDIHDDQDYLHSLGKARTAQVQKDARIGEAEAKRDAGIREAKAKQEKVSAQYLSEIE

SEQ ID NO: 32333 - protein, 145 aa, Homo sapiens
  Payload ID: 6330
  Gene Symbol: FLOT1
  Gene Name: flotillin 1
  ENSP ID: ENSP00000389698
MGVEGTGRGGCRLGGPDGKGKGWAPVDATARLPHPQRLSLPLLQLQPEPCFSLVAQMRPWWSPDYLHSLGKARTAQVQKDARIGEAEAKRDAGIREAKAKQEKVSAQYLSEIEMAKAQRDYELKKAAYDIEVNTRRAQADLAYQL

SEQ ID NO: 32334 - protein, 185 aa, Homo sapiens
  Payload ID: 6330
  Gene Symbol: FLOT1
  Gene Name: flotillin 1
  ENSP ID: ENSP00000390747
MFFTCGPNEAMVVSGFCRSPPVMVAGGRVFVLPCIQQIQRISLNTLTLNVKSEKVYTRHGVPISVTGIAQVKIQGQNKEMLAAACQMFLGKTEAEIAHIALETLEGHQRAIMAHMTVEEIYKDRQKFSEQVFKVASSDLVNMGISVVSYTLKDIHDDQDYLHSLGKARTAQVQKDARIGEAEAKR

SEQ ID NO: 32335 - protein, 210 aa, Homo sapiens
  Payload ID: 6330
  Gene Symbol: FLOT1
  Gene Name: flotillin 1
  ENSP ID: ENSP00000390909
MFFTCGPNEAMVVSGFCRSPPVMVAGGRVFVLPCIQQIQRISLNTLTLNVKSEKVYTRHGVPISVTGIAQVKIQGQNKEMLAAACQMFLGKTEAEIAHIALETLEGHQRAIMAHMTVEEIYKDRQKFSEQVFKVASSDLVNMGISVVSYTLKDIHDDQDYLHSLGKARTAQVQKDARIGEAEAKRDAGIREAKAKQEKVSAQYLSEIEMA

SEQ ID NO: 32336 - protein, 235 aa, Homo sapiens
  Payload ID: 6330
  Gene Symbol: FLOT1
  Gene Name: flotillin 1
  ENSP ID: ENSP00000390961
MFFTCGPNEAMVVSGFCRSPPVMVAGGRVFVLPCIQQIQRISLNTLTLNVKSEKVYTRHGVPISVTGIAQVKIQGQNKEMLAAACQMFLGKTEAEIAHIALETLEGHQRAIMAHMTVEEIYKDRQKFSEQVFKVASSDLVNMGISVVSYTLKDIHDDQDYLHSLGKARTAQVQKDARIGEAEAKRDAGIREAKAKQEKVSAQYLSEIEMAKAQRDYELKKAAYDIEVNTRRAQAD

SEQ ID NO: 32337 - protein, 185 aa, Homo sapiens; identical to SEQ ID NO: 32334
  Payload ID: 6330
  Gene Symbol: FLOT1
  Gene Name: flotillin 1
  ENSP ID: ENSP00000391341

SEQ ID NO: 32338 - protein, 427 aa, Homo sapiens; identical to SEQ ID NO: 32324
  Payload ID: 6330
  Gene Symbol: FLOT1
  Gene Name: flotillin 1
  Uniprot ID: O75955
  ENSP ID: ENSP00000391438

SEQ ID NO: 32339 - protein, 192 aa, Homo sapiens; identical to SEQ ID NO: 32332
  Payload ID: 6330
  Gene Symbol: FLOT1
  Gene Name: flotillin 1
  ENSP ID: ENSP00000391633

SEQ ID NO: 32340 - protein, 192 aa, Homo sapiens; identical to SEQ ID NO: 32332
  Payload ID: 6330
  Gene Symbol: FLOT1
  Gene Name: flotillin 1
  ENSP ID: ENSP00000392683

SEQ ID NO: 32341 - protein, 182 aa, Homo sapiens
  Payload ID: 6330
  Gene Symbol: FLOT1
  Gene Name: flotillin 1
  ENSP ID: ENSP00000392736
VKIQGQNKEMLAAACQMFLGKTEAEIAHIALETLEGHQRAIMAHMTVEEIYKDRQKFSEQVFKVASSDLVNMGISVVSYTLKDIHDDQDYLHSLGKARTAQVQKDARIGEAEAKRDAGIREAKAKQEKVSAQYLSEIEMAKAQRDYELKKAAYDIEVNTRRAQADLAYQLQVAKTKQQIEEQ

SEQ ID NO: 32342 - protein, 138 aa, Homo sapiens
  Payload ID: 6330
  Gene Symbol: FLOT1
  Gene Name: flotillin 1
  ENSP ID: ENSP00000393145
VKIQGQNKEMLAAACQMFLGKTEAEIAHIALETLEGHQRAIMAHMTVEEIYKDRQKFSEQVFKVASSDLVNMGISVVSYTLKDIHDDQDYLHSLGKARTAQVQKDARIGEAEAKRDAGIREAKAKQEKVSAQYLSEIE

SEQ ID NO: 32343 - protein, 252 aa, Homo sapiens
  Payload ID: 6330
  Gene Symbol: FLOT1
  Gene Name: flotillin 1
  ENSP ID: ENSP00000393409
MFFTCGPNEAMVVSGFCRSPPVMVAGGRVFVLPCIQQIQRISLNTLTLNVKSEKVYTRHGVPISVTGIAQVKIQGQNKEMLAAACQMFLGKTEAEIAHIALETLEGHQRAIMAHMTVEEIYKDRQKFSEQVFKVASSDLVNMGISVVSYTLKDIHDDQDYLHSLGKARTAQVQKDARIGEAEAKRDAGIREAKAKQEKVSAQYLSEIEMAKAQRDYELKKAAYDIEVNTRRAQADLAYQLQVAKTKQQIEEQ

SEQ ID NO: 32344 - protein, 252 aa, Homo sapiens; identical to SEQ ID NO: 32343
  Payload ID: 6330
  Gene Symbol: FLOT1
  Gene Name: flotillin 1
  ENSP ID: ENSP00000393741

SEQ ID NO: 32345 - protein, 90 aa, Homo sapiens
  Payload ID: 6330
  Gene Symbol: FLOT1
  Gene Name: flotillin 1
  ENSP ID: ENSP00000393767
  MOD_RES (1)..(1): Any amino acid
XAKKAEAFQLYQEAAQLDMLLEKLPQVAEEISGPLTSANKITLVSSGSGTMGAAKVTGEVLDILTRLPESVERLTGVSISQVNHKPLRTA

SEQ ID NO: 32346 - protein, 238 aa, Homo sapiens; identical to SEQ ID NO: 32327
  Payload ID: 6330
  Gene Symbol: FLOT1
  Gene Name: flotillin 1
  ENSP ID: ENSP00000395333

SEQ ID NO: 32347 - protein, 235 aa, Homo sapiens; identical to SEQ ID NO: 32336
  Payload ID: 6330
  Gene Symbol: FLOT1
  Gene Name: flotillin 1
  ENSP ID: ENSP00000395732

SEQ ID NO: 32348 - protein, 238 aa, Homo sapiens; identical to SEQ ID NO: 32327
  Payload ID: 6330
  Gene Symbol: FLOT1
  Gene Name: flotillin 1
  ENSP ID: ENSP00000395846

SEQ ID NO: 32349 - protein, 192 aa, Homo sapiens; identical to SEQ ID NO: 32332
  Payload ID: 6330
  Gene Symbol: FLOT1
  Gene Name: flotillin 1
  ENSP ID: ENSP00000396247

SEQ ID NO: 32350 - protein, 115 aa, Homo sapiens
  Payload ID: 6330
  Gene Symbol: FLOT1
  Gene Name: flotillin 1
  ENSP ID: ENSP00000397108
VKIQGQNKEMLAAACQMFLGKTEAEIAHIALETLEGHQRAIMAHMTVEEIYKDRQKFSEQVFKVASSDLVNMGISVVSYTLKDIHDDQDYLHSLGKARTAQVQKDARIGEAEAKR

SEQ ID NO: 32351 - protein, 235 aa, Homo sapiens; identical to SEQ ID NO: 32336
  Payload ID: 6330
  Gene Symbol: FLOT1
  Gene Name: flotillin 1
  ENSP ID: ENSP00000398834

SEQ ID NO: 32352 - protein, 165 aa, Homo sapiens
  Payload ID: 6330
  Gene Symbol: FLOT1
  Gene Name: flotillin 1
  ENSP ID: ENSP00000398866
VKIQGQNKEMLAAACQMFLGKTEAEIAHIALETLEGHQRAIMAHMTVEEIYKDRQKFSEQVFKVASSDLVNMGISVVSYTLKDIHDDQDYLHSLGKARTAQVQKDARIGEAEAKRDAGIREAKAKQEKVSAQYLSEIEMAKAQRDYELKKAAYDIEVNTRRAQAD

SEQ ID NO: 32353 - protein, 185 aa, Homo sapiens; identical to SEQ ID NO: 32334
  Payload ID: 6330
  Gene Symbol: FLOT1
  Gene Name: flotillin 1
  ENSP ID: ENSP00000399313

SEQ ID NO: 32354 - protein, 252 aa, Homo sapiens; identical to SEQ ID NO: 32343
  Payload ID: 6330
  Gene Symbol: FLOT1
  Gene Name: flotillin 1
  ENSP ID: ENSP00000400615

SEQ ID NO: 32355 - protein, 185 aa, Homo sapiens; identical to SEQ ID NO: 32334
  Payload ID: 6330
  Gene Symbol: FLOT1
  Gene Name: flotillin 1
  ENSP ID: ENSP00000403273

SEQ ID NO: 32356 - protein, 11 aa, Homo sapiens
  Payload ID: 6330
  Gene Symbol: FLOT1
  Gene Name: flotillin 1
  ENSP ID: ENSP00000403574
VAKTKQQIEEQ

SEQ ID NO: 32357 - protein, 235 aa, Homo sapiens; identical to SEQ ID NO: 32336
  Payload ID: 6330
  Gene Symbol: FLOT1
  Gene Name: flotillin 1
  ENSP ID: ENSP00000403627

SEQ ID NO: 32358 - protein, 210 aa, Homo sapiens; identical to SEQ ID NO: 32335
  Payload ID: 6330
  Gene Symbol: FLOT1
  Gene Name: flotillin 1
  ENSP ID: ENSP00000403917

SEQ ID NO: 32359 - protein, 145 aa, Homo sapiens; identical to SEQ ID NO: 32333
  Payload ID: 6330
  Gene Symbol: FLOT1
  Gene Name: flotillin 1
  ENSP ID: ENSP00000404300

SEQ ID NO: 32360 - protein, 115 aa, Homo sapiens
  Payload ID: 6330
  Gene Symbol: FLOT1
  Gene Name: flotillin 1
  ENSP ID: ENSP00000407101
MGVEGTGRGGCRLGGPDGKGKGWAPVDATARLPHPQRLSLPLLQLQPEPCFSLVAQMRPWWSPDYLHSLGKARTAQVQKDARIGEAEAKRDAGIREAKAKQEKVSAQYLSEIEMA

SEQ ID NO: 32361 - protein, 192 aa, Homo sapiens; identical to SEQ ID NO: 32332
  Payload ID: 6330
  Gene Symbol: FLOT1
  Gene Name: flotillin 1
  ENSP ID: ENSP00000407122

SEQ ID NO: 32362 - protein, 185 aa, Homo sapiens; identical to SEQ ID NO: 32334
  Payload ID: 6330
  Gene Symbol: FLOT1
  Gene Name: flotillin 1
  ENSP ID: ENSP00000409375

SEQ ID NO: 32363 - protein, 210 aa, Homo sapiens; identical to SEQ ID NO: 32335
  Payload ID: 6330
  Gene Symbol: FLOT1
  Gene Name: flotillin 1
  ENSP ID: ENSP00000409995

SEQ ID NO: 32364 - protein, 145 aa, Homo sapiens; identical to SEQ ID NO: 32333
  Payload ID: 6330
  Gene Symbol: FLOT1
  Gene Name: flotillin 1
  ENSP ID: ENSP00000410255

SEQ ID NO: 32365 - protein, 357 aa, Homo sapiens
  Payload ID: 6330
  Gene Symbol: FLOT1
  Gene Name: flotillin 1
  ENSP ID: ENSP00000410658
VKIQGQNKEMLAAACQMFLGKTEAEIAHIALETLEGHQRAIMAHMTVEEIYKDRQKFSEQVFKVASSDLVNMGISVVSYTLKDIHDDQDYLHSLGKARTAQVQKDARIGEAEAKRDAGIREAKAKQEKVSAQYLSEIEMAKAQRDYELKKAAYDIEVNTRRAQADLAYQLQVAKTKQQIEEQRVQVQVVERAQQVAVQEQEIARREKELEARVRKPAEAERYKLERLAEAEKSQLIMQAEAEAASVRMRGEAEAFAIGARARAEAEQMAKKAEAFQLYQEAAQLDMLLEKLPQVAEEISGPLTSANKITLVSSGSGTMGAAKVTGEVLDILTRLPESVERLTGVSISQVNHKPLRTA

SEQ ID NO: 32366 - protein, 252 aa, Homo sapiens; identical to SEQ ID NO: 32343
  Payload ID: 6330
  Gene Symbol: FLOT1
  Gene Name: flotillin 1
  ENSP ID: ENSP00000411030

SEQ ID NO: 32367 - protein, 192 aa, Homo sapiens; identical to SEQ ID NO: 32332
  Payload ID: 6330
  Gene Symbol: FLOT1
  Gene Name: flotillin 1
  ENSP ID: ENSP00000412058

SEQ ID NO: 32368 - protein, 185 aa, Homo sapiens; identical to SEQ ID NO: 32334
  Payload ID: 6330
  Gene Symbol: FLOT1
  Gene Name: flotillin 1
  ENSP ID: ENSP00000412484

SEQ ID NO: 32369 - protein, 235 aa, Homo sapiens; identical to SEQ ID NO: 32336
  Payload ID: 6330
  Gene Symbol: FLOT1
  Gene Name: flotillin 1
  ENSP ID: ENSP00000413293

SEQ ID NO: 32370 - protein, 145 aa, Homo sapiens; identical to SEQ ID NO: 32333
  Payload ID: 6330
  Gene Symbol: FLOT1
  Gene Name: flotillin 1
  ENSP ID: ENSP00000414435

SEQ ID NO: 32371 - protein, 238 aa, Homo sapiens; identical to SEQ ID NO: 32327
  Payload ID: 6330
  Gene Symbol: FLOT1
  Gene Name: flotillin 1
  ENSP ID: ENSP00000415094

SEQ ID NO: 32372 - protein, 231 aa, Homo sapiens
  Payload ID: 6330
  Gene Symbol: FLOT1
  Gene Name: flotillin 1
  ENSP ID: ENSP00000415104
VKIQGQNKEMLAAACQMFLGKTEAEIAHIALETLEGHQRAIMAHMTVEEIYKDRQKFSEQVFKVASSDLVNMGISVVSYTLKDIHDDQDYLHSLGKARTAQVQKDARIGEAEAKRDAGIREAKAKQEKVSAQYLSEIEMAKAQRDYELKKAAYDIEVNTRRAQADLAYQLQVAKTKQQIEEQRVQVQVVERAQQVAVQEQEIARREKELEARVRKPAEAERYKLERLAEAE

SEQ ID NO: 32373 - protein, 186 aa, Homo sapiens
  Payload ID: 6330
  Gene Symbol: FLOT1
  Gene Name: flotillin 1
  ENSP ID: ENSP00000415215
VAKTKQQIEEQRVQVQVVERAQQVAVQEQEIARREKELEARVRKPAEAERYKLERLAEAEKSQLIMQAEAEAASVRMRGEAEAFAIGARARAEAEQMAKKAEAFQLYQEAAQLDMLLEKLPQVAEEISGPLTSANKITLVSSGSGTMGAAKVTGEVLDILTRLPESVERLTGVSISQVNHKPLRTA

SEQ ID NO: 32374 - protein, 145 aa, Homo sapiens; identical to SEQ ID NO: 32333
  Payload ID: 6330
  Gene Symbol: FLOT1
  Gene Name: flotillin 1
  ENSP ID: ENSP00000416243

SEQ ID NO: 32375 - protein, 238 aa, Homo sapiens; identical to SEQ ID NO: 32327
  Payload ID: 6330
  Gene Symbol: FLOT1
  Gene Name: flotillin 1
  ENSP ID: ENSP00000416355

SEQ ID NO: 32376 - protein, 252 aa, Homo sapiens; identical to SEQ ID NO: 32343
  Payload ID: 6330
  Gene Symbol: FLOT1
  Gene Name: flotillin 1
  ENSP ID: ENSP00000416413

SEQ ID NO: 32377 - protein, 483 aa, Homo sapiens
  Payload ID: 6331
  Gene Symbol: FLOT2
  Gene Name: flotillin 2
  ENSP ID: ENSP00000378366
MGNCHTVGPNEALVVSGGCCGSDYKQYVFGGWAWAWWCISDTQRLSLEVMTILCRCENIETSEGVPLFVTGVAQVPCPCLLDCKWGNSKGFWKLCQVCQISLEIMTLQPRCEDVETAEGVALTVTGVAQVKIMTEKELLAVACEQFLGKNVQDIKNVVLQTLEGHLRSILGTLTVEQIYQDRDQFAKLVREVAAPDVGRMGIEILSFTIKDVYDKVDYLSSLGKTQTAVVQRDADIGVAEAERDAGIREAECKKEMLDVKFMADTKIADSKRAFELQKSAFSEEVNIKTAEAQLAYELQGAREQQKIRQEEIEIEVVQRKKQIAVEAQEILRTDKELIATVRRPAEAEAHRIQQIAEGEKVKQVLLAQAEAEKIRKIGEAEAAVIEAMGKAEAERMKLKAEAYQKYGDAAKMALVLEALPQIAAKIAAPLTKVDEIVVLSGDNSKVTSEVNRLLAELPASVHALTGVDLSKIPLIKKATGVQV

SEQ ID NO: 32378 - protein, 428 aa, Homo sapiens
  Payload ID: 6331
  Gene Symbol: FLOT2
  Gene Name: flotillin 2
  Uniprot ID: Q14254
  ENSP ID: ENSP00000378368
MGNCHTVGPNEALVVSGGCCGSDYKQYVFGGWAWAWWCISDTQRISLEIMTLQPRCEDVETAEGVALTVTGVAQVKIMTEKELLAVACEQFLGKNVQDIKNVVLQTLEGHLRSILGTLTVEQIYQDRDQFAKLVREVAAPDVGRMGIEILSFTIKDVYDKVDYLSSLGKTQTAVVQRDADIGVAEAERDAGIREAECKKEMLDVKFMADTKIADSKRAFELQKSAFSEEVNIKTAEAQLAYELQGAREQQKIRQEEIEIEVVQRKKQIAVEAQEILRTDKELIATVRRPAEAEAHRIQQIAEGEKVKQVLLAQAEAEKIRKIGEAEAAVIEAMGKAEAERMKLKAEAYQKYGDAAKMALVLEALPQIAAKIAAPLTKVDEIVVLSGDNSKVTSEVNRLLAELPASVHALTGVDLSKIPLIKKATGVQV

SEQ ID NO: 32379 - protein, 118 aa, Homo sapiens
  Payload ID: 6331
  Gene Symbol: FLOT2
  Gene Name: flotillin 2
  ENSP ID: ENSP00000463304
MGNCHTVGPNEALVVSGGCCGSDYKQYVFGGWAWAWWCISDTQRLSLEVMTILCRCENIETSEGVPLFVTGVAQDFPRDYDVAAPLRGRRDGRGGSFNCDGCRPGEDHDGEGTPGRGL

SEQ ID NO: 32380 - protein, 428 aa, Homo sapiens
  Payload ID: 6331
  Gene Symbol: FLOT2
  Gene Name: flotillin 2
  ENSP ID: ENSP00000463503
MGNCHTVGPNEALVVSGGCCGSDYKQYVFGGWAWAWWCISDTQRLSLEVMTILCRCENIETSEGVPLFVTGVAQVKIMTEKELLAVACEQFLGKNVQDIKNVVLQTLEGHLRSILGTLTVEQIYQDRDQFAKLVREVAAPDVGRMGIEILSFTIKDVYDKVDYLSSLGKTQTAVVQRDADIGVAEAERDAGIREAECKKEMLDVKFMADTKIADSKRAFELQKSAFSEEVNIKTAEAQLAYELQGAREQQKIRQEEIEIEVVQRKKQIAVEAQEILRTDKELIATVRRPAEAEAHRIQQIAEGEKVKQVLLAQAEAEKIRKIGEAEAAVIEAMGKAEAERMKLKAEAYQKYGDAAKMALVLEALPQIAAKIAAPLTKVDEIVVLSGDNSKVTSEVNRLLAELPASVHALTGVDLSKIPLIKKATGVQV

SEQ ID NO: 32381 - protein, 68 aa, Homo sapiens
  Payload ID: 6331
  Gene Symbol: FLOT2
  Gene Name: flotillin 2
  ENSP ID: ENSP00000465022
MGNCHTVGPNEALVVSGGCCGSDYKQYVFGGWAWAWWCISDTQRDPDSGADLSGPGPVCQAGAGGGSP

SEQ ID NO: 32382 - protein, 249 aa, Homo sapiens
  Payload ID: 6331
  Gene Symbol: FLOT2
  Gene Name: flotillin 2
  ENSP ID: ENSP00000465819
  MOD_RES (1)..(1): Any amino acid
XLSLEVMTILCRCENIETSEGVPLFVTGVAQVKIMTEKELLAVACEQFLGTLTVEQIYQDRDQFAKLVREVAAPDVGRMGIEILSFTIKDVYDKVDYLSSLGKTQTAVVQRDADIGVAEAERDAGIREAECKKEMLDVKFMADTKIADSKRAFELQKSAFSEEVNIKTAEAQLAYELQGAREQQKIRQEEIEIEVVQRKKQIAVEAQEILRTDKELIATVRRPAEAEAHRIQQIAEGEKVKQVLLAQAE

SEQ ID NO: 32383 - protein, 496 aa, Homo sapiens
  Payload ID: 6332
  Gene Symbol: FIZ1
  Gene Name: FLT3-interacting zinc finger 1
  Uniprot ID: Q96SL8
  ENSP ID: ENSP00000221665
MDDVPAPTPAPAPPAAAAPRVPFHCSECGKSFRYRSDLRRHFARHTALKPHACPRCGKGFKHSFNLANHLRSHTGERPYRCSACPKGFRDSTGLLHHQVVHTGEKPYCCLVCELRFSSRSSLGRHLKRQHRGVLPSPLQPGPGLPALSAPCSVCCNVGPCSVCGGSGAGGGEGPEGAGAGLGSWGLAEAAAAAAASLPPFACGACARRFDHGRELAAHWAAHTDVKPFKCPRCERDFNAPALLERHKLTHDLQGPGAPPAQAWAAGPGAGPETAGEGTAAEAGDAPLASDRRLLLGPAGGGVPKLGGLLPEGGGEAPAPAAAAEPSEDTLYQCDCGTFFASAAALASHLEAHSGPATYGCGHCGALYAALAALEEHRRVSHGEGGGEEAATAAREREPASGEPPSGSGRGKKIFGCSECEKLFRSPRDLERHVLVHTGEKPFPCLECGKFFRHECYLKRHRLLHGTERPFPCHICGKGFITLSNLSRHLKLHRGMD

SEQ ID NO: 32384 - protein, 193 aa, Homo sapiens
  Payload ID: 6332
  Gene Symbol: FIZ1
  Gene Name: FLT3-interacting zinc finger 1
  ENSP ID: ENSP00000465131
MDDVPAPTPAPAPPAAAAPRVPFHCSECGKSFRYRSDLRRHFARHTALKPHACPRCGKGFKHSFNLANHLRSHTGERPYRCSACPKGFRDSTGLLHHQVVHTGEKPYCCLVCELRFSSRSSLGRHLKRQHRGVLPSPLQPGPGLPALSAPCSVCCNVGPCSVCGGSGAGGGEGPEGAGAGLGSWGLAEAAAAA

SEQ ID NO: 32385 - protein, 44 aa, Homo sapiens
  Payload ID: 6332
  Gene Symbol: FIZ1
  Gene Name: FLT3-interacting zinc finger 1
  ENSP ID: ENSP00000468018
MDDVPAPTPAPAPPAAAAPRVPFHCSECGKSFRYRSDLRRHFAR

SEQ ID NO: 32386 - protein, 134 aa, Homo sapiens
  Payload ID: 6332
  Gene Symbol: FIZ1
  Gene Name: FLT3-interacting zinc finger 1
  ENSP ID: ENSP00000468342
  MOD_RES (1)..(1): Any amino acid
XPAPAPPAAAAPRVPFHCSECGKSFRYRSDLRRHFARHTALKPHACPRCGKGFKHSFNLANHLRSHTGERPYRCSACPKGFRDSTGLLHHQEAKQALEELEEGQCDWSMEKQKVWLRRSLESAGPWKYSCRPHW

SEQ ID NO: 32387 - protein, 68 aa, Homo sapiens
  Payload ID: 6332
  Gene Symbol: FIZ1
  Gene Name: FLT3-interacting zinc finger 1
  ENSP ID: ENSP00000468529
MDDVPAPTPAPAPPAAAAPRVPFHCSECGKSFRYRSDLRRHFARHTALNASTVGFSPLPCSPALACPP

SEQ ID NO: 32388 - protein, 140 aa, Homo sapiens
  Payload ID: 6333
  Gene Symbol: FLYWCH2
  Gene Name: FLYWCH family member 2
  Uniprot ID: Q96CP2
  ENSP ID: ENSP00000293981
MPLPEPSEQEGESVKASQEPSPKPGTEVIPAAPRKPRKFSKLVLLTASKDSTKVAGAKRKGVHCVMSLGVPGPATLAKALLQTHPEAQRAIEAAPQEPEQKRSRQDPGTDRTEDSGLAAGPPEAAGENFAPCSVAPGKSL

SEQ ID NO: 32389 - protein, 140 aa, Homo sapiens; identical to SEQ ID NO: 32388
  Payload ID: 6333
  Gene Symbol: FLYWCH2
  Gene Name: FLYWCH family member 2
  Uniprot ID: Q96CP2
  ENSP ID: ENSP00000380159

SEQ ID NO: 32390 - protein, 144 aa, Homo sapiens
  Payload ID: 6333
  Gene Symbol: FLYWCH2
  Gene Name: FLYWCH family member 2
  ENSP ID: ENSP00000459223
MPLPEPSEQEGESVKASQEPSPKPGTEVIPAAPRKPRKFSKLVLLTASKDSTKVAGAKRKGVHCVMSLGVPGPATLAKALLQTHPEAQRAIEAAPQEPEQKRSRQDPGEAPQRPPRTARHLPGWPPQPRWLHQALLPGMRVLVP

SEQ ID NO: 32391 - protein, 91 aa, Homo sapiens
  Payload ID: 6333
  Gene Symbol: FLYWCH2
  Gene Name: FLYWCH family member 2
  ENSP ID: ENSP00000461275
MPLPEPSEQEGESVKASQEPSPKPGTEVIPAAPRKPRKFSKLVLLTASKDSTKVAGAKRKGVHCVMSLGVPGPATLAKALLQTHPEAQRAI

SEQ ID NO: 32392 - protein, 716 aa, Homo sapiens
  Payload ID: 6334
  Gene Symbol: FLYWCH1
  Gene Name: FLYWCH-type zinc finger 1
  Uniprot ID: Q4VC44
  ENSP ID: ENSP00000253928
MPLPEPSEQEGESVKAGQEPSPKPGTDVIPAAPRKPREFSKLVLLTASDQDEDGVGSKPQEVHCVLSLEMAGPATLASTLQILPVEEQGGVVQPALEMPEQKCSKLDAAAPQSLEFLRTPFGGRLLVLESFLYKQEKAVGDKVYWKCRQHAELGCRGRAITRGLRATVMRGHCHAPDEQGLEARRQREKLPSLALPEGLGEPQGPEGPGGRVEEPLEGVGPWQCPEEPEPTPGLVLSKPALEEEEAPRALSLLSLPPKKRSILGLGQARPLEFLRTCYGGSFLVHESFLYKREKAVGDKVYWTCRDHALHGCRSRAITQGQRVTVMRGHCHQPDMEGLEARRQQEKAVETLQAGQDGPGSQVDTLLRGVDSLLYRRGPGPLTLTRPRPRKRAKVEDQELPTQPEAPDEHQDMDADPGGPEFLKTPLGGSFLVYESFLYRREKAAGEKVYWTCRDQARMGCRSRAITQGRRVTVMRGHCHPPDLGGLEALRQREKRPNTAQRGSPGGPEFLKTPLGGSFLVYESFLYRREKAAGEKVYWTCRDQARMGCRSRAITQGRRVMVMRRHCHPPDLGGLEALRQREHFPNLAQWDSPDPLRPLEFLRTSLGGRFLVHESFLYRKEKAAGEKVYWMCRDQARLGCRSRAITQGHRIMVMRSHCHQPDLAGLEALRQRERLPTTAQQEDPEKIQVQLCFKTCSPESQQIYGDIKDVRLDGESQ

SEQ ID NO: 32393 - protein, 494 aa, Homo sapiens
  Payload ID: 6334
  Gene Symbol: FLYWCH1
  Gene Name: FLYWCH-type zinc finger 1
  ENSP ID: ENSP00000344122
  MOD_RES (1)..(1): Any amino acid
XFLRTCYGGSFLVHESFLYKREKAVGDKVYWTCRDHALHGCRSRAITQGQRVTVMRGHCHQPDMEGLEARRQQEKAVETLQAGQDGPGSQVDTLLRGVDSLLYRRGPGPLTLTRPRPRKRAKVEDQELPTQPEAPDEHQDMDADPGGPEFLKTPLGGSFLVYESFLYRREKAAGEKVYWTCRDQARMGCRSRAITQGRRVTVMRGHCHPPDLGGLEALRQREKRPNTAQRGSPGAGLSFQWLFRILQLLGHAPVLLCPSGSSCLPSLPAPHGPCPALSIPLEGGPEFLKTPLGGSFLVYESFLYRREKAAGEKVYWTCRDQARMGCRSRAITQGRRVMVMRRHCHPPDLGGLEALRQREHFPNLAQWDSPDPLRPLEFLRTSLGGRFLVHESFLYRKEKAAGEKVYWMCRDQARLGCRSRAITQGHRIMVMRSHCHQPDLAGLEALRQRERLPTTAQQEDPEKIQVQLCFKTCSPESQQIYGDIKDVRLDGESQ

SEQ ID NO: 32394 - protein, 715 aa, Homo sapiens
  Payload ID: 6334
  Gene Symbol: FLYWCH1
  Gene Name: FLYWCH-type zinc finger 1
  Uniprot ID: Q4VC44
  ENSP ID: ENSP00000399938
MPLPEPSEQEGESVKAGQEPSPKPGTDVIPAAPRKPREFSKLVLLTASDQDEDGVGSKPQEVHCVLSLEMAGPATLASTLQILPVEEQGGVVQPALEMPEQKCSKLDAAPQSLEFLRTPFGGRLLVLESFLYKQEKAVGDKVYWKCRQHAELGCRGRAITRGLRATVMRGHCHAPDEQGLEARRQREKLPSLALPEGLGEPQGPEGPGGRVEEPLEGVGPWQCPEEPEPTPGLVLSKPALEEEEAPRALSLLSLPPKKRSILGLGQARPLEFLRTCYGGSFLVHESFLYKREKAVGDKVYWTCRDHALHGCRSRAITQGQRVTVMRGHCHQPDMEGLEARRQQEKAVETLQAGQDGPGSQVDTLLRGVDSLLYRRGPGPLTLTRPRPRKRAKVEDQELPTQPEAPDEHQDMDADPGGPEFLKTPLGGSFLVYESFLYRREKAAGEKVYWTCRDQARMGCRSRAITQGRRVTVMRGHCHPPDLGGLEALRQREKRPNTAQRGSPGGPEFLKTPLGGSFLVYESFLYRREKAAGEKVYWTCRDQARMGCRSRAITQGRRVMVMRRHCHPPDLGGLEALRQREHFPNLAQWDSPDPLRPLEFLRTSLGGRFLVHESFLYRKEKAAGEKVYWMCRDQARLGCRSRAITQGHRIMVMRSHCHQPDLAGLEALRQRERLPTTAQQEDPEKIQVQLCFKTCSPESQQIYGDIKDVRLDGESQ

SEQ ID NO: 32395 - protein, 47 aa, Homo sapiens
  Payload ID: 6334
  Gene Symbol: FLYWCH1
  Gene Name: FLYWCH-type zinc finger 1
  ENSP ID: ENSP00000458282
MPLPEPSEQEGESVKAGQEPSPKPGTDVIPAAPRKPREFSKLVLLTA

SEQ ID NO: 32396 - protein, 467 aa, Homo sapiens
  Payload ID: 6334
  Gene Symbol: FLYWCH1
  Gene Name: FLYWCH-type zinc finger 1
  ENSP ID: ENSP00000458661
  MOD_RES (1)..(1): Any amino acid
XPALEEEEAPRALSLLSLPPKKRSILGLGQARPLEFLRTCYGGSFLVHESFLYKREKAVGDKVYWTCRDHALHGCRSRAITQGQRVTVMRGHCHQPDMEGLEARRQQEKAVETLQAGQDGPGSQVDTLLRGVDSLLYRRGPGPLTLTRPRPRKRAKVEDQELPTQPEAPDEHQDMDADPGGPEFLKTPLGGSFLVYESFLYRREKAAGEKVYWTCRDQARMGCRSRAITQGRRVTVMRGHCHPPDLGGLEALRQREKRPNTAQRGSPGGPEFLKTPLGGSFLVYESFLYRREKAAGEKVYWTCRDQARMGCRSRAITQGRRVMVMRRHCHPPDLGGLEALRQREHFPNLAQWDSPDPLRPLEFLRTSLGGRFLVHESFLYRKEKAAGEKVYWMCRDQARLGCRSRAITQGHRIMVMRSHCHQPDLAGLEALRQRERLPTTAQQEDPEKIQVQLCFKTCSPESQQIYG

SEQ ID NO: 32397 - protein, 78 aa, Homo sapiens
  Payload ID: 6334
  Gene Symbol: FLYWCH1
  Gene Name: FLYWCH-type zinc finger 1
  ENSP ID: ENSP00000458689
  MOD_RES (1)..(1): Any amino acid
XQARLGCRSRAITQGHRIMVMRSHCHQPDLAGLEALRQRERLPTTAQQEDPEKIQVQLCFKTCSPESQQIYGKSQPLV

SEQ ID NO: 32398 - protein, 77 aa, Homo sapiens
  Payload ID: 6334
  Gene Symbol: FLYWCH1
  Gene Name: FLYWCH-type zinc finger 1
  ENSP ID: ENSP00000459326
MPLPEPSEQEGESVKAGQEPSPKPGTDVIPAAPRKPREFSKLVLLTASDQDEDGVGSKPQEVHCVLSLEMAGPATLA

SEQ ID NO: 32399 - protein, 93 aa, Homo sapiens
  Payload ID: 6334
  Gene Symbol: FLYWCH1
  Gene Name: FLYWCH-type zinc finger 1
  ENSP ID: ENSP00000459480
  MOD_RES (1)..(1): Any amino acid
XALRQRERLPTTAQQEDPEKIQVQLCFKTCSPESQQIYGDIKDVRLDASMVFASPQEVSQEEFLDGVLMSAENSAQSWRLQTQLSWGRAVAPS

SEQ ID NO: 32400 - protein, 198 aa, Homo sapiens
  Payload ID: 6334
  Gene Symbol: FLYWCH1
  Gene Name: FLYWCH-type zinc finger 1
  ENSP ID: ENSP00000461566
  MOD_RES (1)..(1): Any amino acid
XGEKVYWTCRDQARMGCRSRAITQGRRVTVMRGHCHPPDLGGLEALRQREKRPNTAQRGSPERQCCEVPASSSPPLLTPQSPGVTPLPARLSGATPLSPIRLLSSFVPRGPRVIPLTNQARRTLHASLGGCWGRTSDAADTASLKAWQGGPEFLKTPLGGSFLVYESFLYRREKAAGEKVYWTCRDQARMGCRSRAIT

SEQ ID NO: 32401 - protein, 662 aa, Homo sapiens
  Payload ID: 6335
  Gene Symbol:
  Gene Name: FMN1
  ENSP ID: ENSP00000487643
MEGTHCTLQLHKPITELCYISFCLPKGEVRGFSYKGTVTLDRSNKGFHNCYQVREESDIISLSQEPDEHPGDIFFKQTPTKDILTELYKLTTERERLLTNLLSSDHILGITMGNQEGKLQELSVSLAPEDDCFQSAGDWQGELPVGPLNKRSTHGNKKPRRSSGRRESFGALPQKRTKRKGRGGRESAPLMGKDKICSSHSLPLSRTRPNLWVLEEKGNLLPNGALACSLQRRESCPPDIPKTPDTDLGFGSFETAFKDTGLGREVLPPDCSSTEAGGDGIRRPPSGLEHQQTGLSESHQDPEKHPEAEKDEMEKPAKRTCKQKPVSKVVAKVQDLSSQVQRVVKTHSKGKETIAIRPAAHAEFVPKADLLTLPGAEAGAHGSRRQGKERQGDRSSQSPAGETASISSVSASAEGAVNKVPLKVIESEKLDEAPEGKRLGFPVHTSVPHTRPETRNKRRAGLPLGGHKSLFLDLPHKVGPDSSQPRGDKKKPSPPAPAALGKVFNNSASQSSTHKQTSPVPSPLSPRLPSPQQHHRILRLPALPGEREAALNDSPCRKSRVFSGCVSADTLEPPSSAKVTETKGASPAFLRAGQPRLVPGETLEKSLGPGKTTAEPQHQSPPAFHWDLQQHFQEPVIRTVSISCASNLIKEEAGKGKESRSG

SEQ ID NO: 32402 - protein, 1321 aa, Homo sapiens
  Payload ID: 6335
  Gene Symbol:
  Gene Name: FMN1
  ENSP ID: ENSP00000487766
MEGTHCTLQLHKPITELCYISFCLPKGEVRGFSYKGTVTLDRSNKGFHNCYQVREESDIISLSQEPDEHPGDIFFKQTPTKDILTELYKLTTERERLLTNLLSSDHILGITMGNQEGKLQELSVSLAPEDDCFQSAGDWQGELPVGPLNKRSTHGNKKPRRSSGRRESFGALPQKRTKRKGRGGRESAPLMGKDKICSSHSLPLSRTRPNLWVLEEKGNLLPNGALACSLQRRESCPPDIPKTPDTDLGFGSFETAFKDTGLGREVLPPDCSSTEAGGDGIRRPPSGLEHQQTGLSESHQDPEKHPEAEKDEMEKPAKRTCKQKPVSKVVAKVQDLSSQVQRVVKTHSKGKETIAIRPAAHAEFVPKADLLTLPGAEAGAHGSRRQGKERQGDRSSQSPAGETASISSVSASAEGAVNKVPLKVIESEKLDEAPEGKRLGFPVHTSVPHTRPETRNKRRAGLPLGGHKSLFLDLPHKVGPDSSQPRGDKKKPSPPAPAALGKVFNNSASQSSTHKQTSPVPSPLSPRLPSPQQHHRILRLPALPGEREAALNDSPCRKSRVFSGCVSADTLEPPSSAKVTETKGASPAFLRAGQPRLVPGETLEKSLGPGKTTAEPQHQSPPEYQAAILHLKREHKEEIENLQAQFELRAFHIRGEHAMITARLEETIENLKHELEHRWRGGCEERKDVCISTDDDCPPKTFRNVCVQTDRETFLKPCESESKTTRSNQLVPKKLNISSLSQLSPPNDHKDIHAALQPMEGMASNQQKALPPPPASIPPPPPLPSGLGSLSPAPPMPPVSAGPPLPPPPPPPPPLPPPSSAGPPPPPPPPPLPNSPAPPNPGGPPPAPPPPGLAPPPPPGLFFGLGSSSSQCPRKPAIEPSCPMKPLYWTRIQISDRSQNATPTLWDSLEEPDIRDPSEFEYLFSKDTTQQKKKPLSETYEKKNKVKKIIKLLDGKRSQTVGILISSLHLEMKDIQQAIFNVDDSVVDLETLAALYENRAQEDELVKIRKYYETSKEEELKLLDKPEQFLHELAQIPNFAERAQCIIFRSVFSEGITSLHRKVEIITRASKDLLHVKSVKDILALILAFGNYMNGGNRTRGQADGYSLEILPKLKDVKSRDNGINLVDYVVKYYLRYYDQEAGTEKSVFPLPEPQDFFLASQVKFEDLIKDLRKLKRQLEASEKQMVVVCKESPKEYLQPFKDKLEEFFQKAKKEHKMEESHLENAQKSFETTVRYFGMKPKSGEKEITPSYVFMVWYEFCSDFKTIWKRESKNISKERLKMAQESVSKLTSEKKVETKKINPTASLKERLRQKEASVTTN

SEQ ID NO: 32403 - protein, 1196 aa, Homo sapiens
  Payload ID: 6335
  Gene Symbol:
  Gene Name: FMN1
  ENSP ID: ENSP00000488198
MENVDNSLDGSDVSEPAKPEAGLEVAQSILSKFSMKSLFGFTSKLESVNPEEEDAVLKAFHSLDVNPTSQQDDSSNGLDPQEAGSRVSPDLGNDEKIASVETESEGSQRKEAGTSLLAQELLPLSTLKGTKDDVICVRGTLVHTTSDSDSDDGGQEPEEGSSTNGPKSPSGVLSEPSQESKENPGGFRENTVTGEMNGAELCAEDPQRIPPEMSSKLEAGNGGLQTERRPSQDQVGEEGSQDLPAVTNQNSSVGITESASSKKEVSGEKSFQLPAFFSGLRVLKKGATAEGGETITEIKPKDGDLALLKLTQPVQKSLVQAGLQTVKSEKKATDPKATPTLLEQLSLLLNIDMPKTEPKGADPESPRREEMGCNADQESQSGPGVPQTQGGEVKPKSPETALEAFKALFIRPPRKGTTADTSELEALKRKMRHEKESLRAVFERSNSKPADGPSDSKSPDHSLTEQDDRTPGRLQAVWPPPKTKDTEEKVGLKYTEAEYQAAILHLKREHKEEIENLQAQFELRAFHIRGEHAMITARLEETIENLKHELEHRWRGGCEERKDVCISTDDDCPPKTFRNVCVQTDRETFLKPCESESKTTRSNQLVPKKLNISSLSQLSPPNDHKDIHAALQPMEGMASNQQKALPPPPASIPPPPPLPSGLGSLSPAPPMPPVSAGPPLPPPPPPPPPLPPPSSAGPPPPPPPPPLPNSPAPPNPGGPPPAPPPPGLAPPPPPGLFFGLGSSSSQCPRKPAIEPSCPMKPLYWTRIQISDRSQNATPTLWDSLEEPDIRDPSEFEYLFSKDTTQQKKKPLSETYEKKNKVKKIIKLLDGKRSQTVGILISSLHLEMKDIQQAIFNVDDSVVDLETLAALYENRAQEDELVKIRKYYETSKEEELKLLDKPEQFLHELAQIPNFAERAQCIIFRSVFSEGITSLHRKVEIITRASKDLLHVKSVKDILALILAFGNYMNGGNRTRGQADGYSLEILPKLKDVKSRDNGINLVDYVVKYYLRYYDQEAGTEKSVFPLPEPQDFFLASQVKFEDLIKDLRKLKRQLEASEKQMVVVCKESPKEYLQPFKDKLEEFFQKAKKEHKMEESHLENAQKSFETTVRYFGMKPKSGEKEITPSYVFMVWYEFCSDFKTIWKRESKNISKERLKMAQESVSKLTSEKKVETKKINPTASLKERLRQKEASVTTN

SEQ ID NO: 32404 - protein, 1419 aa, Homo sapiens
  Payload ID: 6335
  Gene Symbol:
  Gene Name: FMN1
  ENSP ID: ENSP00000488300
MEGTHCTLQLHKPITELCYISFCLPKGEVRGFSYKGTVTLDRSNKGFHNCYQVREESDIISLSQEPDEHPGDIFFKQTPTKDILTELYKLTTERERLLTNLLSSDHILGITMGNQEGKLQELSVSLAPEDDCFQSAGDWQGELPVGPLNKRSTHGNKKPRRSSGRRESFGALPQKRTKRKGRGGRESAPLMGKDKICSSHSLPLSRTRPNLWVLEEKGNLLPNGALACSLQRRESCPPDIPKTPDTDLGFGSFETAFKDTGLGREVLPPDCSSTEAGGDGIRRPPSGLEHQQTGLSESHQDPEKHPEAEKDEMEKPAKRTCKQKPVSKVVAKVQDLSSQVQRVVKTHSKGKETIAIRPAAHAEFVPKADLLTLPGAEAGAHGSRRQGKERQGDRSSQSPAGETASISSVSASAEGAVNKVPLKVIESEKLDEAPEGKRLGFPVHTSVPHTRPETRNKRRAGLPLGGHKSLFLDLPHKVGPDSSQPRGDKKKPSPPAPAALGKVFNNSASQSSTHKQTSPVPSPLSPRLPSPQQHHRILRLPALPGEREAALNDSPCRKSRVFSGCVSADTLEPPSSAKVTETKGASPAFLRAGQPRLVPGETLEKSLGPGKTTAEPQHQSPPGISSEGFPWDGFNEQTPKDLPNRDGGAWVLGYRAGPACPFLLHEEREKSNRSELYLDLHPDHSLTEQDDRTPGRLQAVWPPPKTKDTEEKVGLKYTEAEYQAAILHLKREHKEEIENLQAQFELRAFHIRGEHAMITARLEETIENLKHELEHRWRGGCEERKDVCISTDDDCPPKTFRNVCVQTDRETFLKPCESESKTTRSNQLVPKKLNISSLSQLSPPNDHKDIHAALQPMEGMASNQQKALPPPPASIPPPPPLPSGLGSLSPAPPMPPVSAGPPLPPPPPPPPPLPPPSSAGPPPPPPPPPLPNSPAPPNPGGPPPAPPPPGLAPPPPPGLFFGLGSSSSQCPRKPAIEPSCPMKPLYWTRIQISDRSQNATPTLWDSLEEPDIRDPSEFEYLFSKDTTQQKKKPLSETYEKKNKVKKIIKLLDGKRSQTVGILISSLHLEMKDIQQAIFNVDDSVVDLETLAALYENRAQEDELVKIRKYYETSKEEELKLLDKPEQFLHELAQIPNFAERAQCIIFRSVFSEGITSLHRKVEIITRASKDLLHVKSVKDILALILAFGNYMNGGNRTRGQADGYSLEILPKLKDVKSRDNGINLVDYVVKYYLRYYDQEAGTEKSVFPLPEPQDFFLASQVKFEDLIKDLRKLKRQLEASEKQMVVVCKESPKEYLQPFKDKLEEFFQKAKKEHKMEESHLENAQKSFETTVRYFGMKPKSGEKEITPSYVFMVWYEFCSDFKTIWKRESKNISKERLKMAQESVSKLTSEKKVETKKINPTASLKERLRQKEASVTTN

SEQ ID NO: 32405 - protein, 58 aa, Homo sapiens
  Payload ID: 6335
  Gene Symbol:
  Gene Name: FMN1
  ENSP ID: ENSP00000488453
  MOD_RES (1)..(1): Any amino acid
XFLHELAQIPNFAERAQCIIFRSVFSEGITSLHRKVEIITRASKQLLILLVPSLPTAY

SEQ ID NO: 32406 - protein, 1419 aa, Homo sapiens; identical to SEQ ID NO: 32404
  Payload ID: 6335
  Gene Symbol:
  Gene Name: FMN1
  ENSP ID: ENSP00000488532

SEQ ID NO: 32407 - protein, 181 aa, Homo sapiens
  Payload ID: 6335
  Gene Symbol:
  Gene Name: FMN1
  ENSP ID: ENSP00000488562
  MOD_RES (1)..(1): Any amino acid
XIKLLDGKRSQTVGILISSLHLEMKDIQQAIFNVDDSVVDLETLAALYENRAQEDELVKIRKYYETSKEEELKLLDKPEQFLHELAQIPNFAERAQCIIFRSVFSEGITSLHRKVEIITRASKDLLHVKSVKDILALILAFGNYMNGGNRTRGQADGYSLEILPKLKDVKSRVFIFHNKFP

SEQ ID NO: 32408 - protein, 114 aa, Homo sapiens
  Payload ID: 6335
  Gene Symbol:
  Gene Name: FMN1
  ENSP ID: ENSP00000488762
  MOD_RES (1)..(1): Any amino acid
XPQDFFLASQVKFEDLIKDLRKLKRQLEASEKQMVVVCKESPKEYLQPFKDKLEEFFQKGHPFPMSACCASVGVKHLFLLESAQRGFSKKWKTIATLTSDGSHVKQSAVPLFPR

SEQ ID NO: 32409 - protein, 503 aa, Homo sapiens
  Payload ID: 6335
  Gene Symbol:
  Gene Name: FMN1
  ENSP ID: ENSP00000488866
MENVDNSLDGSDVSEPAKPEAGLEVAQSILSKFSMKSLFGFTSKLESVNPEEEDAVLKAFHSLDVNPTSQQDDSSNGLDPQEAGSRVSPDLGNDEKIASVETESEGSQRKEAGTSLLAQELLPLSTLKGTKDDVICVRGTLVHTTSDSDSDDGGQEPEEGSSTNGPKSPSGVLSEPSQESKENPGGFRENTVTGEMNGAELCAEDPQRIPPEMSSKLEAGNGGLQTERRPSQDQVGEEGSQDLPAVTNQNSSVGITESASSKKEVSGEKSFQLPAFFSGLRVLKKGATAEGGETITEIKPKDGDLALLKLTQPVQKSLVQAGLQTVKSEKKATDPKATPTLLEQLSLLLNIDMPKTEPKGADPESPRREEMGCNADQESQSGPGVPQTQGGEVKPKSPETALEAFKALFIRPPRKGTTADTSELEALKRKMRHEKESLRAVFERSNSKPADGPSDSKSPDHSLTEQDDRTPGRLQAVWPPPKTKDTEEKVGLKYTEAGNVKGS

SEQ ID NO: 32410 - protein, 1338 aa, Homo sapiens
  Payload ID: 6336
  Gene Symbol: FLT1
  Gene Name: fms-related tyrosine kinase 1
  Uniprot ID: P17948
  ENSP ID: ENSP00000282397
MVSYWDTGVLLCALLSCLLLTGSSSGSKLKDPELSLKGTQHIMQAGQTLHLQCRGEAAHKWSLPEMVSKESERLSITKSACGRNGKQFCSTLTLNTAQANHTGFYSCKYLAVPTSKKKETESAIYIFISDTGRPFVEMYSEIPEIIHMTEGRELVIPCRVTSPNITVTLKKFPLDTLIPDGKRIIWDSRKGFIISNATYKEIGLLTCEATVNGHLYKTNYLTHRQTNTIIDVQISTPRPVKLLRGHTLVLNCTATTPLNTRVQMTWSYPDEKNKRASVRRRIDQSNSHANIFYSVLTIDKMQNKDKGLYTCRVRSGPSFKSVNTSVHIYDKAFITVKHRKQQVLETVAGKRSYRLSMKVKAFPSPEVVWLKDGLPATEKSARYLTRGYSLIIKDVTEEDAGNYTILLSIKQSNVFKNLTATLIVNVKPQIYEKAVSSFPDPALYPLGSRQILTCTAYGIPQPTIKWFWHPCNHNHSEARCDFCSNNEESFILDADSNMGNRIESITQRMAIIEGKNKMASTLVVADSRISGIYICIASNKVGTVGRNISFYITDVPNGFHVNLEKMPTEGEDLKLSCTVNKFLYRDVTWILLRTVNNRTMHYSISKQKMAITKEHSITLNLTIMNVSLQDSGTYACRARNVYTGEEILQKKEITIRDQEAPYLLRNLSDHTVAISSSTTLDCHANGVPEPQITWFKNNHKIQQEPGIILGPGSSTLFIERVTEEDEGVYHCKATNQKGSVESSAYLTVQGTSDKSNLELITLTCTCVAATLFWLLLTLFIRKMKRSSSEIKTDYLSIIMDPDEVPLDEQCERLPYDASKWEFARERLKLGKSLGRGAFGKVVQASAFGIKKSPTCRTVAVKMLKEGATASEYKALMTELKILTHIGHHLNVVNLLGACTKQGGPLMVIVEYCKYGNLSNYLKSKRDLFFLNKDAALHMEPKKEKMEPGLEQGKKPRLDSVTSSESFASSGFQEDKSLSDVEEEEDSDGFYKEPITMEDLISYSFQVARGMEFLSSRKCIHRDLAARNILLSENNVVKICDFGLARDIYKNPDYVRKGDTRLPLKWMAPESIFDKIYSTKSDVWSYGVLLWEIFSLGGSPYPGVQMDEDFCSRLREGMRMRAPEYSTPEIYQIMLDCWHRDPKERPRFAELVEKLGDLLQANVQQDGKDYIPINAILTGNSGFTYSTPAFSEDFFKESISAPKFNSGSSDDVRYVNAFKFMSLERIKTFEELLPNATSMFDDYQGDSSTLLASPMLKRFTWTDSKPKASLKIDLRVTSKSKESGLSDVSRPSFCHSSCGHVSEGKRRFTYDHAELERKIACCSPPPDYNSVVLYSTPPI

SEQ ID NO: 32411 - protein, 733 aa, Homo sapiens
  Payload ID: 6336
  Gene Symbol: FLT1
  Gene Name: fms-related tyrosine kinase 1
  Uniprot ID: P17948
  ENSP ID: ENSP00000437631
MVSYWDTGVLLCALLSCLLLTGSSSGSKLKDPELSLKGTQHIMQAGQTLHLQCRGEAAHKWSLPEMVSKESERLSITKSACGRNGKQFCSTLTLNTAQANHTGFYSCKYLAVPTSKKKETESAIYIFISDTGRPFVEMYSEIPEIIHMTEGRELVIPCRVTSPNITVTLKKFPLDTLIPDGKRIIWDSRKGFIISNATYKEIGLLTCEATVNGHLYKTNYLTHRQTNTIIDVQISTPRPVKLLRGHTLVLNCTATTPLNTRVQMTWSYPDEKNKRASVRRRIDQSNSHANIFYSVLTIDKMQNKDKGLYTCRVRSGPSFKSVNTSVHIYDKAFITVKHRKQQVLETVAGKRSYRLSMKVKAFPSPEVVWLKDGLPATEKSARYLTRGYSLIIKDVTEEDAGNYTILLSIKQSNVFKNLTATLIVNVKPQIYEKAVSSFPDPALYPLGSRQILTCTAYGIPQPTIKWFWHPCNHNHSEARCDFCSNNEESFILDADSNMGNRIESITQRMAIIEGKNKMASTLVVADSRISGIYICIASNKVGTVGRNISFYITDVPNGFHVNLEKMPTEGEDLKLSCTVNKFLYRDVTWILLRTVNNRTMHYSISKQKMAITKEHSITLNLTIMNVSLQDSGTYACRARNVYTGEEILQKKEITIRDQEAPYLLRNLSDHTVAISSSTTLDCHANGVPEPQITWFKNNHKIQQEPELYTSTSPSSSSSSPLSSSSSSSSSSSS

SEQ ID NO: 32412 - protein, 361 aa, Homo sapiens
  Payload ID: 6336
  Gene Symbol: FLT1
  Gene Name: fms-related tyrosine kinase 1
  Uniprot ID: P17948
  ENSP ID: ENSP00000437841
MNSDLLVDSDGFYKEPITMEDLISYSFQVARGMEFLSSRKCIHRDLAARNILLSENNVVKICDFGLARDIYKNPDYVRKGDTRLPLKWMAPESIFDKIYSTKSDVWSYGVLLWEIFSLGGSPYPGVQMDEDFCSRLREGMRMRAPEYSTPEIYQIMLDCWHRDPKERPRFAELVEKLGDLLQANVQQDGKDYIPINAILTGNSGFTYSTPAFSEDFFKESISAPKFNSGSSDDVRYVNAFKFMSLERIKTFEELLPNATSMFDDYQGDSSTLLASPMLKRFTWTDSKPKASLKIDLRVTSKSKESGLSDVSRPSFCHSSCGHVSEGKRRFTYDHAELERKIACCSPPPDYNSVVLYSTPPI

SEQ ID NO: 32413 - protein, 541 aa, Homo sapiens
  Payload ID: 6336
  Gene Symbol: FLT1
  Gene Name: fms-related tyrosine kinase 1
  Uniprot ID: P17948
  ENSP ID: ENSP00000442630
MVSYWDTGVLLCALLSCLLLTGSSSGSKLKDPELSLKGTQHIMQAGQTLHLQCRGEAAHKWSLPEMVSKESERLSITKSACGRNGKQFCSTLTLNTAQANHTGFYSCKYLAVPTSKKKETESAIYIFISDTGRPFVEMYSEIPEIIHMTEGRELVIPCRVTSPNITVTLKKFPLDTLIPDGKRIIWDSRKGFIISNATYKEIGLLTCEATVNGHLYKTNYLTHRQTNTIIDVQISTPRPVKLLRGHTLVLNCTATTPLNTRVQMTWSYPDEKNKRASVRRRIDQSNSHANIFYSVLTIDKMQNKDKGLYTCRVRSGPSFKSVNTSVHIYDKAFITVKHRKQQVLETVAGKRSYRLSMKVKAFPSPEVVWLKDGLPATEKSARYLTRGYSLIIKDVTEEDAGNYTILLSIKQSNVFKNLTATLIVNVKPQIYEKAVSSFPDPALYPLGSRQILTCTAYGIPQPTIKWFWHPCNHNHSEARCDFCSNNEESFILDADSNMGNRIESITQRMAIIEGKNKLPPANSSFMLPPTSFSSNYFHFLP

SEQ ID NO: 32414 - protein, 85 aa, Homo sapiens
  Payload ID: 6336
  Gene Symbol: FLT1
  Gene Name: fms-related tyrosine kinase 1
  ENSP ID: ENSP00000443311
MLKRFTWTDSKPKASLKIDLRVTSKSKESGLSDVSRPSFCHSSCGHVSEGKRRFTYDHAELERKIACCSPPPDYNSVVLYSTPPI

SEQ ID NO: 32415 - protein, 687 aa, Homo sapiens
  Payload ID: 6336
  Gene Symbol: FLT1
  Gene Name: fms-related tyrosine kinase 1
  Uniprot ID: P17948
  ENSP ID: ENSP00000484039
MVSYWDTGVLLCALLSCLLLTGSSSGSKLKDPELSLKGTQHIMQAGQTLHLQCRGEAAHKWSLPEMVSKESERLSITKSACGRNGKQFCSTLTLNTAQANHTGFYSCKYLAVPTSKKKETESAIYIFISDTGRPFVEMYSEIPEIIHMTEGRELVIPCRVTSPNITVTLKKFPLDTLIPDGKRIIWDSRKGFIISNATYKEIGLLTCEATVNGHLYKTNYLTHRQTNTIIDVQISTPRPVKLLRGHTLVLNCTATTPLNTRVQMTWSYPDEKNKRASVRRRIDQSNSHANIFYSVLTIDKMQNKDKGLYTCRVRSGPSFKSVNTSVHIYDKAFITVKHRKQQVLETVAGKRSYRLSMKVKAFPSPEVVWLKDGLPATEKSARYLTRGYSLIIKDVTEEDAGNYTILLSIKQSNVFKNLTATLIVNVKPQIYEKAVSSFPDPALYPLGSRQILTCTAYGIPQPTIKWFWHPCNHNHSEARCDFCSNNEESFILDADSNMGNRIESITQRMAIIEGKNKMASTLVVADSRISGIYICIASNKVGTVGRNISFYITDVPNGFHVNLEKMPTEGEDLKLSCTVNKFLYRDVTWILLRTVNNRTMHYSISKQKMAITKEHSITLNLTIMNVSLQDSGTYACRARNVYTGEEILQKKEITIRGEHCNKKAVFSRISKFKSTRNDCTTQSNVKH

SEQ ID NO: 32416 - protein, 433 aa, Homo sapiens
  Payload ID: 6336
  Gene Symbol: FLT1
  Gene Name: fms-related tyrosine kinase 1
  ENSP ID: ENSP00000484385
MVIVEYCKYGNLSNYLKSKRDLFFLNKDAALHMEPKKEKMEPGLEQGKKPRLDSVTSSESFASSGFQEDKSLSDVEEEEDSDGFYKEPITMEDLISYSFQVARGMEFLSSRKCIHRDLAARNILLSENNVVKICDFGLARDIYKNPDYVRKGDTRLPLKWMAPESIFDKIYSTKSDVWSYGVLLWEIFSLGGSPYPGVQMDEDFCSRLREGMRMRAPEYSTPEIYQIMLDCWHRDPKERPRFAELVEKLGDLLQANVQQDGKDYIPINAILTGNSGFTYSTPAFSEDFFKESISAPKFNSGSSDDVRYVNAFKFMSLERIKTFEELLPNATSMFDDYQGDSSTLLASPMLKRFTWTDSKPKASLKIDLRVTSKSKESGLSDVSRPSFCHSSCGHVSEGKRRFTYDHAELERKIACCSPPPDYNSVVLYSTPPI

SEQ ID NO: 32417 - protein, 85 aa, Homo sapiens; identical to SEQ ID NO: 32414
  Payload ID: 6336
  Gene Symbol: FLT1
  Gene Name: fms-related tyrosine kinase 1
  ENSP ID: ENSP00000484832

SEQ ID NO: 32418 - protein, 993 aa, Homo sapiens
  Payload ID: 6337
  Gene Symbol: FLT3
  Gene Name: fms-related tyrosine kinase 3
  Uniprot ID: P36888
  ENSP ID: ENSP00000241453
MPALARDGGQLPLLVVFSAMIFGTITNQDLPVIKCVLINHKNNDSSVGKSSSYPMVSESPEDLGCALRPQSSGTVYEAAAVEVDVSASITLQVLVDAPGNISCLWVFKHSSLNCQPHFDLQNRGVVSMVILKMTETQAGEYLLFIQSEATNYTILFTVSIRNTLLYTLRRPYFRKMENQDALVCISESVPEPIVEWVLCDSQGESCKEESPAVVKKEEKVLHELFGTDIRCCARNELGRECTRLFTIDLNQTPQTTLPQLFLKVGEPLWIRCKAVHVNHGFGLTWELENKALEEGNYFEMSTYSTNRTMIRILFAFVSSVARNDTGYYTCSSSKHPSQSALVTIVEKGFINATNSSEDYEIDQYEEFCFSVRFKAYPQIRCTWTFSRKSFPCEQKGLDNGYSISKFCNHKHQPGEYIFHAENDDAQFTKMFTLNIRRKPQVLAEASASQASCFSDGYPLPSWTWKKCSDKSPNCTEEITEGVWNRKANRKVFGQWVSSSTLNMSEAIKGFLVKCCAYNSLGTSCETILLNSPGPFPFIQDNISFYATIGVCLLFIVVLTLLICHKYKKQFRYESQLQMVQVTGSSDNEYFYVDFREYEYDLKWEFPRENLEFGKVLGSGAFGKVMNATAYGISKTGVSIQVAVKMLKEKADSSEREALMSELKMMTQLGSHENIVNLLGACTLSGPIYLIFEYCCYGDLLNYLRSKREKFHRTWTEIFKEHNFSFYPTFQSHPNSSMPGSREVQIHPDSDQISGLHGNSFHSEDEIEYENQKRLEEEEDLNVLTFEDLLCFAYQVAKGMEFLEFKSCVHRDLAARNVLVTHGKVVKICDFGLARDIMSDSNYVVRGNARLPVKWMAPESLFEGIYTIKSDVWSYGILLWEIFSLGVNPYPGIPVDANFYKLIQNGFKMDQPFYATEEIYIIMQSCWAFDSRKRPSFPNLTSFLGCQLADAEEAMYQNVDGRVSECPHTYQNRRPFSREMDLGLLSPQAQVEDS

SEQ ID NO: 32419 - protein, 739 aa, Homo sapiens
  Payload ID: 6337
  Gene Symbol: FLT3
  Gene Name: fms-related tyrosine kinase 3
  ENSP ID: ENSP00000370374
MPALARDGGQLPLLVVFSAMIFGTITNQDLPVIKCVLINHKNNDSSVGKSSSYPMVSESPEDLGCALRPQSSGTVYEAAAVEVDVSASITLQVLVDAPGNISCLWVFKHSSLNCQPHFDLQNRGVVSMVILKMTETQAGEYLLFIQSEATNYTILFTVSIRNTLLYTLRRPYFRKMENQDALVCISESVPEPIVEWVLCDSQGESCKEESPAVVKKEEKVLHELFGTDIRCCARNELGRECTRLFTIDLNQTPQTTLPQLFLKVGEPLWIRCKAVHVNHGFGLTWELENKALEEGNYFEMSTYSTNRTMIRILFAFVSSVARNDTGYYTCSSSKHPSQSALVTIVEKGFINATNSSEDYEIDQYEEFCFSVRFKAYPQIRCTWTFSRKSFPCEQKGLDNGYSISKFCNHKHQPGEYIFHAENDDAQFTKMFTLNIRRKPQVLAEASASQASCFSDGYPLPSWTWKKCSDKSPNCTEEITEGVWNRKANRKVFGQWVSSSTLNMSEAIKGFLVKCCAYNSLGTSCETILLNSPGPFPFIQDNISFYATIGVCLLFIVVLTLLICHKYKKQFRYESQLQMVQVTGSSDNEYFYVDFREYEYDLKWEFPRENLEFGKVLGSGAFGKVMNATAYGISKTGVSIQVAVKMLKEKADSSEREALMSELKMMTQLGSHENIVNLLGACTLSGPIYLIFEYCCYGDLLNYLRSKREKFHRTWTEIFKEHNFSFYPTFQSHPNSSKKK

SEQ ID NO: 32420 - protein, 153 aa, Homo sapiens
  Payload ID: 6338
  Gene Symbol: FLT3LG
  Gene Name: fms-related tyrosine kinase 3 ligand
  Uniprot ID: P49771
  ENSP ID: ENSP00000204637
MERLKTVAGSKMQGLLERVNTEIHFVTKCAFQPPPSCLRFVQTNISRLLQETSEQLVALKPWITRQNFSRCLELQCQPDSSTLPPPWSPRPLEATAPTAPQPPLLLLLLLPVGLLLLAAAWCLHWQRTRRRTPRPGEQVPPVPSPQDLLLVEH

SEQ ID NO: 32421 - protein, 235 aa, Homo sapiens
  Payload ID: 6338
  Gene Symbol: FLT3LG
  Gene Name: fms-related tyrosine kinase 3 ligand
  Uniprot ID: P49771
  ENSP ID: ENSP00000468977
MTVLAPAWSPTTYLLLLLLLSSGLSGTQDCSFQHSPISSDFAVKIRELSDYLLQDYPVTVASNLQDEELCGGLWRLVLAQRWMERLKTVAGSKMQGLLERVNTEIHFVTKCAFQPPPSCLRFVQTNISRLLQETSEQLVALKPWITRQNFSRCLELQCQPDSSTLPPPWSPRPLEATAPTAPQPPLLLLLLLPVGLLLLAAAWCLHWQRTRRRTPRPGEQVPPVPSPQDLLLVEH

SEQ ID NO: 32422 - protein, 187 aa, Homo sapiens
  Payload ID: 6338
  Gene Symbol: FLT3LG
  Gene Name: fms-related tyrosine kinase 3 ligand
  ENSP ID: ENSP00000469181
  MOD_RES (1)..(1): Any amino acid
XAVKIRELSDYLLQDYPVTVASNLQDEELCGGLWRLVLAQRWMERLKTVAGSKMQGLLERVNTEIHFVTKCAFQETSEQLVALKPWITRQNFSRCLELQCQPGAPRPQSPGPAACGALTWPRPHPGEDTEAHRGESPARGCIAWTQRKLARGRSLPWAPLIPSPEWRQRQNPAPAPFTQLCTKPLSP

SEQ ID NO: 32423 - protein, 235 aa, Homo sapiens; identical to SEQ ID NO: 32421
  Payload ID: 6338
  Gene Symbol: FLT3LG
  Gene Name: fms-related tyrosine kinase 3 ligand
  Uniprot ID: P49771
  ENSP ID: ENSP00000469613

SEQ ID NO: 32424 - protein, 217 aa, Homo sapiens
  Payload ID: 6338
  Gene Symbol: FLT3LG
  Gene Name: fms-related tyrosine kinase 3 ligand
  ENSP ID: ENSP00000469942
MTVLAPAWSPTTYLLLLLLLSSGLSGTQDCSFQHSPISSDFAVKIRELSDYLLQDYPVTVASNLQDEELCGGLWRLVLAQRWMERLKTVAGSKMQGLLERVNTEIHFVTKCAFQETSEQLVALKPWITRQNFSRCLELQCQPDSSTLPPPWSPRPLEATAPTAPQPPLLLLLLLPVGLLLLAAAWCLHWQRTRRRTPRPGEQVPPVPSPQDLLLVEH

SEQ ID NO: 32425 - protein, 235 aa, Homo sapiens; identical to SEQ ID NO: 32421
  Payload ID: 6338
  Gene Symbol: FLT3LG
  Gene Name: fms-related tyrosine kinase 3 ligand
  Uniprot ID: P49771
  ENSP ID: ENSP00000470453

SEQ ID NO: 32426 - protein, 153 aa, Homo sapiens; identical to SEQ ID NO: 32420
  Payload ID: 6338
  Gene Symbol: FLT3LG
  Gene Name: fms-related tyrosine kinase 3 ligand
  Uniprot ID: P49771
  ENSP ID: ENSP00000471226

SEQ ID NO: 32427 - protein, 58 aa, Homo sapiens
  Payload ID: 6338
  Gene Symbol: FLT3LG
  Gene Name: fms-related tyrosine kinase 3 ligand
  ENSP ID: ENSP00000471860
MTVLAPAWSPTTYLLLLLLLSSGLSGTQDCSFQHSPISSDFAVKIRELPGLILFSPAV

SEQ ID NO: 32428 - protein, 58 aa, Homo sapiens; identical to SEQ ID NO: 32427
  Payload ID: 6338
  Gene Symbol: FLT3LG
  Gene Name: fms-related tyrosine kinase 3 ligand
  ENSP ID: ENSP00000472628

SEQ ID NO: 32429 - protein, 132 aa, Homo sapiens
  Payload ID: 6338
  Gene Symbol: FLT3LG
  Gene Name: fms-related tyrosine kinase 3 ligand
  ENSP ID: ENSP00000473098
  MOD_RES (1)..(1): Any amino acid
XSCLRFVQTNISRLLQETSEQLVALKPWITRQNFSRCLELQCQPGAPRPQSPGPAACGALTWPRPHPGESFLGYGAWTLCLQVGRVTRRPWKGGEQWRGRGSSRCRKTPLGPGAVAHACNPSTLGGRGGWIT

SEQ ID NO: 32430 - protein, 1363 aa, Homo sapiens
  Payload ID: 6339
  Gene Symbol: FLT4
  Gene Name: fms-related tyrosine kinase 4
  Uniprot ID: P35916
  ENSP ID: ENSP00000261937
MQRGAALCLRLWLCLGLLDGLVSGYSMTPPTLNITEESHVIDTGDSLSISCRGQHPLEWAWPGAQEAPATGDKDSEDTGVVRDCEGTDARPYCKVLLLHEVHANDTGSYVCYYKYIKARIEGTTAASSYVFVRDFEQPFINKPDTLLVNRKDAMWVPCLVSIPGLNVTLRSQSSVLWPDGQEVVWDDRRGMLVSTPLLHDALYLQCETTWGDQDFLSNPFLVHITGNELYDIQLLPRKSLELLVGEKLVLNCTVWAEFNSGVTFDWDYPGKQAERGKWVPERRSQQTHTELSSILTIHNVSQHDLGSYVCKANNGIQRFRESTEVIVHENPFISVEWLKGPILEATAGDELVKLPVKLAAYPPPEFQWYKDGKALSGRHSPHALVLKEVTEASTGTYTLALWNSAAGLRRNISLELVVNVPPQIHEKEASSPSIYSRHSRQALTCTAYGVPLPLSIQWHWRPWTPCKMFAQRSLRRRQQQDLMPQCRDWRAVTTQDAVNPIESLDTWTEFVEGKNKTVSKLVIQNANVSAMYKCVVSNKVGQDERLIYFYVTTIPDGFTIESKPSEELLEGQPVLLSCQADSYKYEHLRWYRLNLSTLHDAHGNPLLLDCKNVHLFATPLAASLEEVAPGARHATLSLSIPRVAPEHEGHYVCEVQDRRSHDKHCHKKYLSVQALEAPRLTQNLTDLLVNVSDSLEMQCLVAGAHAPSIVWYKDERLLEEKSGVDLADSNQKLSIQRVREEDAGRYLCSVCNAKGCVNSSASVAVEGSEDKGSMEIVILVGTGVIAVFFWVLLLLIFCNMRRPAHADIKTGYLSIIMDPGEVPLEEQCEYLSYDASQWEFPRERLHLGRVLGYGAFGKVVEASAFGIHKGSSCDTVAVKMLKEGATASEHRALMSELKILIHIGNHLNVVNLLGACTKPQGPLMVIVEFCKYGNLSNFLRAKRDAFSPCAEKSPEQRGRFRAMVELARLDRRRPGSSDRVLFARFSKTEGGARRASPDQEAEDLWLSPLTMEDLVCYSFQVARGMEFLASRKCIHRDLAARNILLSESDVVKICDFGLARDIYKDPDYVRKGSARLPLKWMAPESIFDKVYTTQSDVWSFGVLLWEIFSLGASPYPGVQINEEFCQRLRDGTRMRAPELATPAIRRIMLNCWSGDPKARPAFSELVEILGDLLQGRGLQEEEEVCMAPRSSQSSEEGSFSQVSTMALHIAQADAEDSPPSLQRHSLAARYYNWVSFPGCLARGAETRGSSRMKTFEEFPMTPTTYKGSVDNQTDSGMVLASEEFEQIESRHRQESGFSCKGPGQNVAVTRAHPDSQGRRRRPERGARGGQVFYNSEYGELSEPSEEDHCSPSARVTFFTDNSY

SEQ ID NO: 32431 - protein, 1298 aa, Homo sapiens
  Payload ID: 6339
  Gene Symbol: FLT4
  Gene Name: fms-related tyrosine kinase 4
  Uniprot ID: P35916
  ENSP ID: ENSP00000377016
MQRGAALCLRLWLCLGLLDGLVSGYSMTPPTLNITEESHVIDTGDSLSISCRGQHPLEWAWPGAQEAPATGDKDSEDTGVVRDCEGTDARPYCKVLLLHEVHANDTGSYVCYYKYIKARIEGTTAASSYVFVRDFEQPFINKPDTLLVNRKDAMWVPCLVSIPGLNVTLRSQSSVLWPDGQEVVWDDRRGMLVSTPLLHDALYLQCETTWGDQDFLSNPFLVHITGNELYDIQLLPRKSLELLVGEKLVLNCTVWAEFNSGVTFDWDYPGKQAERGKWVPERRSQQTHTELSSILTIHNVSQHDLGSYVCKANNGIQRFRESTEVIVHENPFISVEWLKGPILEATAGDELVKLPVKLAAYPPPEFQWYKDGKALSGRHSPHALVLKEVTEASTGTYTLALWNSAAGLRRNISLELVVNVPPQIHEKEASSPSIYSRHSRQALTCTAYGVPLPLSIQWHWRPWTPCKMFAQRSLRRRQQQDLMPQCRDWRAVTTQDAVNPIESLDTWTEFVEGKNKTVSKLVIQNANVSAMYKCVVSNKVGQDERLIYFYVTTIPDGFTIESKPSEELLEGQPVLLSCQADSYKYEHLRWYRLNLSTLHDAHGNPLLLDCKNVHLFATPLAASLEEVAPGARHATLSLSIPRVAPEHEGHYVCEVQDRRSHDKHCHKKYLSVQALEAPRLTQNLTDLLVNVSDSLEMQCLVAGAHAPSIVWYKDERLLEEKSGVDLADSNQKLSIQRVREEDAGRYLCSVCNAKGCVNSSASVAVEGSEDKGSMEIVILVGTGVIAVFFWVLLLLIFCNMRRPAHADIKTGYLSIIMDPGEVPLEEQCEYLSYDASQWEFPRERLHLGRVLGYGAFGKVVEASAFGIHKGSSCDTVAVKMLKEGATASEHRALMSELKILIHIGNHLNVVNLLGACTKPQGPLMVIVEFCKYGNLSNFLRAKRDAFSPCAEKSPEQRGRFRAMVELARLDRRRPGSSDRVLFARFSKTEGGARRASPDQEAEDLWLSPLTMEDLVCYSFQVARGMEFLASRKCIHRDLAARNILLSESDVVKICDFGLARDIYKDPDYVRKGSARLPLKWMAPESIFDKVYTTQSDVWSFGVLLWEIFSLGASPYPGVQINEEFCQRLRDGTRMRAPELATPAIRRIMLNCWSGDPKARPAFSELVEILGDLLQGRGLQEEEEVCMAPRSSQSSEEGSFSQVSTMALHIAQADAEDSPPSLQRHSLAARYYNWVSFPGCLARGAETRGSSRMKTFEEFPMTPTTYKGSVDNQTDSGMVLASEEFEQIESRHRQESGFR

SEQ ID NO: 32432 - protein, 142 aa, Homo sapiens
  Payload ID: 6339
  Gene Symbol: FLT4
  Gene Name: fms-related tyrosine kinase 4
  ENSP ID: ENSP00000421535
MVELARLDRRRPGSSDRVLFARFSKTEGGARRASPDQEAEDLWLSPLTMEDLVCYSFQVARGMEFLASRKCIHRDLAARNILLSESDVVKICDFGLARDIYKDPDYVRKGSARLPLKWMAPESIFDKVYTTQSDVWSFGVLL

SEQ ID NO: 32433 - protein, 1306 aa, Homo sapiens
  Payload ID: 6339
  Gene Symbol: FLT4
  Gene Name: fms-related tyrosine kinase 4
  ENSP ID: ENSP00000426057
MQRGAALCLRLWLCLGLLDGLVSGYSMTPPTLNITEESHVIDTGDSLSISCRGQHPLEWAWPGAQEAPATGDKDSEDTGVVRDCEGTDARPYCKVLLLHEVHANDTGSYVCYYKYIKARIEGTTAASSYVFVRDFEQPFINKPDTLLVNRKDAMWVPCLVSIPGLNVTLRSQSSVLWPDGQEVVWDDRRGMLVSTPLLHDALYLQCETTWGDQDFLSNPFLVHITGNELYDIQLLPRKSLELLVGEKLVLNCTVWAEFNSGVTFDWDYPGKQAERGKWVPERRSQQTHTELSSILTIHNVSQHDLGSYVCKANNGIQRFRESTEVIVHENPFISVEWLKGPILEATAGDELVKLPVKLAAYPPPEFQWYKDGKALSGRHSPHALVLKEVTEASTGTYTLALWNSAAGLRRNISLELVVNVPPQIHEKEASSPSIYSRHSRQALTCTAYGVPLPLSIQWHWRPWTPCKMFAQRSLRRRQQQDLMPQCRDWRAVTTQDAVNPIESLDTWTEFVEGKNKTVSKLVIQNANVSAMYKCVVSNKVGQDERLIYFYVTTIPDGFTIESKPSEELLEGQPVLLSCQADSYKYEHLRWYRLNLSTLHDAHGNPLLLDCKNVHLFATPLAASLEEVAPGARHATLSLSIPRVAPEHEGHYVCEVQDRRSHDKHCHKKYLSVQALEAPRLTQNLTDLLVNVSDSLEMQCLVAGAHAPSIVWYKDERLLEEKSGVDLADSNQKLSIQRVREEDAGRYLCSVCNAKGCVNSSASVAVEGSEDKGSMEIVILVGTGVIAVFFWVLLLLIFCNMRRPAHADIKTGYLSIIMDPGEVPLEEQCEYLSYDASQWEFPRERLHLGRVLGYGAFGKVVEASAFGIHKGSSCDTVAVKMLKEGATASEHRALMSELKILIHIGNHLNVVNLLGACTKPQGPLMVIVEFCKYGNLSNFLRAKRDAFSPCAEKSPEQRGRFRAMVELARLDRRRPGSSDRVLFARFSKTEGGARRASPDQEAEDLWLSPLTMEDLVCYSFQVARGMEFLASRKCIHRDLAARNILLSESDVVKICDFGLARDIYKDPDYVRKGSARLPLKWMAPESIFDKVYTTQSDVWSFGVLLWEIFSLGASPYPGVQINEEFCQRLRDGTRMRAPELATPAIRRIMLNCWSGDPKARPAFSELVEILGDLLQGRGLQEEEEVCMAPRSSQSSEEGSFSQVSTMALHIAQADAEDSPPSLQRHSLAARYYNWVSFPGCLARGAETRGSSRMKTFEEFPMTPTTYKGSVDNQTDSGMVLASEEFEQIESRHRQESGFRGTRRTRGA

SEQ ID NO: 32434 - protein, 295 aa, Homo sapiens
  Payload ID: 6339
  Gene Symbol: FLT4
  Gene Name: fms-related tyrosine kinase 4
  ENSP ID: ENSP00000481134
MQRGAALCLRLWLCLGLLDGLVSGYSMTPPTLNITEESHVIDTGDSLSISCRGQHPLEWAWPGAQEAPATGDKDSEDTGVVRDCEGTDARPYCKVLLLHEVHANDTGSYVCYYKYIKARIEGTTAASSYVFVRDFEQPFINKPDTLLVNRKDAMWVPCLVSIPGLNVTLRSQSSVLWPDGQEVVWDDRRGMLVSTPLLHDALYLQCETTWGDQDFLSNPFLVHITGNELYDIQLLPRKSLELLVGEKLVLNCTVWAEFNSGVTFDWDYPGKQKIPSSASSGSKDPSWRPRQETSW

SEQ ID NO: 32435 - protein, 359 aa, Homo sapiens
  Payload ID: 6340
  Gene Symbol:
  Gene Name: FO538757.2
  ENSP ID: ENSP00000485222
MTPVRMQHSLAGQTYAVPLIQPDLRREEAVQQMADALQYLQKVSGDIFSRWQVEQSRSQVQAIGEKVSLAQAKIEKIKGSKKAIKVFSSAKYPAPGRLQEYGSIFTGAQDPGLQRRPHRIQSKHRPLDERALQEKLKDFPVCVSTKPEPEDDAEEGLGGLPSNISSVSSLLLFNTTENLQGKKYVFLDPLAGAVTKTHVMLGAETEEKLFDAPLSISKREQLEQQVPENYFYVPDLGQVPEIDVPSYLPDLSGIANDLMYIADLGPGIAPSAPGTIPELPTFHTEVAEPLKVVRATSQGGHLMSDLFNKLVMRRKGISGKGPGAGEGPGGAFARVSDSIPPLPPPQQPQAEEDEDDWES

SEQ ID NO: 32436 - protein, 455 aa, Homo sapiens
  Payload ID: 6340
  Gene Symbol:
  Gene Name: FO538757.2
  ENSP ID: ENSP00000485351
MGAVCTSGARSERTMTPVRMQHSLAGQTYAVPLIQPDLRREEAVQQMADALQYLQKVSGDIFSRWVEQSRSQVQAIGEKVSLAQAKIEKIKGSKKAIKVFSSAKYPAPGRLQEYGSIFTGAQDPGLQRRPHRIQSKHRPLDERALQEKLKDFPVCVSTKPEPEDDAEEGLGGLPSNISSVSSLLLFNTTENLGKKYVFLDPLAGAVTKTHVMLGAETEEKLFDAPLSISKREQLEQQVPENYFYVPDLGQVPEIDVPSYLPDLSGIANDLMYIADLGPGIAPSAPGTIPELPTFHTEVAEPLKTYKMGYTPPPPPPPPPPAPEVLASAPPLPPSTAAPVGQGARQDDSSSSASPSVQGAPREVVDPSGGRATLLESIRQAGGIGKAKLRSMKERKLEKKKQKEQEQVRATSQGGHLIWGGDFCLPVLHGGTAPPSLRHCVLKRLPEKTAHQSIKN

SEQ ID NO: 32437 - protein, 464 aa, Homo sapiens
  Payload ID: 6340
  Gene Symbol:
  Gene Name: FO538757.2
  ENSP ID: ENSP00000485442
MTPVRMQHSLAGQTYAVPLIQPDLRREEAVQQMADALQYLQKVSGDIFSRISQQVEQSRSQVQAIGEKVSLAQAKIEKIKGSKKAIKVFSSAKYPAPGRLQEYGSIFTGAQDPGLQRRPHRIQSKHRPLDERALQEKLKDFPVCVSTKPEPEDDAEEGLGGLPSNISSVSSLLLFNTTENLYKKYVFLDPLAGAVTKTHVMLGAETEEKLFDAPLSISKREQLEQQVPENYFYVPDLGQVPEIDVPSYLPDLSGIANDLMYIADLGPGIAPSAPGTIPELPTFHTEVAEPLKVDLQDGVLTPPPPPPPPPPAPEVLASAPPLPPSTAAPVGQGARQDDSSSSASPSVQGAPREVVDPSGGRATLLESIRQAGGIGKAKLRSMKERKLEKKKQKEQEQVRATSQGGHLMSDLFNKLVMRRKGISGKGPGAGEGPGGAFARVSDSIPPLPPPQQPQAEEDEDDWES

SEQ ID NO: 32438 - protein, 133 aa, Homo sapiens
  Payload ID: 6341
  Gene Symbol:
  Gene Name: FO538757.3
  ENSP ID: ENSP00000485457
MSDSINFSHNLGQLLSPPRCVVMPGMPFPSIRSPELQKTTADLDHTLVSVPSVAESLHHPEITFLTAFCLPSFTRSRPLPDRQLHHCLALCPSFALPAGDGVCHGPGLQGSCYKGETQESVESRVLPGPRHRH

SEQ ID NO: 32439 - protein, 1801 aa, Homo sapiens
  Payload ID: 6342
  Gene Symbol: FOCAD
  Gene Name: focadhesin
  Uniprot ID: Q5VW36
  ENSP ID: ENSP00000344307
MSDDIRKRFEFPNSLIQSQAVGHLIAAVLKENGFSEKIHQSTNQTPALNLLWEKCCSDNVVVRTACCEGLVALVAQDHAEFSYVLNGILNLIPSTRNTHGLIKAIMHLLQMQALKEGQGGEKNIQSIYTIRNHPHPLITVLEHRPDCWPVFLQQLTAFFQQCPERLEVSCIQIMAPFLWYLYCEPSQLQEYAKLRLALLKVLLQPQVLCDKDQPSILEQQILQLCCDIVPCLQVKDLIQTTEAMMFIEEVCLSLLRHPVFWKIQLTQMSLQLLCVSEVSLKITGECSSSIHLLEHSVELLKEDFPVELVIIGIALLLLQTPASQQKPILNLALKLLSVTEDQKIPKSSLLLVMPILQILSSTALEDCISVDEEGPSRQQLALNLLEMIQQECYRDDHQKLSYKLVCPVTSMYGTIFTAWRILEVMTDSSAASDWLASVESLLPITAVIPAPAFLLLAHLLVEDKGQNLHQILKVTTELAQADSSQVPNLIPVLMFKLGRPLEPILYNDILYTLPKLGVHKVCIGQILRIIQLLGTTPRLRAVTLRLLTSLWEKQDRVYPELQRFMAVSDVPSLSVGKEVQWEKLIAKAASIRDICKQRPYQHGADMLAAISQVLNECTKPDQATPAALVLQGLHALCQAEVVCIRSTWNALSPKLSCDTRPLILKTLSELFSLVPSLTVNTTEYENFKVQVLSFLWTHTQNKDPIVANAAYRSLANFSAGEHTILHLPEKIRPEIPIPEELDDDEDVEDVDLSVPGSCYLKLLSLTPPLVLPALEEFFTSLVKQEMVNMPRGIYHSALKGGARSDQGKTVAGIPNFILKMYETNKQPGLKPGLAGGMLFCYDVSMYQSKDGKPLNRLMASRGRSFKQTSLALVHEVHIQLSEWHRAIFLPQAWLAYMNRAYHAILQGRLGELELQLKHGKEEPEEVQYKKSTAWLWVRDMLTDEITKAAAKESPVVKGNALLALSSLAVVVSRHEASLSSDSDGLLEVQPNFLSMKEWVSMVLDTLLVIVDSHYQPRGQLLSWFYYKSYSGENTASAIARSAAATALSLLVPVFIISCKEKVEEILNMLTARLPGKPSADESQAVQIHMGLALGMFLSRLCEEKLSDISGQEMNLLLMKSLDALENCCFDTSLEYNTGCILGVGLVLSLMSHSSQMQSRVHVAALLRKLSAHVDDSGSQSRTFQEVLAYTLSCVCTSAFSAGIIEATEAEDVMNKLRLLVENSQQTSGFALALGNIVHGLSVCGHGKAEDLGSKLLPAWIRIVLTEGTPTMLCLAALHGMVALVGSEGDVMQLKSEAIQTSHFQGRLNEVIRTLTQVISVSGVIGLQSNAVWLLGHLHLSTLSSSQSRASVPTDYSYLPESSFIGAAIGFFITGGKKGPESVPPSLLKVVMKPIATVGESYQYPPVNWAALLSPLMRLNFGEEIQQLCLEIMVTQAQSSQNAAALLGLWVTPPLIHSLSLNTKRYLLISAPLWIKHISDEQILGFVENLMVAVFKAASPLGSPELCPSALHGLSQAMKLPSPAHHLWSLLSEATGKIFDLLPNKIRRKDLELYISIAKCLLEMTDDDANRIAQVTKSNIEKAAFVKLYLVSQGRFPLVNLTDMLSVAVQHREKEVLAWMILHSLYQARIVSHANTGVLKRMEWLLELMGYIRNVAYQSTSFHNTALDKALDFFLLIFATAVVAWADHTAPLLLGLSASWLPWHQENGPAGPVPSFLGRSPMHRVTLQEVLTLLPNSMALLLQKEPWKEQTQKFIDWLFSIMESPKEALSAQSRDLLKATLLSLRVLPEFKKKAVWTRAYGW

SEQ ID NO: 32440 - protein, 1801 aa, Homo sapiens; identical to SEQ ID NO: 32439
  Payload ID: 6342
  Gene Symbol: FOCAD
  Gene Name: focadhesin
  Uniprot ID: Q5VW36
  ENSP ID: ENSP00000369599

SEQ ID NO: 32441 - protein, 180 aa, Homo sapiens
  Payload ID: 6342
  Gene Symbol: FOCAD
  Gene Name: focadhesin
  ENSP ID: ENSP00000474563
MPKVFSVYFVCLCPALGKICDISGQEMNLLLMKSLDALENCCFDTSLEYNTGCILGVGLVLSLMSHSSQMQSRVHVAALLRKLSAHVDDSGSQSRTFQEVLAYTLSCVCTSAFSAGIIEATEAEDVMNKLRLLVENSQQTSGFALALGNIVHGLSVCGHGKAEDLGSKLLPAWIRIVLTE

SEQ ID NO: 32442 - protein, 99 aa, Homo sapiens
  Payload ID: 6342
  Gene Symbol: FOCAD
  Gene Name: focadhesin
  ENSP ID: ENSP00000474683
MLTARLPGKPSADESQAVQIHMGLALGMFLSRLCEEKLSDISGQEMNLLLMKSLDALENCCFDTSLEYNTGCILGVGLVLSLMSHSSQMQSRVHVAALL

SEQ ID NO: 32443 - protein, 1237 aa, Homo sapiens
  Payload ID: 6342
  Gene Symbol: FOCAD
  Gene Name: focadhesin
  ENSP ID: ENSP00000474915
MAVSDVPSLSVGKEVQWEKLIAKAASIRDICKQRPYQHGADMLAAISQVLNECTKPDQATPAALVLQGLHALCQAEVVCIRSTWNALSPKLSCDTRPLILKTLSELFSLVPSLTVNTTEYENFKVQVLSFLWTHTQNKDPIVANAAYRSLANFSAGEHTILHLPEKIRPEIPIPEELDDDEDVEDVDLSVPGSCYLKLLSLTPPLVLPALEEFFTSLVKQEMVNMPRGIYHSALKGGARSDQGKTVAGIPNFILKMYETNKQPGLKPGLAGGMLFCYDVSMYQSKDGKPLNRLMASRGRSFKQTSLALVHEVHIQLSEWHRAIFLPQAWLAYMNRAYHAILQGRLGELELQLKHGKEEPEEVQYKKSTAWLWVRDMLTDEITKAAAKESPVVKGNALLALSSLAVVVSRHEASLSSDSDGLLEVQPNFLSMKEWVSMVLDTLLVIVDSHYQPRGQLLSWFYYKSYSGENTASAIARSAAATALSLLVPVFIISCKEKVEEILNMLTARLPGKPSADESQAVQIHMGLALGMFLSRLCEEKLSDISGQEMNLLLMKSLDALENCCFDTSLEYNTGCILGVGLVLSLMSHSSQMQSRVHVAALLRKLSAHVDDSGSQSRTFQEVLAYTLSCVCTSAFSAGIIEATEAEDVMNKLRLLVENSQQTSGFALALGNIVHGLSVCGHGKAEDLGSKLLPAWIRIVLTEGTPTMLCLAALHGMVALVGSEGDVMQLKSEAIQTSHFQGRLNEVIRTLTQVISVSGVIGLQSNAVWLLGHLHLSTLSSSQSRASVPTDYSYLPESSFIGAAIGFFITGGKKGPESVPPSLLKVVMKPIATVGESYQYPPVNWAALLSPLMRLNFGEEIQQLCLEIMVTQAQSSQNAAALLGLWVTPPLIHSLSLNTKRYLLISAPLWIKHISDEQILGFVENLMVAVFKAASPLGSPELCPSALHGLSQAMKLPSPAHHLWSLLSEATGKIFDLLPNKIRRKDLELYISIAKCLLEMTDDDANRIAQVTKSNIEKAAFVKLYLVSQGRFPLVNLTDMLSVAVQHREKEVLAWMILHSLYQARIVSHANTGVLKRMEWLLELMGYIRNVAYQSTSFHNTALDKALDFFLLIFATAVVAWADHTAPLLLGLSASWLPWHQENGPAGPVPSFLGRSPMHRVTLQEVLTLLPNSMALLLQKEPWKEQTQKFIDWLFSIMESPKEALSAQSRDLLKATLLSLRVLPEFKKKAVWTRAYGW

SEQ ID NO: 32444 - protein, 46 aa, Homo sapiens
  Payload ID: 6342
  Gene Symbol: FOCAD
  Gene Name: focadhesin
  ENSP ID: ENSP00000475030
MAVSDVPSLSVGKEVQWEKLIAKAASIRDICHINMVQICWQLFLKC

SEQ ID NO: 32445 - protein, 128 aa, Homo sapiens
  Payload ID: 6342
  Gene Symbol: FOCAD
  Gene Name: focadhesin
  ENSP ID: ENSP00000475075
MLTARLPGKPSADESQAVQIHMGLALGMFLSRLCEEKLSDISGQEMNLLLMKSLDALENCCFDTSLEYNTGCILGVGLVLSLMSHSSQMQSRVHVAALLRKLSAHVDDSGSQSRTFQEVLAYTLSCVC

SEQ ID NO: 32446 - protein, 750 aa, Homo sapiens
  Payload ID: 6343
  Gene Symbol: FOLH1
  Gene Name: folate hydrolase (prostate-specific membrane antigen) 1
  Uniprot ID: Q04609
  ENSP ID: ENSP00000256999
MWNLLHETDSAVATARRPRWLCAGALVLAGGFFLLGFLFGWFIKSSNEATNITPKHNMKAFLDELKAENIKKFLYNFTQIPHLAGTEQNFQLAKQIQSQWKEFGLDSVELAHYDVLLSYPNKTHPNYISIINEDGNEIFNTSLFEPPPPGYENVSDIVPPFSAFSPQGMPEGDLVYVNYARTEDFFKLERDMKINCSGKIVIARYGKVFRGNKVKNAQLAGAKGVILYSDPADYFAPGVKSYPDGWNLPGGGVQRGNILNLNGAGDPLTPGYPANEYAYRRGIAEAVGLPSIPVHPIGYYDAQKLLEKMGGSAPPDSSWRGSLKVPYNVGPGFTGNFSTQKVKMHIHSTNEVTRIYNVIGTLRGAVEPDRYVILGGHRDSWVFGGIDPQSGAAVVHEIVRSFGTLKKEGWRPRRTILFASWDAEEFGLLGSTEWAEENSRLLQERGVAYINADSSIEGNYTLRVDCTPLMYSLVHNLTKELKSPDEGFEGKSLYESWTKKSPSPEFSGMPRISKLGSGNDFEVFFQRLGIASGRARYTKNWETNKFSGYPLYHSVYETYELVEKFYDPMFKYHLTVAQVRGGMVFELANSIVLPFDCRDYAVVLRKYADKIYSISMKHPQEMKTYSVSFDSLFSAVKNFTEIASKFSERLQDFDKSNPIVLRMMNDQLMFLERAFIDPLGLPDRPFYRHVIYAPSSHNKYAGESFPGIYDALFDIESKVDPSKAWGEVKRQIYVAAFTVQAAAETLSEVA

SEQ ID NO: 32447 - protein, 442 aa, Homo sapiens
  Payload ID: 6343
  Gene Symbol: FOLH1
  Gene Name: folate hydrolase (prostate-specific membrane antigen) 1
  Uniprot ID: Q04609
  ENSP ID: ENSP00000344086
MGGSAPPDSSWRGSLKVPYNVGPGFTGNFSTQKVKMHIHSTNEVTRIYNVIGTLRGAVEPDRYVILGGHRDSWVFGGIDPQSGAAVVHEIVRSFGTLKKEGWRPRRTILFASWDAEEFGLLGSTEWAEENSRLLQERGVAYINADSSIEGNYTLRVDCTPLMYSLVHNLTKELKSPDEGFEGKSLYESWTKKSPSPEFSGMPRISKLGSGNDFEVFFQRLGIASGRARYTKNWETNKFSGYPLYHSVYETYELVEKFYDPMFKYHLTVAQVRGGMVFELANSIVLPFDCRDYAVVLRKYADKIYSISMKHPQEMKTYSVSFDSLFSAVKNFTEIASKFSERLQDFDKSNPIVLRMMNDQLMFLERAFIDPLGLPDRPFYRHVIYAPSSHNKYAGESFPGIYDALFDIESKVDPSKAWGEVKRQIYVAAFTVQAAAETLSEVA

SEQ ID NO: 32448 - protein, 735 aa, Homo sapiens
  Payload ID: 6343
  Gene Symbol: FOLH1
  Gene Name: folate hydrolase (prostate-specific membrane antigen) 1
  Uniprot ID: Q04609
  ENSP ID: ENSP00000344131
MTAGSSYPLFLAAYACTGCLAERLGWFIKSSNEATNITPKHNMKAFLDELKAENIKKFLYNFTQIPHLAGTEQNFQLAKQIQSQWKEFGLDSVELAHYDVLLSYPNKTHPNYISIINEDGNEIFNTSLFEPPPPGYENVSDIVPPFSAFSPQGMPEGDLVYVNYARTEDFFKLERDMKINCSGKIVIARYGKVFRGNKVKNAQLAGAKGVILYSDPADYFAPGVKSYPDGWNLPGGGVQRGNILNLNGAGDPLTPGYPANEYAYRRGIAEAVGLPSIPVHPIGYYDAQKLLEKMGGSAPPDSSWRGSLKVPYNVGPGFTGNFSTQKVKMHIHSTNEVTRIYNVIGTLRGAVEPDRYVILGGHRDSWVFGGIDPQSGAAVVHEIVRSFGTLKKEGWRPRRTILFASWDAEEFGLLGSTEWAEENSRLLQERGVAYINADSSIEGNYTLRVDCTPLMYSLVHNLTKELKSPDEGFEGKSLYESWTKKSPSPEFSGMPRISKLGSGNDFEVFFQRLGIASGRARYTKNWETNKFSGYPLYHSVYETYELVEKFYDPMFKYHLTVAQVRGGMVFELANSIVLPFDCRDYAVVLRKYADKIYSISMKHPQEMKTYSVSFDSLFSAVKNFTEIASKFSERLQDFDKSNPIVLRMMNDQLMFLERAFIDPLGLPDRPFYRHVIYAPSSHNKYAGESFPGIYDALFDIESKVDPSKAWGEVKRQIYVAAFTVQAAAETLSEVA

SEQ ID NO: 32449 - protein, 719 aa, Homo sapiens
  Payload ID: 6343
  Gene Symbol: FOLH1
  Gene Name: folate hydrolase (prostate-specific membrane antigen) 1
  Uniprot ID: Q04609
  ENSP ID: ENSP00000349129
MWNLLHETDSAVATARRPRWLCAGALVLAGGFFLLGFLFGWFIKSSNEATNITPKHNMKAFLDELKAENIKKFLYNFTQIPHLAGTEQNFQLAKQIQSQWKEFGLDSVELAHYDVLLSYPNKTHPNYISIINEDGNEIFNTSLFEPPPPGYENVSDIVPPFSAFSPQGMPEGDLVYVNYARTEDFFKLERDMKINCSGKIVIARYGKVFRGNKVKNAQLAGAKGVILYSDPADYFAPGVKSYPDGWNLPGGGVQRGNILNLNGAGDPLTPGYPANEYAYRRGIAEAVGLPSIPVHPIGYYDAQKLLEKMGGSAPPDSSWRGSLKVPYNVGPGFTGNFSTQKVKMHIHSTNEVTRIYNVIGTLRGAVEPDRYVILGGHRDSWVFGGIDPQSGAAVVHEIVRSFGTLKKEGWRPRRTILFASWDAEEFGLLGSTEWAEENSRLLQERGVAYINADSSIEGNYTLRVDCTPLMYSLVHNLTKELKSPDEGFEGKSLYESWTKKSPSPEFSGMPRISKLGSGNDFEVFFQRLGIASGRARYTKNWETNKFSGYPLYHSVYETYELVEKFYDPMFKYHLTVAQVRGGMVFELANSIVLPFDCRDYAVVLRKYADKIYSISMKHPQEMKTYSVSFDSLFSAVKNFTEIASKFSERLQDFDKSKHVIYAPSSHNKYAGESFPGIYDALFDIESKVDPSKAWGEVKRQIYVAAFTVQAAAETLSEVA

SEQ ID NO: 32450 - protein, 48 aa, Homo sapiens
  Payload ID: 6343
  Gene Symbol: FOLH1
  Gene Name: folate hydrolase (prostate-specific membrane antigen) 1
  ENSP ID: ENSP00000431263
MWNLLHETDSAVATARRPRWLCAGALVLAGGFFLLGFLFVTEASLGTV

SEQ ID NO: 32451 - protein, 704 aa, Homo sapiens
  Payload ID: 6343
  Gene Symbol: FOLH1
  Gene Name: folate hydrolase (prostate-specific membrane antigen) 1
  Uniprot ID: Q04609
  ENSP ID: ENSP00000431463
MTAGSSYPLFLAAYACTGCLAERLGWFIKSSNEATNITPKHNMKAFLDELKAENIKKFLYNFTQIPHLAGTEQNFQLAKQIQSQWKEFGLDSVELAHYDVLLSYPNKTHPNYISIINEDGNEIFNTSLFEPPPPGYENVSDIVPPFSAFSPQGMPEGDLVYVNYARTEDFFKLERDMKINCSGKIVIARYGKVFRGNKVKNAQLAGAKGVILYSDPADYFAPGVKSYPDGWNLPGGGVQRGNILNLNGAGDPLTPGYPANEYAYRRGIAEAVGLPSIPVHPIGYYDAQKLLEKMGGSAPPDSSWRGSLKVPYNVGPGFTGNFSTQKVKMHIHSTNEVTRIYNVIGTLRGAVEPDRYVILGGHRDSWVFGGIDPQSGAAVVHEIVRSFGTLKKEGWRPRRTILFASWDAEEFGLLGSTEWAEENSRLLQERGVAYINADSSIEGNYTLRVDCTPLMYSLVHNLTKELKSPDEGFEGKSLYESWTKKSPSPEFSGMPRISKLGSGNDFEVFFQRLGIASGRARYTKNWETNKFSGYPLYHSVYETYELVEKFYDPMFKYHLTVAQVRGGMVFELANSIVLPFDCRDYAVVLRKYADKIYSISMKHPQEMKTYSVSFDSLFSAVKNFTEIASKFSERLQDFDKSKHVIYAPSSHNKYAGESFPGIYDALFDIESKVDPSKAWGEVKRQIYVAAFTVQAAAETLSEVA

SEQ ID NO: 32452 - protein, 64 aa, Homo sapiens
  Payload ID: 6343
  Gene Symbol: FOLH1
  Gene Name: folate hydrolase (prostate-specific membrane antigen) 1
  ENSP ID: ENSP00000431577
MKAFLDELKAENIKKFLYNFTQIPHLAGTEQNFQLAKQIQSQWKEFGLDSVELAHYDVLLSYPN

SEQ ID NO: 32453 - protein, 74 aa, Homo sapiens
  Payload ID: 6343
  Gene Symbol: FOLH1
  Gene Name: folate hydrolase (prostate-specific membrane antigen) 1
  ENSP ID: ENSP00000434928
MWNLLHETDSAVATARRPRWLCAGALVLAGGFFLLGFLFGWFIKSSNEATNITPKHNMKAFLDELKAENIKKFL

SEQ ID NO: 32454 - protein, 46 aa, Homo sapiens
  Payload ID: 6343
  Gene Symbol: FOLH1
  Gene Name: folate hydrolase (prostate-specific membrane antigen) 1
  ENSP ID: ENSP00000436569
MWNLLHETDSAVATARRPRWLCAGALVLAGGFFLLGFLFVKVGKRN

SEQ ID NO: 32455 - protein, 257 aa, Homo sapiens
  Payload ID: 6344
  Gene Symbol: FOLR1
  Gene Name: folate receptor 1 (adult)
  Uniprot ID: P15328
  ENSP ID: ENSP00000308137
MAQRMTTQLLLLLVWVAVVGEAQTRIAWARTELLNVCMNAKHHKEKPGPEDKLHEQCRPWRKNACCSTNTSQEAHKDVSYLYRFNWNHCGEMAPACKRHFIQDTCLYECSPNLGPWIQQVDQSWRKERVLNVPLCKEDCEQWWEDCRTSYTCKSNWHKGWNWTSGFNKCAVGAACQPFHFYFPTPTVLCNEIWTHSYKVSNYSRGSGRCIQMWFDPAQGNPNEEVARFYAAAMSGAGPWAAWPFLLSLALMLLWLLS

SEQ ID NO: 32456 - protein, 257 aa, Homo sapiens; identical to SEQ ID NO: 32455
  Payload ID: 6344
  Gene Symbol: FOLR1
  Gene Name: folate receptor 1 (adult)
  Uniprot ID: P15328
  ENSP ID: ENSP00000377281

SEQ ID NO: 32457 - protein, 257 aa, Homo sapiens; identical to SEQ ID NO: 32455
  Payload ID: 6344
  Gene Symbol: FOLR1
  Gene Name: folate receptor 1 (adult)
  Uniprot ID: P15328
  ENSP ID: ENSP00000377284

SEQ ID NO: 32458 - protein, 257 aa, Homo sapiens; identical to SEQ ID NO: 32455
  Payload ID: 6344
  Gene Symbol: FOLR1
  Gene Name: folate receptor 1 (adult)
  Uniprot ID: P15328
  ENSP ID: ENSP00000377286

SEQ ID NO: 32459 - protein, 255 aa, Homo sapiens
  Payload ID: 6345
  Gene Symbol: FOLR2
  Gene Name: folate receptor 2 (fetal)
  Uniprot ID: P14207
  ENSP ID: ENSP00000298223
MVWKWMPLLLLLVCVATMCSAQDRTDLLNVCMDAKHHKTKPGPEDKLHDQCSPWKKNACCTASTSQELHKDTSRLYNFNWDHCGKMEPACKRHFIQDTCLYECSPNLGPWIQQVNQSWRKERFLDVPLCKEDCQRWWEDCHTSHTCKSNWHRGWDWTSGVNKCPAGALCRTFESYFPTPAALCEGLWSHSYKVSNYSRGSGRCIQMWFDSAQGNPNEEVARFYAAAMHVNAGEMLHGTGGLLLSLALMLQLWLLG

SEQ ID NO: 32460 - protein, 210 aa, Homo sapiens
  Payload ID: 6345
  Gene Symbol: FOLR2
  Gene Name: folate receptor 2 (fetal)
  ENSP ID: ENSP00000321957
MLPAATEVQGQKDMVWKWMPLLLLLVCVATMCSAQDRTDLLNVCMDAKHHKTKPGPEDKLHDQCSPWKKNACCTASTSQELHKDTSRLYNFNWDHCGKMEPACKRHFIQDTCLYECSPNLGPWIQQVNQSWRKERFLDVPLCKEDCQRWWEDCHTSHTCKSNWHRGWDWTSGVNKCPAGALCRTFESYFPTPAALCEGLWSHSYKVSNYS

SEQ ID NO: 32461 - protein, 251 aa, Homo sapiens
  Payload ID: 6345
  Gene Symbol: FOLR2
  Gene Name: folate receptor 2 (fetal)
  ENSP ID: ENSP00000405638
MLPAATEVQLRLQGQKDMVWKWMPLLLLLVCVATMCSAQDRTDLLNVCMDAKHHKTKPGPEDKLHDQCSPWKKNACCTASTSQELHKDTSRLYNFNWDHCGKMEPACKRHFIQDTCLYECSPNLGPWIQQVNQSWRKERFLDVPLCKEDCQRWWEDCHTSHTCKSNWHRGWDWTSAALCEGLWSHSYKVSNYSRGSGRCIQMWFDSAQGNPNEEVARFYAAAMHVNAGEMLHGTGGLLLSLALMLQLWLLG

SEQ ID NO: 32462 - protein, 214 aa, Homo sapiens
  Payload ID: 6345
  Gene Symbol: FOLR2
  Gene Name: folate receptor 2 (fetal)
  ENSP ID: ENSP00000414094
MLPAATEVQCSPWKKNACCTASTSQELHKDTSRLYNFNWDHCGKMEPACKRHFIQDTCLYECSPNLGPWIQQVNQSWRKERFLDVPLCKEDCQRWWEDCHTSHTCKSNWHRGWDWTSGVNKCPAGALCRTFESYFPTPAALCEGLWSHSYKVSNYSRGSGRCIQMWFDSAQGNPNEEVARFYAAAMHVNAGEMLHGTGGLLLSLALMLQLWLLG

SEQ ID NO: 32463 - protein, 198 aa, Homo sapiens
  Payload ID: 6345
  Gene Symbol: FOLR2
  Gene Name: folate receptor 2 (fetal)
  ENSP ID: ENSP00000438568
MLPAATELRLQGQKDMVWKWMPLLLLLVCVATMCSAQDRTDLLNVCMDAKHHKTKPGPEDKLHDQCSPWKKNACCTASTSQELHKDTSRLYNFNWDHCGKMEPACKRHFIQDTCLYECSPNLGPWIQQVNQSWRKERFLDVPLCKEDCQRWWEDCHTSHTCKSNWHRGWDWTSGVNKCPAGALCRTFESYFPTPAALC

SEQ ID NO: 32464 - protein, 169 aa, Homo sapiens
  Payload ID: 6345
  Gene Symbol: FOLR2
  Gene Name: folate receptor 2 (fetal)
  ENSP ID: ENSP00000440337
MVWKWMPLLLLLVCVATMCSAQDRTDLLNVCMDAKHHKTKPGPEDKLHDQCSPWKKNACCTASTSQELHKDTSRLYNFNWDHCGKMEPACKRHFIQDTCLYECSPNLGPWIQQVNQSWRKERFLDVPLCKEDCQRWWEDCHTSHTCKSNWHRGWDWTSAALCEGLWSHS

SEQ ID NO: 32465 - protein, 180 aa, Homo sapiens
  Payload ID: 6345
  Gene Symbol: FOLR2
  Gene Name: folate receptor 2 (fetal)
  ENSP ID: ENSP00000441547
MLPAATEGQKDMVWKWMPLLLLLVCVATMCSAQDRTDLLNVCMDAKHHKTKPGPEDKLHDQCSPWKKNACCTASTSQELHKDTSRLYNFNWDHCGKMEPACKRHFIQDTCLYECSPNLGPWIQQVNQSWRKERFLDVPLCKEDCQRWWEDCHTSHTCKSNWHRGWDWTSGVNKCPAGALC

SEQ ID NO: 32466 - protein, 148 aa, Homo sapiens
  Payload ID: 6345
  Gene Symbol: FOLR2
  Gene Name: folate receptor 2 (fetal)
  ENSP ID: ENSP00000443307
MLPAATEVQKDHAGSCGEGNLKGKKLEEGRLDTKHRAMLRLQGQKDMVWKWMPLLLLLVCVATMCSAQDRTDLLNVCMDAKHHKTKPGPEDKLHDQCSPWKKNACCTASTSQELHKDTSRLYNFNWDHCGKMEPACKRHFIQDTCLYE

SEQ ID NO: 32467 - protein, 171 aa, Homo sapiens
  Payload ID: 6345
  Gene Symbol: FOLR2
  Gene Name: folate receptor 2 (fetal)
  ENSP ID: ENSP00000444794
MVWKWMPLLLLLVCVATMCSAQDRTDLLNVCMDAKHHKTKPGPEDKLHDQCSPWKKNACCTASTSQELHKDTSRLYNFNWDHCGKMEPACKRHFIQDTCLYECSPNLGPWIQQVNQSWRKERFLDVPLCKEDCQRWWEDCHTSHTCKSNWHRGWDWTSGVNKCPAGALCRT

SEQ ID NO: 32468 - protein, 244 aa, Homo sapiens
  Payload ID: 6345
  Gene Symbol: FOLR2
  Gene Name: folate receptor 2 (fetal)
  ENSP ID: ENSP00000480592
MLPAATEVQLRLQGQKDMVWKWMPLLLLLVCVATMCSAQDRTDLLNVCMDAKHHKTKPGPEDKLHDQCSPWKKNACCTASTSQELHKDTSRLYNFNWDHCGKMEPACSATSSRTPVSMSAHQPGALDPAGIRAGAKNASWMCPYAKRTVSAGGRIVTPPTRARATGTEDGTGPQELTSAQLGLSAAPLSPTSPLQLPFVKASGVTHTRSATTAEGAAAASRCGLIQPRATPTRKWRGSMLQPCM

SEQ ID NO: 32469 - protein, 104 aa, Homo sapiens
  Payload ID: 6346
  Gene Symbol: FOLR3
  Gene Name: folate receptor 3 (gamma)
  Uniprot ID: P41439
  ENSP ID: ENSP00000411161
MAWQMMQLLLLALVTAAGSAQPRSARARTDLLNVCMNAKHHKTQPSPEDELYGQCSPWKKNACCTASTSQELHKDTSRLYNFNWDHCGKMEPTCKRHFIQDSCL

SEQ ID NO: 32470 - protein, 74 aa, Homo sapiens
  Payload ID: 6346
  Gene Symbol: FOLR3
  Gene Name: folate receptor 3 (gamma)
  ENSP ID: ENSP00000446279
MAWQMMQLLLLALVTAAGSAQPRSARARTDLLNVCMNAKHHKTQPSPEDELYGQCSPWKKNACCTASTSQELHK

SEQ ID NO: 32471 - protein, 172 aa, Homo sapiens
  Payload ID: 6346
  Gene Symbol: FOLR3
  Gene Name: folate receptor 3 (gamma)
  ENSP ID: ENSP00000481027
MDMAWQMMQLLLLALVTAAGSAQPRSARARTDLLNVCMNAKHHKTQPSPEDELYGQVGAPQGPSPGSVPLDDLPGAEEPEYGGDGCGGERLSPVSSPPSAVPGRRMPAARPAPARSCTRTPPACTTLTGITVVRWNPPASATLSRTAVSMSAHPTWGPGSGRSTRAGAKSAF

SEQ ID NO: 32472 - protein, 245 aa, Homo sapiens
  Payload ID: 6346
  Gene Symbol: FOLR3
  Gene Name: folate receptor 3 (gamma)
  ENSP ID: ENSP00000481114
MDMAWQMMQLLLLALVTAAGSAQPRSARARTDLLNVCMNAKHHKTQPSPEDELYGQCSPWKKNACCTASTSQELHKDTSRLYNFNWDHCGKMEPTCKRHFIQDSCLYECSPNLGPWIRQVNQSWRKERILNVPLCKEDCERWWEDCRTSYTCKSNWHKGWNWTSGINECPAGALCSTFESYFPTPAALCEGLWSHSFKVSNYSRGSGRCIQMWFDSAQGNPNEEVAKFYAAAMNAGAPSRGIIDS

SEQ ID NO: 32473 - protein, 178 aa, Homo sapiens
  Payload ID: 6346
  Gene Symbol: FOLR3
  Gene Name: folate receptor 3 (gamma)
  ENSP ID: ENSP00000481833
MDMAWQMMQLLLLALVTAAGSAQPRSARARTDLLNVCMNAKHHKTQPSPEDELYGQCSPWKKNACCTASTSQELHKDTSRLYNFNWDHCGKMEPTCKRHFIQDSCLYECSPNLGPWIRQVNQSWRKERILNVPLCKEDCERWWEDCRTSYTCKSNWHKGWNWTSGINECPAGALCSTF

SEQ ID NO: 32474 - protein, 669 aa, Homo sapiens
  Payload ID: 6347
  Gene Symbol: FSHR
  Gene Name: follicle stimulating hormone receptor
  Uniprot ID: P23945
  ENSP ID: ENSP00000306780
MALLLVSLLAFLSLGSGCHHRICHCSNRVFLCQESKVTEIPSDLPRNAIELRFVLTKLRVIQKGAFSGFGDLEKIEISQNDVLEVIEADVFSNLPKLHEIRIEKANNLLYINPEAFQNLPNLQYLLISNTGIKHLPDVHKIHSLQKVLLWLNKNGIQEIHNCAFNGTQLDELNLSDNNNLEELPNDVFHGASGPVILDISRTRIHSLPSYGLENLKKLRARSTYNLKKLPTLEKLVALMEASLTYPSHCCAFANWRRQISELHPICNKSILRQEVDYMTQARGQRSSLAEDNESSYSRGFDMTYTEFDYDLCNEVVDVTCSPKPDAFNPCEDIMGYNILRVLIWFISILAITGNIIVLVILTTSQYKLTVPRFLMCNLAFADLCIGIYLLLIASVDIHTKSQYHNYAIDWQTGAGCDAAGFFTVFASELSVYTLTAITLERWHTITHAMQLDCKVQLRHAASVMVMGWIFAFAAALFPIFGISSYMKVSICLPMDIDSPLSQLYVMSLLVLNVLAFVVICGCYIHIYLTVRNPNIVSSSSDTRIAKRMAMLIFTDFLCMAPISFFAISASLKVPLITVSKAKILLVLFHPINSCANPFLYAIFTKNFRRDFFILLSKCGCYEMQAQIYRTETSSTVHNTHPRNGHCSSAPRVTSGSTYILVPLSHLAQN

SEQ ID NO: 32475 - protein, 695 aa, Homo sapiens
  Payload ID: 6347
  Gene Symbol: FSHR
  Gene Name: follicle stimulating hormone receptor
  ENSP ID: ENSP00000384708
MALLLVSLLAFLSLGSGCHHRICHCSNRVFLCQESKVTEIPSDLPRNAIELRFVLTKLRVIQKGAFSGFGDLEKIEISQNDVLEVIEADVFSNLPKLHEIRIEKANNLLYINPEAFQNLPNLQYLLISNTGIKHLPDVHKIHSLQKVLLDIQDNINIHTIERNSFVGLSFESVILWLNKNGIQEIHNCAFNGTQLDELNLSDNNNLEELPNDVFHGASGPVILDISRTRIHSLPSYGLENLKKLRARSTYNLKKLPTLEKLVALMEASLTYPSHCCAFANWRRQISELHPICNKSILRQEVDYMTQARGQRSSLAEDNESSYSRGFDMTYTEFDYDLCNEVVDVTCSPKPDAFNPCEDIMGYNILRVLIWFISILAITGNIIVLVILTTSQYKLTVPRFLMCNLAFADLCIGIYLLLIASVDIHTKSQYHNYAIDWQTGAGCDAAGFFTVFASELSVYTLTAITLERWHTITHAMQLDCKVQLRHAASVMVMGWIFAFAAALFPIFGISSYMKVSICLPMDIDSPLSQLYVMSLLVLNVLAFVVICGCYIHIYLTVRNPNIVSSSSDTRIAKRMAMLIFTDFLCMAPISFFAISASLKVPLITVSKAKILLVLFHPINSCANPFLYAIFTKNFRRDFFILLSKCGCYEMQAQIYRTETSSTVHNTHPRNGHCSSAPRVTSGSTYILVPLSHLAQN

SEQ ID NO: 32476 - protein, 152 aa, Homo sapiens
  Payload ID: 6347
  Gene Symbol: FSHR
  Gene Name: follicle stimulating hormone receptor
  ENSP ID: ENSP00000405775
MALLLVSLLAFLSLGSGCHHRICHCSNRVFLCQESKVTEIPSDLPRNAIELRFVLTKLRVIQKGAFSGFGDLEKIEISQNDVLEVIEADVFSNLPKLHEIRIEKANNLLYINPEAFQNLPNLQYLSFSSFVLENAKVENGDHRAFSDRTNAL

SEQ ID NO: 32477 - protein, 278 aa, Homo sapiens
  Payload ID: 6347
  Gene Symbol: FSHR
  Gene Name: follicle stimulating hormone receptor
  ENSP ID: ENSP00000415504
MALLLVSLLAFLSLGSGCHHRICHCSNRVFLCQESKVTEIPSDLPRNAIELRFVLTKLRVIQKGAFSGFGDLEKIEISQNDVLEVIEADVFSNLPKLHEIRIEKANNLLYINPEAFQNLPNLQYLLISNTGIKHLPDVHKIHSLQKVLLDIQDNINIHTIERNSFVGLSFESVILWLNKNGIQEIHNCAFNGTQLDELNLSDNNNLEELPNDVFHGASGPVILSELHPICNKSILRQEVDYMTQARGQRSSLAEDNESSYSRGFDMTYTEFDYDLCNE

SEQ ID NO: 32478 - protein, 129 aa, Homo sapiens
  Payload ID: 6348
  Gene Symbol: FSHB
  Gene Name: follicle stimulating hormone, beta polypeptide
  Uniprot ID: P01225
  ENSP ID: ENSP00000254122
MKTLQFFFLFCCWKAICCNSCELTNITIAIEKEECRFCISINTTWCAGYCYTRDLVYKDPARPKIQKTCTFKELVYETVRVPGCAHHADSLYTYPVATQCHCGKCDSDSTDCTVRGLGPSYCSFGEMKE

SEQ ID NO: 32479 - protein, 129 aa, Homo sapiens; identical to SEQ ID NO: 32478
  Payload ID: 6348
  Gene Symbol: FSHB
  Gene Name: follicle stimulating hormone, beta polypeptide
  Uniprot ID: P01225
  ENSP ID: ENSP00000416606

SEQ ID NO: 32480 - protein, 129 aa, Homo sapiens; identical to SEQ ID NO: 32478
  Payload ID: 6348
  Gene Symbol: FSHB
  Gene Name: follicle stimulating hormone, beta polypeptide
  Uniprot ID: P01225
  ENSP ID: ENSP00000433424

SEQ ID NO: 32481 - protein, 85 aa, Homo sapiens
  Payload ID: 6349
  Gene Symbol: FDCSP
  Gene Name: follicular dendritic cell secreted protein
  Uniprot ID: Q8NFU4
  ENSP ID: ENSP00000318437
MKKVLLLITAILAVAVGFPVSQDQEREKRSISDSDELASGFFVFPYPYPFRPLPPIPFPRFPWFRRNFPIPIPESAPTTPLPSEK

SEQ ID NO: 32482 - protein, 579 aa, Homo sapiens
  Payload ID: 6350
  Gene Symbol: FLCN
  Gene Name: folliculin
  Uniprot ID: Q8NFG4
  ENSP ID: ENSP00000285071
MNAIVALCHFCELHGPRTLFCTEVLHAPLPQGDGNEDSPGQGEQAEEEEGGIQMNSRMRAHSPAEGASVESSSPGPKKSDMCEGCRSLAAGHPGYISHDKETSIKYVSHQHPSHPQLFSIVRQACVRSLSCEVCPGREGPIFFGDEQHGFVFSHTFFIKDSLARGFQRWYSIITIMMDRIYLINSWPFLLGKVRGIIDELQGKALKVFEAEQFGCPQRAQRMNTAFTPFLHQRNGNAARSLTSLTSDDNLWACLHTSFAWLLKACGSRLTEKLLEGAPTEDTLVQMEKLADLEEESESWDNSEAEEEEKAPVLPESTEGRELTQGPAESSSLSGCGSWQPRKLPVFKSLRHMRQVLGAPSFRMLAWHVLMGNQVIWKSRDVDLVQSAFEVLRTMLPVGCVRIIPYSSQYEEAYRCNFLGLSPHVQIPPHVLSSEFAVIVEVHAAARSTLHPVGCEDDQSLSKYEFVVTSGSPVAADRVGPTILNKIEAALTNQNLSVDVVDQCLVCLKEEWMNKVKVLFKFTKVDSRPKEDTQKLLSILGASEEDNVKLLKFWMTGLSKTYKSHLMSTVRSPTASESRN

SEQ ID NO: 32483 - protein, 342 aa, Homo sapiens
  Payload ID: 6350
  Gene Symbol: FLCN
  Gene Name: folliculin
  Uniprot ID: Q8NFG4
  ENSP ID: ENSP00000373821
MNAIVALCHFCELHGPRTLFCTEVLHAPLPQGDGNEDSPGQGEQAEEEEGGIQMNSRMRAHSPAEGASVESSSPGPKKSDMCEGCRSLAAGHPGYISHDKETSIKYVSHQHPSHPQLFSIVRQACVRSLSCEVCPGREGPIFFGDEQHGFVFSHTFFIKDSLARGFQRWYSIITIMMDRIYLINSWPFLLGKVRGIIDELQGKALKVFEAEQFGCPQRAQRMNTAFTPFLHQRNGNAARSLTSLTSDDNLWACLHTSFAWLLKACGSRLTEKLLEGAPTEDTLVQMEKLAGEAGVLLPGPWPGWPWGGTSCLLSWQESLREGNAALNQPRTSLREAHPPISV

SEQ ID NO: 32484 - protein, 153 aa, Homo sapiens
  Payload ID: 6350
  Gene Symbol: FLCN
  Gene Name: folliculin
  ENSP ID: ENSP00000410410
MNSRMRAHSPAEGASVESSSPGPKKSDMCEGCRSLAAGHPGYISHDKETSIKYVSHQHPSHPQLFSIVRQACVRSLSCEVCPGREGPIFFGDEQHGFVFSHTFFIKDSLARGFQRWYSIITIMMDRIYLINSWPFLLGKVRGIIDELQGKALK

SEQ ID NO: 32485 - protein, 37 aa, Homo sapiens
  Payload ID: 6350
  Gene Symbol: FLCN
  Gene Name: folliculin
  ENSP ID: ENSP00000463970
MNAIVALCHFCELHGPRTLFCTEVLHAPLPQGDGNED

SEQ ID NO: 32486 - protein, 1138 aa, Homo sapiens
  Payload ID: 6351
  Gene Symbol: FNIP1
  Gene Name: folliculin interacting protein 1
  Uniprot ID: Q8TF40
  ENSP ID: ENSP00000309266
MAPTLFQKLFSKRTGLGAPGRDARDPDCGFSWPLPEFDPSQIRLIVYQDCERRGRNVLFDSSVKRRNEDISVSKLGSDAQVKVFGKCCQLKPGGDSSSSLDSSVTSSSDIKDQCLKYQGSRCSSDANMLGEMMFGSVAMSYKGSTLKIHQIRSPPQLMLSKVFTARTGSSICGSLNTLQDSLEFINQDNNTLKADNNTVINGLLGNIVHSNPMDMPGRELNEDRDSGIARSASLSSLLITPFPSPNSSLTRSCASSYQRRWRRSQTTSLENGVFPRWSIEESFNLSDESCGPNPGIVRKKKIAIGVIFSLSKDEDENNKFNEFFFSHFPLFESHMNKLKSAIEQAMKMSRRSADASQRSLAYNRIVDALNEFRTTICNLYTMPRIGEPVWLTMMSGTPEKNHLCYRFMKEFTFLMENASKNQFLPALITAVLTNHLAWVPTVMPNGQPPIKIFLEKHSSQSVDMLAKTHPYNPLWAQLGDLYGAIGSPVRLARTVVVGKRQDMVQRLLYFLTYFIRCSELQETHLLENGEDEAIVMPGTVITTTLEKGEIEESEYVLVTMHRNKSSLLFKESEEIRTPNCNCKYCSHPLLGQNVENISQQEREDIQNSSKELLGISDECQMISPSDCQEENAVDVKQYRDKLRTCFDAKLETVVCTGSVPVDKCALSESGLESTEETWQSEKLLDSDSHTGKAMRSTGMVVEKKPPDKIVPASFSCEAAQTKVTFLIGDSMSPDSDTELRSQAVVDQITRHHTKPLKEERGAIDQHQETKQTTKDQSGESDTQNMVSEEPCELPCWNHSDPESMSLFDEYFNDDSIETRTIDDVPFKTSTDSKDHCCMLEFSKILCTKNNKQNNEFCKCIETVPQDSCKTCFPQQDQRDTLSILVPHGDKESSDKKIAVGTEWDIPRNESSDSALGDSESEDTGHDMTRQVSSYYGGEQEDWAEEDEIPFPGSKLIEVSAVQPNIANFGRSLLGGYCSSYVPDFVLQGIGSDERFRQCLMSDLSHAVQHPVLDEPIAEAVCIIADMDKWTVQVASSQRRVTDNKLGKEVLVSSLVSNLLHSTLQLYKHNLSPNFCVMHLEDRLQELYFKSKMLSEYLRGQMRVHVKELGVVLGIESSDLPLLAAVASTHSPYVAQILL

SEQ ID NO: 32487 - protein, 1121 aa, Homo sapiens
  Payload ID: 6351
  Gene Symbol: FNIP1
  Gene Name: folliculin interacting protein 1
  ENSP ID: ENSP00000310453
MAPTLFQKLFSKRTGLGAPGRDARDPDCGFSWPLPEFDPSQIRLIVYQDCERRGRNVLFDSSVKRRNEDISVSGSRCSSDANMLGEMMFGSVAMSYKGSTLKIHQIRSPPQLMLSKVFTARTGSSICGSLNTLQDSLEFINQDNNTLKADNNTVINGLLGNIGLSQFCSPRRAFSEQGPLRLIRSASFFAVHSNPMDMPGRELNEDRDSGIARSASLSSLLITPFPSPNSSLTRSCASSYQRRWRRSQTTSLENGVFPRWSIEESFNLSDESCGPNPGIVRKKKIAIGVIFSLSKDEDENNKFNEFFFSHFPLFESHMNKLKSAIEQAMKMSRRSADASQRSLAYNRIVDALNEFRTTICNLYTMPRIGEPVWLTMMSGTPEKNHLCYRFMKEFTFLMENASKNQFLPALITAVLTNHLAWVPTVMPNGQPPIKIFLEKHSSQSVDMLAKTHPYNPLWAQLGDLYGAIGSPVRLARTVVVGKRQDMVQRLLYFLTYFIRCSELQETHLLENGEDEAIVMPGTVITTTLEKGEIEESEYVLVTMHRNKSSLLFKESEEIRTPNCNCKYCSHPLLGQNVENISQQEREDIQNSSKELLGISDECQMISPSDCQEENAVDVKQYRDKLRTCFDAKLETVVCTGSVPVDKCALSESGLESTEETWQSEKLLDSDSHTGKAMRSTGMVVEKKPPDKIVPASFSCEAAQTKVTFLIGDSMSPDSDTELRSQAVVDQITRHHTKPLKEERGAIDQHQETKQTTKDQSGESDTQNMVSEEPCELPCWNHSDPESMSLFDEYFNDDSIETRTIDDVPFKTSTDSKDHCCMLEFSKILCTKNNKQNNEFCKCIETVPQDSCKTCFPQQDQRDTLSILVPHGDKESSDKKIAVGTEWDIPRNESSDSALGDSESEDTGHDMTRQVSSYYGGEQEDWAEEDEIPFPGSKLIEVSAVQPNIANFGRSLLGGYCSSYVPDFVLQGIGSDERFRQCLMSDLSHAVQHPVLDEPIAEAVCIIADMDKWTVQVASSQRRVTDNKLGKEVLVSSLVSNLLHSTLQLYKHNLSPNFCVMHLEDRLQELYFKSKMLSEYLRGQMRVHVKELGVVLGIESSDLPLLAAVASTHSPYVAQILL

SEQ ID NO: 32488 - protein, 1166 aa, Homo sapiens
  Payload ID: 6351
  Gene Symbol: FNIP1
  Gene Name: folliculin interacting protein 1
  Uniprot ID: Q8TF40
  ENSP ID: ENSP00000421985
MAPTLFQKLFSKRTGLGAPGRDARDPDCGFSWPLPEFDPSQIRLIVYQDCERRGRNVLFDSSVKRRNEDISVSKLGSDAQVKVFGKCCQLKPGGDSSSSLDSSVTSSSDIKDQCLKYQGSRCSSDANMLGEMMFGSVAMSYKGSTLKIHQIRSPPQLMLSKVFTARTGSSICGSLNTLQDSLEFINQDNNTLKADNNTVINGLLGNIGLSQFCSPRRAFSEQGPLRLIRSASFFAVHSNPMDMPGRELNEDRDSGIARSASLSSLLITPFPSPNSSLTRSCASSYQRRWRRSQTTSLENGVFPRWSIEESFNLSDESCGPNPGIVRKKKIAIGVIFSLSKDEDENNKFNEFFFSHFPLFESHMNKLKSAIEQAMKMSRRSADASQRSLAYNRIVDALNEFRTTICNLYTMPRIGEPVWLTMMSGTPEKNHLCYRFMKEFTFLMENASKNQFLPALITAVLTNHLAWVPTVMPNGQPPIKIFLEKHSSQSVDMLAKTHPYNPLWAQLGDLYGAIGSPVRLARTVVVGKRQDMVQRLLYFLTYFIRCSELQETHLLENGEDEAIVMPGTVITTTLEKGEIEESEYVLVTMHRNKSSLLFKESEEIRTPNCNCKYCSHPLLGQNVENISQQEREDIQNSSKELLGISDECQMISPSDCQEENAVDVKQYRDKLRTCFDAKLETVVCTGSVPVDKCALSESGLESTEETWQSEKLLDSDSHTGKAMRSTGMVVEKKPPDKIVPASFSCEAAQTKVTFLIGDSMSPDSDTELRSQAVVDQITRHHTKPLKEERGAIDQHQETKQTTKDQSGESDTQNMVSEEPCELPCWNHSDPESMSLFDEYFNDDSIETRTIDDVPFKTSTDSKDHCCMLEFSKILCTKNNKQNNEFCKCIETVPQDSCKTCFPQQDQRDTLSILVPHGDKESSDKKIAVGTEWDIPRNESSDSALGDSESEDTGHDMTRQVSSYYGGEQEDWAEEDEIPFPGSKLIEVSAVQPNIANFGRSLLGGYCSSYVPDFVLQGIGSDERFRQCLMSDLSHAVQHPVLDEPIAEAVCIIADMDKWTVQVASSQRRVTDNKLGKEVLVSSLVSNLLHSTLQLYKHNLSPNFCVMHLEDRLQELYFKSKMLSEYLRGQMRVHVKELGVVLGIESSDLPLLAAVASTHSPYVAQILL

SEQ ID NO: 32489 - protein, 508 aa, Homo sapiens
  Payload ID: 6351
  Gene Symbol: FNIP1
  Gene Name: folliculin interacting protein 1
  Uniprot ID: Q8TF40
  ENSP ID: ENSP00000425619
MAPTLFQKLFSKRTGLGAPGRDARDPDCGFSWPLPEFDPSQIRLIVYQDCERRGRNVLFDSSVKRRNEDISVSKLGSDAQVKVFGKCCQLKPGGDSSSSLDSSVTSSSDIKDQCLKYQGSRCSSDANMLGEMMFGSVAMSYKGSTLKIHQIRSPPQLMLSKVFTARTGSSICGSLNTLQDSLEFINQDNNTLKADNNTVINGLLGNIGLSQFCSPRRAFSEQGPLRLIRSASFFAVHSNPMDMPGRELNEDRDSGIARSASLSSLLITPFPSPNSSLTRSCASSYQRRWRRSQTTSLENGVFPRWSIEESFNLSDESCGPNPGIVRKKKIAIGVIFSLSKDEDENNKFNEFFFSHFPLFESHMNKLKSAIEQAMKMSRRSADASQRSLAYNRIVDALNEFRTTICNLYTMPRIGEPVWLTMMSGTPEKNHLCYRFMKEFTFLMENASKNQFLPALITAVLTNHLAWVPTVMPNGQPPIKIFLEKHSSQSVDMLAKTHPYNPLWAQLGM

SEQ ID NO: 32490 - protein, 918 aa, Homo sapiens
  Payload ID: 6351
  Gene Symbol: FNIP1
  Gene Name: folliculin interacting protein 1
  ENSP ID: ENSP00000480650
MDMPGRELNEDRDSGIARSASLSSLLITPFPSPNSSLTRSCASSYQRRWRRSQTTSLENGVFPRWSIEESFNLSDESCGPNPGIVRKKKIAIGVIFSLSKDEDENNKFNEFFFSHFPLFESHMNKLKSAIEQAMKMSRRSADASQRSLAYNRIVDALNEFRTTICNLYTMPRIGEPVWLTMMSGTPEKNHLCYRFMKEFTFLMENASKNQFLPALITAVLTNHLAWVPTVMPNGQPPIKIFLEKHSSQSVDMLAKTHPYNPLWAQLGDLYGAIGSPVRLARTVVVGKRQDMVQRLLYFLTYFIRCSELQETHLLENGEDEAIVMPGTVITTTLEKGEIEESEYVLVLLFKESEEIRTPNCNCKYCSHPLLGQNVENISQQEREDIQNSSKELLGISDECQMISPSDCQEENAVDVKQYRDKLRTCFDAKLETVVCTGSVPVDKCALSESGLESTEETWQSEKLLDSDSHTGKAMRSTGMVVEKKPPDKIVPASFSCEAAQTKVTFLIGDSMSPDSDTELRSQAVVDQITRHHTKPLKEERGAIDQHQETKQTTKDQSGESDTQNMVSEEPCELPCWNHSDPESMSLFDEYFNDDSIETRTIDDVPFKTSTDSKDHCCMLEFSKILCTKNNKQNNEFCKCIETVPQDSCKTCFPQQDQRDTLSILVPHGDKESSDKKIAVGTEWDIPRNESSDSALGDSESEDTGHDMTRQVSSYYGGEQEDWAEEDEIPFPGSKLIEVSAVQPNIANFGRSLLGGYCSSYVPDFVLQGIGSDERFRQCLMSDLSHAVQHPVLDEPIAEAVCIIADMDKWTVQVASSQRRVTDNKLGKEVLVSSLVSNLLHSTLQLYKHNLSPNFCVMHLEDRLQELYFKSKMLSEYLRGQMRVHVKELGVVLGIESSDLPLLAAVASTHSPYVAQILL

SEQ ID NO: 32491 - protein, 1114 aa, Homo sapiens
  Payload ID: 6352
  Gene Symbol: FNIP2
  Gene Name: folliculin interacting protein 2
  Uniprot ID: Q9P278
  ENSP ID: ENSP00000264433
MAPTLLQKLFNKRGSSGSSAAASAQGRAPKEGPAFSWSCSEFDLNEIRLIVYQDCDRRGRQVLFDSKAVQKIEEVTAQKTEDVPIKISAKCCQGSSSVSSSSSSSISSHSSSGGSSHHAKEQLPKYQYTRPASDVNMLGEMMFGSVAMSYKGSTLKIHYIRSPPQLMISKVFSARMGSFCGSTNNLQDSFEYINQDPNLGKLNTNQNSLGPCRTGSNLAHSTPVDMPSRGQNEDRDSGIARSASLSSLLITPFPSPSSSTSSSSSYQRRWLRSQTTSLENGIIPRRSTDETFSLAEETCSSNPAMVRRKKIAISIIFSLCEKEEAQRNFQDFFFSHFPLFESHMNRLKSAIEKAMISCRKIAESSLRVQFYVSRLMEALGEFRGTIWNLYSVPRIAEPVWLTMMSGTLEKNQLCQRFLKEFTLLIEQINKNQFFAALLTAVLTYHLAWVPTVMPVDHPPIKAFSEKRTSQSVNMLAKTHPYNPLWAQLGDLYGAIGSPVRLTRTVVVGKQKDLVQRILYVLTYFLRCSELQENQLTWSGNHGEGDQVLNGSKIITALEKGEVEESEYVVITVRNEPALVPPILPPTAAERHNPWPTGFPECPEGTDSRDLGLKPDKEANRRPEQGSEACSAGCLGPASDASWKPQNAFCGDEKNKEAPQDGSSRLPSCEVLGAGMKMDQQAVCELLKVEMPTRLPDRSVAWPCPDRHLREKPSLEKVTFQIGSFASPESDFESRMKKMEERVKACGPSLEASEAADVAQDPQVSRSPFKPGFQENVCCPQNRLSEGDEGESDKGFAEDRGSRNDMAADIAGQLSHAADLGTASHGAGGTGGRRLEATRGLYVKAAEGPVLEPVAPRCVQRGPGLVAGANIPCGDDNKKANFRTEGDIPRNESSDSALGDSDDEACASAMLDLGHGGDRTGGSLEVELPLPRSQSISTQNVRNFGRSLLAGYCPTYMPDLVLHGTGSDEKLKQCLVADLVHTVHHPVLDEPIAEAVCIIADTDKWSVQVATSQRKVTDNMKLGQDVLVSSQVSSLLQSILQLYKLHLPADFCIMHLEDRLQEMYLKSKMLSEYLRGHTRVHVKELGVVLGIESNDLPLLTAIASTHSPYVAQILL

SEQ ID NO: 32492 - protein, 241 aa, Homo sapiens
  Payload ID: 6352
  Gene Symbol: FNIP2
  Gene Name: folliculin interacting protein 2
  ENSP ID: ENSP00000420841
LMISKVFSARMGSFCGSTNNLQDSFEYINQDPNLGKLNTNQNSLGPCRTGSNLGLLQACSSKLLQGVAEGGPLRLTRSASFFAAHSTPVDMPSRGQNEDRDSGIARSASLSSLLITPFPSPSSSTSSSSSYQRRWLRSQTTSLENGIIPRRSTDETFSLAEETCSSNPAMVRRKKIAISIIFSLCEKEEAQRNFQDFFFSHFPLFESHMNRLKSAIEKAMISCRKIAESSLRVQFYVSRLM

SEQ ID NO: 32493 - protein, 673 aa, Homo sapiens
  Payload ID: 6352
  Gene Symbol: FNIP2
  Gene Name: folliculin interacting protein 2
  ENSP ID: ENSP00000421488
MCGGTANTTNQPESWQDSARCVSDAVPGAGRIYRALLCTKIKKHTGVDRSTDHTELDNSWSCSEFDLNEIRLIVYQDCDRRGRQVLFDSKAVQKIEEVTAQKTEDVPIKISAKCCQGSSSVSSSSSSSISSHSSSGGSSHHAKEQLPKYQYTRPASDVNMLGEMMFGSVAMSYKGSTLKIHYIRSPPQLMISKVFSARMGSFCGSTNNLQDSFEYINQDPNLGKLNTNQNSLGPCRTGSNLAHSTPVDMPSRGQNEDRDSGIARSASLSSLLITPFPSPSSSTSSSSSYQRRWLRSQTTSLENGIIPRRSTDETFSLAEETCSSNPAMVRRKKIAISIIFSLCEKEEAQRNFQDFFFSHFPLFESHMNRLKSAIEKAMISCRKIAESSLRVQFYVSRLMEALGEFRGTIWNLYSVPRIAEPVWLTMMSGTLEKNQLCQRFLKEFTLLIEQINKNQFFAALLTAVLTYHLAWVPTVMPVDHPPIKAFSEKRTSQSVNMLAKTHPYNPLWAQLGDLYGAIGSPVRLTRTVVVGKQKDLVQRILYVLTYFLRCSELQENQLTWSGNHGEGDQVLNGSKIITALEKGEVEESEYVVITVRNEPALVPPILPPTAAERHNPWPTGFPECPEGTDSRDLGLKPDKEANRRPEQGSEACSAGCLGPASDASWKPQNAFCG

SEQ ID NO: 32494 - protein, 219 aa, Homo sapiens
  Payload ID: 6353
  Gene Symbol: FIGLA
  Gene Name: folliculogenesis specific bHLH transcription factor
  Uniprot ID: Q6QHK4
  ENSP ID: ENSP00000333097
MDPAPGVLDPRAAPPALLGTPQAEVLEDVLREQFGPLPQLAAVCRLKRLPSGGYSSTENLQLVLERRRVANAKERERIKNLNRGFARLKALVPFLPQSRKPSKVDILKGATEYIQVLSDLLEGAKDSKKQDPDEQSYSNNSSESHTSSARQLSRNITQHISCAFGLKNEEEGPWADGGSGEPAHACRHSVMSTTEIISPTRSLDRFPEVELLSHRLPQV

SEQ ID NO: 32495 - protein, 344 aa, Homo sapiens
  Payload ID: 6354
  Gene Symbol: FST
  Gene Name: follistatin
  Uniprot ID: P19883
  ENSP ID: ENSP00000256759
MVRARHQPGGLCLLLLLLCQFMEDRSAQAGNCWLRQAKNGRCQVLYKTELSKEECCSTGRLSTSWTEEDVNDNTLFKWMIFNGGAPNCIPCKETCENVDCGPGKKCRMNKKNKPRCVCAPDCSNITWKGPVCGLDGKTYRNECALLKARCKEQPELEVQYQGRCKKTCRDVFCPGSSTCVVDQTNNAYCVTCNRICPEPASSEQYLCGNDGVTYSSACHLRKATCLLGRSIGLAYEGKCIKAKSCEDIQCTGGKKCLWDFKVGRGRCSLCDELCPDSKSDEPVCASDNATYASECAMKEAACSSGVLLEVKHSGSCNSISEDTEEEEEDEDQDYSFPISSILEW

SEQ ID NO: 32496 - protein, 317 aa, Homo sapiens
  Payload ID: 6354
  Gene Symbol: FST
  Gene Name: follistatin
  Uniprot ID: P19883
  ENSP ID: ENSP00000380151
MVRARHQPGGLCLLLLLLCQFMEDRSAQAGNCWLRQAKNGRCQVLYKTELSKEECCSTGRLSTSWTEEDVNDNTLFKWMIFNGGAPNCIPCKETCENVDCGPGKKCRMNKKNKPRCVCAPDCSNITWKGPVCGLDGKTYRNECALLKARCKEQPELEVQYQGRCKKTCRDVFCPGSSTCVVDQTNNAYCVTCNRICPEPASSEQYLCGNDGVTYSSACHLRKATCLLGRSIGLAYEGKCIKAKSCEDIQCTGGKKCLWDFKVGRGRCSLCDELCPDSKSDEPVCASDNATYASECAMKEAACSSGVLLEVKHSGSCN

SEQ ID NO: 32497 - protein, 215 aa, Homo sapiens
  Payload ID: 6354
  Gene Symbol: FST
  Gene Name: follistatin
  ENSP ID: ENSP00000426315
GPVCGLDGKTYRNECALLKARCKEQPELEVQYQGRCKKTCRDVFCPGSSTCVVDQTNNAYCVTCNRICPEPASSEQYLCGNDGVTYSSACHLRKATCLLGRSIGLAYEGKCITKSCEDIQCTGGKKCLWDFKVGRGRCSLCDELCPDSKSDEPVCASDNATYASECAMKEAACSSGVLLEVKHSGSCNSISEDTEEEEEDEDQDYSFPISSILEW

SEQ ID NO: 32498 - protein, 102 aa, Homo sapiens
  Payload ID: 6354
  Gene Symbol: FST
  Gene Name: follistatin
  ENSP ID: ENSP00000426971
  MOD_RES (1)..(1): Any amino acid
XSACHLRKATCLLGRSIGLAYEGKCITKSCEDIQCTGGKKCLWDFKVGRGRCSLCDELCPDSKSDEPVCASDNATYASECAMKEAACSSGVLLEVKHSGSCN

SEQ ID NO: 32499 - protein, 308 aa, Homo sapiens
  Payload ID: 6355
  Gene Symbol: FSTL1
  Gene Name: follistatin-like 1
  Uniprot ID: Q12841
  ENSP ID: ENSP00000295633
MWKRWLALALALVAVAWVRAEEELRSKSKICANVFCGAGRECAVTEKGEPTCLCIEQCKPHKRPVCGSNGKTYLNHCELHRDACLTGSKIQVDYDGHCKEKKSVSPSASPVVCYQSNRDELRRRIIQWLEAEIIPDGWFSKGSNYSEILDKYFKNFDNGDSRLDSSEFLKFVEQNETAINITTYPDQENNKLLRGLCVDALIELSDENADWKLSFQEFLKCLNPSFNPPEKKCALEDETYADGAETEVDCNRCVCACGNWVCTAMTCDGKNQKGAQTQTEEEMTRYVQELQKHQETAEKTKRVSTKEI

SEQ ID NO: 32500 - protein, 273 aa, Homo sapiens
  Payload ID: 6355
  Gene Symbol: FSTL1
  Gene Name: follistatin-like 1
  Uniprot ID: Q12841
  ENSP ID: ENSP00000394355
MWKRWLALALALVAVAWVRAEQCKPHKRPVCGSNGKTYLNHCELHRDACLTGSKIQVDYDGHCKEKKSVSPSASPVVCYQSNRDELRRRIIQWLEAEIIPDGWFSKGSNYSEILDKYFKNFDNGDSRLDSSEFLKFVEQNETAINITTYPDQENNKLLRGLCVDALIELSDENADWKLSFQEFLKCLNPSFNPPEKKCALEDETYADGAETEVDCNRCVCACGNWVCTAMTCDGKNQKGAQTQTEEEMTRYVQELQKHQETAEKTKRVSTKEI

SEQ ID NO: 32501 - protein, 20 aa, Homo sapiens
  Payload ID: 6355
  Gene Symbol: FSTL1
  Gene Name: follistatin-like 1
  ENSP ID: ENSP00000418389
  MOD_RES (1)..(1): Any amino acid
XSFQEFLKCLNPSFNPPEKK

SEQ ID NO: 32502 - protein, 139 aa, Homo sapiens
  Payload ID: 6355
  Gene Symbol: FSTL1
  Gene Name: follistatin-like 1
  ENSP ID: ENSP00000418505
MWKRWLALALALVAVAWVRAEEELRSKSKICANVFCGAGRECAVTEKGEPTCLCIEQCKPHKRPVCGSNGKTYLNHCELHRDACLTGSKIQVDYDGHCKEKKSVSPSASPVVCYQSNRDELRRRIIQWLEAEIIPDGWF

SEQ ID NO: 32503 - protein, 263 aa, Homo sapiens
  Payload ID: 6356
  Gene Symbol: FSTL3
  Gene Name: follistatin-like 3 (secreted glycoprotein)
  Uniprot ID: O95633
  ENSP ID: ENSP00000166139
MRPGAPGPLWPLPWGALAWAVGFVSSMGSGNPAPGGVCWLQQGQEATCSLVLQTDVTRAECCASGNIDTAWSNLTHPGNKINLLGFLGLVHCLPCKDSCDGVECGPGKACRMLGGRPRCECAPDCSGLPARLQVCGSDGATYRDECELRAARCRGHPDLSVMYRGRCRKSCEHVVCPRPQSCVVDQTGSAHCVVCRAAPCPVPSSPGQELCGNNNVTYISSCHMRQATCFLGRSIGVRHAGSCAGTPEEPPGGESAEEEENFV

SEQ ID NO: 32504 - protein, 40 aa, Homo sapiens
  Payload ID: 6356
  Gene Symbol: FSTL3
  Gene Name: follistatin-like 3 (secreted glycoprotein)
  ENSP ID: ENSP00000466383
MRQATCFLGRSIGVRHAGSCAGTPEEPPGGESAEEEENFV

SEQ ID NO: 32505 - protein, 91 aa, Homo sapiens
  Payload ID: 6356
  Gene Symbol: FSTL3
  Gene Name: follistatin-like 3 (secreted glycoprotein)
  ENSP ID: ENSP00000477770
MRQATCFLGRSIGVRHAGSCAGADAGRGHRPVLGAGEPPALRPQCSYRPLQAPLRSRQVVSLQKRKRTSCEPAGQAWAWCPRPPIIPCYLL

SEQ ID NO: 32506 - protein, 40 aa, Homo sapiens; identical to SEQ ID NO: 32504
  Payload ID: 6356
  Gene Symbol: FSTL3
  Gene Name: follistatin-like 3 (secreted glycoprotein)
  ENSP ID: ENSP00000483064

SEQ ID NO: 32507 - protein, 84 aa, Homo sapiens
  Payload ID: 6356
  Gene Symbol: FSTL3
  Gene Name: follistatin-like 3 (secreted glycoprotein)
  ENSP ID: ENSP00000484376
MLGGRPRCECAPDCSGLPARLQVCGSDGATYRDECELRAARCRGHPDLSVMYRGRCRKSCEHVVCPRPQSCVVDQTGSAHCVVC

SEQ ID NO: 32508 - protein, 40 aa, Homo sapiens; identical to SEQ ID NO: 32504
  Payload ID: 6356
  Gene Symbol: FSTL3
  Gene Name: follistatin-like 3 (secreted glycoprotein)
  ENSP ID: ENSP00000484412

SEQ ID NO: 32509 - protein, 842 aa, Homo sapiens
  Payload ID: 6357
  Gene Symbol: FSTL4
  Gene Name: follistatin-like 4
  Uniprot ID: Q6MZW2
  ENSP ID: ENSP00000265342
MKPGGFWLHLTLLGASLPAALGWMDPGTSRGPDVGVGESQAEEPRSFEVTRREGLSSHNELLASCGKKFCSRGSRCVLSRKTGEPECQCLEACRPSYVPVCGSDGRFYENHCKLHRAACLLGKRITVIHSKDCFLKGDTCTMAGYARLKNVLLALQTRLQPLQEGDSRQDPASQKRLLVESLFRDLDADGNGHLSSSELAQHVLKKQDLDEDLLGCSPGDLLRFDDYNSDSSLTLREFYMAFQVVQLSLAPEDRVSVTTVTVGLSTVLTCAVHGDLRPPIIWKRNGLTLNFLDLEDINDFGEDDSLYITKVTTIHMGNYTCHASGHEQLFQTHVLQVNVPPVIRVYPESQAQEPGVAASLRCHAEGIPMPRITWLKNGVDVSTQMSKQLSLLANGSELHISSVRYEDTGAYTCIAKNEVGVDEDISSLFIEDSARKTLANILWREEGLSVGNMFYVFSDDGIIVIHPVDCEIQRHLKPTEKIFMSYEEICPQREKNATQPCQWVSAVNVRNRYIYVAQPALSRVLVVDIQAQKVLQSIGVDPLPAKLSYDKSHDQVWVLSWGDVHKSRPSLQVITEASTGQSQHLIRTPFAGVDDFFIPPTNLIINHIRFGFIFNKSDPAVHKVDLETMMPLKTIGLHHHGCVPQAMAHTHLGGYFFIQCRQDSPASAARQLLVDSVTDSVLGPNGDVTGTPHTSPDGRFIVSAAADSPWLHVQEITVRGEIQTLYDLQINSGISDLAFQRSFTESNQYNIYAALHTEPDLLFLELSTGKVGMLKNLKEPPAGPAQPWGGTHRIMRDSGLFGQYLLTPARESLFLINGRQNTLRCEVSGIKGGTTVVWVGEV

SEQ ID NO: 32510 - protein, 157 aa, Homo sapiens
  Payload ID: 6357
  Gene Symbol: FSTL4
  Gene Name: follistatin-like 4
  ENSP ID: ENSP00000427662
MNPVPQMEMQKSPVFCVAHAGSCRPELFLFGHLGSSWGLDLKEEEPRSFEVTRREGLSSHNELLASCGKKFCSRGSRCVLSRKTGEPECQCLEACRPSYVPVCGSDGRFYENHCKLHRAACLLGKRITVIHSKDCFLKGDTCTMAGYARLKNVLLAL

SEQ ID NO: 32511 - protein, 673 aa, Homo sapiens
  Payload ID: 6357
  Gene Symbol: FSTL4
  Gene Name: follistatin-like 4
  Uniprot ID: Q6MZW2
  ENSP ID: ENSP00000484273
MKPGGFWLHLTLLGASLPAALGWMDPGTSRGPDVGVGESQAEEPRSFEVTRREGLSSHNELLASCGKKFCSRGSRCVLSLAPEDRVSVTTVTVGLSTVLTCAVHGDLRPPIIWKRNGLTLNFLDLEDINDFGEDDSLYITKVTTIHMGNYTCHASGHEQLFQTHVLQVNVPPVIRVYPESQAQEPGVAASLRCHAEGIPMPRITWLKNGVDVSTQMSKQLSLLANGSELHISSVRYEDTGAYTCIAKNEVGVDEDISSLFIEDSARKTLANILWREEGLSVGNMFYVFSDDGIIVIHPVDCEIQRHLKPTEKIFMSYEEICPQREKNATQPCQWVSAVNVRNRYIYVAQPALSRVLVVDIQAQKVLQSIGVDPLPAKLSYDKSHDQVWVLSWGDVHKSRPSLQVITEASTGQSQHLIRTPFAGVDDFFIPPTNLIINHIRFGFIFNKSDPAVHKVDLETMMPLKTIGLHHHGCVPQAMAHTHLGGYFFIQCRQDSPASAARQLLVDSVTDSVLGPNGDVTGTPHTSPDGRFIVSAAADSPWLHVQEITVRGEIQTLYDLQINSGISDLAFQRSFTESNQYNIYAALHTEPDLLFLELSTGKVGMLKNLKEPPAGPAQPWGGTHRIMRDSGLFGQYLLTPARESLFLINGRQNTLRCEVSGIKGGTTVVWVGEV

SEQ ID NO: 32512 - protein, 847 aa, Homo sapiens
  Payload ID: 6358
  Gene Symbol: FSTL5
  Gene Name: follistatin-like 5
  Uniprot ID: Q8N475
  ENSP ID: ENSP00000305334
MFKCWSVVLVLGFIFLESEGRPTKEGGYGLKSYQPLMRLRHKQEKNQESSRVKGFMIQDGPFGSCENKYCGLGRHCVTSRETGQAECACMDLCKRHYKPVCGSDGEFYENHCEVHRAACLKKQKITIVHNEDCFFKGDKCKTTEYSKMKNMLLDLQNQKYIMQENENPNGDDISRKKLLVDQMFKYFDADSNGLVDINELTQVIKQEELGKDLFDCTLYVLLKYDDFNADKHLALEEFYRAFQVIQLSLPEDQKLSITAATVGQSAVLSCAIQGTLRPPIIWKRNNIILNNLDLEDINDFGDDGSLYITKVTTTHVGNYTCYADGYEQVYQTHIFQVNVPPVIRVYPESQAREPGVTASLRCHAEGIPKPQLGWLKNGIDITPKLSKQLTLQANGSEVHISNVRYEDTGAYTCIAKNEAGVDEDISSLFVEDSARKTLANILWREEGLGIGNMFYVFYEDGIKVIQPIECEFQRHIKPSEKLLGFQDEVCPKAEGDEVQRCVWASAVNVKDKFIYVAQPTLDRVLIVDVQSQKVVQAVSTDPVPVKLHYDKSHDQVWVLSWGTLEKTSPTLQVITLASGNVPHHTIHTQPVGKQFDRVDDFFIPTTTLIITHMRFGFILHKDEAALQKIDLETMSYIKTINLKDYKCVPQSLAYTHLGGYYFIGCKPDSTGAVSPQVMVDGVTDSVIGFNSDVTGTPYVSPDGHYLVSINDVKGLVRVQYITIRGEIQEAFDIYTNLHISDLAFQPSFTEAHQYNIYGSSSTQTDVLFVELSSGKVKMIKSLKEPLKAEEWPWNRKNRQIQDSGLFGQYLMTPSKDSLFILDGRLNKLNCEITEVEKGNTVIWVGDA

SEQ ID NO: 32513 - protein, 846 aa, Homo sapiens
  Payload ID: 6358
  Gene Symbol: FSTL5
  Gene Name: follistatin-like 5
  Uniprot ID: Q8N475
  ENSP ID: ENSP00000368462
MFKCWSVVLVLGFIFLESEGRPTKEGGYGLKSYQPLMRLRHKEKNQESSRVKGFMIQDGPFGSCENKYCGLGRHCVTSRETGQAECACMDLCKRHYKPVCGSDGEFYENHCEVHRAACLKKQKITIVHNEDCFFKGDKCKTTEYSKMKNMLLDLQNQKYIMQENENPNGDDISRKKLLVDQMFKYFDADSNGLVDINELTQVIKQEELGKDLFDCTLYVLLKYDDFNADKHLALEEFYRAFQVIQLSLPEDQKLSITAATVGQSAVLSCAIQGTLRPPIIWKRNNIILNNLDLEDINDFGDDGSLYITKVTTTHVGNYTCYADGYEQVYQTHIFQVNVPPVIRVYPESQAREPGVTASLRCHAEGIPKPQLGWLKNGIDITPKLSKQLTLQANGSEVHISNVRYEDTGAYTCIAKNEAGVDEDISSLFVEDSARKTLANILWREEGLGIGNMFYVFYEDGIKVIQPIECEFQRHIKPSEKLLGFQDEVCPKAEGDEVQRCVWASAVNVKDKFIYVAQPTLDRVLIVDVQSQKVVQAVSTDPVPVKLHYDKSHDQVWVLSWGTLEKTSPTLQVITLASGNVPHHTIHTQPVGKQFDRVDDFFIPTTTLIITHMRFGFILHKDEAALQKIDLETMSYIKTINLKDYKCVPQSLAYTHLGGYYFIGCKPDSTGAVSPQVMVDGVTDSVIGFNSDVTGTPYVSPDGHYLVSINDVKGLVRVQYITIRGEIQEAFDIYTNLHISDLAFQPSFTEAHQYNIYGSSSTQTDVLFVELSSGKVKMIKSLKEPLKAEEWPWNRKNRQIQDSGLFGQYLMTPSKDSLFILDGRLNKLNCEITEVEKGNTVIWVGDA

SEQ ID NO: 32514 - protein, 837 aa, Homo sapiens
  Payload ID: 6358
  Gene Symbol: FSTL5
  Gene Name: follistatin-like 5
  Uniprot ID: Q8N475
  ENSP ID: ENSP00000389270
MFKCWSVVLVLGFIFLESEGRPTKEGGYGLKSYQPLMRLRHKEKNQESSRVKGFMIQDGPFGSCENKYCGLGRHCVTSRETGQAECACMDLCKRHYKPVCGSDGEFYENHCEVHRAACLKKQKITIVHNEDCFFKGDKCKTTEYSKMKNMLLDLQNQKYIMQENENPNGDDISRKKLLVDQMFKYFDADSNGLVDINELTQVIKQEELGKDLFDCTLYVLLKYDDFNADKHLALEEFYRAFQVIQLSLPEDQKLSITAATVGQSAVLSCAIQGTLRPPIIWKRNNIILNNLDLEDINDFGDDGSLYITKVTTTHVGNYTCYADGYEQVYQTHIFQVNVPPVIRVYPESQAREPGVTASLRCHAEGIPKPQLGWLKNGIDITPKLSKQLTLQANGSEVHISNVRYEDTGAYTCIAKNEAGVDEDISSLFVEDSARKTRLGIGNMFYVFYEDGIKVIQPIECEFQRHIKPSEKLLGFQDEVCPKAEGDEVQRCVWASAVNVKDKFIYVAQPTLDRVLIVDVQSQKVVQAVSTDPVPVKLHYDKSHDQVWVLSWGTLEKTSPTLQVITLASGNVPHHTIHTQPVGKQFDRVDDFFIPTTTLIITHMRFGFILHKDEAALQKIDLETMSYIKTINLKDYKCVPQSLAYTHLGGYYFIGCKPDSTGAVSPQVMVDGVTDSVIGFNSDVTGTPYVSPDGHYLVSINDVKGLVRVQYITIRGEIQEAFDIYTNLHISDLAFQPSFTEAHQYNIYGSSSTQTDVLFVELSSGKVKMIKSLKEPLKAEEWPWNRKNRQIQDSGLFGQYLMTPSKDSLFILDGRLNKLNCEITEVEKGNTVIWVGDA

SEQ ID NO: 32515 - protein, 537 aa, Homo sapiens
  Payload ID: 6359
  Gene Symbol: FPGS
  Gene Name: folylpolyglutamate synthase
  Uniprot ID: Q05932
  ENSP ID: ENSP00000362322
MLNTLQTNAGYLEQVKRQRGDPQTQLEAMELYLARSGLQVEDLDRLNIIHVTGTKGKGSTCAFTECILRSYGLKTGFFSSPHLVQVRERIRINGQPISPELFTKYFWRLYHRLEETKDGSCVSMPPYFRFLTLMAFHVFLQEKVDLAVVEVGIGGAYDCTNIIRKPVVCGVSSLGIDHTSLLGDTVEKIAWQKGGIFKQGVPAFTVLQPEGPLAVLRDRAQQISCPLYLCPMLEALEEGGPPLTLGLEGEHQRSNAALALQLAHCWLQRQDRHGAGEPKASRPGLLWQLPLAPVFQPTSHMRLGLRNTEWPGRTQVLRRGPLTWYLDGAHTASSAQACVRWFRQALQGRERPSGGPEVRVLLFNATGDRDPAALLKLLQPCQFDYAVFCPNLTEVSSTGNADQQNFTVTLDQVLLRCLEHQQHWNHLDEEQASPDLWSAPSPEPGGSASLLLAPHPPHTCSASSLVFSCISHALQWISQGRDPIFQPPSPPKGLLTHPVAHSGASILREAAAIHVLVTGSLHLVGGVLKLLEPALSQ

SEQ ID NO: 32516 - protein, 375 aa, Homo sapiens
  Payload ID: 6359
  Gene Symbol: FPGS
  Gene Name: folylpolyglutamate synthase
  ENSP ID: ENSP00000362325
MSRARSHLRAALFLAAASARGITTQVAARRGLSAWPVPQEPSMEYQDAVRMLNTLQTNAGYLEQVKRQRGDPQTQLEAMELYLARSGLQVEDLDRLNIIHVTGTKGKGSTCAFTECILRSYGLKTGFFSSPHLVQVRERIRINGQPISPELFTKYFWRLYHRLEETKDGSCVSMPPYFRFLTLMAFHVFLQEKVDLAVVEVGIGGAYDCTNIIRKPVVCGVSSLGIDHTSLLGDTVEKIAWQKGGIFKQGVPAFTVLQPEGPLAVLRDRAQQISVLGSQRHPGQGSCGSCPWHLCSSPHPTCGSGFGTRSGRAGRRCCGAGPSPGTWTVRTPPAARRPACAGSARRCRAARGRAVAPRFESCSSMLPGTGTRRPC

SEQ ID NO: 32517 - protein, 587 aa, Homo sapiens
  Payload ID: 6359
  Gene Symbol: FPGS
  Gene Name: folylpolyglutamate synthase
  Uniprot ID: Q05932
  ENSP ID: ENSP00000362344
MSRARSHLRAALFLAAASARGITTQVAARRGLSAWPVPQEPSMEYQDAVRMLNTLQTNAGYLEQVKRQRGDPQTQLEAMELYLARSGLQVEDLDRLNIIHVTGTKGKGSTCAFTECILRSYGLKTGFFSSPHLVQVRERIRINGQPISPELFTKYFWRLYHRLEETKDGSCVSMPPYFRFLTLMAFHVFLQEKVDLAVVEVGIGGAYDCTNIIRKPVVCGVSSLGIDHTSLLGDTVEKIAWQKGGIFKQGVPAFTVLQPEGPLAVLRDRAQQISCPLYLCPMLEALEEGGPPLTLGLEGEHQRSNAALALQLAHCWLQRQDRHGAGEPKASRPGLLWQLPLAPVFQPTSHMRLGLRNTEWPGRTQVLRRGPLTWYLDGAHTASSAQACVRWFRQALQGRERPSGGPEVRVLLFNATGDRDPAALLKLLQPCQFDYAVFCPNLTEVSSTGNADQQNFTVTLDQVLLRCLEHQQHWNHLDEEQASPDLWSAPSPEPGGSASLLLAPHPPHTCSASSLVFSCISHALQWISQGRDPIFQPPSPPKGLLTHPVAHSGASILREAAAIHVLVTGSLHLVGGVLKLLEPALSQ

SEQ ID NO: 32518 - protein, 561 aa, Homo sapiens
  Payload ID: 6359
  Gene Symbol: FPGS
  Gene Name: folylpolyglutamate synthase
  Uniprot ID: Q05932
  ENSP ID: ENSP00000377309
MSRARSHLRAALFLAAASARGITTQVAARRGLSAWPVPQEPSMEYQDAVRMLNTLQTNAGYLEQVKRQRGDPQTQLEAMELYLARSGLQVEDLDRLNIIHVTGTKGKGSTCAFTECILRSYGLKTGFFSSPHLVQVRERIRINGQPISPELFTKYFWRLYHRLEETKVDLAVVEVGIGGAYDCTNIIRKPVVCGVSSLGIDHTSLLGDTVEKIAWQKGGIFKQGVPAFTVLQPEGPLAVLRDRAQQISCPLYLCPMLEALEEGGPPLTLGLEGEHQRSNAALALQLAHCWLQRQDRHGAGEPKASRPGLLWQLPLAPVFQPTSHMRLGLRNTEWPGRTQVLRRGPLTWYLDGAHTASSAQACVRWFRQALQGRERPSGGPEVRVLLFNATGDRDPAALLKLLQPCQFDYAVFCPNLTEVSSTGNADQQNFTVTLDQVLLRCLEHQQHWNHLDEEQASPDLWSAPSPEPGGSASLLLAPHPPHTCSASSLVFSCISHALQWISQGRDPIFQPPSPPKGLLTHPVAHSGASILREAAAIHVLVTGSLHLVGGVLKLLEPALSQ

SEQ ID NO: 32519 - protein, 264 aa, Homo sapiens
  Payload ID: 6359
  Gene Symbol: FPGS
  Gene Name: folylpolyglutamate synthase
  ENSP ID: ENSP00000400007
MLNTLQTNAGYLEQVKRQRGDPQTQLEAMELYLARSGLQVEDLDRLNIIHVTGTKGKGSTCAFTECILRSYGLKTGFFSSPHLVQVRERIRINGQPISPELFTKYFWRLYHRLEETKDGSCVSMPPYFRFLTLMAFHVFLQEKVDLAVVEVGIGGAYDCTNIIRKPVVCGVSSLGIDHTSLLGDTVEKIAWQKGGIFKQGVPAFTVLQPEGPLAVLRDRAQQISVLGSQRHPGQGSCGSCPWHLCSSPHPTCGSGFGTRSGRAG

SEQ ID NO: 32520 - protein, 194 aa, Homo sapiens
  Payload ID: 6359
  Gene Symbol: FPGS
  Gene Name: folylpolyglutamate synthase
  ENSP ID: ENSP00000406328
MLNTLQTNAGYLEQVKRQRGDPQTQLEAMELYLARSGLQVEDLDRLNIIHVTGTKGKGSTCAFTECILRSYGLKTGFFSSPHLVQVRERIRINGQPISPELFTKYFWRLYHRLEETKVDLAVVEVGIGGAYDCTNIIRKPVVCGVSSLGIDHTSLLGDTVEKIAWQKGGIFKQGVPAFTVLQPEGPLAVLRDRA

SEQ ID NO: 32521 - protein, 375 aa, Homo sapiens; identical to SEQ ID NO: 32516
  Payload ID: 6359
  Gene Symbol: FPGS
  Gene Name: folylpolyglutamate synthase
  ENSP ID: ENSP00000486766

SEQ ID NO: 32522 - protein, 472 aa, Homo sapiens
  Payload ID: 6360
  Gene Symbol: FOXA1
  Gene Name: forkhead box A1
  Uniprot ID: P55317
  ENSP ID: ENSP00000250448
MLGTVKMEGHETSDWNSYYADTQEAYSSVPVSNMNSGLGSMNSMNTYMTMNTMTTSGNMTPASFNMSYANPGLGAGLSPGAVAGMPGGSAGAMNSMTAAGVTAMGTALSPSGMGAMGAQQAASMNGLGPYAAAMNPCMSPMAYAPSNLGRSRAGGGGDAKTFKRSYPHAKPPYSYISLITMAIQQAPSKMLTLSEIYQWIMDLFPYYRQNQQRWQNSIRHSLSFNDCFVKVARSPDKPGKGSYWTLHPDSGNMFENGCYLRRQKRFKCEKQPGAGGGGGSGSGGSGAKGGPESRKDPSGASNPSADSPLHRGVHGKTGQLEGAPAPGPAASPQTLDHSGATATGGASELKTPASSTAPPISSGPGALASVPASHPAHGLAPHESQLHLKGDPHYSFNHPFSINNLMSSSEQQHKLDFKAYEQALQYSPYGSTLPASLPLGSASVTTRSPIEPSALEPAYYQGVYSRPVLNTS

SEQ ID NO: 32523 - protein, 36 aa, Homo sapiens
  Payload ID: 6360
  Gene Symbol: FOXA1
  Gene Name: forkhead box A1
  ENSP ID: ENSP00000451704
MLGTVKMEGHETSDWNSYYADTQELAITLQKFNYHY

SEQ ID NO: 32524 - protein, 457 aa, Homo sapiens
  Payload ID: 6361
  Gene Symbol: FOXA2
  Gene Name: forkhead box A2
  Uniprot ID: Q9Y261
  ENSP ID: ENSP00000366319
MLGAVKMEGHEPSDWSSYYAEPEGYSSVSNMNAGLGMNGMNTYMSMSAAAMGSGSGNMSAGSMNMSSYVGAGMSPSLAGMSPGAGAMAGMGGSAGAAGVAGMGPHLSPSLSPLGGQAAGAMGGLAPYANMNSMSPMYGQAGLSRARDPKTYRRSYTHAKPPYSYISLITMAIQQSPNKMLTLSEIYQWIMDLFPFYRQNQQRWQNSIRHSLSFNDCFLKVPRSPDKPGKGSFWTLHPDSGNMFENGCYLRRQKRFKCEKQLALKEAAGAAGSGKKAAAGAQASQAQLGEAAGPASETPAGTESPHSSASPCQEHKRGGLGELKGTPAAALSPPEPAPSPGQQQQAAAHLLGPPHHPGLPPEAHLKPEHHYAFNHPFSINNLMSSEQQHHHSHHHHQPHKMDLKAYEQVMHYPGYGSPMPGSLAMGPVTNKTGLDASPLAADTSYYQGVYSRPIMNSS

SEQ ID NO: 32525 - protein, 463 aa, Homo sapiens
  Payload ID: 6361
  Gene Symbol: FOXA2
  Gene Name: forkhead box A2
  Uniprot ID: Q9Y261
  ENSP ID: ENSP00000400341
MHSASSMLGAVKMEGHEPSDWSSYYAEPEGYSSVSNMNAGLGMNGMNTYMSMSAAAMGSGSGNMSAGSMNMSSYVGAGMSPSLAGMSPGAGAMAGMGGSAGAAGVAGMGPHLSPSLSPLGGQAAGAMGGLAPYANMNSMSPMYGQAGLSRARDPKTYRRSYTHAKPPYSYISLITMAIQQSPNKMLTLSEIYQWIMDLFPFYRQNQQRWQNSIRHSLSFNDCFLKVPRSPDKPGKGSFWTLHPDSGNMFENGCYLRRQKRFKCEKQLALKEAAGAAGSGKKAAAGAQASQAQLGEAAGPASETPAGTESPHSSASPCQEHKRGGLGELKGTPAAALSPPEPAPSPGQQQQAAAHLLGPPHHPGLPPEAHLKPEHHYAFNHPFSINNLMSSEQQHHHSHHHHQPHKMDLKAYEQVMHYPGYGSPMPGSLAMGPVTNKTGLDASPLAADTSYYQGVYSRPIMNSS

SEQ ID NO: 32526 - protein, 350 aa, Homo sapiens
  Payload ID: 6362
  Gene Symbol: FOXA3
  Gene Name: forkhead box A3
  Uniprot ID: P55318
  ENSP ID: ENSP00000304004
MLGSVKMEAHDLAEWSYYPEAGEVYSPVTPVPTMAPLNSYMTLNPLSSPYPPGGLPASPLPSGPLAPPAPAAPLGPTFPGLGVSGGSSSSGYGAPGPGLVHGKEMPKGYRRPLAHAKPPYSYISLITMAIQQAPGKMLTLSEIYQWIMDLFPYYRENQQRWQNSIRHSLSFNDCFVKVARSPDKPGKGSYWALHPSSGNMFENGCYLRRQKRFKLEEKVKKGGSGAATTTRNGTGSAASTTTPAATVTSPPQPPPPAPEPEAQGGEDVGALDCGSPASSTPYFTGLELPGELKLDAPYNFNHPFSINNLMSEQTPAPPKLDVGFGGYGAEGGEPGVYYQGLYSRSLLNAS

SEQ ID NO: 32527 - protein, 101 aa, Homo sapiens
  Payload ID: 6362
  Gene Symbol: FOXA3
  Gene Name: forkhead box A3
  ENSP ID: ENSP00000470816
MAPLNSYMTLNPLSSPYPPGGLPASPLPSGPLAPPAPAAPLGPTFPGLGVSGGSSSSGYGAPGPGLVHGKEMPKGYRRPLAHAKPPYSYISLITMAIQQAP

SEQ ID NO: 32528 - protein, 325 aa, Homo sapiens
  Payload ID: 6363
  Gene Symbol: FOXB1
  Gene Name: forkhead box B1
  Uniprot ID: Q99853
  ENSP ID: ENSP00000379369
MPRPGRNTYSDQKPPYSYISLTAMAIQSSPEKMLPLSEIYKFIMDRFPYYRENTQRWQNSLRHNLSFNDCFIKIPRRPDQPGKGSFWALHPSCGDMFENGSFLRRRKRFKVLKSDHLAPSKPADAAQYLQQQAKLRLSALAASGTHLPQMPAAAYNLGGVAQPSGFKHPFAIENIIAREYKMPGGLAFSAMQPVPAAYPLPNQLTTMGSSLGTGWPHVYGSAGMIDSATPISMASGDYSAYGVPLKPLCHAAGQTLPAIPVPIKPTPAAVPALPALPAPIPTLLSNSPPSLSPTSSQTATSQSSPATPSETLTSPASALHSVAVH

SEQ ID NO: 32529 - protein, 432 aa, Homo sapiens
  Payload ID: 6364
  Gene Symbol: FOXB2
  Gene Name: forkhead box B2
  Uniprot ID: Q5VYV0
  ENSP ID: ENSP00000365898
MPRPGKSSYSDQKPPYSYISLTAMAIQHSAEKMLPLSDIYKFIMERFPYYREHTQRWQNSLRHNLSFNDCFIKIPRRPDQPGKGSFWALHPDCGDMFENGSFLRRRKRFKVLRADHTHLHAGSTKSAPGAGPGGHLHPHHHHHPHHHHHHHAAAHHHHHHHPPQPPPPPPPPPPHMVHYFHQQPPTAPQPPPHLPSQPPQQPPQQSQPQQPSHPGKMQEAAAVAAAAAAAAAAAVGSVGRLSQFPPYGLGSAAAAAAAAAASTSGFKHPFAIENIIGRDYKGVLQAGGLPLASVMHHLGYPVPGQLGNVVSSVWPHVGVMDSVAAAAAAAAAAGVPVGPEYGAFGVPVKSLCHSASQSLPAMPVPIKPTPALPPVSALQPGLTVPAASQQPPAPSTVCSAAAASPVASLLEPTAPTSAESKGGSLHSVLVHS

SEQ ID NO: 32530 - protein, 553 aa, Homo sapiens
  Payload ID: 6365
  Gene Symbol: FOXC1
  Gene Name: forkhead box C1
  Uniprot ID: Q12948
  ENSP ID: ENSP00000370256
MQARYSVSSPNSLGVVPYLGGEQSYYRAAAAAAGGGYTAMPAPMSVYSHPAHAEQYPGGMARAYGPYTPQPQPKDMVKPPYSYIALITMAIQNAPDKKITLNGIYQFIMDRFPFYRDNKQGWQNSIRHNLSLNECFVKVPRDDKKPGKGSYWTLDPDSYNMFENGSFLRRRRRFKKKDAVKDKEEKDRLHLKEPPPPGRQPPPAPPEQADGNAPGPQPPPVRIQDIKTENGTCPSPPQPLSPAAALGSGSAAAVPKIESPDSSSSSLSSGSSPPGSLPSARPLSLDGADSAPPPPAPSAPPPHHSQGFSVDNIMTSLRGSPQSAAAELSSGLLASAAASSRAGIAPPLALGAYSPGQSSLYSSPCSQTSSAGSSGGGGGGAGAAGGAGGAGTYHCNLQAMSLYAAGERGGHLQGAPGGAGGSAVDDPLPDYSLPPVTSSSSSSLSHGGGGGGGGGGQEAGHHPAAHQGRLTSWYLNQAGGDLGHLASAAAAAAAAGYPGQQQNFHSVREMFESQRIGLNNSPVNGNSSCQMAFPSSQSLYRTSGAFVYDCSKF

SEQ ID NO: 32531 - protein, 501 aa, Homo sapiens
  Payload ID: 6366
  Gene Symbol: FOXC2
  Gene Name: forkhead box C2
  Uniprot ID: Q99958
  ENSP ID: ENSP00000326371
MQARYSVSDPNALGVVPYLSEQNYYRAAGSYGGMASPMGVYSGHPEQYSAGMGRSYAPYHHHQPAAPKDLVKPPYSYIALITMAIQNAPEKKITLNGIYQFIMDRFPFYRENKQGWQNSIRHNLSLNECFVKVPRDDKKPGKGSYWTLDPDSYNMFENGSFLRRRRRFKKKDVSKEKEERAHLKEPPPAASKGAPATPHLADAPKEAEKKVVIKSEAASPALPVITKVETLSPESALQGSPRSAASTPAGSPDGSLPEHHAAAPNGLPGFSVENIMTLRTSPPGGELSPGAGRAGLVVPPLALPYAAAPPAAYGQPCAQGLEAGAAGGYQCSMRAMSLYTGAERPAHMCVPPALDEALSDHPSGPTSPLSALNLAAGQEGALAATGHHHQHHGHHHPQAPPPPPAPQPQPTPQPGAAAAQAASWYLNHSGDLNHLPGHTFAAQQQTFPNVREMFNSHRLGIENSTLGESQVSGNASCQLPYRSTPPLYRHAAPYSYDCTKY

SEQ ID NO: 32532 - protein, 465 aa, Homo sapiens
  Payload ID: 6367
  Gene Symbol: FOXD1
  Gene Name: forkhead box D1
  Uniprot ID: Q16676
  ENSP ID: ENSP00000481581
MTLSTEMSDASGLAEETDIDVVGEGEDEEDEEEEDDDEGGGGGPRLAVPAQRRRRRRSYAGEDELEDLEEEEDDDDILLAPPAGGSPAPPGPAPAAGAGAGGGGGGGGAGGGGSAGSGAKNPLVKPPYSYIALITMAILQSPKKRLTLSEICEFISGRFPYYREKFPAWQNSIRHNLSLNDCFVKIPREPGNPGKGNYWTLDPESADMFDNGSFLRRRKRFKRQPLLPPNAAAAESLLLRGAGAAGGAGDPAAAAALFPPAPPPPPHAYGYGPYGCGYGLQLPPYAPPSALFAAAAAAAAAAAFHPHSPPPPPPPHGAAAELARTAFGYRPHPLGAALPGPLPASAAKAGGPGASALARSPFSIESIIGGSLGPAAAAAAAAQAAAAAQASPSPSPVAAPPAPGSSGGGCAAQAAVGPAAALTRSLVAAAAAAASSVSSSAALGTLHQGTALSSVENFTARISNC

SEQ ID NO: 32533 - protein, 495 aa, Homo sapiens
  Payload ID: 6368
  Gene Symbol: FOXD2
  Gene Name: forkhead box D2
  Uniprot ID: O60548
  ENSP ID: ENSP00000335493
MTLGSCCCEIMSSESSPAALSEADADIDVVGGGSGGGELPARSGPRAPRDVLPHGHEPPAEEAEADLAEDEEESGGCSDGEPRALASRGAAAAAGSPGPGAAAARGAAGPGPGPPSGGAATRSPLVKPPYSYIALITMAILQSPKKRLTLSEICEFISGRFPYYREKFPAWQNSIRHNLSLNDCFVKIPREPGNPGKGNYWTLDPESADMFDNGSFLRRRKRFKRQPLPPPHPHPHPHPELLLRGGAAAAGDPGAFLPGFAAYGAYGYGYGLALPAYGAPPPGPAPHPHPHPHAFAFAAAAAAAPCQLSVPPGRAAAPPPGPPTASVFAGAGSAPAPAPASGSGPGPGPAGLPAFLGAELGCAKAFYAASLSPPAAGTAAGLPTALLRQGLKTDAGGGAGGGGAGAGQRPSFSIDHIMGHGGGGAAPPGAGEGSPGPPFAAAAGPGGQAQVLAMLTAPALAPVAGHIRLSHPGDALLSSGSRFASKVAGLSGCHF

SEQ ID NO: 32534 - protein, 478 aa, Homo sapiens
  Payload ID: 6369
  Gene Symbol: FOXD3
  Gene Name: forkhead box D3
  Uniprot ID: Q9UJU5
  ENSP ID: ENSP00000360157
MTLSGGGSASDMSGQTVLTAEDVDIDVVGEGDDGLEEKDSDAGCDSPAGPPELRLDEADEVPPAAPHHGQPQPPHQQPLTLPKEAAGAGAGPGGDVGAPEADGCKGGVGGEEGGASGGGPGAGSGSAGGLAPSKPKNSLVKPPYSYIALITMAILQSPQKKLTLSGICEFISNRFPYYREKFPAWQNSIRHNLSLNDCFVKIPREPGNPGKGNYWTLDPQSEDMFDNGSFLRRRKRFKRHQQEHLREQTALMMQSFGAYSLAAAAGAAGPYGRPYGLHPAAAAGAYSHPAAAAAAAAAAALQYPYALPPVAPVLPPAVPLLPSGELGRKAAAFGSQLGPGLQLQLNSLGAAAAAAGTAGAAGTTASLIKSEPSARPSFSIENIIGGGPAAPGGSAVGAGVAGGTGGSGGGSTAQSFLRPPGTVQSAALMATHQPLSLSRTTATIAPILSVPLSGQFLQPAASAAAAAAAAAQAKWPAQ

SEQ ID NO: 32535 - protein, 439 aa, Homo sapiens
  Payload ID: 6370
  Gene Symbol: FOXD4
  Gene Name: forkhead box D4
  Uniprot ID: Q12950
  ENSP ID: ENSP00000371940
MNLPRAERLRSTPQRSLRDSDGEDGKIDVLGEEEDEDEEEAASQQFLEQSLQPGLQVARWGGVALPREHIEGGGGPSDPSEFGTEFRAPPRSAAASEDARQPAKPPSSYIALITMAILQSPHKRLTLSGICAFISDRFPYYRRKFPAWQNSIRHNLSLNDCFVKIPREPGRPGKGNYWSLDPASQDMFDNGSFLRRRKRFQRHQPTPGAHLPHPFPLPAAHAALHNPRPGPLLGAPAPPQPVPGAYPNTGPGRRPYALLHPHPPRYLLLSAPAYAGAPKKAEGADLATPAPFPCCSPHLVLSLGRRARVWRRHREADASLSALRVSCKGSGERVQGLRRVCPRPRGATAPCSSDRQACRTILQQQQRHQEEDCANGCAPTKGAVLGGHLSAASALLRYQAVAEGSGLTSLAAPLGGEGTSPVFLVSPTPSSLAESAGPS

SEQ ID NO: 32536 - protein, 408 aa, Homo sapiens
  Payload ID: 6371
  Gene Symbol: FOXD4L1
  Gene Name: forkhead box D4-like 1
  Uniprot ID: Q9NU39
  ENSP ID: ENSP00000302756
MNLPRAERPRSTPQRSLRDSDGEDGKIDVLGEEEDEDEVEDEEEEASQKFLEQSLQPGLQVARWGGVALPREHIEGGGPSDPSEFGTEFRAPPRSAAASEDARQPAKPPYSYIALITMAILQSPHKRLTLSGICAFISGRFPYYRRKFPAWQNSIRHNLSLNDCFVKIPREPGHPGKGTYWSLDPASQDMFDNGSFLRRRKRFKRHQLTPGAHLPHPFPLPAAHAALHNPRPGPLLGAPALPQPVPGAYPNTAPGRRPYALLHPHPPRYLLLSAPAYAGAPKKAEGADLATPGTLPVLQPSLGPQPWEEGKGLASPPGGGCISFSIESIMQGVRGAGTGAAQSLSPTAWSYCPLLQRPSSLSDNFAATAAASGGGLRQRLRSHQGRGAGRAPVGRVGAAAVSGGGRGL

SEQ ID NO: 32537 - protein, 417 aa, Homo sapiens
  Payload ID: 6372
  Gene Symbol: FOXD4L3
  Gene Name: forkhead box D4-like 3
  Uniprot ID: Q6VB84
  ENSP ID: ENSP00000341961
MNLPRAERLRSTPQRSLRDSDGEDGKIDVLGEEEDEDEVEDEEEAASQQFLEQSLQPGLQVARWGGVALPREHIEGGGGPSDPSEFGTKFRAPPRSAAASEDARQPAKPPYSYIALITMAILQNPHKRLTLSGICAFISGRFPYYRRKFPAWQNSIRHNLSLNDCFVKIPREPGHPGKGNYWSLDPASQDMFDNGSFLRRRKRFKRHQLTPGAHLPHPFPLPAAHAALHNPRPGPLLGAPAPPQPVPGAYPNTAPGRRPYALLHPHPLRYLLLSAPVYAGAPKKAEGAALATPAPFPCCSPHLVLSLGRRARVWRRHREADASLSALRVLCKGSGERVQGLRRICPRPRGATATCSSDHQACCIPRPLPLCCKCPPPPLLGQFCSNSSSIRRRTAPTAALPPRARCWAGTCRPRRPC

SEQ ID NO: 32538 - protein, 416 aa, Homo sapiens
  Payload ID: 6373
  Gene Symbol: FOXD4L4
  Gene Name: forkhead box D4-like 4
  Uniprot ID: Q8WXT5
  ENSP ID: ENSP00000366630
MNLPRAERPRSTPQRSLRDSDGEDGKIDVLGEEEDEDEVEDEEEEARQQFLEQSLQPGLQVARWGGVALPREHIEGGGGPSDPSEFGTKFRAPPRSAAASEDARQPAKPPYSYIALITMAILQNPHKRLTLSGICAFISGRFPYYRRKFPAWQNSIRHNLSLNDCFVKIPREPGHPGKGNYWSLDPASQDMFDNGSFLRRRKRFKRHQLTPGAHLPHPFPLPAAHAALHNPHPGPLLGAPAPPQPVPGAYPNTAPGRRPYALLHPHPLRYLLLSARVYAGAPKKAEGADLATPAPFPCCSPHLVLSLGRRARVWRRHREADASLSALRVLCKGSGERVQGLRRVCPRPRGATATCSSDHQACCIPKPLPLCCKCPPPLLLGQFCSNSSSIRRTAPTAALPPRARCWAGTCRPRRRC

SEQ ID NO: 32539 - protein, 416 aa, Homo sapiens
  Payload ID: 6374
  Gene Symbol: FOXD4L5
  Gene Name: forkhead box D4-like 5
  Uniprot ID: Q5VV16
  ENSP ID: ENSP00000366637
MNLPRAERPRSTPQRSLRDSDGEDGKIDVLGEEEDEDEVEDEEEEARQQFLEQSLQPGLQVARWGGVALPREHIEGGGGPSDPSEFGTKFRAPPRSAAASEDARQPAKPPYSYIALITMAILQNPHKRLTLSGICAFISGRFPYYRRKFPAWQNSIRHNLSLNDCFVKIPREPGHPGKGNYWSLDPASQDMFDNGSFLRRRKRFKRHQLTPGAHLPHPFPLPAAHAALHNPHPGPLLGAPAPPQPVPGAYPNTAPGRCPYALLHPHPLRYLLLSAPVYAGAPKKAEGADLATPAPFPCCSPHLVLSLGRRARVWRRHREADASLSALRVLCKGSGERVQGLRRVCPRPRGATATCSSDHQACCIPKPLPLCCKCPPPLLLGQFCSNSSSIRRTAPTAALPPRARCWAGTCRPRRRC

SEQ ID NO: 32540 - protein, 417 aa, Homo sapiens
  Payload ID: 6375
  Gene Symbol: FOXD4L6
  Gene Name: forkhead box D4-like 6
  Uniprot ID: Q3SYB3
  ENSP ID: ENSP00000484875
MNLPRAERLRSTPQRSLRDSDGEDGKIDVLGEEEDEDEVEDEEEAASQQFLEQSLQPGLQVARWGGVALPREHIEGGGGPSDPSEFGTKFRAPPRSAAASEDARQPAKPPYSYIALITMAILQNPHKRLTLSGICAFISGRFPYYRRKFPAWQNSIRHNLSLNDCFVKIPREPGHPGKGNYWSLDPASQDMFDNGSFLRRRKRFKRHQLTPGAHLPHPFPLPAAHAALHNPHPGPLLGAPAPPQPVPGAYPNTAPGRRPYALLHPHPLRYLLLSAPVYAGAPKKAEGAALATPAPFPCCSPHLVLSLGRRARVWRRHREADASLSALRVLCKGSGERVQGLRRVCPRPRGATATCSSDHQACCIPRPLPLCCKCPPPPLLGQFCSNSSSIRRRTAPTAALPPRARCWAGTCRPRRPC

SEQ ID NO: 32541 - protein, 373 aa, Homo sapiens
  Payload ID: 6376
  Gene Symbol: FOXE1
  Gene Name: forkhead box E1
  Uniprot ID: O00358
  ENSP ID: ENSP00000364265
MTAESGPPPPQPEVLATVKEERGETAAGAGVPGEATGRGAGGRRRKRPLQRGKPPYSYIALIAMAIAHAPERRLTLGGIYKFITERFPFYRDNPKKWQNSIRHNLTLNDCFLKIPREAGRPGKGNYWALDPNAEDMFESGSFLRRRKRFKRSDLSTYPAYMHDAAAAAAAAAAAAAAAAIFPGAVPAARPPYPGAVYAGYAPPSLAAPPPVYYPAASPGPCRVFGLVPERPLSPELGPAPSGPGGSCAFASAGAPATTTGYQPAGCTGARPANPSAYAAAYAGPDGAYPQGAGSAIFAAAGRLAGPASPPAGGSSGGVETTVDFYGRTSPGQFGALGACYNPGGQLGGASAGAYHARHAAAYPGGIDRFVSAM

SEQ ID NO: 32542 - protein, 319 aa, Homo sapiens
  Payload ID: 6377
  Gene Symbol: FOXE3
  Gene Name: forkhead box E3
  Uniprot ID: Q13461
  ENSP ID: ENSP00000334472
MAGRSDMDPPAAFSGFPALPAVAPSGPPPSPLAGAEPGREPEEAAAGRGEAAPTPAPGPGRRRRRPLQRGKPPYSYIALIAMALAHAPGRRLTLAAIYRFITERFAFYRDSPRKWQNSIRHNLTLNDCFVKVPREPGNPGKGNYWTLDPAAADMFDNGSFLRRRKRFKRAELPAHAAAAPGPPLPFPYAPYAPAPGPALLVPPPSAGPGPSPPARLFSVDSLVNLQPELAGLGAPEPPCCAAPDAAAAAFPPCAAAASPPLYSQVPDRLVLPATRPGPGPLPAEPLLALAGPAAALGPLSPGEAYLRQPGFASGLERYL

SEQ ID NO: 32543 - protein, 379 aa, Homo sapiens
  Payload ID: 6378
  Gene Symbol: FOXF1
  Gene Name: forkhead box F1
  Uniprot ID: Q12946
  ENSP ID: ENSP00000262426
MSSAPEKQQPPHGGGGGGGGGGGAAMDPASSGPSKAKKTNAGIRRPEKPPYSYIALIVMAIQSSPTKRLTLSEIYQFLQSRFPFFRGSYQGWKNSVRHNLSLNECFIKLPKGLGRPGKGHYWTIDPASEFMFEEGSFRRRPRGFRRKCQALKPMYSMMNGLGFNHLPDTYGFQGSAGGLSCPPNSLALEGGLGMMNGHLPGNVDGMALPSHSVPHLPSNGGHSYMGGCGGAAAGEYPHHDSSVPASPLLPTGAGGVMEPHAVYSGSAAAWPPSASAALNSGASYIKQQPLSPCNPAANPLSGSLSTHSLEQPYLHQNSHNAPAELQGIPRYHSQSPSMCDRKEFVFSFNAMASSSMHSAGGGSYYHQQVTYQDIKPCVM

SEQ ID NO: 32544 - protein, 444 aa, Homo sapiens
  Payload ID: 6379
  Gene Symbol: FOXF2
  Gene Name: forkhead box F2
  Uniprot ID: Q12947
  ENSP ID: ENSP00000259806
MTTEGGPPPAPLRRACSPVPGALQAALMSPPPAAAAAAAAAPETTSSSSSSSSASCASSSSSSNSASAPSAACKSAGGGGAGAGSGGAKKASSGLRRPEKPPYSYIALIVMAIQSSPSKRLTLSEIYQFLQARFPFFRGAYQGWKNSVRHNLSLNECFIKLPKGLGRPGKGHYWTIDPASEFMFEEGSFRRRPRGFRRKCQALKPMYHRVVSGLGFGASLLPQGFDFQAPPSAPLGCHSQGGYGGLDMMPAGYDAGAGAPSHAHPHHHHHHHVPHMSPNPGSTYMASCPVPAGPGGVGAAGGGGGGDYGPDSSSSPVPSSPAMASAIECHSPYTSPAAHWSSPGASPYLKQPPALTPSSNPAASAGLHSSMSSYSLEQSYLHQNAREDLSVGLPRYQHHSTPVCDRKDFVLNFNGISSFHPSASGSYYHHHHQSVCQDIKPCVM

SEQ ID NO: 32545 - protein, 489 aa, Homo sapiens [sequence omitted]

SEQ ID NO: 32546 - protein, 365 aa, Homo sapiens
  Payload ID: 6381
  Gene Symbol: FOXH1
  Gene Name: forkhead box H1
  Uniprot ID: O75593
  ENSP ID: ENSP00000366534
MGPCSGSRLGPPEAESPSQPPKRRKKRYLRHDKPPYTYLAMIALVIQAAPSRRLKLAQIIRQVQAVFPFFREDYEGWKDSIRHNLSSNRCFRKVPKDPAKPQAKGNFWAVDVSLIPAEALRLQNTALCRRWQNGGARGAFAKDLGPYVLHGRPYRPPSPPPPPSEGFSIKSLLGGSGEGAPWPGLAPQSSPVPAGTGNSGEEAVPTPPLPSSERPLWPLCPLPGPTRVEGETVQGGAIGPSTLSPEPRAWPLHLLQGTAVPGGRSSGGHRASLWGQLPTSYLPIYTPNVVMPLAPPPTSCPQCPSTSPAYWGVAPETRGPPGLLCDLDALFQGVPPNKSIYDVWVSHPRDLAAPGPGWLLSWCSL

SEQ ID NO: 32547 - protein, 378 aa, Homo sapiens
  Payload ID: 6382
  Gene Symbol: FOXI1
  Gene Name: forkhead box I1
  Uniprot ID: Q12951
  ENSP ID: ENSP00000304286
MSSFDLPAPSPPRCSPQFPSIGQEPPEMNLYYENFFHPQGVPSPQRPSFEGGGEYGATPNPYLWFNGPTMTPPPYLPGPNASPFLPQAYGVQRPLLPSVSGLGGSDLGWLPIPSQEELMKLVRPPYSYSALIAMAIHGAPDKRLTLSQIYQYVADNFPFYNKSKAGWQNSIRHNLSLNDCFKKVPRDEDDPGKGNYWTLDPNCEKMFDNGNFRRKRKRKSDVSSSTASLALEKTESSLPVDSPKTTEPQDILDGASPGGTTSSPEKRPSPPPSGAPCLNSFLSSMTAYVSGGSPTSHPLVTPGLSPEPSDKTGQNSLTFNSFSPLTNLSNHSGGGDWANPMPTNMLSYGGSVLSQFSPHFYNSVNTSGVLYPREGTEV

SEQ ID NO: 32548 - protein, 283 aa, Homo sapiens
  Payload ID: 6382
  Gene Symbol: FOXI1
  Gene Name: forkhead box I1
  Uniprot ID: Q12951
  ENSP ID: ENSP00000415483
MSSFDLPAPSPPRCSPQFPSIGQEPPEMNLYYENFFHPQGVPSPQRPSFEGGGEYGATPNPYLWFNGPTMTPPPYLPGPNASPFLPQAYGVQRPLLPSVSGLGGSDLGWLPIPSQEELMKLVRPPYSYSALIAMAIHGAPDKRLTLSQIYQYVADNFPFYNKSKAGWQNSIRHNLSLNDCFKKVPRDEDDPAYVSGGSPTSHPLVTPGLSPEPSDKTGQNSLTFNSFSPLTNLSNHSGGGDWANPMPTNMLSYGGSVLSQFSPHFYNSVNTSGVLYPREGTEV

SEQ ID NO: 32549 - protein, 318 aa, Homo sapiens
  Payload ID: 6383
  Gene Symbol: FOXI2
  Gene Name: forkhead box I2
  Uniprot ID: Q6ZQN5
  ENSP ID: ENSP00000373572
MATYCDDLGPSSAPPGQAQATAHPPGYEPGDLGAVGGGPLLWVNAPALSPKSYASGPGPAPPYAAPSYGAPGPLLGAPGGLAGADLAWLSLSGQQELLRLVRPPYSYSALIAMAIQSAPLRKLTLSQIYQYVAGNFPFYKRSKAGWQNSIRHNLSLNDCFKKVPRDEDDPGKGNYWTLDPNCEKMFDNGNFRRKRKRRAEASAAVRSGARSVGGAEAPALEPPSAACLDLQASPSPSAPEAATCFSGFASAMSALAGGLGTFPGGLAGDFSFGRRPPTVATHAPQTLNPSPGFAPGHQTAAAGFRLSHLLYSREGTEV

SEQ ID NO: 32550 - protein, 420 aa, Homo sapiens
  Payload ID: 6384
  Gene Symbol: FOXI3
  Gene Name: forkhead box I3
  Uniprot ID: A8MTJ6
  ENSP ID: ENSP00000478384
MALYCGDNFGVYSQPGLPPPAATAAAPGAPPAARAPYGLADYAAPPAAAANPYLWLNGPGVGGPPSAAAAAAAAYLGAPPPPPPPGAAAGPFLQPPPAAGTFGCSQRPFAQPAPAAPASPAAPAGPGELGWLSMASREDLMKMVRPPYSYSALIAMAIQSAPERKLTLSHIYQFVADSFPFYQRSKAGWQNSIRHNLSLNDCFKKVPRDEDDPGKGNYWTLDPNCEKMFDNGNFRRKRKRRSEASNGSTVAAGTSKSEEGLSSGLGSGVGGKPEEESPSTLLRPSHSPEPPEGTKSTASSPGGPMLTSTPCLNTFFSSLSSLSVSSSVSTQRALPGSRHLGIQGAQLPSSGVFSPTSISEASADTLQLSNSTSNSTGQRSSYYSPFPASTSGGQSSPFSSPFHNFSMVNSLIYPREGSEV

SEQ ID NO: 32551 - protein, 421 aa, Homo sapiens
  Payload ID: 6385
  Gene Symbol: FOXJ1
  Gene Name: forkhead box J1
  Uniprot ID: Q92949
  ENSP ID: ENSP00000323880
MAESWLRLSGAGPAEEAGPEGGLEEPDALDDSLTSLQWLQEFSILNAKAPALPPGGTDPHGYHQVPGSAAPGSPLAADPACLGQPHTPGKPTSSCTSRSAPPGLQAPPPDDVDYATNPHVKPPYSYATLICMAMQASKATKITLSAIYKWITDNFCYFRHADPTWQNSIRHNLSLNKCFIKVPREKDEPGKGGFWRIDPQYAERLLSGAFKKRRLPPVHIHPAFARQAAQEPSAVPRAGPLTVNTEAQQLLREFEEATGEAGWGAGEGRLGHKRKQPLPKRVAKVPRPPSTLLPTPEEQGELEPLKGNFDWEAIFDAGTLGGELGALEALELSPPLSPASHVDVDLTIHGRHIDCPATWGPSVEQAADSLDFDETFLATSFLQHPWDESGSGCLPPEPLFEAGDATLASDLQDWASVGAFL

SEQ ID NO: 32552 - protein, 574 aa, Homo sapiens
  Payload ID: 6386
  Gene Symbol: FOXJ2
  Gene Name: forkhead box J2
  Uniprot ID: Q9P0K8
  ENSP ID: ENSP00000162391
MASDLESSLTSIDWLPQLTLRATIEKLGSASQAGPPGSSRKCSPGSPTDPNATLSKDEAAVHQDGKPRYSYATLITYAINSSPAKKMTLSEIYRWICDNFPYYKNAGIGWKNSIRHNLSLNKCFRKVPRPRDDPGKGSYWTIDTCPDISRKRRHPPDDDLSQDSPEQEASKSPRGGVAGSGEASLPPEGNPQMSLQSPTSIASYSQGTGSVDGGAVAAGASGRESAEGPPPLYNTNHDFKFSYSEINFQDLSWSFRNLYKSMLEKSSSSSQHGFSSLLGDIPPSNNYYMYQQQQPPPPQQQQQQQQPPQPPPQQSQPQQQQAPAQGPSAVGGAPPLHTPSTDGCTPPGGKQAGAEGYGPPPVMAMHPPPLQHGGYHPHQHHPHSHPAQQPPPPQPQAQGQAPINNTGFAFPSDWCSNIDSLKESFKMVNRLNWSSIEQSQFSELMESLRQAEQKNWTLDQHHIANLCDSLNHFLTQTGHVPPQGGTHRPPAPARIADSCALTSGKQESAMSQVNSYGHPQAPHLYPGPSPMYPIPTQDSAGYNRPAHHMVPRPSVPPPGANEEIPDDFDWDLIT

SEQ ID NO: 32553 - protein, 526 aa, Homo sapiens
  Payload ID: 6386
  Gene Symbol: FOXJ2
  Gene Name: forkhead box J2
  Uniprot ID: Q9P0K8
  ENSP ID: ENSP00000403411
MASDLESSLTSIDWLPQLTLRATIEKLGSASQAGPPGSSRKCSPGSPTDPNATLSKDEAAVHQDGKPRYSYATLITYAINSSPAKKMTLSEIYRWICDNFPYYKNAGIGWKNSIRHNLSLNKCFRKVPRPRDDPGKGSYWTIDTCPDISRKRRHPPDDDLSQDSPEQEASKSPRGGVAGSGEASLPPEGNPQMSLQSPTSIASYSQGTGSVDGGAVAAGASGRESAEGPPPLYNTNHDFKFSYSEINFQDLSWSFRNLYKSMLEKSSSSSQHGFSSLLGDIPPSNNYYMYQQQQPPPPQQQQQQQQPPQPPPQQSQPQQQQAPAQGPSAVGGAPPLHTPSTDGCTPPGGKQAGAEGYGPPPVMAMHPPPLQHGGYHPHQHHPHSHPAQQPPPPQPQAQGQAPINNTGFAFPSDWCSNIDSLKESFKMVNRLNWSSIEQSQFSELMESLRQAEQKNWTLDQHHIANLCDSLNHFLTQTGHVPPQGGTHRPPAPARIADSCALTSGKQESAMSQGTAPSQLPWRWRLC

SEQ ID NO: 32554 - protein, 588 aa, Homo sapiens
  Payload ID: 6387
  Gene Symbol: FOXJ3
  Gene Name: forkhead box J3
  Uniprot ID: Q9UPW0
  ENSP ID: ENSP00000354449
MGLYGQACPSVTSLRMTSELESSLTSMDWLPQLTMRAAIQKSDATQNAHGTGISKKNALLDPNTTLDQEEVQQHKDGKPPYSYASLITFAINSSPKKKMTLSEIYQWICDNFPYYREAGSGWKNSIRHNLSLNKCFLKVPRSKDDPGKGSYWAIDTNPKEDVLPTRPKKRARSVERVTLYNTDQDGSDSPRSSLNNSLSDQSLASVNLNSVGSVHSYTPVTSHPESVSQSLTPQQQPQYNLPERDKQLLFSEYNFEDLSASFRSLYKSVFEQSLSQQGLMNIPSESSQQSHTSCTYQHSPSSTVSTHPHSNQSSLSNSHGSGLNTTGSNSVAQVSLSHPQMHTQPSPHPPHRPHGLPQHPQRSPHPAPHPQQHSQLQSPHPQHPSPHQHIQHHPNHQHQTLTHQAPPPPQQVSCNSGVSNDWYATLDMLKESCRIASSVNWSDVDLSQFQGLMESMRQADLKNWSLDQVQFADLCSSLNQFFTQTGLIHSQSNVQQNVCHGAMHPTKPSQHIGTGNLYIDSRQNLPPSVMPPPGYPHIPQALSTPGTTMAGHHRAMNQQHMMPSQAFQMRRSLPPDDIQDDFDWDSIV

SEQ ID NO: 32555 - protein, 622 aa, Homo sapiens
  Payload ID: 6387
  Gene Symbol: FOXJ3
  Gene Name: forkhead box J3
  Uniprot ID: Q9UPW0
  ENSP ID: ENSP00000354620
MGLYGQACPSVTSLRMTSELESSLTSMDWLPQLTMRAAIQKSDATQNAHGTGISKKNALLDPNTTLDQEEVQQHKDGKPPYSYASLITFAINSSPKKKMTLSEIYQWICDNFPYYREAGSGWKNSIRHNLSLNKCFLKVPRSKDDPGKGSYWAIDTNPKEDVLPTRPKKRARSVERASTPYSIDSDSLGMECIISGSASPTLAINTVTNKVTLYNTDQDGSDSPRSSLNNSLSDQSLASVNLNSVGSVHSYTPVTSHPESVSQSLTPQQQPQYNLPERDKQLLFSEYNFEDLSASFRSLYKSVFEQSLSQQGLMNIPSESSQQSHTSCTYQHSPSSTVSTHPHSNQSSLSNSHGSGLNTTGSNSVAQVSLSHPQMHTQPSPHPPHRPHGLPQHPQRSPHPAPHPQQHSQLQSPHPQHPSPHQHIQHHPNHQHQTLTHQAPPPPQQVSCNSGVSNDWYATLDMLKESCRIASSVNWSDVDLSQFQGLMESMRQADLKNWSLDQVQFADLCSSLNQFFTQTGLIHSQSNVQQNVCHGAMHPTKPSQHIGTGNLYIDSRQNLPPSVMPPPGYPHIPQALSTPGTTMAGHHRAMNQQHMMPSQAFQMRRSLPPDDIQDDFDWDSIV

SEQ ID NO: 32556 - protein, 136 aa, Homo sapiens
  Payload ID: 6387
  Gene Symbol: FOXJ3
  Gene Name: forkhead box J3
  ENSP ID: ENSP00000361652
MESMRQADLKNWSLDQVQFADLCSSLNQFFTQTGLIHSQSNVQQNVCHGAMHPTKPSQHIGTGNLYIDSRQNLPPSVMPPPGYPHIPQALSTPGTTMAGHHRAMNQQHMMPSQAFQMRRSLPPDDIQDDFDWDSIV

SEQ ID NO: 32557 - protein, 622 aa, Homo sapiens; identical to SEQ ID NO: 32555
  Payload ID: 6387
  Gene Symbol: FOXJ3
  Gene Name: forkhead box J3
  Uniprot ID: Q9UPW0
  ENSP ID: ENSP00000361653

SEQ ID NO: 32558 - protein, 622 aa, Homo sapiens; identical to SEQ ID NO: 32555
  Payload ID: 6387
  Gene Symbol: FOXJ3
  Gene Name: forkhead box J3
  Uniprot ID: Q9UPW0
  ENSP ID: ENSP00000361654

SEQ ID NO: 32559 - protein, 86 aa, Homo sapiens
  Payload ID: 6387
  Gene Symbol: FOXJ3
  Gene Name: forkhead box J3
  ENSP ID: ENSP00000388099
MECIISGSASPTLAINTVTNKVTLYNTDQDGSDSPRSSLNNSLSDQSLASVNLNSVGSVHSYTPVTSHPESVSQSLTPQQQPQYNL

SEQ ID NO: 32560 - protein, 382 aa, Homo sapiens
  Payload ID: 6387
  Gene Symbol: FOXJ3
  Gene Name: forkhead box J3
  ENSP ID: ENSP00000393408
MGLYGQACPSVTSLRMTSELESSLTSMDWLPQLTMRAAIQKSDATQNAHGTGISKKNALLDPNTTLDQEEVQQHKDGKPPYSYASLITFAINSSPKKKMTLSEIYQWICDNFPYYREAGSGWKNSIRHNLSLNKCFLKVPRSKDDPGKGSYWAIDTNPKEDVLPTRPKKRARSVERVTLYNTDQDGSDSPRSSLNNSLSDQSLASVNLNSVGSVHSYTPVTSHPESVSQSLTPQQQPQYNLPERDKQLLFSEYNFEDLSASFRSLYKSVFEQSLSQQGLMNIPSESSQQSHTSCTYQHSPSSTVSTHPHSNQSSLSNSHGSGLNTTGSNSVAQVSLSHPQMHTQPSPHPPHRPHGLPQHPQRSPHPAPHPQQHSQLQSPHPQ

SEQ ID NO: 32561 - protein, 125 aa, Homo sapiens
  Payload ID: 6387
  Gene Symbol: FOXJ3
  Gene Name: forkhead box J3
  ENSP ID: ENSP00000403060
ATQNAHGTGISKKNALLDPNTTLDQEEVQQHKDGKPPYSYASLITFAINSSPKKKMTLSEIYQWICDNFPYYREAGSGWKNSIRHNLSLNKCFLKVPRSKDDPGKVGFIFLKQLNSSVCHLSCLN

SEQ ID NO: 32562 - protein, 622 aa, Homo sapiens; identical to SEQ ID NO: 32555
  Payload ID: 6387
  Gene Symbol: FOXJ3
  Gene Name: forkhead box J3
  Uniprot ID: Q9UPW0
  ENSP ID: ENSP00000439044

SEQ ID NO: 32563 - protein, 733 aa, Homo sapiens
  Payload ID: 6388
  Gene Symbol: FOXK1
  Gene Name: forkhead box K1
  Uniprot ID: P85037
  ENSP ID: ENSP00000328720
MAEVGEDSGARALLALRSAPCSPVLCAAAAAAAFPAAAPPPAPAQPQPPPGPPPPPPPPLPPGAIAGAGSSGGSSGVSGDSAVAGAAPALVAAAAASVRQSPGPALARLEGREFEFLMRQPSVTIGRNSSQGSVDLSMGLSSFISRRHLQLSFQEPHFYLRCLGKNGVFVDGAFQRRGAPALQLPKQCTFRFPSTAIKIQFTSLYHKEEAPASPLRPLYPQISPLKIHIPEPDLRSMVSPVPSPTGTISVPNSCPASPRGAGSSSYRFVQNVTSDLQLAAEFAAKAASEQQADTSGGDSPKDESKPPFSYAQLIVQAISSAQDRQLTLSGIYAHITKHYPYYRTADKGWQNSIRHNLSLNRYFIKVPRSQEEPGKGSFWRIDPASEAKLVEQAFRKRRQRGVSCFRTPFGPLSSRSAPASPTHPGLMSPRSGGLQTPECLSREGSPIPHDPEFGSKLASVPEYRYSQSAPGSPVSAQPVIMAVPPRPSSLVAKPVAYMPASIVTSQQPAGHAIHVVQQAPTVTMVRVVTTSANSANGYILTSQGAAGGSHDAAGAAVLDLGSEARGLEEKPTIAFATIPAAGGVIQTVASQMAPGVPGHTVTILQPATPVTLGQHHLPVRAVTQNGKHAVPTNSLAGNAYALTSPLQLLATQASSSAPVVVTRVCEVGPKEPAAAVAATATTTPATATTASASASSTGEPEVKRSRVEEPSGAVTTPAGVIAAAGPQGPGTGE

SEQ ID NO: 32564 - protein, 109 aa, Homo sapiens
  Payload ID: 6388
  Gene Symbol: FOXK1
  Gene Name: forkhead box K1
  ENSP ID: ENSP00000475486
  MOD_RES (1)..(1): Any amino acid
XTAIKIQFTSLYHKEEAPASPLRPLYPQISPLKIHIPEPDLRSMVSPVPSPTGTISVPNSCPASPRGAGSSSYRFVQNVTSDLQLAAEFAAKAASEQQADTSGGDSPKV

SEQ ID NO: 32565 - protein, 660 aa, Homo sapiens
  Payload ID: 6389
  Gene Symbol: FOXK2
  Gene Name: forkhead box K2
  Uniprot ID: Q01167
  ENSP ID: ENSP00000335677
MAAAAAALSGAGTPPAGGGAGGGGAGGGGSPPGGWAVARLEGREFEYLMKKRSVTIGRNSSQGSVDVSMGHSSFISRRHLEIFTPPGGGGHGGAAPELPPAQPRPDAGGDFYLRCLGKNGVFVDGVFQRRGAPPLQLPRVCTFRFPSTNIKITFTALSSEKREKQEASESPVKAVQPHISPLTINIPDTMAHLISPLPSPTGTISAANSCPSSPRGAGSSGYKVGRVMPSDLNLMADNSQPENEKEASGGDSPKDDSKPPYSYAQLIVQAITMAPDKQLTLNGIYTHITKNYPYYRTADKGWQNSIRHNLSLNRYFIKVPRSQEEPGKGSFWRIDPASESKLIEQAFRKRRPRGVPCFRTPLGPLSSRSAPASPNHAGVLSAHSSGAQTPESLSREGSPAPLEPEPGAAQPKLAVIQEARFAQSAPGSPLSSQPVLITVQRQLPQAIKPVTYTVATPVTTSTSQPPVVQTVHVVHQIPAVSVTSVAGLAPANTYTVSGQAVVTPAAVLAPPKAEAQENGDHREVKVKVEPIPAIGHATLGTASRIIQTAQTTPVQTVTIVQQAPLGQHQLPIKTVTQNGTHVASVPTAVHGQVNNAAASPLHMLATHASASASLPTKRHNGDQPEQPELKRIKTEDGEGIVIALSVDTPPAAVREKGVQN

SEQ ID NO: 32566 - protein, 253 aa, Homo sapiens
  Payload ID: 6389
  Gene Symbol: FOXK2
  Gene Name: forkhead box K2
  ENSP ID: ENSP00000432663
MAEPLGIQAPCPVCVHLVLPCTFRFPSTNIKITFTALSSEKREKQEASESPVKAVQPHISPLTINIPDTMAHLISPLPSPTGTISAANSCPSSPRGAGSSGYKVGRVMPSDLNLMADNSQPENEKEASGGDSPKDDSKPPYSYAQLIVQAITMAPDKQLTLNGIYTHITKNYPYYRTADKGWQNSIRHNLSLNRYFIKVPRSQEEPGKGSFWRIDPASESKLIEQAFRKRRPRGVPCFRTPLGPLSSRSAPAS

SEQ ID NO: 32567 - protein, 172 aa, Homo sapiens
  Payload ID: 6389
  Gene Symbol: FOXK2
  Gene Name: forkhead box K2
  ENSP ID: ENSP00000433167
MAHLISPLPSPTGTISAANSCPSSPRGAGSSGYKVGRVMPSDLNLMADNSQPENEKEASGGDSPKDDSKPPYSYAQLIVQAITMAPDKQLTLNGIYTHITKNYPYYRTADKGWQNSIRHNLSLNRYFIKVPRSQEEPGKGSFWRIDPASESKLIEQAFRKRRPRGVPCFRTP

SEQ ID NO: 32568 - protein, 614 aa, Homo sapiens
  Payload ID: 6389
  Gene Symbol: FOXK2
  Gene Name: forkhead box K2
  Uniprot ID: Q01167
  ENSP ID: ENSP00000436108
MAAAAAALSGAGTPPAGGGAGGGGAGGGGSPPGGWAVARLEGREFEYLMKKRSVTIGRNSSQGSVDVSMGHSSFISRRHLEIFTPPGGGGHGGAAPELPPAQPRPDAGGDFYLRCLGKNGVFVDGVFQRRGAPPLQLPRVCTFRFPSTNIKITFTALSSEKREKQEASESPVKAVQPHISPLTINIPDTMAHLISPLPSPTGTISAANSCPSSPRGAGSSGYKVGRVMPSDLNLMADNSQPENEKEASGGDSPKDDSKPPYSYAQLIVQAITMAPDKQLTLNGIYTHITKNYPYYRTADKGWQNSIRHNLSLNRYFIKVPRSQEEPGKGSFWRIDPASESKLIEQAFRKRRPRGVPCFRTPLGPLSSRSAPASPNHAGVLSAHSSGAQTPESLSREGSPAPLEPEPGAAQPKLAVIQEARFAQSAPGSPLSSQPVLITVQRQLPQAIKPVTYTVATPVTTSTSQPPVVQTVHVVHQIPAVSVTSVAGLAPANTYTVSGQAVVTPAAVLAPPKAEAQENGDHREVKVKVEPIPAIGHATLGTASRIIQTAQTTPVQTVTIVQQAPLGQHQLPIKTVTQNGTHVASVPTAVHGQVNNGPLGLRRPPCASSDWSCLS

SEQ ID NO: 32569 - protein, 129 aa, Homo sapiens
  Payload ID: 6389
  Gene Symbol: FOXK2
  Gene Name: forkhead box K2
  ENSP ID: ENSP00000461540
  MOD_RES (1)..(1): Any amino acid
XTPAAVLAPPKAEAQENGDHREVKVKVEPIPAIGHATLGTASRIIQTAQTTPVQTVTIVQQAPLGQHQLPIKTVTQNGTHVASVPTAVHGQVNNGKTCWSVAPRGCGYWEQSPFSLVVSVLTVTILAFV

SEQ ID NO: 32570 - protein, 610 aa, Homo sapiens
  Payload ID: 6389
  Gene Symbol: FOXK2
  Gene Name: forkhead box K2
  ENSP ID: ENSP00000481132
MAAARRALGAGTPRARGRGRGAGGGGSRRALGRGAPGGPRVRVSDEEALGDHRPQLVAGLGGREHGPLELHLPAPPRDLHAPGRRGHGGAAPELPPAQPRPDAGGDFYLRCLGKNGVFVDGVFQRRGAPPLQLPRVCTFRFPSTNIKITFTALSSEKREKQEASESPVKAVQPHISPLTINIPDTMAHLISPLPSPTGTISAANSCPSSPRGAGSSGYKVGRVMPSDLNLMADNSQPENEKEASGGDSPKDDSKPPYSYAQLIVQAITMAPDKQLTLNGIYTHITKNYPYYRTADKGWQNSIRHNLSLNRYFIKVPRSQEEPGKGSFWRIDPASESKLIEQAFRKRRPRGVPCFRTPLGPLSSRSAPASPNHAGVLSAHSSGAQTPESLSREGSPAPLEPEPGAAQPKLAVIQEARFAQSAPGSPLSSQPVLITVQRQLPQAIKPVTYTVATPVTTSTSQPPVVQTVHVVHQIPAVSVTSVAGLAPANTYTVSGQAVVTPAAVLAPPKAEAQENGDHREVKVKVEPIPAIGHATLGTASRIIQTAQTTPVQTVTIVQQAPLGQHQLPIKTVTQNGTHVASVPTAVHGQVNNGPLGLRRPPCASSDWSCLS

SEQ ID NO: 32571 - protein, 345 aa, Homo sapiens
  Payload ID: 6390
  Gene Symbol: FOXL1
  Gene Name: forkhead box L1
  Uniprot ID: Q12952
  ENSP ID: ENSP00000326272
MSHLFDPRLPALAASPMLYLYGPERPGLPLAFAPAAALAASGRAETPQKPPYSYIALIAMAIQDAPEQRVTLNGIYQFIMDRFPFYHDNRQGWQNSIRHNLSLNDCFVKVPREKGRPGKGSYWTLDPRCLDMFENGNYRRRKRKPKPGPGAPEAKRPRAETHQRSAEAQPEAGSGAGGSGPAISRLQAAPAGPSPLLDGPSPPAPLHWPGTASPNEDAGDAAQGAAAVAVGQAARTGDGPGSPLRPASRSSPKSSDKSKSFSIDSILAGKQGQKPPSGDELLGGAKPGPGGRLGASLLAASSSLRPPFNASLMLDPHVQGGFYQLGIPFLSYFPLQVPDTVLHFQ

SEQ ID NO: 32572 - protein, 114 aa, Homo sapiens
  Payload ID: 6390
  Gene Symbol: FOXL1
  Gene Name: forkhead box L1
  ENSP ID: ENSP00000472376
MSHLFDPRLPALAASPMLYLYGPERPGLPLAFAPAAALAASGRAETPQKPPYSYIALIAMAIQDAPEQRVTLNGIYQFIMDRFPFYHDNRQGWQNSIRHNLSLNDCFVKVPREK

SEQ ID NO: 32573 - protein, 376 aa, Homo sapiens
  Payload ID: 6391
  Gene Symbol: FOXL2
  Gene Name: forkhead box L2
  Uniprot ID: P58012
  ENSP ID: ENSP00000333188
MMASYPEPEDAAGALLAPETGRTVKEPEGPPPSPGKGGGGGGGTAPEKPDPAQKPPYSYVALIAMAIRESAEKRLTLSGIYQYIIAKFPFYEKNKKGWQNSIRHNLSLNECFIKVPREGGGERKGNYWTLDPACEDMFEKGNYRRRRRMKRPFRPPPAHFQPGKGLFGAGGAAGGCGVAGAGADGYGYLAPPKYLQSGFLNNSWPLPQPPSPMPYASCQMAAAAAAAAAAAAAAGPGSPGAAAVVKGLAGPAASYGPYTRVQSMALPPGVVNSYNGLGGPPAAPPPPPHPHPHPHAHHLHAAAAPPPAPPHHGAAAPPPGQLSPASPATAAPPAPAPTSAPGLQFACARQPELAMMHCSYWDHDSKTGALHSRLDL

SEQ ID NO: 32574 - protein, 801 aa, Homo sapiens
  Payload ID: 6392
  Gene Symbol: FOXM1
  Gene Name: forkhead box M1
  Uniprot ID: Q08050
  ENSP ID: ENSP00000342307
MKTSPRRPLILKRRRLPLPVQNAPSETSEEEPKRSPAQQESNQAEASKEVAESNSCKFPAGIKIINHPTMPNTQVVAIPNNANIHSIITALTAKGKESGSSGPNKFILISCGGAPTQPPGLRPQTQTSYDAKRTEVTLETLGPKPAARDVNLPRPPGALCEQKRETCADGEAAGCTINNSLSNIQWLRKMSSDGLGSRSIKQEMEEKENCHLEQRQVKVEEPSRPSASWQNSVSERPPYSYMAMIQFAINSTERKRMTLKDIYTWIEDHFPYFKHIAKPGWKNSIRHNLSLHDMFVRETSANGKVSFWTIHPSANRYLTLDQVFKPLDPGSPQLPEHLESQQKRPNPELRRNMTIKTELPLGARRKMKPLLPRVSSYLVPIQFPVNQSLVLQPSVKVPLPLAASLMSSELARHSKRVRIAPKVFGEQVVFGYMSKFFSGDLRDFGTPITSLFNFIFLCLSVLLAEEGIAPLSSAGPGKEEKLLFGEGFSPLLPVQTIKEEEIQPGEEMPHLARPIKVESPPLEEWPSPAPSFKEESSHSWEDSSQSPTPRPKKSYSGLRSPTRCVSEMLVIQHRERRERSRSRRKQHLLPPCVDEPELLFSEGPSTSRWAAELPFPADSSDPASQLSYSQEVGGPFKTPIKETLPISSTPSKSVLPRTPESWRLTPPAKVGGLDFSPVQTSQGASDPLPDPLGLMDLSTTPLQSAPPLESPQRLLSSEPLDLISVPFGNSSPSDIDVPKPGSPEPQVSGLAANRSLTEGLVLDTMNDSLSKILLDISFPGLDEDPLGPDNINWSQFIPELQ

SEQ ID NO: 32575 - protein, 763 aa, Homo sapiens
  Payload ID: 6392
  Gene Symbol: FOXM1
  Gene Name: forkhead box M1
  Uniprot ID: Q08050
  ENSP ID: ENSP00000352901
MKTSPRRPLILKRRRLPLPVQNAPSETSEEEPKRSPAQQESNQAEASKEVAESNSCKFPAGIKIINHPTMPNTQVVAIPNNANIHSIITALTAKGKESGSSGPNKFILISCGGAPTQPPGLRPQTQTSYDAKRTEVTLETLGPKPAARDVNLPRPPGALCEQKRETCADGEAAGCTINNSLSNIQWLRKMSSDGLGSRSIKQEMEEKENCHLEQRQVKVEEPSRPSASWQNSVSERPPYSYMAMIQFAINSTERKRMTLKDIYTWIEDHFPYFKHIAKPGWKNSIRHNLSLHDMFVRETSANGKVSFWTIHPSANRYLTLDQVFKPLDPGSPQLPEHLESQQKRPNPELRRNMTIKTELPLGARRKMKPLLPRVSSYLVPIQFPVNQSLVLQPSVKVPLPLAASLMSSELARHSKRVRIAPKVLLAEEGIAPLSSAGPGKEEKLLFGEGFSPLLPVQTIKEEEIQPGEEMPHLARPIKVESPPLEEWPSPAPSFKEESSHSWEDSSQSPTPRPKKSYSGLRSPTRCVSEMLVIQHRERRERSRSRRKQHLLPPCVDEPELLFSEGPSTSRWAAELPFPADSSDPASQLSYSQEVGGPFKTPIKETLPISSTPSKSVLPRTPESWRLTPPAKVGGLDFSPVQTSQGASDPLPDPLGLMDLSTTPLQSAPPLESPQRLLSSEPLDLISVPFGNSSPSDIDVPKPGSPEPQVSGLAANRSLTEGLVLDTMNDSLSKILLDISFPGLDEDPLGPDNINWSQFIPELQ

SEQ ID NO: 32576 - protein, 748 aa, Homo sapiens
  Payload ID: 6392
  Gene Symbol: FOXM1
  Gene Name: forkhead box M1
  Uniprot ID: Q08050
  ENSP ID: ENSP00000354492
MKTSPRRPLILKRRRLPLPVQNAPSETSEEEPKRSPAQQESNQAEASKEVAESNSCKFPAGIKIINHPTMPNTQVVAIPNNANIHSIITALTAKGKESGSSGPNKFILISCGGAPTQPPGLRPQTQTSYDAKRTEVTLETLGPKPAARDVNLPRPPGALCEQKRETCADGEAAGCTINNSLSNIQWLRKMSSDGLGSRSIKQEMEEKENCHLEQRQVKVEEPSRPSASWQNSVSERPPYSYMAMIQFAINSTERKRMTLKDIYTWIEDHFPYFKHIAKPGWKNSIRHNLSLHDMFVRETSANGKVSFWTIHPSANRYLTLDQVFKQQKRPNPELRRNMTIKTELPLGARRKMKPLLPRVSSYLVPIQFPVNQSLVLQPSVKVPLPLAASLMSSELARHSKRVRIAPKVLLAEEGIAPLSSAGPGKEEKLLFGEGFSPLLPVQTIKEEEIQPGEEMPHLARPIKVESPPLEEWPSPAPSFKEESSHSWEDSSQSPTPRPKKSYSGLRSPTRCVSEMLVIQHRERRERSRSRRKQHLLPPCVDEPELLFSEGPSTSRWAAELPFPADSSDPASQLSYSQEVGGPFKTPIKETLPISSTPSKSVLPRTPESWRLTPPAKVGGLDFSPVQTSQGASDPLPDPLGLMDLSTTPLQSAPPLESPQRLLSSEPLDLISVPFGNSSPSDIDVPKPGSPEPQVSGLAANRSLTEGLVLDTMNDSLSKILLDISFPGLDEDPLGPDNINWSQFIPELQ

SEQ ID NO: 32577 - protein, 206 aa, Homo sapiens
  Payload ID: 6392
  Gene Symbol: FOXM1
  Gene Name: forkhead box M1
  ENSP ID: ENSP00000442309
  MOD_RES (1)..(1): Any amino acid
XAKPGWKNSIRHNLSLHDMFVRETSANGKVSFWTIHPSANRYLTLDQVFKPLDPGSPQLPEHLESQQQKRPNPELRRNMTIKTELPLGARRKMKPLLPRVSSYLVPIQFPVNQSLVLQPSVKVPLPLAASLMSSELARHSKRVRIAPKVLLAEEGIAPLSSAGPGKEEKLLFGEGFSPLLPVQTIKEEEIQPGEEMPHLARPIKVE

SEQ ID NO: 32578 - protein, 80 aa, Homo sapiens
  Payload ID: 6392
  Gene Symbol: FOXM1
  Gene Name: forkhead box M1
  ENSP ID: ENSP00000444541
TALTAKGKESGSSGPNKFILISCGGAPTQPPGLRPQTQTSYDAKRTEVTLETLGPKPAARDVNLPRPPGALCEQKRETCG

SEQ ID NO: 32579 - protein, 748 aa, Homo sapiens
  Payload ID: 6392
  Gene Symbol: FOXM1
  Gene Name: forkhead box M1
  ENSP ID: ENSP00000486536
MKTSPRRPLILKRRRLPLPVQNAPSETSEEEPKRSPAQQESNQAEASKEVAESNSCKFPAGIKIINHPTMPNTQVVAIPNNANIHSIITALTAKGKESGSSGPNKFILISCGGAPTQPPGLRPQTQTSYDAKRTEVTLETLGPKPAARDVNLPRPPGALCEQKRETCDGEAAGCTINNSLSNIQWLRKMSSDGLGSRSIKQEMEEKENCHLEQRQVKVEEPSRPSASWQNSVSERPPYSYMAMIQFAINSTERKRMTLKDIYTWIEDHFPYFKHIAKPGWKNSIRHNLSLHDMFVRETSANGKVSFWTIHPSANRYLTLDQVFKQQQKRPNPELRRNMTIKTELPLGARRKMKPLLPRVSSYLVPIQFPVNQSLVLQPSVKVPLPLAASLMSSELARHSKRVRIAPKVLLAEEGIAPLSSAGPGKEEKLLFGEGFSPLLPVQTIKEEEIQPGEEMPHLARPIKVESPPLEEWPSPAPSFKEESSHSWEDSSQSPTPRPKKSYSGLRSPTRCVSEMLVIQHRERRERSRSRRKQHLLPPCVDEPELLFSEGPSTSRWAAELPFPADSSDPASQLSYSQEVGGPFKTPIKETLPISSTPSKSVLPRTPESWRLTPPAKVGGLDFSPVQTSQGASDPLPDPLGLMDLSTTPLQSAPPLESPQRLLSSEPLDLISVPFGNSSPSDIDVPKPGSPEPQVSGLAANRSLTEGLVLDTMNDSLSKILLDISFPGLDEDPLGPDNINWSQFIPELQ

SEQ ID NO: 32580 - protein, 648 aa, Homo sapiens
  Payload ID: 6393
  Gene Symbol: FOXN1
  Gene Name: forkhead box N1
  Uniprot ID: O15353
  ENSP ID: ENSP00000226247
MVSLPPPQSDVTLPGPTRLEGERQGDLMQAPGLPGSPAPQSKHAGFSCSSFVSDGPPERTPSLPPHSPRIASPGPEQVQGHCPAGPGPGPFRLSPSDKYPGFGFEEAAASSPGRFLKGSHAPFHPYKRPFHEDVFPEAETTLALKGHSFKTPGPLEAFEEIPVDVAEAEAFLPGFSAEAWCNGLPYPSQEHGPQVLGSEVKVKPPVLESGAGMFCYQPPLQHMYCSSQPPFHQYSPGGGSYPIPYLGSSHYQYQRMAPQASTDGHQPLFPKPIYSYSILIFMALKNSKTGSLPVSEIYNFMTEHFPYFKTAPDGWKNSVRHNLSLNKCFEKVENKSGSSSRKGCLWALNPAKIDKMQEELQKWKRKDPIAVRKSMAKPEELDSLIGDKREKLGSPLLGCPPPGLSGSGPIRPLAPPAGLSPPLHSLHPAPGPIPGKNPLQDLLMGHTPSCYGQTYLHLSPGLAPPGPPQPLFPQPDGHLELRAQPGTPQDSPLPAHTPPSHSAKLLAEPSPARTMHDTLLPDGDLGTDLDAINPSLTDFDFQGNLWEQLKDDSLALDPLVLVTSSPTSSSMPPPQPPPHCFPPGPCLTETGSGAGDLAAPGSGGSGALGDLHLTTLYSAFMELEPTPPTAPAGPSVYLSPSSKPVALA

SEQ ID NO: 32581 - protein, 117 aa, Homo sapiens
  Payload ID: 6393
  Gene Symbol: FOXN1
  Gene Name: forkhead box N1
  ENSP ID: ENSP00000462159
MVSLPPPQSDVTLPGPTRLEGERQGDLMQAPGLPGSPAPQSKHAGFSCSSFVSDGPPERTPSLPPHSPRIASPGPEQVQGHCPAGPGPGPFRLSPSDKYPGFGFEEAAASSPGRFLK

SEQ ID NO: 32582 - protein, 648 aa, Homo sapiens; identical to SEQ ID NO: 32580
  Payload ID: 6393
  Gene Symbol: FOXN1
  Gene Name: forkhead box N1
  Uniprot ID: O15353
  ENSP ID: ENSP00000464645

SEQ ID NO: 32583 - protein, 431 aa, Homo sapiens
  Payload ID: 6394
  Gene Symbol: FOXN2
  Gene Name: forkhead box N2
  Uniprot ID: P32314
  ENSP ID: ENSP00000343633
MGPVIGMTPDKRAETPGAEKIAGLSQIYKMGSLPEAVDAARPKATLVDSESADDELTNLNWLHESTNLLTNFSLGSEGLPIVSPLYDIEGDDVPSFGPACYQNPEKKSATSKPPYSFSLLIYMAIEHSPNKCLPVKEIYSWILDHFPYFATAPTGWKNSVRHNLSLNKCFQKVERSHGKVNGKGSLWCVDPEYKPNLIQALKKQPFSSASSQNGSLSPHYLSSVIKQNQVRNLKESDIDAAAAMMLLNTSIEQGILECEKPLPLKTALQKKRSYGNAFHHPSAVRLQESDSLATSIDPKEDHNYSASSMAAQRCASRSSVSSLSSVDEVYEFIPKNSHVGSDGSEGFHSEEDTDVDYEDDPLGDSGYASQPCAKISEKGQSGKKMRKQTCQEIDEELKEAAGSLLHLAGIRTCLGSLISTAKTQNQKQRKK

SEQ ID NO: 32584 - protein, 246 aa, Homo sapiens
  Payload ID: 6394
  Gene Symbol: FOXN2
  Gene Name: forkhead box N2
  ENSP ID: ENSP00000388486
MGPVIGMTPDKRAETPGAEKIAGLSQIYKMGSLPEAVDAARPKATLVDSESADDELTNLNWLHESTNLLTNFSLGSEGLPIVSPLYDIEGDDVPSFGPACYQNPEKKSATSKPPYSFSLLIYMAIEHSPNKCLPVKEIYSWILDHFPYFATAPTGWKNSVRHNLSLNKCFQKVERSHGKVNGKGSLWCVDPEYKPNLIQALKKQPFSSASSQNGSLSPHYLSSVIKQNQVRNLKESDIDAAAAMML

SEQ ID NO: 32585 - protein, 340 aa, Homo sapiens
  Payload ID: 6394
  Gene Symbol: FOXN2
  Gene Name: forkhead box N2
  ENSP ID: ENSP00000484534
MMCHPLDQLATRTQKKSATSKPPYSFSLLIYMAIEHSPNKCLPVKEIYSWILDHFPYFATAPTGWKNSVRHNLSLNKCFQKVERSHGKVNGKGSLWCVDPEYKPNLIQALKKQPFSSASSQNGSLSPHYLSSVIKQNQVRNLKESDIDAAAAMMLLNTSIEQGILECEKPLPLKTALQKKRSYGNAFHHPSAVRLQESDSLATSIDPKEDHNYSASSMAAQRCASRSSVSSLSSVDEVYEFIPKNSHVGSDGSEGFHSEEDTDVDYEDDPLGDSGYASQPCAKISEKGQSGKKMRKQTCQEIDEELKEAAGSLLHLAGIRTCLGSLISTAKTQNQKQRKK

SEQ ID NO: 32586 - protein, 490 aa, Homo sapiens
  Payload ID: 6395
  Gene Symbol: FOXN3
  Gene Name: forkhead box N3
  Uniprot ID: O00409
  ENSP ID: ENSP00000261302
MGPVMPPSKKPESSGISVSSGLSQCYGGSGFSKALQEDDDLDFSLPDIRLEEGAMEDEELTNLNWLHESKNLLKSFGESVLRSVSPVQDLDDDTPPSPAHSDMPYDARQNPNCKPPYSFSCLIFMAIEDSPTKRLPVKDIYNWILEHFPYFANAPTGWKNSVRHNLSLNKCFKKVDKERSQSIGKGSLWCIDPEYRQNLIQALKKTPYHPHPHVFNTPPTCPQAYQSTSGPPIWPGSTFFKRNGALLQDPDIDAASAMMLLNTPPEIQAGFPPGVIQNGARVLSRGLFPGVRPLPITPIGVTAAMRNGITSCRMRTESEPSCGSPVVSGDPKEDHNYSSAKSSNARSTSPTSDSISSSSSSADDHYEFATKGSQEGSEGSEGSFRSHESPSDTEEDDRKHSQKEPKDSLGDSGYASQHKKRQHFAKARKVPSDTLPLKKRRTEKPPESDDEEMKEAAGSLLHLAGIRSCLNNITNRTAKGQKEQKETTKN

SEQ ID NO: 32587 - protein, 490 aa, Homo sapiens; identical to SEQ ID NO: 32586
  Payload ID: 6395
  Gene Symbol: FOXN3
  Gene Name: forkhead box N3
  Uniprot ID: O00409
  ENSP ID: ENSP00000343288

SEQ ID NO: 32588 - protein, 111 aa, Homo sapiens
  Payload ID: 6395
  Gene Symbol: FOXN3
  Gene Name: forkhead box N3
  ENSP ID: ENSP00000450684
  MOD_RES (1)..(1): Any amino acid
XYNWILEHFPYFANAPTGWKNSVRHNLSLNKCFKKVDKERSQSIGKGSLWCIDPEYRQNLIQALKKTPYHPHPHVFNTPPTCPQAYQSTSGPPIWPGSTFFKRNGALLQEK

SEQ ID NO: 32589 - protein, 79 aa, Homo sapiens
  Payload ID: 6395
  Gene Symbol: FOXN3
  Gene Name: forkhead box N3
  ENSP ID: ENSP00000450783
RPLPITPIGVTAAMRQSVYTMIHLCDSSSQTYIVPELSATSIFLHLPLLGERRNSSVESIIIQRTCRNLSQQHKLQDQA

SEQ ID NO: 32590 - protein, 185 aa, Homo sapiens
  Payload ID: 6395
  Gene Symbol: FOXN3
  Gene Name: forkhead box N3
  ENSP ID: ENSP00000450833
  MOD_RES (1)..(1): Any amino acid
XANAPTGWKNSVRHNLSLNKCFKKVDKERSQSIGKGSLWCIDPEYRQNLIQALKKTPYHPHPHVFNTPPTCPQAYQSTSGPPIWPGSTFFKRNGALLQDPDIDAASAMMLLNTPPEIQAVPPGVIQNGARVLSRGLFPGVRPLPITPIGVTAAMRNGITSCRMRTESEPSCGSPVVSGDPKEDHN

SEQ ID NO: 32591 - protein, 91 aa, Homo sapiens
  Payload ID: 6395
  Gene Symbol: FOXN3
  Gene Name: forkhead box N3
  ENSP ID: ENSP00000451024
FPYFANAPTGWKNSVRHNLSLNKCFKKVDKERSQSIGKGSLWCIDPEYRQNLIQALKKTPYHPHPHVFNTPPTCPQAYQRDGVSPSWPGWS

SEQ ID NO: 32592 - protein, 208 aa, Homo sapiens
  Payload ID: 6395
  Gene Symbol: FOXN3
  Gene Name: forkhead box N3
  ENSP ID: ENSP00000451135
MGPVMPPSKKPESSGISVSSGLSQCYGGSGFSKALQEDDDLDFSLPDIRLEEGAMEDEELTNLNWLHESKNLLKSFGESVLRSVSPVQDLDDDTPPSPAHSDMPYDARQNPNCKPPYSFSCLIFMAIEDSPTKRLPVKDIYNWILEHFPYFANAPTGWKNSVRHNLSLNKCFKKVDKERSQSIGKGSLWCIDPEYRQNLIQALKKTPY

SEQ ID NO: 32593 - protein, 76 aa, Homo sapiens
  Payload ID: 6395
  Gene Symbol: FOXN3
  Gene Name: forkhead box N3
  ENSP ID: ENSP00000451437
APTGWKNSVRHNLSLNKCFKKVDKERSQSIGKGSLWCIDPEYRQNLIQALKKTPYHPHPHVFNTPPTCPQAYQREG

SEQ ID NO: 32594 - protein, 54 aa, Homo sapiens
  Payload ID: 6395
  Gene Symbol: FOXN3
  Gene Name: forkhead box N3
  ENSP ID: ENSP00000451902
MGPVMPPSKKPESSGISVSSGLSQCYGGSGFSKALQEDDDLDFSLPDIRLEEGA

SEQ ID NO: 32595 - protein, 468 aa, Homo sapiens
  Payload ID: 6395
  Gene Symbol: FOXN3
  Gene Name: forkhead box N3
  Uniprot ID: O00409
  ENSP ID: ENSP00000452005
MGPVMPPSKKPESSGISVSSGLSQCYGGSGFSKALQEDDDLDFSLPDIRLEEGAMEDEELTNLNWLHESKNLLKSFGESVLRSVSPVQDLDDDTPPSPAHSDMPYDARQNPNCKPPYSFSCLIFMAIEDSPTKRLPVKDIYNWILEHFPYFANAPTGWKNSVRHNLSLNKCFKKVDKERSQSIGKGSLWCIDPEYRQNLIQALKKTPYHPHPHVFNTPPTCPQAYQSTSGPPIWPGSTFFKRNGALLQVPPGVIQNGARVLSRGLFPGVRPLPITPIGVTAAMRNGITSCRMRTESEPSCGSPVVSGDPKEDHNYSSAKSSNARSTSPTSDSISSSSSSADDHYEFATKGSQEGSEGSEGSFRSHESPSDTEEDDRKHSQKEPKDSLGDSGYASQHKKRQHFAKARKVPSDTLPLKKRRTEKPPESDDEEMKEAAGSLLHLAGIRSCLNNITNRTAKGQKEQKETTKN

SEQ ID NO: 32596 - protein, 468 aa, Homo sapiens; identical to SEQ ID NO: 32595
  Payload ID: 6395
  Gene Symbol: FOXN3
  Gene Name: forkhead box N3
  Uniprot ID: O00409
  ENSP ID: ENSP00000452227

SEQ ID NO: 32597 - protein, 93 aa, Homo sapiens
  Payload ID: 6395
  Gene Symbol: FOXN3
  Gene Name: forkhead box N3
  ENSP ID: ENSP00000452290
MGPVMPPSKKPESSGISVSSGLSQCYGGSGFSKALQEDDDLDFSLPDIRLEEGAMEDEELTNLNWLHESKNLLKSFGESVLRSVSPVQDLDDD

SEQ ID NO: 32598 - protein, 122 aa, Homo sapiens
  Payload ID: 6395
  Gene Symbol: FOXN3
  Gene Name: forkhead box N3
  ENSP ID: ENSP00000452444
SHVSADSNRGYSRGGRKVPNLQESRYREPGTESIGKGSLWCIDPEYRQNLIQALKKTPYHPHPHVFNTPPTCPQAYQSTSGPPIWPGSTFFKRNGALLQDPDIDAASAMMLLNTPPEIQAGC

SEQ ID NO: 32599 - protein, 468 aa, Homo sapiens; identical to SEQ ID NO: 32595
  Payload ID: 6395
  Gene Symbol: FOXN3
  Gene Name: forkhead box N3
  Uniprot ID: O00409
  ENSP ID: ENSP00000479114

SEQ ID NO: 32600 - protein, 517 aa, Homo sapiens
  Payload ID: 6396
  Gene Symbol: FOXN4
  Gene Name: forkhead box N4
  Uniprot ID: Q96NZ1
  ENSP ID: ENSP00000299162
MIESDTSSIMSGIIRNSGQNHHPSPQEYRLLATTSDDDLPGDLQSLSWLTAVDVPRLQQMASGRVDLGGPCVPHPHPGALAGVADLHVGATPSPLLHGPAGMAPRGMPGLGPITGHRDSMSQFPVGGQPSSGLQDPPHLYSPATQPQFPLPPGAQQCPPVGLYGPPFGVRPPYPQPHVAVHSSQELHPKHYPKPIYSYSCLIAMALKNSKTGSLPVSEIYSFMKEHFPYFKTAPDGWKNSVRHNLSLNKCFEKVENKMSGSSRKGCLWALNLARIDKMEEEMHKWKRKDLAAIHRSMANPEELDKLISDRPESCRRPGKPGEPEAPVLTHATTVAVAHGCLAVSQLPPQPLMTLSLQSVPLHHQVQPQAHLAPDSPAPAQTPPLHALPDLSPSPLPHPAMGRAPVDFINISTDMNTEVDALDPSIMDFALQGNLWEEMKDEGFSLDTLGAFADSPLGCDLGASGLTPASGGSDQSFPDLQVTGLYTAYSTPDSVAASGTSSSSQYLGAQGNKPIALL

SEQ ID NO: 32601 - protein, 337 aa, Homo sapiens
  Payload ID: 6396
  Gene Symbol: FOXN4
  Gene Name: forkhead box N4
  Uniprot ID: Q96NZ1
  ENSP ID: ENSP00000347354
MPGLPCPALPCPAPPPAPSCLIAMALKNSKTGSLPVSEIYSFMKEHFPYFKTAPDGWKNSVRHNLSLNKCFEKVENKMSGSSRKGCLWALNLARIDKMEEEMHKWKRKDLAAIHRSMANPEELDKLISDRPESCRRPGKPGEPEAPVLTHATTVAVAHGCLAVSQLPPQPLMTLSLQSVPLHHQVQPQAHLAPDSPAPAQTPPLHALPDLSPSPLPHPAMGRAPVDFINISTDMNTEVDALDPSIMDFALQGNLWEEMKDEGFSLDTLGAFADSPLGCDLGASGLTPASGGSDQSFPDLQVTGLYTAYSTPDSVAASGTSSSSQYLGAQGNKPIALL

SEQ ID NO: 32602 - protein, 218 aa, Homo sapiens
  Payload ID: 6396
  Gene Symbol: FOXN4
  Gene Name: forkhead box N4
  ENSP ID: ENSP00000408085
GDLQSLSWLTAVDVPRLQQMASGRVDLGGPCVPHPHPGALAGVADLHVGATPSPLLHGPAGMAPRGMPGLGPITGHRDSQMSQFPVGGQPSSGLQDPPHLYSPATQPQFPLPPGAQQLSDRHGPEEQQDRQPACERDLQLHEGALPLLQDGPRRVEELGAAQPVSEQVLREGGEQDERLLPQGLPVGSEPGPHRQDGGGDAQVEEEGPGCHPPEYGQP

SEQ ID NO: 32603 - protein, 84 aa, Homo sapiens
  Payload ID: 6396
  Gene Symbol: FOXN4
  Gene Name: forkhead box N4
  ENSP ID: ENSP00000474754
  MOD_RES (1)..(1): Any amino acid
XKNSKTGSLPVSEIYSFMKEHFPYFKTAPDGWKNSVRHNLSLNKCFEKVDKQPSIPRPLDTPPRPEPQCLPVLSETSPSWILAA

SEQ ID NO: 32604 - protein, 655 aa, Homo sapiens
  Payload ID: 6397
  Gene Symbol: FOXO1
  Gene Name: forkhead box O1
  Uniprot ID: Q12778
  ENSP ID: ENSP00000368880
MAEAPQVVEIDPDFEPLPRPRSCTWPLPRPEFSQSNSATSSPAPSGSAAANPDAAAGLPSASAAAVSADFMSNLSLLEESEDFPQAPGSVAAAVAAAAAAAATGGLCGDFQGPEAGCLHPAPPQPPPPGPLSQHPPVPPAAAGPLAGQPRKSSSSRRNAWGNLSYADLITKAIESSAEKRLTLSQIYEWMVKSVPYFKDKGDSNSSAGWKNSIRHNLSLHSKFIRVQNEGTGKSSWWMLNPEGGKSGKSPRRRAASMDNNSKFAKSRSRAAKKKASLQSGQEGAGDSPGSQFSKWPASPGSHSNDDFDNWSTFRPRTSSNASTISGRLSPIMTEQDDLGEGDVHSMVYPPSAAKMASTLPSLSEISNPENMENLLDNLNLLSSPTSLTVSTQSSPGTMMQQTPCYSFAPPNTSLNSPSPNYQKYTYGQSSMSPLPQMPIQTLQDNKSSYGGMSQYNCAPGLLKELLTSDSPPHNDIMTPVDPGVAQPNSRVLGQNVMMGPNSVMSTYGSQASHNKMMNPSSHTHPGHAQQTSAVNGRPLPHTVSTMPHTSGMNRLTQVKTPVQVPLPHPMQMSALGGYSSVSSCNGYGRMGLLHQEKLPSDLDGMFIERLDCDMESIIRNDLMDGDTLDFNFDNVLPNQSFPHSVKTTTHSWVSG

SEQ ID NO: 32605 - protein, 673 aa, Homo sapiens
  Payload ID: 6398
  Gene Symbol: FOXO3
  Gene Name: forkhead box O3
  Uniprot ID: O43524
  ENSP ID: ENSP00000339527
MAEAPASPAPLSPLEVELDPEFEPQSRPRSCTWPLQRPELQASPAKPSGETAADSMIPEEEDDEDDEDGGGRAGSAMAIGGGGGSGTLGSGLLLEDSARVLAPGGQDPGSGPATAAGGLSGGTQALLQPQQPLPPPQPGAAGGSGQPRKCSSRRNAWGNLSYADLITRAIESSPDKRLTLSQIYEWMVRCVPYFKDKGDSNSSAGWKNSIRHNLSLHSRFMRVQNEGTGKSSWWIINPDGGKSGKAPRRRAVSMDNSNKYTKSRGRAAKKKAALQTAPESADDSPSQLSKWPGSPTSRSSDELDAWTDFRSRTNSNASTVSGRLSPIMASTELDEVQDDDAPLSPMLYSSSASLSPSVSKPCTVELPRLTDMAGTMNLNDGLTENLMDDLLDNITLPPSQPSPTGGLMQRSSSFPYTTKGSGLGSPTSSFNSTVFGPSSLNSLRQSPMQTIQENKPATFSSMSHYGNQTLQDLLTSDSLSHSDVMMTQSDPLMSQASTAVSAQNSRRNVMLRNDPMMSFAAQPNQGSLVNQNLLHHQHQTQGALGGSRALSNSVSNMGLSESSSLGSAKHQQQSPVSQSMQTLSDSLSGSSLYSTSANLPVMGHEKFPSDLDLDMFNGSLECDMESIIRSELMDADGLDFNFDSLISTQNVVGLNVGNFTGAKQASSQSWVPG

SEQ ID NO: 32606 - protein, 673 aa, Homo sapiens; identical to SEQ ID NO: 32605
  Payload ID: 6398
  Gene Symbol: FOXO3
  Gene Name: forkhead box O3
  Uniprot ID: O43524
  ENSP ID: ENSP00000385824

SEQ ID NO: 32607 - protein, 453 aa, Homo sapiens
  Payload ID: 6398
  Gene Symbol: FOXO3
  Gene Name: forkhead box O3
  Uniprot ID: O43524
  ENSP ID: ENSP00000446316
MRVQNEGTGKSSWWIINPDGGKSGKAPRRRAVSMDNSNKYTKSRGRAAKKKAALQTAPESADDSPSQLSKWPGSPTSRSSDELDAWTDFRSRTNSNASTVSGRLSPIMASTELDEVQDDDAPLSPMLYSSSASLSPSVSKPCTVELPRLTDMAGTMNLNDGLTENLMDDLLDNITLPPSQPSPTGGLMQRSSSFPYTTKGSGLGSPTSSFNSTVFGPSSLNSLRQSPMQTIQENKPATFSSMSHYGNQTLQDLLTSDSLSHSDVMMTQSDPLMSQASTAVSAQNSRRNVMLRNDPMMSFAAQPNQGSLVNQNLLHHQHQTQGALGGSRALSNSVSNMGLSESSSLGSAKHQQQSPVSQSMQTLSDSLSGSSLYSTSANLPVMGHEKFPSDLDLDMFNGSLECDMESIIRSELMDADGLDFNFDSLISTQNVVGLNVGNFTGAKQASSQSWVPG

SEQ ID NO: 32608 - protein, 450 aa, Homo sapiens
  Payload ID: 6399
  Gene Symbol: FOXO4
  Gene Name: forkhead box O4
  Uniprot ID: P98177
  ENSP ID: ENSP00000342209
MDPGNENSATEAAAIIDLDPDFEPQSRPRSCTWPLPRPEIANQPSEPPEVEPDLGEKAIESAPEKRLTLAQIYEWMVRTVPYFKDKGDSNSSAGWKNSIRHNLSLHSKFIKVHNEATGKSSWWMLNPEGGKSGKAPRRRAASMDSSSKLLRGRSKAPKKKPSVLPAPPEGATPTSPVGHFAKWSGSPCSRNREEADMWTTFRPRSSSNASSVSTRLSPLRPESEVLAEEIPASVSSYAGGVPPTLNEGLELLDGLNLTSSHSLLSRSGLSGFSLQHPGVTGPLHTYSSSLFSPAEGPLSAGEGCFSSSQALEALLTSDTPPPPADVLMTQVDPILSQAPTLLLLGGLPSSSKLATGVGLCPKPLEAPGPSSLVPTLSMIAPPPVMASAPIPKALGTPVLTPPTEAASQDRMPQDLDLDMYMENLECDMDNIISDLMDEGEGLDFNFEPDP

SEQ ID NO: 32609 - protein, 505 aa, Homo sapiens
  Payload ID: 6399
  Gene Symbol: FOXO4
  Gene Name: forkhead box O4
  Uniprot ID: P98177
  ENSP ID: ENSP00000363377
MDPGNENSATEAAAIIDLDPDFEPQSRPRSCTWPLPRPEIANQPSEPPEVEPDLGEKVHTEGRSEPILLPSRLPEPAGGPQPGILGAVTGPRKGGSRRNAWGNQSYAELISQAIESAPEKRLTLAQIYEWMVRTVPYFKDKGDSNSSAGWKNSIRHNLSLHSKFIKVHNEATGKSSWWMLNPEGGKSGKAPRRRAASMDSSSKLLRGRSKAPKKKPSVLPAPPEGATPTSPVGHFAKWSGSPCSRNREEADMWTTFRPRSSSNASSVSTRLSPLRPESEVLAEEIPASVSSYAGGVPPTLNEGLELLDGLNLTSSHSLLSRSGLSGFSLQHPGVTGPLHTYSSSLFSPAEGPLSAGEGCFSSSQALEALLTSDTPPPPADVLMTQVDPILSQAPTLLLLGGLPSSSKLATGVGLCPKPLEAPGPSSLVPTLSMIAPPPVMASAPIPKALGTPVLTPPTEAASQDRMPQDLDLDMYMENLECDMDNIISDLMDEGEGLDFNFEPDP

SEQ ID NO: 32610 - protein, 559 aa, Homo sapiens
  Payload ID: 6400
  Gene Symbol: FOXO6
  Gene Name: forkhead box O6
  ENSP ID: ENSP00000361672
MAAKLRAHQVDVDPDFAPQSRPRSCTWPLPQPDLAGDEDGALGAGVAEGAEDCGPERRATAPAMAPAPPLGAEVGPLRKAKSSRRNAWGNLSYADLITKAIESAPDKRLTLSQIYDWMVRYVPYFKDKGDSNSSAGWKNSIRHNLSLHTRFIRVQNEGTGKSSWWMLNPEGGKTGKTPRRRAVSMDNGAKFLRIKGKASKKKQLQAPERSPDDSSPSAPAPGPVPAAAKWAASPASHASDDYEAWADFRGGGRPLLGEAAELEDDEALEALAPSSPLMYPSPASALSPALGSRCPGELPRLAELGGPLGLHGGGGAGLPEGLLDGAQDAYGPRARAQARPGAGCAGGAGAGGRSRRLPRQRGGPVRAARALAQCLSPPHQPYDAARRGGRRGPGTAGPRRRLRGPARRPPAGRSAGALRCRRRRAAGRRARPLPGRPGPRHVQREPRVRRGVHHPQRLHGQRRNGLQLRFGPASAAAGPGRGPAPQPELGAGLRAASRLRAPRPVPRGPLSSHPDSRVPAPDSSSPGGGPSPARDPSRRPAAGEGEGGAGAPHCSCPHS

SEQ ID NO: 32611 - protein, 492 aa, Homo sapiens
  Payload ID: 6400
  Gene Symbol: FOXO6
  Gene Name: forkhead box O6
  Uniprot ID: A8MYZ6
  ENSP ID: ENSP00000484727
MAAKLRAHQVDVDPDFAPQSRPRSCTWPLPQPDLAGDEDGALGAGVAEGAEDCGPERRATAPAMAPAPPLGAEVGPLRKAKSSRRNAWGNLSYADLITKAIESAPDKRLTLSQIYDWMVRYVPYFKDKGDSNSSAGWKNSIRHNLSLHTRFIRVQNEGTGKSSWWMLNPEGGKTGKTPRRRAVSMDNGAKFLRIKGKASKKKQLQAPERSPDDSSPSAPAPGPVPAAAKWAASPASHASDDYEAWADFRGGGRPLLGEAAELEDDEALEALAPSSPLMYPSPASALSPALGSRCPGELPRLAELGGPLGLHGGGGAGLPEGLLDGAQDAYGPRPAPRPGPVLGAPGELALAGAAAAYPGKGAAPYAPPAPSRSALAHPISLMTLPGEAGAAGLAPPGHAAAFGGPPGGLLLDALPGPYAAAAAGPLGAAPDRFPADLDLDMFSGSLECDVESIILNDFMDSDEMDFNFDSALPPPPPGLAGAPPPNQSWVPG

SEQ ID NO: 32612 - protein, 559 aa, Homo sapiens
  Payload ID: 6400
  Gene Symbol: FOXO6
  Gene Name: Forkhead box O6
  ENSP ID: ENSP00000486069
MAAKLRAHQVDVDPDFAPQSRPRSCTWPLPQPDLAGDEDGALGAGVAEGAEDCGPERRATAPAMAPAPPLGAEVGPLRKAKSSRRNAWGNLSYADLITKAIESAPDKRLTLSQIYDWMVRYVPYFKDKGDSNSSAGWKNSIRHNLSLHTRFIRVQNEGTGKSSWWMLNPEGGKTGKTPRRRAVSMDNGAKFLRIKGKASKKKQLQAPERSPDDSSPSAPAPGPVPAAAKWAASPASHASDDYEAWADFRGGGRPLLGEAAELEDDEALEALAPSSPLMYPSPASALSPALGSRCPGELPRLAELGGPLGLHGGGGAGLPEGLLDGAQDAYGPRARAGARPGAGCAGGAGAGGRSRRLPRQRGGPVRAARALAQCLSPPHQPYDAARRGGRRGPGTVGPRRRLRGPARRPPAGRSAGALRCRRRRAAGRRARPLPGRPGPRHVQREPRVRRGVHHPQRLHGQRRNGLQLRFGPASTAAGPGRGPAPQPELGAGLRAASRLRAPRPVPRGPLSSHPDSRVPAPDSSSPGGGPSPARDPSRRPAAGEGEGGAGAPHCSCPHS

SEQ ID NO: 32613 - protein, 559 aa, Homo sapiens
  Payload ID: 6400
  Gene Symbol: FOXO6
  Gene Name: Forkhead box O6
  ENSP ID: ENSP00000487155
MAAKLRAHQVDVDPDFAPQSRPRSCTWPLPQPDLAGDEDGALGAGVAEGAEDCGPERRATAPAMAPAPPLGAEVGPLRKAKSSRRNAWGNLSYADLITKAIESAPDKRLTLSQIYDWMVRYVPYFKDKGDSNSSAGWKNSIRHNLSLHTRFIRVQNEGTGKSSWWMLNPEGGKTGKTPRRRAVSMDNGAKFLRIKGKASKKKQLQAPERSPDDSSPSAPAPGPVPAAAKWAASPASHASDDYEAWADFRGGGRPLLGEAAELEDDEALEALAPSSPLMYPSPASALSPALGSRCPGELPRLAELGGPLGLHGGGGAGLPEGLLDGAQDAYGPRARAGTPAYFGGCKGGAYGGGGGFGPPAMGALRRLPMQTIQENKQASFVPAAAPFRPGALPALLPPPPPAPRPGPVLGAPGELALAGAAAAYPGKGAAPYAPPAPSRSALAHPISLMTLPGEAGAAGLAPSGHAAAFGGPPGGLLLDALPGPYAAAAAGPLGAAPDRFPADLDLDMFSGSLECDVESIILNDFMDSDEMDFNFDSALPPPPPGLAGAPPPNQSWVPG

SEQ ID NO: 32614 - protein, 114 aa, Homo sapiens
  Payload ID: 6401
  Gene Symbol: FOXP1
  Gene Name: forkhead box P1
  Uniprot ID: Q9H334
  ENSP ID: ENSP00000318721
MMQESGTETKSNGSAIQNGSGGSNHLLECGGLREGRSNGETPAVDIGAADLAHAQQQQQQWHLINHQPSRSPSSWLKRLISSPWELEVLQVPLWGAVAETKMSGPVCQPNPSPF

SEQ ID NO: 32615 - protein, 677 aa, Homo sapiens
  Payload ID: 6401
  Gene Symbol: FOXP1
  Gene Name: forkhead box P1
  Uniprot ID: Q9H334
  ENSP ID: ENSP00000318902
MMQESGTETKSNGSAIQNGSGGSNHLLECGGLREGRSNGETPAVDIGAADLAHAQQQQQQALQVARQLLLQQQQQQQVSGLKSPKRNDKQPALQVPVSVAMMTPQVITPQQMQQILQQQVLSPQQLQVLLQQQQALMLQQQQLQEFYKKQQEQLQLQLLQQQHAGKQPKEQQQVATQQLAFQQQLLQMQQLQQQHLLSLQRQGLLTIQPGQPALPLQPLAQGMIPTELQQLWKEVTSAHTAEETTGNNHSSLDLTTTCVSSSAPSKTSLIMNPHASTNGQLSVHTPKRESLSHEEHPHSHPLYGHGVCKWPGCEAVCEDFQSFLKHLNSEHALDDRSTAQCRVQMQVVQQLELQLAKDKERLQAMMTHLHVKSTEPKAAPQPLNLVSSVTLSKSASEASPQSLPHTPTTPTAPLTPVTQGPSVITTTSMHTVGPIRRRYSDKYNVPISSADIAQNQEFYKNAEVRPPFTYASLIRQAILESPEKQLTLNEIYNWFTRMFAYFRRNAATWKNAVRHNLSLHKCFVRVENVKGAVWTVDEVEFQKRRPQKISGNPSLIKNMQSSHAYCTPLNAALQASMAENSIPLYTTASMGNPTLGNLASAIREELNGAMEHTNSNESDSSPGRSPMQAVHPVHVKEEPLDPEEAEGPLSLVTTANHSPDFDHDRDYEDEPVNEDME

SEQ ID NO: 32616 - protein, 566 aa, Homo sapiens
  Payload ID: 6401
  Gene Symbol: FOXP1
  Gene Name: forkhead box P1
  ENSP ID: ENSP00000333560
MMQESGTETKSNGSAIQNGSGGSNHLLECGGLREGRSNGETPAVDIGAADLAHAQQQQQQALQVARQLLLQQQQQQQVSGLKSPKRNDKQPALQVPVSVAMMTPQVITPQQMQQILQQQVLSPQQLQVLLQQQQALMLQQQQLQEFYKKQQEQLQLQLLQQQHAGKQPKEQQQVATQQLAFQQQLLQMQQLQQQHLLSLQRQGLLTIQPGQPALPLQPLAQGMIPTELQQLWKEVTSAHTAEETTGNNHSSLDLTTTCVSSSAPSKTSLIMNPHASTNGQLSVHTPKRESLSHEEHPHSHPLYGHGVCKWPGCEAVCEDFQSFLKHLNSEHALDDRSTAQCRVQMQVVQQLELQLAKDKERLQAMMTHLHVKSTEPKAAPQPLNLVSSVTLSKSASEASPQSLPHTPTTPTAPLTPVTQGPSVITTTSMHTVGPIRRRYSDKYNVPISSADIAQNQEFYKNAEVRPPFTYASLIRQAILESPEKQLTLNEIYNWFTRMFAYFRRNAATWKNAVRHNLSLHKCFVRVENVKGAVWTVDEVEFQKRRPQKISGVPFAPTSHCISALSE

SEQ ID NO: 32617 - protein, 601 aa, Homo sapiens
  Payload ID: 6401
  Gene Symbol: FOXP1
  Gene Name: forkhead box P1
  Uniprot ID: Q9H334
  ENSP ID: ENSP00000417857
MMQESGTETKSNGSAIQNGSGGSNHLLECGGLREGRSNGETPAVDIGAADLAHAQQQQQQALQVARQLLLQQQQQQQVSGLKSPKRNDKQPALQQQQVATQQLAFQQQLLQMQQLQQQHLLSLQRQGLLTIQPGQPALPLQPLAQGMIPTELQQLWKEVTSAHTAEETTGNNHSSLDLTTTCVSSSAPSKTSLIMNPHASTNGQLSVHTPKRESLSHEEHPHSHPLYGHGVCKWPGCEAVCEDFQSFLKHLNSEHALDDRSTAQCRVQMQVVQQLELQLAKDKERLQAMMTHLHVKSTEPKAAPQPLNLVSSVTLSKSASEASPQSLPHTPTTPTAPLTPVTQGPSVITTTSMHTVGPIRRRYSDKYNVPISSADIAQNQEFYKNAEVRPPFTYASLIRQAILESPEKQLTLNEIYNWFTRMFAYFRRNAATWKNAVRHNLSLHKCFVRVENVKGAVWTVDEVEFQKRRPQKISGNPSLIKNMQSSHAYCTPLNAALQASMAENSIPLYTTASMGNPTLGNLASAIREELNGAMEHTNSNESDSSPGRSPMQAVHPVHVKEEPLDPEEAEGPLSLVTTANHSPDFDHDRDYEDEPVNEDME

SEQ ID NO: 32618 - protein, 224 aa, Homo sapiens
  Payload ID: 6401
  Gene Symbol: FOXP1
  Gene Name: forkhead box P1
  ENSP ID: ENSP00000417941
MMTPQVITPQQMQQILQQQVLSPQQLQVLLQQQQALMLQQQQLQEFYKKQQEQLQLQLLQQQHAGKQPKEQQQVATQQLAFQQQLLQMQQLQQQHLLSLQRQGLLTIQPGQPALPLQPLAQGMIPTELQQLWKEVTSAHTAEETTGNNHSSLDLTTTCVSSSAPSKTSLIMNPHASTNGQLSVHTPKRESLSHEEHPHSHPLYGHGVCKWPGCEAVCEDFQSFL

SEQ ID NO: 32619 - protein, 677 aa, Homo sapiens; identical to SEQ ID NO: 32615
  Payload ID: 6401
  Gene Symbol: FOXP1
  Gene Name: forkhead box P1
  Uniprot ID: Q9H334
  ENSP ID: ENSP00000418102

SEQ ID NO: 32620 - protein, 573 aa, Homo sapiens
  Payload ID: 6401
  Gene Symbol: FOXP1
  Gene Name: forkhead box P1
  ENSP ID: ENSP00000418225
ASQKQPEPIYSKKTEIQRQTVRAPFAKLFIFSALQVARQLLLQQQQQQQVSGLKSPKRNDKQPALQQQQVATQQLAFQQQLLQMQQLQQQHLLSLQRQGLLTIQPGQPALPLQPLAQGMIPTELQQLWKEVTSAHTAEETTGNNHSSLDLTTTCVSSSAPSKTSLIMNPHASTNGQLSVHTPKRESLSHEEHPHSHPLYGHGVCKWPGCEAVCEDFQSFLKHLNSEHALDDRSTAQCRVQMQVVQQLELQLAKDKERLQAMMTHLHVKSTEPKAAPQPLNLVSSVTLSKSASEASPQSLPHTPTTPTAPLTPVTQGPSVITTTSMHTVGPIRRRYSDKYNVPISSADIAQNQEFYKNAEVRPPFTYASLIRQAILESPEKQLTLNEIYNWFTRMFAYFRRNAATWKNAVRHNLSLHKCFVRVENVKGAVWTVDEVEFQKRRPQKISGNPSLIKNMQSSHAYCTPLNAALQASMAENSIPLYTTASMGNPTLGNLASAIREELNGAMEHTNSNESDSSPGRSPMQAVHPVHVKEEPLDPEEAEGPLSLVTTANHSPDFDHDRDYEDEPVNEDME

SEQ ID NO: 32621 - protein, 676 aa, Homo sapiens
  Payload ID: 6401
  Gene Symbol: FOXP1
  Gene Name: forkhead box P1
  Uniprot ID: Q9H334
  ENSP ID: ENSP00000418524
MMQESGTETKSNGSAIQNGSGGSNHLLECGGLREGRSNGETPAVDIGAADLAHAQQQQQQALQVARQLLLQQQQQQQVSGLKSPKRNDKQPALQVPVSVAMMTPQVITPQQMQQILQQQVLSPQQLQVLLQQQQALMLQQQQLQEFYKKQQEQLQLQLLQQQHAGKQPKEQQQVATQQLAFQQQLLQMQQLQQQHLLSLQRQGLLTIQPGQPALPLQPLAQGMIPTELQQLWKEVTSAHTAEETTGNNHSSLDLTTTCVSSSAPSKTSLIMNPHASTNGQLSVHTPKRESLSHEEHPHSHPLYGHGVCKWPGCEAVCEDFQSFLKHLNSEHALDDRSTAQCRVQMQVVQQLELQLAKDKERLQAMMTHLHVKSTEPKAAPQPLNLVSSVTLSKSASEASPQSLPHTPTTPTAPLTPVTQGPSVITTTSMHTVGPIRRRYSDKYNVPISSDIAQNQEFYKNAEVRPPFTYASLIRQAILESPEKQLTLNEIYNWFTRMFAYFRRNAATWKNAVRHNLSLHKCFVRVENVKGAVWTVDEVEFQKRRPQKISGNPSLIKNMQSSHAYCTPLNAALQASMAENSIPLYTTASMGNPTLGNLASAIREELNGAMEHTNSNESDSSPGRSPMQAVHPVHVKEEPLDPEEAEGPLSLVTTANHSPDFDHDRDYEDEPVNEDME

SEQ ID NO: 32622 - protein, 123 aa, Homo sapiens
  Payload ID: 6401
  Gene Symbol: FOXP1
  Gene Name: forkhead box P1
  ENSP ID: ENSP00000418784
MMTPQVITPQQMQQILQQQVLSPQQLQVLLQQQQALMLQQQQLQEFYKKQQEQLQLQLLQQQHAGKQPKEQQQVATQQLAFQQQLLQMQQLQQQHLLSLQRQGLLTIQPGQPALPLQPLAQGM

SEQ ID NO: 32623 - protein, 613 aa, Homo sapiens
  Payload ID: 6401
  Gene Symbol: FOXP1
  Gene Name: forkhead box P1
  ENSP ID: ENSP00000418883
MMQESGTETKSNGSAIQNGSGGSNHLLECGGLREGRSNGETPAVDIGAADLAHAQQQQQQALQVARQLLLQQQQQQQVSGLKSPKRNDKQPALQVPVSVAMMTPQVITPQQMQQILQQQVLSPQQLQVLLQQQQALMLQQQQLQEFYKKQQEQLQLQLLQQQHAGKQPKEQQQVATQQLAFQQQLLQMQQLQQQHLLSLQRQGLLTIQPGQPALPLQPLAQGMIPTELQQLWKEVTSAHTAEETTGNNHSSLDLTTTCVSSSAPSKTSLIMNPHASTNGQLSVHTPKRESLSHEEHPHSHPLYGHGVCKWPGCEAVCEDFQSFLKHLNSEHALDDRSTAQCRVQMQVVQQLELQLAKDKERLQAMMTHLHVKSTEPKAAPQPLNLVSSVTLSKSASEASPQSLPHTPTTPTAPLTPVTQGPSVITTTSMHTVGPIRRRYSDKYNVPISSADIAQNQEFYKNAEVRPPFTYASLIRQAILESPEKQLTLNEIYNWFTRMFAYFRRNAATWKASMAENSIPLYTTASMGNPTLGNLASAIREELNGAMEHTNSNESDSSPGRSPMQAVHPVHVKEEPLDPEEAEGPLSLVTTANHSPDFDHDRDYEDEPVNEDME

SEQ ID NO: 32624 - protein, 677 aa, Homo sapiens; identical to SEQ ID NO: 32615
  Payload ID: 6401
  Gene Symbol: FOXP1
  Gene Name: forkhead box P1
  Uniprot ID: Q9H334
  ENSP ID: ENSP00000419393

SEQ ID NO: 32625 - protein, 679 aa, Homo sapiens
  Payload ID: 6401
  Gene Symbol: FOXP1
  Gene Name: forkhead box P1
  ENSP ID: ENSP00000420736
MFQCVFSSSVLQPHSTSCLFKHLFYHSATPASQKQPEPIYSKKTEIQRQTVRAPFAKLFIFSALQVARQLLLQQQQQQQVSGLKSPKRNDKQPALQVPVSVAMMTPQVITPQQMQQILQQQVLSPQQLQVLLQQQQALMLQQQQLQEFYKKQQEQLQLQLLQQQHAGKQPKEQQQVATQQLAFQQQLLQMQQLQQQHLLSLQRQGLLTIQPGQPALPLQPLAQGMIPTELQQLWKEVTSAHTAEETTGNNHSSLDLTTTCVSSSAPSKTSLIMNPHASTNGQLSVHTPKRESLSHEEHPHSHPLYGHGVCKWPGCEAVCEDFQSFLKHLNSEHALDDRSTAQCRVQMQVVQQLELQLAKDKERLQAMMTHLHVKSTEPKAAPQPLNLVSSVTLSKSASEASPQSLPHTPTTPTAPLTPVTQGPSVITTTSMHTVGPIRRRYSDKYNVPISSADIAQNQEFYKNAEVRPPFTYASLIRQAILESPEKQLTLNEIYNWFTRMFAYFRRNAATWKNAVRHNLSLHKCFVRVENVKGAVWTVDEVEFQKRRPQKISGNPSLIKNMQSSHAYCTPLNAALQASMAENSIPLYTTASMGNPTLGNLASAIREELNGAMEHTNSNESDSSPGRSPMQAVHPVHVKEEPLDPEEAEGPLSLVTTANHSPDFDHDRDYEDEPVNEDME

SEQ ID NO: 32626 - protein, 114 aa, Homo sapiens; identical to SEQ ID NO: 32614
  Payload ID: 6401
  Gene Symbol: FOXP1
  Gene Name: forkhead box P1
  Uniprot ID: Q9H334
  ENSP ID: ENSP00000477918

SEQ ID NO: 32627 - protein, 117 aa, Homo sapiens
  Payload ID: 6401
  Gene Symbol: FOXP1
  Gene Name: forkhead box P1
  ENSP ID: ENSP00000479663
MMQESGTETKSNGSAIQNGSGGSNHLLECGGLREGRSNGETPAVDIGAADLAHAQQQQQQALQVARQLLLQQQQQQQVSGLKSPKRNDKQPALQVPVSVAMMTPQVITPQQMQQILQ

SEQ ID NO: 32628 - protein, 577 aa, Homo sapiens
  Payload ID: 6401
  Gene Symbol: FOXP1
  Gene Name: forkhead box P1
  ENSP ID: ENSP00000482847
MMTPQVITPQQMQQILQQQVLSPQQLQVLLQQQQALMLQQQQLQEFYKKQQEQLQLQLLQQQHAGKQPKEQQQVATQQLAFQQQLLQMQQLQQQHLLSLQRQGLLTIQPGQPALPLQPLAQGMIPTELQQLWKEVTSAHTAEETTGNNHSSLDLTTTCVSSSAPSKTSLIMNPHASTNGQLSVHTPKRESLSHEEHPHSHPLYGHGVCKWPGCEAVCEDFQSFLKHLNSEHALDDRSTAQCRVQMQVVQQLELQLAKDKERLQAMMTHLHVKSTEPKAAPQPLNLVSSVTLSKSASEASPQSLPHTPTTPTAPLTPVTQGPSVITTTSMHTVGPIRRRYSDKYNVPISSADIAQNQEFYKNAEVRPPFTYASLIRQAILESPEKQLTLNEIYNWFTRMFAYFRRNAATWKNAVRHNLSLHKCFVRVENVKGAVWTVDEVEFQKRRPQKISGNPSLIKNMQSSHAYCTPLNAALQASMAENSIPLYTTASMGNPTLGNLASAIREELNGAMEHTNSNESDSSPGRSPMQAVHPVHVKEEPLDPEEAEGPLSLVTTANHSPDFDHDRDYEDEPVNEDME

SEQ ID NO: 32629 - protein, 693 aa, Homo sapiens
  Payload ID: 6401
  Gene Symbol: FOXP1
  Gene Name: forkhead box P1
  ENSP ID: ENSP00000484803
MMQESGTETKSNGSAIQNGSGGSNHLLECGGLREGRSNGETPAVDIGAADLAHAQQQQQQALQVARQLLLQQQQQQQVSGLKSPKRNDKQPALQVPVSVAMMTPQVITPQQMQQILQQQVLSPQQLQVLLQQQQALMLQQQQLQEFYKKQQEQLQLQLLQQQHAGKQPKEQQQVATQQLAFQQQLLQMQQLQQQHLLSLQRQGLLTIQPGQPALPLQPLAQGMIPTELQQLWKEVTSAHTAEETTGNNHSSLDLTTTCVSSSAPSKTSLIMNPHASTNGQLSVHTPKRESLSHEEHPHSHPLYGHGVCKWPGCEAVCEDFQSFLKHLNSEHALDDRSTAQCRVQMQVVQQLELQLAKDKERLQAMMTHLHVKSTEPKAAPQPLNLVSSVTLSKSASEASPQSLPHTPTTPTAPLTPVTQGPSVITTTSMHTVGPIRRRYSDKYNVPISSADIAQNQEFYKNAEVRPPFTYASLIRQAILESPEKQLTLNEIYNWFTRMFAYFRRNAATWKGAIRTNLSLHKCFIRVEDEFGSFWTVDDEEFKRGRHIQRGRPRKYCPDENFDELVAHNPSLIKNMQSSHAYCTPLNAALQASMAENSIPLYTTASMGNPTLGNLASAIREELNGAMEHTNSNESDSSPGRSPMQAVHPVHVKEEPLDPEEAEGPLSLVTTANHSPDFDHDRDYEDEPVNEDME

SEQ ID NO: 32630 - protein, 203 aa, Homo sapiens
  Payload ID: 6401
  Gene Symbol: FOXP1
  Gene Name: forkhead box P1
  ENSP ID: ENSP00000484963
VPVSVAMMTPQVITPQQMQQILQQQVLSPQQLQVLLQQQQALMLQQQQLQEFYKKQQEQLQLQLLQQQHAGKQPKEQQQVATQQLAFQQQLLQMQQLQQQHLLSLQRQGLLTIQPGQPALPLQPLAQGMIPTELQQLWKEVTSAHTAEETTGNNHSSLDLTTTCVSSSAPSKTSLIMNPHASTNGQLSVHTPKRERQSFHTQR

SEQ ID NO: 32631 - protein, 715 aa, Homo sapiens
  Payload ID: 6402
  Gene Symbol: FOXP2
  Gene Name: forkhead box P2
  Uniprot ID: O15409
  ENSP ID: ENSP00000265436
MMQESATETISNSSMNQNGMSTLSSQLDAGSRDGRSSGDTSSEVSTVELLHLQQQQALQAARQLLLQQQTSGLKSPKSSDKQRPLQVPVSVAMMTPQVITPQQMQQILQQQVLSPQQLQALLQQQQAVMLQQQQLQEFYKKQQEQLHLQLLQQQQQQQQQQQQQQQQQQQQQQQQQQQQQQQQQQQQQQQQHPGKQAKEQQQQQQQQQQLAAQQLVFQQQLLQMQQLQQQQHLLSLQRQGLISIPPGQAALPVQSLPQAGLSPAEIQQLWKEVTGVHSMEDNGIKHGGLDLTTNNSSSTTSSNTSKASPPITHHSIVNGQSSVLSARRDSSSHEETGASHTLYGHGVCKWPGCESICEDFGQFLKHLNNEHALDDRSTAQCRVQMQVVQQLEIQLSKERERLQAMMTHLHMRPSEPKPSPKPLNLVSSVTMSKNMLETSPQSLPQTPTTPTAPVTPITQGPSVITPASVPNVGAIRRRHSDKYNIPMSSEIAPNYEFYKNADVRPPFTYATLIRQAIMESSDRQLTLNEIYSWFTRTFAYFRRNAATWKNAVRHNLSLHKCFVRVENVKGAVWTVDEVEYQKRRSQKITGSPTLVKNIPTSLGYGAALNASLQAALAESSLPLLSNPGLINNASSGLLQAVHEDLNGSLDHIDSNGNSSPGCSPQPHIHSIHVKEEPVIAEDEDCPMSLVTTANHSPELEDDREIEEEPLSEDLE

SEQ ID NO: 32632 - protein, 432 aa, Homo sapiens
  Payload ID: 6402
  Gene Symbol: FOXP2
  Gene Name: forkhead box P2
  Uniprot ID: O15409
  ENSP ID: ENSP00000353367
MMQESATETISNSSMNQNGMSTLSSQLDAGSRDGRSSGDTSSEVSTVELLHLQQQQALQAARQLLLQQQTSGLKSPKSSDKQRPLQVPVSVAMMTPQVITPQQMQQILQQQVLSPQQLQALLQQQQAVMLQQQQLQEFYKKQQEQLHLQLLQQQQQQQQQQQQQQQQQQQQQQQQQQQQQQQQQQQQQQQQHPGKQAKEQQQQQQQQQQLAAQQLVFQQQLLQMQQLQQQQHLLSLQRQGLISIPPGQAALPVQSLPQAGLSPAEIQQLWKEVTGVHSMEDNGIKHGGLDLTTNNSSSTTSSNTSKASPPITHHSIVNGQSSVLSARRDSSSHEETGASHTLYGHGVCKWPGCESICEDFGQFLKHLNNEHALDDRSTAQCRVQMQVVQQLEIQLSKERERLQAMMTHLHMRPSEPKPSPKPVSAYCFINSK

SEQ ID NO: 32633 - protein, 365 aa, Homo sapiens
  Payload ID: 6402
  Gene Symbol: FOXP2
  Gene Name: forkhead box P2
  Uniprot ID: O15409
  ENSP ID: ENSP00000367482
MMQESATETISNSSMNQNGMSTLSSQLDAGSRDGRSSGDTSSEVSTVELLHLQQQQALQAARQLLLQQQTSGLKSPKSSDKQRPLQVPVSVAMMTPQVITPQQMQQILQQQVLSPQQLQALLQQQQAVMLQQQQLQEFYKKQQEQLHLQLLQQQQQQQQQQQQQQQQQQQQQQQQQQQQQQQQQQQQQQQQHPGKQAKEQQQQQQQQQQLAAQQLVFQQQLLQMQQLQQQQHLLSLQRQGLISIPPGQAALPVQSLPQAGLSPAEIQQLWKEVTGVHSMEDNGIKHGGLDLTTNNSSSTTSSNTSKASPPITHHSIVNGQSSVLSARRDSSSHEETGASHTLYGHGVCKWPGCESICEDFGQFLK

SEQ ID NO: 32634 - protein, 456 aa, Homo sapiens
  Payload ID: 6402
  Gene Symbol: FOXP2
  Gene Name: forkhead box P2
  ENSP ID: ENSP00000375084
MQESATETISNSSMNQNGMSTLSSQLDAGSRDGRSSGDTSSEVSTVELLHLQQQQALQAARQLLLQQQTSGLKSPKSSDKQRPLQELLPETKLCICGHSSGDGHPHNTFAVPVSVAMMTPQVITPQQMQQILQQQVLSPQQLQALLQQQQAVMLQQQQLQEFYKKQQEQLHLQLLQQQQQQQQQQQQQQQQQQQQQQQQQQQQQQQQQQQQQQQQHPGKQAKEQQQQQQQQQQLAAQQLVFQQQLLQMQQLQQQQHLLSLQRQGLISIPPGQAALPVQSLPQAGLSPAEIQQLWKEVTGVHSMEDNGIKHGGLDLTTNNSSSTTSSNTSKASPPITHHSIVNGQSSVLSARRDSSSHEETGASHTLYGHGVCKWPGCESICEDFGQFLKHLNNEHALDDRSTAQCRVQMQVVQQLEIQLSKERERLQAMMTHLHMRPSEPKPSPKPVSAYCFINSK

SEQ ID NO: 32635 - protein, 623 aa, Homo sapiens
  Payload ID: 6402
  Gene Symbol: FOXP2
  Gene Name: forkhead box P2
  Uniprot ID: O15409
  ENSP ID: ENSP00000377129
MMTPQVITPQQMQQILQQQVLSPQQLQALLQQQQAVMLQQQQLQEFYKKQQEQLHLQLLQQQQQQQQQQQQQQQQQQQQQQQQQQQQQQQQQQQQQQQQHPGKQAKEQQQQQQQQQQLAAQQLVFQQQLLQMQQLQQQQHLLSLQRQGLISIPPGQAALPVQSLPQAGLSPAEIQQLWKEVTGVHSMEDNGIKHGGLDLTTNNSSSTTSSNTSKASPPITHHSIVNGQSSVLSARRDSSSHEETGASHTLYGHGVCKWPGCESICEDFGQFLKHLNNEHALDDRSTAQCRVQMQVVQQLEIQLSKERERLQAMMTHLHMRPSEPKPSPKPLNLVSSVTMSKNMLETSPQSLPQTPTTPTAPVTPITQGPSVITPASVPNVGAIRRRHSDKYNIPMSSEIAPNYEFYKNADVRPPFTYATLIRQAIMESSDRQLTLNEIYSWFTRTFAYFRRNAATWKNAVRHNLSLHKCFVRVENVKGAVWTVDEVEYQKRRSQKITGSPTLVKNIPTSLGYGAALNASLQAALAESSLPLLSNPGLINNASSGLLQAVHEDLNGSLDHIDSNGNSSPGCSPQPHIHSIHVKEEPVIAEDEDCPMSLVTTANHSPELEDDREIEEEPLSEDLE

SEQ ID NO: 32636 - protein, 530 aa, Homo sapiens
  Payload ID: 6402
  Gene Symbol: FOXP2
  Gene Name: forkhead box P2
  ENSP ID: ENSP00000377130
MMTPQVITPQQMQQILQQQVLSPQQLQALLQQQQAVMLQQQQLQEFYKKQQEQLHLQLLQQQQQQQQQQQQQQQQQQQQQQQQQQQQQQQQQQQQQQQQHPGKQAKEQQQQQQQQQQLAAQQLVFQQQLLQMQQLQQQQHLLSLQRQGLISIPPGQAALPVQSLPQAGLSPAEIQQLWKEVTGVHSMEDNGIKHGGLDLTTNNSSSTTSSNTSKASPPITHHSIVNGQSSVLSARRDSSSHEETGASHTLYGHGVCKWPGCESICEDFGQFLKHLNNEHALDDRSTAQCRVQMQVVQQLEIQLSKERERLQAMMTHLHMRPSEPKPSPKPAIMESSDRQLTLNEIYSWFTRTFAYFRRNAATWKNAVRHNLSLHKCFVRVENVKGAVWTVDEVEYQKRRSQKITGSPTLVKNIPTSLGYGAALNASLQAALAESSLPLLSNPGLINNASSGLLQAVHEDLNGSLDHIDSNGNSSPGCSPQPHIHSIHVKEEPVIAEDEDCPMSLVTTANHSPELEDDREIEEEPLSEDLE

SEQ ID NO: 32637 - protein, 715 aa, Homo sapiens; identical to SEQ ID NO: 32631
  Payload ID: 6402
  Gene Symbol: FOXP2
  Gene Name: forkhead box P2
  Uniprot ID: O15409
  ENSP ID: ENSP00000377132

SEQ ID NO: 32638 - protein, 171 aa, Homo sapiens
  Payload ID: 6402
  Gene Symbol: FOXP2
  Gene Name: forkhead box P2
  ENSP ID: ENSP00000377133
MMQESATETISNSSMNQNGMSTLSSQLDAGSRDGRSSGDTSSEVSTVELLHLQQQQQQQQQQQLAAQQLVFQQQLLQMQQLQQQQHLLSLQRQGLISIPPGQAALPVQSLPQAGLSPAEIQQLWKEVTGVHSMEDNGIKHGGLDLTTNNSSSTTSSNTSKASPPITHHSIV

SEQ ID NO: 32639 - protein, 694 aa, Homo sapiens
  Payload ID: 6402
  Gene Symbol: FOXP2
  Gene Name: forkhead box P2
  ENSP ID: ENSP00000377135
MMQESATETISNSSMNQNGMSTLSSQLDAGSRDGRSSGDTSSEVSTVELLHLQQQQALQAARQLLLQQQTSGLKSPKSSDKQRPLQVPVSVAMMTPQVITPQQMQQILQQQVLSPQQLQALLQQQQAVMLQQQQQQQQQQQQQQQQQQQQQQQQQQQQQQQQQQQQQQQQQHPGKQAKEQQQQQQQQQLAAQQLVFQQQLLQMQQLQQQQHLLSLQRQGLISIPPGQAALPVQSLPQAGLSPAEIQQLWKEVTGVHSMEDNGIKHGGLDLTTNNSSSTTSSNTSKASPPITHHSIVNGQSSVLSARRDSSSHEETGASHTLYGHGVCKWPGCESICEDFGQFLKHLNNEHALDDRSTAQCRVQMQVVQQLEIQLSKERERLQAMMTHLHMRPSEPKPSPKPLNLVSSVTMSKNMLETSPQSLPQTPTTPTAPVTPITQGPSVITPASVPNVGAIRRRHSDKYNIPMSSEIAPNYEFYKNADVRPPFTYATLIRQAIMESSDRQLTLNEIYSWFTRTFAYFRRNAATWKNAVRHNLSLHKCFVRVENVKGAVWTVDEVEYQKRRSQKITGSPTLVKNIPTSLGYGAALNASLQAALAESSLPLLSNPGLINNASSGLLQAVHEDLNGSLDHIDSNGNSSPGCSPQPHIHSIHVKEEPVIAEDEDCPMSLVTTANHSPELEDDREIEEEPLSEDLE

SEQ ID NO: 32640 - protein, 732 aa, Homo sapiens
  Payload ID: 6402
  Gene Symbol: FOXP2
  Gene Name: forkhead box P2
  Uniprot ID: O15409
  ENSP ID: ENSP00000385069
MMQESATETISNSSMNQNGMSTLSSQLDAGSRDGRSSGDTSSEVSTVELLHLQQQQALQAARQLLLQQQTSGLKSPKSSDKQRPLQVPVSVAMMTPQVITPQQMQQILQQQVLSPQQLQALLQQQQAVMLQQDFLDSGLENFRAALEKNQQLQEFYKKQQEQLHLQLLQQQQQQQQQQQQQQQQQQQQQQQQQQQQQQQQQQQQQQQQHPGKQAKEQQQQQQQQQQLAAQQLVFQQQLLQMQQLQQQQHLLSLQRQGLISIPPGQAALPVQSLPQAGLSPAEIQQLWKEVTGVHSMEDNGIKHGGLDLTTNNSSSTTSSNTSKASPPITHHSIVNGQSSVLSARRDSSSHEETGASHTLYGHGVCKWPGCESICEDFGQFLKHLNNEHALDDRSTAQCRVQMQVVQQLEIQLSKERERLQAMMTHLHMRPSEPKPSPKPLNLVSSVTMSKNMLETSPQSLPQTPTTPTAPVTPITQGPSVITPASVPNVGAIRRRHSDKYNIPMSSEIAPNYEFYKNADVRPPFTYATLIRQAIMESSDRQLTLNEIYSWFTRTFAYFRRNAATWKNAVRHNLSLHKCFVRVENVKGAVWTVDEVEYQKRRSQKITGSPTLVKNIPTSLGYGAALNASLQAALAESSLPLLSNPGLINNASSGLLQAVHEDLNGSLDHIDSNGNSSPGCSPQPHIHSIHVKEEPVIAEDEDCPMSLVTTANHSPELEDDREIEEEPLSEDLE

SEQ ID NO: 32641 - protein, 740 aa, Homo sapiens
  Payload ID: 6402
  Gene Symbol: FOXP2
  Gene Name: forkhead box P2
  Uniprot ID: O15409
  ENSP ID: ENSP00000386200
MMQESATETISNSSMNQNGMSTLSSQLDAGSRDGRSSGDTSSEVSTVELLHLQQQQALQAARQLLLQQQTSGLKSPKSSDKQRPLQELLPETKLCICGHSSGDGHPHNTFAVPVSVAMMTPQVITPQQMQQILQQQVLSPQQLQALLQQQQAVMLQQQQLQEFYKKQQEQLHLQLLQQQQQQQQQQQQQQQQQQQQQQQQQQQQQQQQQQQQQQQQHPGKQAKEQQQQQQQQQQLAAQQLVFQQQLLQMQQLQQQQHLLSLQRQGLISIPPGQAALPVQSLPQAGLSPAEIQQLWKEVTGVHSMEDNGIKHGGLDLTTNNSSSTTSSNTSKASPPITHHSIVNGQSSVLSARRDSSSHEETGASHTLYGHGVCKWPGCESICEDFGQFLKHLNNEHALDDRSTAQCRVQMQVVQQLEIQLSKERERLQAMMTHLHMRPSEPKPSPKPLNLVSSVTMSKNMLETSPQSLPQTPTTPTAPVTPITQGPSVITPASVPNVGAIRRRHSDKYNIPMSSEIAPNYEFYKNADVRPPFTYATLIRQAIMESSDRQLTLNEIYSWFTRTFAYFRRNAATWKNAVRHNLSLHKCFVRVENVKGAVWTVDEVEYQKRRSQKITGSPTLVKNIPTSLGYGAALNASLQAALAESSLPLLSNPGLINNASSGLLQAVHEDLNGSLDHIDSNGNSSPGCSPQPHIHSIHVKEEPVIAEDEDCPMSLVTTANHSPELEDDREIEEEPLSEDLE

SEQ ID NO: 32642 - protein, 82 aa, Homo sapiens
  Payload ID: 6402
  Gene Symbol: FOXP2
  Gene Name: forkhead box P2
  ENSP ID: ENSP00000395552
MMQESATETISNSSMNQNGMSTLSSQLDAGSRDGRSSGDTSSEVSTVELLHLQQQQAGVQWCNHNSLQPGTPGLKQSSDLSL

SEQ ID NO: 32643 - protein, 87 aa, Homo sapiens
  Payload ID: 6402
  Gene Symbol: FOXP2
  Gene Name: forkhead box P2
  Uniprot ID: O15409
  ENSP ID: ENSP00000405470
MMQESATETISNSSMNQNGMSTLSSQLDAGSRDGRSSGDTSSEVSTVELLHLQQQQALQAARQLLLQQQTSGLKSPKSSDKQRPLQP

SEQ ID NO: 32644 - protein, 205 aa, Homo sapiens
  Payload ID: 6402
  Gene Symbol: FOXP2
  Gene Name: forkhead box P2
  ENSP ID: ENSP00000409826
MMQESATETISNSSMNQNGMSTLSSQLDAGSRDGRSSGDTSSEVSTVELLHLQQQQALQAARQLLLQQQTSGLKSPKSSDKQRPLQVPVSVAMMTPQVITPQQMQQILQQQVLSPQQLQALLQQQQAVMLQQSKWFIQQQLQEFYKKQQEQLHLQLLQQQQQQQQQQQQQQQQQQQQQQQQQQQQQQQQQQQQQQQQHPGKQAKE

SEQ ID NO: 32645 - protein, 87 aa, Homo sapiens; identical to SEQ ID NO: 32643
  Payload ID: 6402
  Gene Symbol: FOXP2
  Gene Name: forkhead box P2
  Uniprot ID: O15409
  ENSP ID: ENSP00000416825

SEQ ID NO: 32646 - protein, 67 aa, Homo sapiens
  Payload ID: 6402
  Gene Symbol: FOXP2
  Gene Name: forkhead box P2
  ENSP ID: ENSP00000418100
MMQESATETISNSSMNQNGMSTLSSQLDAGSRDGRSSGDTSSEVSTVELLHLQQQQEDVVSYTQVIC

SEQ ID NO: 32647 - protein, 589 aa, Homo sapiens
  Payload ID: 6402
  Gene Symbol: FOXP2
  Gene Name: forkhead box P2
  ENSP ID: ENSP00000488944
MMQESATETISNSSMNQNGMSTLSSQLDAGSRDGRSSGDTSSEVSTVELLHLQQQQALQAARQLLLQQQTSGLKSPKSSDKQRPLQVPVSVAMMTPQVITPQQMQQILQQQVLSPQQLQALLQQQQAVMLQQQQQQQQQQQQQQQQQQQQQQQQQQQQQQQQQQQQQQQQHPGKQAKEQQQQQQQQQQQLAAQQLVFQQQLLQMQQLQQQQHLLSLQRQGLISIPPGQAALPVQSLPQAGLSPAEIQQLWKEVTGVHSMEDNGIKHGGLDLTTNNSSSTTSSNTSKASPPITHHSIVNGQSSVLSARRDSSSHEETGASHTLYGHGVCKWPGCESICEDFGQFLKHLNNEHALDDRSTAQCRVQMQVVQQLEIQLSKERERLQAMMTHLHMRPSEPKPSPKPLNLVSSVTMSKNMLETSPQSLPQTPTTPTAPVTPITQGPSVITPASVPNVGAIRRRHSDKYNIPMSSEIAPNYEFYKNADVRPPFTYATLIRQAIMESSDRQLTLNEIYSWFTRTFAYFRRNAATWKNAVRHNLSLHKCFVRVENVKGAVWTVDEVEYQKRRSQKITGSPTLVKNIPTSLGYGAALN

SEQ ID NO: 32648 - protein, 228 aa, Homo sapiens
  Payload ID: 6402
  Gene Symbol: FOXP2
  Gene Name: forkhead box P2
  ENSP ID: ENSP00000488954
  MOD_RES (1)..(1): Any amino acid
XLLQQQQQQQQQQQQQQQQQQQQQQQQQQQQQQQQQQQQQQQQHPGKQAKEQQQQQLAAQQLVFQQQLLQMQQLQQQQHLLSLQRQGLISIPPGQAALPVQSLPQAGLSPAEIQQLWKEVTGVHSMEDNGIKHGGLDLTTNNSSSTTSSNTSKASPPITHHSIVNGQSSVLSARRDSSSHEETGASHTLYGHGVCKWPGCESICEDFGQFLKHLNNEHALDDRSTAQC

SEQ ID NO: 32649 - protein, 716 aa, Homo sapiens
  Payload ID: 6402
  Gene Symbol: FOXP2
  Gene Name: forkhead box P2
  ENSP ID: ENSP00000489073
MMQESATETISNSSMNQNGMSTLSSQLDAGSRDGRSSGDTSSEVSTVELLHLQQQQALQAARQLLLQQQTSGLKSPKSSDKQRPLQVPVSVAMMTPQVITPQQMQQILQQQVLSPQQLQALLQQQQAVMLQQQQLQEFYKKQQEQLHLQLLQQQQQQQQQQQQQQQQQQQQQQQQQQQQQQQQQQQQQQQQHPGKQAKEQQQQQQQQQQQLAAQQLVFQQQLLQMQQLQQQQHLLSLQRQGLISIPPGQAALPVQSLPQAGLSPAEIQQLWKEVTGVHSMEDNGIKHGGLDLTTNNSSSTTSSNTSKASPPITHHSIVNGQSSVLSARRDSSSHEETGASHTLYGHGVCKWPGCESICEDFGQFLKHLNNEHALDDRSTAQCRVQMQVVQQLEIQLSKERERLQAMMTHLHMRPSEPKPSPKPLNLVSSVTMSKNMLETSPQSLPQTPTTPTAPVTPITQGPSVITPASVPNVGAIRRRHSDKYNIPMSSEIAPNYEFYKNADVRPPFTYATLIRQAIMESSDRQLTLNEIYSWFTRTFAYFRRNAATWKNAVRHNLSLHKCFVRVENVKGAVWTVDEVEYQKRRSQKITGSPTLVKNIPTSLGYGAALNASLQAALAESSLPLLSNPGLINNASSGLLQAVHEDLNGSLDHIDSNGNSSPGCSPQPHIHSIHVKEEPVIAEDEDCPMSLVTTANHSPELEDDREIEEEPLSEDLE

SEQ ID NO: 32650 - protein, 698 aa, Homo sapiens
  Payload ID: 6402
  Gene Symbol: FOXP2
  Gene Name: forkhead box P2
  ENSP ID: ENSP00000489135
MMQESATETISNSSMNQNGMSTLSSQLDAGSRDGRSSGDTSSEVSTVELLHLQQQQALQAARQLLLQQQTSGLKSPKSSDKQRPLQVPVSVAMMTPQVITPQQMQQILQQQVLSPQQLQALLQQQQAVMLQQLLQQQQQQQQQQQQQQQQQQQQQQQQQQQQQQQQQQQQQQQQHPGKQAKEQQQQQQQQQQLAAQQLVFQQQLLQMQQLQQQQHLLSLQRQGLISIPPGQAALPVQSLPQAGLSPAEIQQLWKEVTGVHSMEDNGIKHGGLDLTTNNSSSTTSSNTSKASPPITHHSIVNGQSSVLSARRDSSSHEETGASHTLYGHGVCKWPGCESICEDFGQFLKHLNNEHALDDRSTAQCRVQMQVVQQLEIQLSKERERLQAMMTHLHMRPSEPKPSPKPLNLVSSVTMSKNMLETSPQSLPQTPTTPTAPVTPITQGPSVITPASVPNVGAIRRRHSDKYNIPMSSEIAPNYEFYKNADVRPPFTYATLIRQAIMESSDRQLTLNEIYSWFTRTFAYFRRNAATWKNAVRHNLSLHKCFVRVENVKGAVWTVDEVEYQKRRSQKITGSPTLVKNIPTSLGYGAALNASLQAALAESSLPLLSNPGLINNASSGLLQAVHEDLNGSLDHIDSNGNSSPGCSPQPHIHSIHVKEEPVIAEDEDCPMSLVTTANHSPELEDDREIEEEPLSEDLE

SEQ ID NO: 32651 - protein, 712 aa, Homo sapiens
  Payload ID: 6402
  Gene Symbol: FOXP2
  Gene Name: forkhead box P2
  ENSP ID: ENSP00000489229
MMQESATETISNSSMNQNGMSTLSSQLDAGSRDGRSSGDTSSEVSTVELLHLQQQQALQAARQLLLQQQTSGLKSPKSSDKQRPLQVPVSVAMMTPQVITPQQMQQILQQQVLSPQQLQALLQQQQAVMLQQDFLDSGLENFRAALEKNQQQQQQQQQQQQQQQQQQQQQQQQQQQQQQQQQQQQQQQHPGKQAKEQQQQQQQQQQLAAQQLVFQQQLLQMQQLQQQQHLLSLQRQGLISIPPGQAALPVQSLPQAGLSPAEIQQLWKEVTGVHSMEDNGIKHGGLDLTTNNSSSTTSSNTSKASPPITHHSIVNGQSSVLSARRDSSSHEETGASHTLYGHGVCKWPGCESICEDFGQFLKHLNNEHALDDRSTAQCRVQMQVVQQLEIQLSKERERLQAMMTHLHMRPSEPKPSPKPLNLVSSVTMSKNMLETSPQSLPQTPTTPTAPVTPITQGPSVITPASVPNVGAIRRRHSDKYNIPMSSEIAPNYEFYKNADVRPPFTYATLIRQAIMESSDRQLTLNEIYSWFTRTFAYFRRNAATWKNAVRHNLSLHKCFVRVENVKGAVWTVDEVEYQKRRSQKITGSPTLVKNIPTSLGYGAALNASLQAALAESSLPLLSNPGLINNASSGLLQAVHEDLNGSLDHIDSNGNSSPGCSPQPHIHSIHVKEEPVIAEDEDCPMSLVTTANHSPELEDDREIEEEPLSEDLE

SEQ ID NO: 32652 - protein, 87 aa, Homo sapiens; identical to SEQ ID NO: 32643
  Payload ID: 6402
  Gene Symbol: FOXP2
  Gene Name: forkhead box P2
  ENSP ID: ENSP00000489457

SEQ ID NO: 32653 - protein, 441 aa, Homo sapiens
  Payload ID: 6403
  Gene Symbol: FOXP3
  Gene Name: forkhead box P3
  ENSP ID: ENSP00000365369
MSPISGASPSWRAAPKASDLLGARGPGGTFQGRDLRGGAHASSSSLNPMPPSQLQLSTVDAHARTPVLQVHPLESPAMISLTPPTTATGVFSLKARPGLPPGINVASLEWVSREPALLCTFPNPSAPRKDSTLSAVPQSSYPLLANGVCKWPGCEKVFEEPEDFLKHCQADHLLDEKGRAQCLLQREMVQSLEQQLVLEKEKLSAMQAHLAGKMALTKASSVASSDKGSCCIVAAGSQGPVVPAWSGPREAPDSLFAVRRHLWGSHGNSTFPEFLHNMDYFKFHNMRPPFTYATLIRWAILEAPEKQRTLNEIYHWFTRMFAFFRNHPATWKVSSSEVAVTGMASSAIAAQSGQAWVWAHRHIGEERDVGCWWWLLASEVDAHLLPVPGLPQNAIRHNLSLHKCFVRVESEKGAVWTVDELEFRKKRSQRPSRCSNPTPGP

SEQ ID NO: 32654 - protein, 396 aa, Homo sapiens
  Payload ID: 6403
  Gene Symbol: FOXP3
  Gene Name: forkhead box P3
  Uniprot ID: Q9BZS1
  ENSP ID: ENSP00000365372
MPNPRPGKPSAPSLALGPSPGASPSWRAAPKASDLLGARGPGGTFQGRDLRGGAHASSSSLNPMPPSQLQLSTVDAHARTPVLQVHPLESPAMISLTPPTTATGVFSLKARPGLPPGINVASLEWVSREPALLCTFPNPSAPRKDSTLSAVPQSSYPLLANGVCKWPGCEKVFEEPEDFLKHCQADHLLDEKGRAQCLLQREMVQSLEQQLVLEKEKLSAMQAHLAGKMALTKASSVASSDKGSCCIVAAGSQGPVVPAWSGPREAPDSLFAVRRHLWGSHGNSTFPEFLHNMDYFKFHNMRPPFTYATLIRWAILEAPEKQRTLNEIYHWFTRMFAFFRNHPATWKNAIRHNLSLHKCFVRVESEKGAVWTVDELEFRKKRSQRPSRCSNPTPGP

SEQ ID NO: 32655 - protein, 431 aa, Homo sapiens
  Payload ID: 6403
  Gene Symbol: FOXP3
  Gene Name: forkhead box P3
  Uniprot ID: Q9BZS1
  ENSP ID: ENSP00000365380
MPNPRPGKPSAPSLALGPSPGASPSWRAAPKASDLLGARGPGGTFQGRDLRGGAHASSSSLNPMPPSQLQLPTLPLVMVAPSGARLGPLPHLQALLQDRPHFMHQLSTVDAHARTPVLQVHPLESPAMISLTPPTTATGVFSLKARPGLPPGINVASLEWVSREPALLCTFPNPSAPRKDSTLSAVPQSSYPLLANGVCKWPGCEKVFEEPEDFLKHCQADHLLDEKGRAQCLLQREMVQSLEQQLVLEKEKLSAMQAHLAGKMALTKASSVASSDKGSCCIVAAGSQGPVVPAWSGPREAPDSLFAVRRHLWGSHGNSTFPEFLHNMDYFKFHNMRPPFTYATLIRWAILEAPEKQRTLNEIYHWFTRMFAFFRNHPATWKNAIRHNLSLHKCFVRVESEKGAVWTVDELEFRKKRSQRPSRCSNPTPGP

SEQ ID NO: 32656 - protein, 454 aa, Homo sapiens
  Payload ID: 6403
  Gene Symbol: FOXP3
  Gene Name: forkhead box P3
  ENSP ID: ENSP00000396415
MPNPRPGKPSAPSLALGPSPGASPSWRAAPKASDLLGARGPGGTFQGRDLRGGAHASSSSLNPMPPSQLQLPTLPLVMVAPSGARLGPLPHLQALLQDRPHFMHQLSTVDAHARTPVLQVHPLESPAMISLTPPTTATGVFSLKARPGLPPGINVASLEWVSREPALLCTFPNPSAPRKDRSVDRAGKDPRPPIPSPDTLCPPSTLSAVPQSSYPLLANGVCKWPGCEKVFEEPEDFLKHCQADHLLDEKGRAQCLLQREMVQSLEQQLVLEKEKLSAMQAHLAGKMALTKASSVASSDKGSCCIVAAGSQGPVVPAWSGPREAPDSLFAVRRHLWGSHGNSTFPEFLHNMDYFKFHNMRPPFTYATLIRWAILEAPEKQRTLNEIYHWFTRMFAFFRNHPATWKNAIRHNLSLHKCFVRVESEKGAVWTVDELEFRKKRSQRPSRCSNPTPGP

SEQ ID NO: 32657 - protein, 396 aa, Homo sapiens; identical to SEQ ID NO: 32654
  Payload ID: 6403
  Gene Symbol: FOXP3
  Gene Name: forkhead box P3
  Uniprot ID: Q9BZS1
  ENSP ID: ENSP00000428952

SEQ ID NO: 32658 - protein, 456 aa, Homo sapiens
  Payload ID: 6403
  Gene Symbol: FOXP3
  Gene Name: forkhead box P3
  Uniprot ID: Q9BZS1
  ENSP ID: ENSP00000451208
MPNPRPGKPSAPSLALGPSPGASPSWRAAPKASDLLGARGPGGTFQGRDLRGGAHASSSSLNPMPPSQLQLSTVDAHARTPVLQVHPLESPAMISLTPPTTATGVFSLKARPGLPPGINVASLEWVSREPALLCTFPNPSAPRKDSTLSAVPQSSYPLLANGVCKWPGCEKVFEEPEDFLKHCQADHLLDEKGRAQCLLQREMVQSLEQQLVLEKEKLSAMQAHLAGKMALTKASSVASSDKGSCCIVAAGSQGPVVPAWSGPREAPDSLFAVRRHLWGSHGNSTFPEFLHNMDYFKFHNMRPPFTYATLIRWAILEAPEKQRTLNEIYHWFTRMFAFFRNHPATWKVSSSEVAVTGMASSAIAAQSGQAWVWAHRHIGEERDVGCWWWLLASEVDAHLLPVPGLPQNAIRHNLSLHKCFVRVESEKGAVWTVDELEFRKKRSQRPSRCSNPTPGP

SEQ ID NO: 32659 - protein, 680 aa, Homo sapiens
  Payload ID: 6404
  Gene Symbol: FOXP4
  Gene Name: forkhead box P4
  Uniprot ID: Q8IVH2
  ENSP ID: ENSP00000309823
MMVESASETIRSAPSGQNGVGSLSGQADGSSGGATGTTASGTGREVTTGADSNGEMSPAELLHFQQQQALQVARQFLLQQASGLSSPGNNDSKQSASAVQVPVSVAMMSPQMLTPQQMQQILSPPQLQALLQQQQALMLQQLQEYYKKQQEQLHLQLLTQQQAGKPQPKEALGNKQLAFQQQLLQMQQLQQQHLLNLQRQGLVSLQPNQASGPLQTLPQAAVCPTDLPQLWKGEGAPGQPAEDSVKQEGLDLTGTAATATSFAAPPKVSPPLSHHTLPNGQPTVLTSRRDSSSHEETPGSHPLYGHGECKWPGCETLCEDLGQFIKHLNTEHALDDRSTAQCRVQMQVVQQLEIQLAKESERLQAMMAHLHMRPSEPKPFSQPLNPVPGSSSFSKVTVSAADSFPDGLVHPPTSAAAPVTPLRPPGLGSASLHGGGPARRRSSDKFCSPISSELAQNHEFYKNADVRPPFTYASLIRQAILETPDRQLTLNEIYNWFTRMFAYFRRNTATWKNAVRHNLSLHKCFVRVENVKGAVWTVDEREYQKRRPPKMTGSPTLVKNMISGLSYGALNASYQAALAESSFPLLNSPGMLNPGSASSLLPLSHDDVGAPVEPLPSNGSSSPPRLSPPQYSHQVQVKEEPAEAEEDRQPGPPLGAPNPSASGPPEDRDLEEELPGEELS

SEQ ID NO: 32660 - protein, 678 aa, Homo sapiens
  Payload ID: 6404
  Gene Symbol: FOXP4
  Gene Name: forkhead box P4
  Uniprot ID: Q8IVH2
  ENSP ID: ENSP00000362148
MMVESASETIRSAPSGQNGVGSLSGQADGSSGGATGTTASGTGREVTTGADSNGEMSPAELLHFQQQQALQVARQFLLQQASGLSSPGNNDSKQSASAVQVPVSVAMMSPQMLTPQQMQQILSPPQLQALLQQQQALMLQQEYYKKQQEQLHLQLLTQQQAGKPQPKEALGNKQLAFQQQLLQMQQLQQQHLLNLQRQGLVSLQPNQASGPLQTLPQAAVCPTDLPQLWKGEGAPGQPAEDSVKQEGLDLTGTAATATSFAAPPKVSPPLSHHTLPNGQPTVLTSRRDSSSHEETPGSHPLYGHGECKWPGCETLCEDLGQFIKHLNTEHALDDRSTAQCRVQMQVVQQLEIQLAKESERLQAMMAHLHMRPSEPKPFSQPLNPVPGSSSFSKVTVSAADSFPDGLVHPPTSAAAPVTPLRPPGLGSASLHGGGPARRRSSDKFCSPISSELAQNHEFYKNADVRPPFTYASLIRQAILETPDRQLTLNEIYNWFTRMFAYFRRNTATWKNAVRHNLSLHKCFVRVENVKGAVWTVDEREYQKRRPPKMTGSPTLVKNMISGLSYGALNASYQAALAESSFPLLNSPGMLNPGSASSLLPLSHDDVGAPVEPLPSNGSSSPPRLSPPQYSHQVQVKEEPAEAEEDRQPGPPLGAPNPSASGPPEDRDLEEELPGEELS

SEQ ID NO: 32661 - protein, 680 aa, Homo sapiens; identical to SEQ ID NO: 32659
  Payload ID: 6404
  Gene Symbol: FOXP4
  Gene Name: forkhead box P4
  Uniprot ID: Q8IVH2
  ENSP ID: ENSP00000362151

SEQ ID NO: 32662 - protein, 667 aa, Homo sapiens
  Payload ID: 6404
  Gene Symbol: FOXP4
  Gene Name: forkhead box P4
  Uniprot ID: Q8IVH2
  ENSP ID: ENSP00000362154
MMVESASETIRSAPSGQNGVGSLSGQADGSSGGATGTTASGTGREVTTGADSNGEMSPAELLHFQQQQALQVARQFLLQQASGLSSPGNNDSKQSASAVQVPVSVAMMSPQMLTPQQMQQILSPPQLQALLQQQQALMLQQLQEYYKKQQEQLHLQLLTQQQAGKPQPKEALGNKQLAFQQQLLQMQQLQQQHLLNLQRQGLVSLQPNQASGPLQTLPQAVCPTDLPQLWKGEGAPGQPAEDSVKQEGLDLTGTAATATSFAAPPKVSPPLSHHTLPNGQPTVLTSRRDSSSHEETPGSHPLYGHGECKWPGCETLCEDLGQFIKHLNTEHALDDRSTAQCRVQMQVVQQLEIQLAKESERLQAMMAHLHMRPSEPKPFSQPVTVSAADSFPDGLVHPPTSAAAPVTPLRPPGLGSASLHGGGPARRRSSDKFCSPISSELAQNHEFYKNADVRPPFTYASLIRQAILETPDRQLTLNEIYNWFTRMFAYFRRNTATWKNAVRHNLSLHKCFVRVENVKGAVWTVDEREYQKRRPPKMTGSPTLVKNMISGLSYGALNASYQAALAESSFPLLNSPGMLNPGSASSLLPLSHDDVGAPVEPLPSNGSSSPPRLSPPQYSHQVQVKEEPAEAEEDRQPGPPLGAPNPSASGPPEDRDLEEELPGEELS

SEQ ID NO: 32663 - protein, 668 aa, Homo sapiens
  Payload ID: 6404
  Gene Symbol: FOXP4
  Gene Name: forkhead box P4
  ENSP ID: ENSP00000386958
MMVESASETIRSAPSGQNGVGSLSGQADGSSGGATGTTASGTGREVTTGADSNGEMSPAELLHFQQQQALQVARQFLLQQASGLSSPGNNDSKQSASAVQVPVSVAMMSPQMLTPQQMQQILSPPQLQALLQQQQALMLQQLQEYYKKQQEQLHLQLLTQQQAGKPQPKEALGNKQLAFQQQLLQMQQLQQQHLLNLQRQGLVSLQPNQASGPLQTLPQAAVCPTDLPQLWKGEGAPGQPAEDSVKQEGLDLTGTAATATSFAAPPKVSPPLSHHTLPNGQPTVLTSRRDSSSHEETPGSHPLYGHGECKWPGCETLCEDLGQFIKHLNTEHALDDRSTAQCRVQMQVVQQLEIQLAKESERLQAMMAHLHMRPSEPKPFSQPVTVSAADSFPDGLVHPPTSAAAPVTPLRPPGLGSASLHGGGPARRRSSDKFCSPISSELAQNHEFYKNADVRPPFTYASLIRQAILETPDRQLTLNEIYNWFTRMFAYFRRNTATWKNAVRHNLSLHKCFVRVENVKGAVWTVDEREYQKRRPPKMTGSPTLVKNMISGLSYGALNASYQAALAESSFPLLNSPGMLNPGSASSLLPLSHDDVGAPVEPLPSNGSSSPPRLSPPQYSHQVQVKEEPAEAEEDRQPGPPLGAPNPSASGPPEDRDLEEELPGEELS

SEQ ID NO: 32664 - protein, 87 aa, Homo sapiens
  Payload ID: 6404
  Gene Symbol: FOXP4
  Gene Name: forkhead box P4
  ENSP ID: ENSP00000393704
MEGELGPALSRGEAYGHHTSSYQLLGNAQKLPFPPWPDTALQVARQFLLQQASGLSSPGNNDSKQSASAVQVPVSVAMMSPQMLTPQ

SEQ ID NO: 32665 - protein, 403 aa, Homo sapiens
  Payload ID: 6405
  Gene Symbol: FOXQ1
  Gene Name: forkhead box Q1
  Uniprot ID: Q9C009
  ENSP ID: ENSP00000296839
MKLEVFVPRAAHGDKQGSDLEGAGGSDAPSPLSAAGDDSLGSDGDCAANSPAAGGGARDTQGDGEQSAGGGPGAEEAIPAAAAAAVVAEGAEAGAAGPGAGGAGSGEGARSKPYTRRPKPPYSYIALIAMAIRDSAGGRLTLAEINEYLMGKFPFFRGSYTGWRNSVRHNLSLNDCFVKVLRDPSRPWGKDNYWMLNPNSEYTFADGVFRRRRKRLSHRAPVPAPGLRPEEAPGLPAAPPPAPAAPASPRMRSPARQEERASPAGKFSSSFAIDSILRKPFRSRRLRDTAPGTTLQWGAAPCPPLPAFPALLPAAPCRALLPLCAYGAGEPARLGAREAEVPPTAPPLLLAPLPAAAPAKPLRGPAAGGAHLYCPLRLPAALQAASVRRPGPHLPYPVETLLA

SEQ ID NO: 32666 - protein, 292 aa, Homo sapiens
  Payload ID: 6406
  Gene Symbol: FOXR1
  Gene Name: forkhead box R1
  Uniprot ID: Q6PIV2
  ENSP ID: ENSP00000314806
MGNELFLAFTTSHLPLAEQKLARYKLRIVKPPKLPLEKKPNPDKDGPDYEPNLWMWVNPNIVYPPGKLEVSGRRKREDLTSTLPSSQPPQKEEDASCSEAAGVESLSQSSSKRSPPRKRFAFSPSTWELTEEEEAEDQEDSSSMALPSPHKRAPLQSRRLRQASSQAGRLWSRPPLNYFHLIALALRNSSPCGLNVQQIYSFTRKHFPFFRTAPEGWKNTVRHNLCFRDSFEKVPVSMQGGASTRPRSCLWKLTEEGHRRFAEEARALASTRLESIQQCMSQPDVMPFLFDL

SEQ ID NO: 32667 - protein, 136 aa, Homo sapiens
  Payload ID: 6406
  Gene Symbol: FOXR1
  Gene Name: forkhead box R1
  ENSP ID: ENSP00000432358
  MOD_RES (1)..(1): Any amino acid
XVARYKLRIVKPPKLPLEKKPNPDKDGPDYEPNLWMWVNPNIVYPPGKLEVSGRRKREDLTSTLPSSQPPQKEEDASCSEAAGVESLSQSSSKRSPPRKRFAFSPSTWEKALPLFPDGPGRLEEYCPSQSLFSRQL

SEQ ID NO: 32668 - protein, 206 aa, Homo sapiens
  Payload ID: 6406
  Gene Symbol: FOXR1
  Gene Name: forkhead box R1
  Uniprot ID: Q6PIV2
  ENSP ID: ENSP00000433394
MGNELFLAFTTSHLPLAEQKLARYKLRIVKPPKLPLEKKPNPDKDGPDYEPNLWMWVNPNIVYPPGKLEVSGRRKREDLTSTLPSSQPPQKEEDASCSEAAGVESLSQSSSKRSPPRKRFAFSPSTWEGPPPESEASASQQPGGEALVPAPSQLLPPNCPGIKKQFPLWPQRATDLQFHSELLGLILLCSCCGPSPGPSEGGRVQL

SEQ ID NO: 32669 - protein, 292 aa, Homo sapiens; identical to SEQ ID NO: 32666
  Payload ID: 6406
  Gene Symbol: FOXR1
  Gene Name: forkhead box R1
  ENSP ID: ENSP00000487495

SEQ ID NO: 32670 - protein, 136 aa, Homo sapiens; identical to SEQ ID NO: 32667
  Payload ID: 6406
  Gene Symbol: FOXR1
  Gene Name: forkhead box R1
  ENSP ID: ENSP00000489131
  MOD_RES (1)..(1): Any amino acid

SEQ ID NO: 32671 - protein, 206 aa, Homo sapiens; identical to SEQ ID NO: 32668
  Payload ID: 6406
  Gene Symbol: FOXR1
  Gene Name: forkhead box R1
  ENSP ID: ENSP00000489241

SEQ ID NO: 32672 - protein, 311 aa, Homo sapiens
  Payload ID: 6407
  Gene Symbol: FOXR2
  Gene Name: forkhead box R2
  Uniprot ID: Q6PJQ5
  ENSP ID: ENSP00000427329
MDLKLKDCEFWYSLHGQVPGLLDWDMRNELFLPCTTDQCSLAEQILAKYRVGVMKPPEMPQKRRPSPDGDGPPCEPNLWMWVDPNILCPLGSQEAPKPSGKEDLTNISPFPQPPQKDEGSNCSEDKVVESLPSSSSEQSPLQKQGIHSPSDFELTEEEAEEPDDNSLQSPEMKCYQSQKLWQINNQEKSWQRPPLNCSHLIALALRNNPHCGLSVQEIYNFTRQHFPFFWTAPDGWKSTIHYNLCFLDSFEKVPDSLKDEDNARPRSCLWKLTKEGHRRFWEETRVLAFAQRERIQECMSQPELLTSLFDL

SEQ ID NO: 32673 - protein, 330 aa, Homo sapiens
  Payload ID: 6408
  Gene Symbol: FOXS1
  Gene Name: forkhead box S1
  Uniprot ID: O43638
  ENSP ID: ENSP00000365145
MQQQPLPGPGAPTTEPTKPPYSYIALIAMAIQSSPGQRATLSGIYRYIMGRFAFYRHNRPGWQNSIRHNLSLNECFVKVPRDDRKPGKGSYWTLDPDCHDMFEHGSFLRRRRRFTRQTGAEGTRGPAKARRGPLRATSQDPGVPNATTGRQCSFPPELPDPKGLSFGGLVGAMPASMCPATTDGRPRPPMEPKEISTPKPACPGELPVATSSSSCPAFGFPAGFSEAESFNKAPTPVLSPESGIGSSYQCRLQALNFCMGADPGLEHLLASAAPSPAPPTPPGSLRAPLPLPTDHKEPWVAGGFPVQGGSGYPLGLTPCLYRTPGMFFFE

SEQ ID NO: 32674 - protein, 647 aa, Homo sapiens
  Payload ID: 6409
  Gene Symbol: FHAD1
  Gene Name: forkhead-associated (FHA) phosphopeptide binding domain 1
  ENSP ID: ENSP00000318812
ITQEKNRVKEALEEEQTRVQELEERLARQKEISESNIAYEKRKAKEAMEKEKKKVQDLENRLTKQKEELELKEQKEDVLNNKLSDALAMVEETQKTKATESLKAESLALKLNETLAELETTKTKMIMVEERLILQQKMVKALQDEQESQRHGFEEEIMEYKEQIKQHAQTIVSLEEKLQKVTQHHKKIEGEIATLKDNDPAPKEERPQDPLVAPMTESSAKDMAYEHLIDDLLAAQKEILSQQEVIMKLRKDLTEAHSRMSDLRGELNEKQKMELEQNVVLVQQQSKELSVLKEKMAQMSSLVEKKDRELKALEEALRASQEKHRLQLNTEKEQKPRKKTQTCDTSVQIEPVHTEAFSSSQEQQSFSDLGVRCKGSRHEEVIQRQKKALSELRARIKELEKARSPDHKDHQNESFLDLKNLRMENNVQKILLDAKPDLPTLSRIEILAPQNGLCNARFGSAMEKSGKMDVAEALELSEKLYLDMSKTLGSLMNIKNMSGHVSMKYLSRQEREKVNQLRQRDLDLVFDKITQLKNQLGRKEELLRGYEKDVEQLRRSKVSIEMYQSQVAKLEDDIYKEAEEKALLKEALERMEHQLCQEKRINRAIRQQKVGTRKASLKMDQEREMLRKETSSKSSQSLLHSKPSGKY

SEQ ID NO: 32675 - protein, 1412 aa, Homo sapiens
  Payload ID: 6409
  Gene Symbol: FHAD1
  Gene Name: forkhead-associated (FHA) phosphopeptide binding domain 1
  Uniprot ID: B1AJZ9
  ENSP ID: ENSP00000351770
MKAYLKSAEGFFVLNKSTTIGRHENSDLVLQSPDIDNHHALIEYNEAECSFVLQDFNSRNGTFVNECHIQNVAVKLIPGDILRFGSAGLTYELVIENPPPVSFPWMRGPAPWPGPQPPRATQQPNQAPPPSHIPFHQGVQPAPMQRSWSQAFPRPTVVLPASHRRPVSANKEMFSFVVDDARKPPVIKQVWTNAMKLSEKSVAEGIPGAVPPAEIYVEEDLAQQDKDEIILLLGKEVSRLSDYEIESKYKDVIIANLQNEVAELSQKVSETTTSRQNEKEISQKCQVLDEDIDAKQKEIQSLKSQISALQKGYSKVLCQTLSERNSEITSLKNEGENLKRDNAITSGMVSSLQKDILAKDEQVQQLKEEVSHLKSQNKDKDHQLEALGSRCSVLKEELKQEDAHRELREAQEKELKLCKTQIQDMEKEMKKLRAELRKSCTEQSVISRTLREKSKVEEKLQEDSRRKLLQLQEMGNRESVIKINLERAVGQLEHFRSQVIKATYGRAKPFRDKPVTDQQLIEKITQVTEDNINFQQKKWTLQKETQLSNSKQEETTENIEKLRTSLDSCQACMKISCCSHDLKKEVDLLQHLQVSPPVSGLQKVVLDVLRHALSWLEEVEQLLRDLGILPSSPNKDQVQQFSGNSAVFTAGKAAGASGREGEAERGEARARGEAQSQNQATDGREGGKALEEYITQERNRAKETLEEERKRMQELESLLAQQKKALAKSITQEKNRVKEALEEEQTRVQELEERLARQKEVLESSIAHEKRKAKEALESEKRKVQDLENHLTQQKEISESNIAYEKRKAKEAMEKEKKKVQDLENRLTKQKEELELKEQKEDVLNNKLSDALAMVEETQKTKATESLKAESLALKLNETLAELETTKTKMIMVEERLILQQKMVKALQDEQESQRHGFEEEIMEYKEQIKQHAQTIVSLEEKLQKVTQHHKKIEGEIATLKDNDPAPKEERPQDPLVAPMTESSAKDMAYEHLIDDLLAAQKEILSQQEVIMKLRKDLTEAHSRMSDLRGELNEKQKMELEQNVVLVQQQSKELSVLKEKMAQMSSLVEKKDRELKALEEALRASQEKHRLQLNTEKEQKPRKKTQTCDTSVQIEPVHTEAFSSSQEQQSFSDLGVRCKGSRHEEVIQRQKKALSELRARIKELEKARSPDHKDHQNESFLDLKNLRMENNVQKILLDAKPDLPTLSRIEILAPQNGLCNARFGSAMEKSGKMDVAEALELSEKLYLDMSKTLGSLMNIKNMSGHVSMKYLSRQEREKVNQLRQRDLDLVFDKITQLKNQLGRKEELLRGYEKDVEQLRRSKVSIEMYQSQVAKLEDDIYKEAEEKALLKEALERMEHQLCQEKRINRAIRQQKVGTRKASLKMDQEREMLRKETSSKSSQSLLHSKPSGKY

SEQ ID NO: 32676 - protein, 251 aa, Homo sapiens
  Payload ID: 6409
  Gene Symbol: FHAD1
  Gene Name: forkhead-associated (FHA) phosphopeptide binding domain 1
  ENSP ID: ENSP00000365163
MILRPPRPCGTISALQKGYSKVLCQTLSERNSEITSLKNEGENLKRDNAITSGMVSSLQKDILAKDEQVQQLKEEVSHLKSQNKDKDHQLEALGSRLEHFRSQVIKATYGRAKPFRDKPVTDQQLIEKITQVTEDNINFQQKKWTLQKETQLSNSKQEETTENIEKLRTSLDSCQACMKISCCSHDLKKEVDLLQHLQVSPPVSGLQKVVLDVLRHALSWLEEVEQLLRDLGILPSSPNKGYWDFFSHMVA

SEQ ID NO: 32677 - protein, 316 aa, Homo sapiens
  Payload ID: 6409
  Gene Symbol: FHAD1
  Gene Name: forkhead-associated (FHA) phosphopeptide binding domain 1
  ENSP ID: ENSP00000365165
MILRPPRPCGTISALQKGYSKVLCQTLSERNSEITSLKNEGENLKRDNAITSGMVSSLQKDILAKDEQVQQLKEEVSHLKSQNKDKDHQLEALGSRCSVLKEELKQEDAHRELREAQEKELKLCKTQIQDMEKEMKKLRAELRKSCTEQSVISRTLREKSKLEHFRSQVIKATYGRAKPFRDKPVTDQQLIEKITQVTEDNINFQQKKWTLQKETQLSNSKQEETTENIEKLRTSLDSCQACMKISCCSHDLKKEVDLLQHLQVSPPVSGLQKVVLDVLRHALSWLEEVEQLLRDLGILPSSPNKGYWDFFSHMVA

SEQ ID NO: 32678 - protein, 1412 aa, Homo sapiens; identical to SEQ ID NO: 32675
  Payload ID: 6409
  Gene Symbol: FHAD1
  Gene Name: forkhead-associated (FHA) phosphopeptide binding domain 1
  Uniprot ID: B1AJZ9
  ENSP ID: ENSP00000365166

SEQ ID NO: 32679 - protein, 693 aa, Homo sapiens
  Payload ID: 6409
  Gene Symbol: FHAD1
  Gene Name: forkhead-associated (FHA) phosphopeptide binding domain 1
  ENSP ID: ENSP00000399819
  MOD_RES (1)..(1): Any amino acid
XQQSLLQEKLREHLAEKEKLNEERLEQEEKLKAKIRQLTEEKAALEEYITQERNRAKETLEEERKRMQELESLLAQQKKALAKSITQEKNRVKEALEEEQTRVQELEERLARQKEISESNIAYEKRKAKEAMEKEKKKVQDLENRLTKQKEELELKEQKEDVLNNKLSDALAMVEETQKTKATESLKAESLALKLNETLAELETTKTKMIMVEERLILQQKMVKALQDEQESQRHGFEEEIMEYKEQIKQHAQTIVSLEEKLQKVTQHHKKIEGEIATLKDNDPAPKEERPQDPLVAPMTESSAKDMAYEHLIDDLLAAQKEILSQQEVIMKLRKDLTEAHSRMSDLRGELNEKQKMELEQNVVLVQQQSKELSVLKEKMAQMSSLVEKKDRELKALEEALRASQEKHRLQLNTEKEQKPRKKTQTCDTSVQIEPVHTEAFSSSQEQQSFSDLGVRCKGSRHEEVIQRQKKALSELRARIKELEKARSPDHKDHQNESFLDLKNLRMENNVQKILLDAKPDLPTLSRIEILAPQNGLCNARFGSAMEKSGKMDVAEALELSEKLYLDMSKTLGSLMNIKNMSGHVSMKYLSRQEREKVNQLRQRDLDLVFDKITQLKNQLGRKEELLRGYEKDVEQLRRSKVSIEMYQSQVAKLEDDIYKEAEEKALLKEALERMEHQLCQEKRINRAIRQQK

SEQ ID NO: 32680 - protein, 190 aa, Homo sapiens
  Payload ID: 6409
  Gene Symbol: FHAD1
  Gene Name: forkhead-associated (FHA) phosphopeptide binding domain 1
  ENSP ID: ENSP00000402241
  MOD_RES (1)..(1): Any amino acid
XLETPRERGREASPRSWPDASRAGRALGGGRSVGFLLPPGKTERMKAYLKSAEGFFVLNKSTTIGRHENSDLVLQVSFPWMRGPAPWPGPQPPRATQQPNQAPPPSHIPFHQGVQPAPMQRSWSQAFPRPTVVLPASHRRPVSANKEMFSFVVDDARKPPVIKQVWTNAMKLSEKSVAEGIPGAVPPAEI

SEQ ID NO: 32681 - protein, 470 aa, Homo sapiens
  Payload ID: 6409
  Gene Symbol: FHAD1
  Gene Name: forkhead-associated (FHA) phosphopeptide binding domain 1
  ENSP ID: ENSP00000432147
  MOD_RES (1)..(1): Any amino acid
XAKDMAYEHLIDDLLAAQKEILSQQEVIMKLRKDLTEAHSRMSDLRGELNEKQKMELEQNVVLVQQQSKELSVLKEKMAQMSSLVEKKDRELKALEEALRASQEKHRLQLNTEKEQKPRKKTQTCDTSVQIEPVHTEAFSSSQEQQSFSDLGVRCKGSRHEEVIQRQKKALSELRARIKELEKARSPDHKDHQNESFLDLKNLRMENNVQKILLDAKPDLPTLSRIEILAPQNGLCNARFGSAMEKSGKMDVAEALELSEKLYLDMSKTLGSLMNIKNMSGHVSMKYLSRQEREKVNQLRQRDLDLVFDKITQLKNQLGRKEELLRGYEKDVEQLRRSKVSIEMYQSQVAKLEDDIYKEAEEKALLKEALERMEHQLCQEKRINRAIRQQKMRKLRLRELRGAQVHTAAGKDSWDLTPDPSDPGSPAVCRVGRKCRGARTEKRKRIDTLQLCLQRERQAGPAPPACSLNG

SEQ ID NO: 32682 - protein, 701 aa, Homo sapiens
  Payload ID: 6409
  Gene Symbol: FHAD1
  Gene Name: forkhead-associated (FHA) phosphopeptide binding domain 1
  ENSP ID: ENSP00000434909
ITQERNRAKETLEEERKRMQELESLLAQQKKALAKSITQEKNRVKEALEEEQTRVQELEERLARQKEISESNIAYEKRKAKEAMEKEKKKVQDLENRLTKQKEELELKEQKEDVLNNKLSDALAMVEETQKTKATESLKAESLALKLNETLAELETTKTKMIMVEERLILQQKMVKALQDEQESQRHGFEEEIMEYKEQIKQHAQTIVSLEEKLQKVTQHHKKIEGEIATLKDNDPAPKEERPQDPLVAPMTESSAKDMAYEHLIDDLLAAQKEILSQQEVIMKLRKDLTEAHSRMSDLRGELNEKQKMELEQNVVLVQQQSKELSVLKEKMAQMSSLVEKKDRELKALEEALRASQEKHRLQLNTEKEQKPRKKTQTCDTSVQIEPVHTEAFSSSQEQQSFSDLGVRCKGSRHEEVIQRQKKALSELRARIKELEKARSPDHKDHQNESFLDLKNLRMENNVQKILLDAKPDLPTLSRIEILAPQNGLCNARFGSAMEKSGKMDVAEALELSEKLYLDMSKTLGSLMNIKNMSGHVSMKYLSRQEREKVNQLRQRDLDLVFDKITQLKNQLGRKEELLRGYEKDVEQLRRSKVSIEMYQSQVAKLEDDIYKEAEEKALLKEALERMEHQLCQEKRINRAIRQQKRRVFVEMVKNRMQNSNSQVGTRKASLKMDQEREMLRKETSSKSSQSLLHSKPSGKY

SEQ ID NO: 32683 - protein, 120 aa, Homo sapiens
  Payload ID: 6409
  Gene Symbol: FHAD1
  Gene Name: forkhead-associated (FHA) phosphopeptide binding domain 1
  ENSP ID: ENSP00000436559
MILRPPRPCGTCSVLKEELKQEDAHRELREAQEKELKLCKTLEHFRSQVIKATYGRAKPFRDKPVTDQQLIEKITQVTEDNINFQQKKWTLQKETQLSNSKQEETTENIEKLRTSLDSCQ

SEQ ID NO: 32684 - protein, 541 aa, Homo sapiens
  Payload ID: 6410
  Gene Symbol: FTCD
  Gene Name: formimidoyltransferase cyclodeaminase
  Uniprot ID: O95954
  ENSP ID: ENSP00000291670
MSQLVECVPNFSEGKNQEVIDAISGAITQTPGCVLLDVDAGPSTNRTVYTFVGPPECVVEGALNAARVASRLIDMSRHQGEHPRMGALDVCPFIPVRGVSVDECVLCAQAFGQRLAEELDVPVYLYGEAARMDSRRTLPAIRAGEYEALPKKLQQADWAPDFGPSSFVPSWGATATGARKFLIAFNINLLGTKEQAHRIALNLREQGRGKDQPGRLKKVQGIGWYLDEKNLAQVSTNLLDFEVTALHTVYEETCREAQELSLPVVGSQLVGLVPLKALLDAAAFYCEKENLFILEEEQRIRLVVSRLGLDSLCPFSPKERIIEYLVPERGPERGLGSKSLRAFVGEVGARSAAPGGGSVAAAAAAMGAALGSMVGLMTYGRRQFQSLDTTMRRLIPPFREASAKLTTLVDADAEAFTAYLEAMRLPKNTPEEKDRRTAALQEGLRRAVSVPLTLAETVASLWPALQELARCGNLACRSDLQVAAKALEMGVFGAYFNVLINLRDITDEAFKDQIHHRVSSLLQEAKTQAALVLDCLETRQE

SEQ ID NO: 32685 - protein, 495 aa, Homo sapiens
  Payload ID: 6410
  Gene Symbol: FTCD
  Gene Name: formimidoyltransferase cyclodeaminase
  ENSP ID: ENSP00000380851
MSQLVECVPNFSEGKNQEVIDAISGAITQTPGCVLLDVDAGPSTNRTVYTFVGPPECVVEGALNAARVASRLIDMSRHQGEHPRMGALDVCPFIPVRGVSVDECVLCAQAFGQRLAEELDVPVYLYGEAARMDSRRTLPAIRAGEYEALPKKLQQADWAPDFGPSSFVPSWGATATGARKFLIAFNINLLGTKEQAHRIALNLREQGRGKDQPGRLKKVQGIGWYLDEKNLAQVSTNLLDFEVTALHTVYEETCREAQELSLPVVGSQLVGLVPLKALLDAAAFYCEKENLFILEEEQRIRLVVSRLGLDSLCPFSPKERIIEYLVPERGPERGLGSKSLRAFVGEVGARSAAPGGGSVAAAAAAMGAALGSMVGLMTYGRRQFQSLDTTMRRLIPPFREASAKLTTLVDADAEAFTAYLAHGGPTGGSEAGSLCAADAGGDGGLAVAGPAGTGPVWEPGLPVRPPGGGQSPGDGRVWRIFQRAHQPEGHHRRGI

SEQ ID NO: 32686 - protein, 541 aa, Homo sapiens; identical to SEQ ID NO: 32684
  Payload ID: 6410
  Gene Symbol: FTCD
  Gene Name: formimidoyltransferase cyclodeaminase
  Uniprot ID: O95954
  ENSP ID: ENSP00000380854

SEQ ID NO: 32687 - protein, 572 aa, Homo sapiens
  Payload ID: 6410
  Gene Symbol: FTCD
  Gene Name: formimidoyltransferase cyclodeaminase
  Uniprot ID: O95954
  ENSP ID: ENSP00000380856
MSQLVECVPNFSEGKNQEVIDAISGAITQTPGCVLLDVDAGPSTNRTVYTFVGPPECVVEGALNAARVASRLIDMSRHQGEHPRMGALDVCPFIPVRGVSVDECVLCAQAFGQRLAEELDVPVYLYGEAARMDSRRTLPAIRAGEYEALPKKLQQADWAPDFGPSSFVPSWGATATGARKFLIAFNINLLGTKEQAHRIALNLREQGRGKDQPGRLKKVQGIGWYLDEKNLAQVSTNLLDFEVTALHTVYEETCREAQELSLPVVGSQLVGLVPLKALLDAAAFYCEKENLFILEEEQRIRLVVSRLGLDSLCPFSPKERIIEYLVPERGPERGLGSKSLRAFVGEVGARSAAPGGGSVAAAAAAMGAALGSMVGLMTYGRRQFQSLDTTMRRLIPPFREASAKLTTLVDADAEAFTAYLEAMRLPKNTPEEKDRRTAALQEGLRRAVSVPLTLAETVASLWPALQELARCGNLACRSDLQVAAKALEMGVFGAYFNVLINLRDITDEAFKDQPPAGSQDPGCTGAGLLGDPAGVTVREASPGSVAPPSPIPRGQSCDLETPGTAGPSTLEG

SEQ ID NO: 32688 - protein, 133 aa, Homo sapiens
  Payload ID: 6410
  Gene Symbol: FTCD
  Gene Name: formimidoyltransferase cyclodeaminase
  ENSP ID: ENSP00000409015
  MOD_RES (1)..(1): Any amino acid
XLWPALQELARCGNLACRSDLQVAAKALEMGVFGAYFNVLINLRDITDEAFKDQPPAGSQDPGCTGAGLLGDPAGVTVREASPGSVAPPSPIPRGQSCDLGGDTACSCGARRVGGQAAGHRLGMEALAGTEGP

SEQ ID NO: 32689 - protein, 420 aa, Homo sapiens
  Payload ID: 6410
  Gene Symbol: FTCD
  Gene Name: formimidoyltransferase cyclodeaminase
  ENSP ID: ENSP00000485804
MSQLVECVPNFSEGKNQEVIDAISGAITQTPGCVLLDVDAGPSTNRTVYTFVGPPECVVEGALNAARVASRLIDMSRHQGEHPRMGALDVCPFIPVRGVSVDECVLCAQAFGQRLAEELDVPVYLYGEAARMDSRRTLPAIRAGEYEALPKKLQQADWAPDFGPSSFVPSWGATATGARKFLIAFNINLLGTKEQAHRIALNLREQGRGKDQPGRLKKVQGIGWYLDEKNLAQVSTNLLDFEVTALHTVYEETCREAQELSLPVVGSQLVGLVPLKALLDAAAFYCEKENLFILEEEQRIRLVVSRLGLDSLCPFSPKERIIEYLVPERGPERGLGSKSLRAFVGEVGARSAAPGGGSVAAAAAAMGAALGSMVGLMTYGRRQFQSLDTTMRRLIPPFREASAKLTTLVDADAEAFTAYL

SEQ ID NO: 32690 - protein, 420 aa, Homo sapiens; identical to SEQ ID NO: 32689
  Payload ID: 6410
  Gene Symbol: FTCD
  Gene Name: formimidoyltransferase cyclodeaminase
  ENSP ID: ENSP00000486740

SEQ ID NO: 32691 - protein, 420 aa, Homo sapiens; identical to SEQ ID NO: 32689
  Payload ID: 6410
  Gene Symbol: FTCD
  Gene Name: formimidoyltransferase cyclodeaminase
  ENSP ID: ENSP00000487110

SEQ ID NO: 32692 - protein, 420 aa, Homo sapiens; identical to SEQ ID NO: 32689
  Payload ID: 6410
  Gene Symbol: FTCD
  Gene Name: formimidoyltransferase cyclodeaminase
  ENSP ID: ENSP00000487475

SEQ ID NO: 32693 - protein, 77 aa, Homo sapiens
  Payload ID: 6411
  Gene Symbol: FTCDNL1
  Gene Name: formiminotransferase cyclodeaminase N-terminal like
  ENSP ID: ENSP00000454447
MSSSRVGLRLAACLLNVSEAGRKYIVENIAKAALLDKNGKKHPQVSVLNIFSDQDYKRSVITIATSVDKLVDKRNQA

SEQ ID NO: 32694 - protein, 114 aa, Homo sapiens
  Payload ID: 6411
  Gene Symbol: FTCDNL1
  Gene Name: formiminotransferase cyclodeaminase N-terminal like
  ENSP ID: ENSP00000456442
MSSSRVGLRLAACLLNVSEAGRKYIVENIAKAALLDKNGKKHPQVSVLNIFSDQDYKRSVITIATSVDKLGSSVLAACLEAFQAIDMEVQEGIHPCLGAVDLIPIYPLSGVTVE

SEQ ID NO: 32695 - protein, 138 aa, Homo sapiens
  Payload ID: 6411
  Gene Symbol: FTCDNL1
  Gene Name: formiminotransferase cyclodeaminase N-terminal like
  ENSP ID: ENSP00000457780
MSSSRVGLRLAACLLNVSEAGRKYIVENIAKAALLDKNGKKHPQVSVLNIFSDQDYKRSVITIATSVDKLGLAEDLVLHVPGCSVFLFGEADLPEKRSLVQRRKQLGWFTRRDFSALQPDLGAAPSQRCGLTACFRAL

SEQ ID NO: 32696 - protein, 147 aa, Homo sapiens
  Payload ID: 6411
  Gene Symbol: FTCDNL1
  Gene Name: formiminotransferase cyclodeaminase N-terminal like
  Uniprot ID: E5RQL4
  ENSP ID: ENSP00000482786
MSSSRVGLRLAACLLNVSEAGRKYIVENIAKAALLDKNGKKHPQVSVLNIFSDQDYKRSVITIATSVDKLGLAEDLVLHVPGCSVFLFGEADLPEKRSLVQRRKQLGWFTRRDFSALQPDLGAAPSQRCGLTGSEHGFCFALFFFFF

SEQ ID NO: 32697 - protein, 662 aa, Homo sapiens; identical to SEQ ID NO: 32401
  Payload ID: 6412
  Gene Symbol: FMN1
  Gene Name: formin 1
  Uniprot ID: Q68DA7
  ENSP ID: ENSP00000325166

SEQ ID NO: 32698 - protein, 1196 aa, Homo sapiens; identical to SEQ ID NO: 32403
  Payload ID: 6412
  Gene Symbol: FMN1
  Gene Name: formin 1
  Uniprot ID: Q68DA7
  ENSP ID: ENSP00000333950

SEQ ID NO: 32699 - protein, 503 aa, Homo sapiens; identical to SEQ ID NO: 32409
  Payload ID: 6412
  Gene Symbol: FMN1
  Gene Name: formin 1
  Uniprot ID: Q68DA7
  ENSP ID: ENSP00000452984

SEQ ID NO: 32700 - protein, 114 aa, Homo sapiens; identical to SEQ ID NO: 32408
  Payload ID: 6412
  Gene Symbol: FMN1
  Gene Name: formin 1
  ENSP ID: ENSP00000453110
  MOD_RES (1)..(1): Any amino acid

SEQ ID NO: 32701 - protein, 181 aa, Homo sapiens; identical to SEQ ID NO: 32407
  Payload ID: 6412
  Gene Symbol: FMN1
  Gene Name: formin 1
  ENSP ID: ENSP00000453266
  MOD_RES (1)..(1): Any amino acid

SEQ ID NO: 32702 - protein, 1321 aa, Homo sapiens; identical to SEQ ID NO: 32402
  Payload ID: 6412
  Gene Symbol: FMN1
  Gene Name: formin 1
  ENSP ID: ENSP00000453443

SEQ ID NO: 32703 - protein, 58 aa, Homo sapiens; identical to SEQ ID NO: 32405
  Payload ID: 6412
  Gene Symbol: FMN1
  Gene Name: formin 1
  ENSP ID: ENSP00000453682
  MOD_RES (1)..(1): Any amino acid

SEQ ID NO: 32704 - protein, 1419 aa, Homo sapiens; identical to SEQ ID NO: 32404
  Payload ID: 6412
  Gene Symbol: FMN1
  Gene Name: formin 1
  Uniprot ID: Q68DA7
  ENSP ID: ENSP00000454047

SEQ ID NO: 32705 - protein, 1419 aa, Homo sapiens; identical to SEQ ID NO: 32404
  Payload ID: 6412
  Gene Symbol: FMN1
  Gene Name: formin 1
  Uniprot ID: Q68DA7
  ENSP ID: ENSP00000479134

SEQ ID NO: 32706 - protein, 1722 aa, Homo sapiens
  Payload ID: 6413
  Gene Symbol: FMN2
  Gene Name: formin 2
  Uniprot ID: Q9NZ56
  ENSP ID: ENSP00000318884
MGNQDGKLKRSAGDALHEGGGGAEDALGPRDVEATKKGSGGKKALGKHGKGGGGGGGGGESGKKKSKSDSRASVFSNLRIRKNLSKGKGAGGSREDVLDSQALQTGELDSAHSLLTKTPDLSLSADEAGLSDTECADPFEVTGPGGPGPAEARVGGRPIAEDVETAAGAQDGQRTSSGSDTDIYSFHSATEQEDLLSDIQQAIRLQQQQQQQLQLQLQQQQQQQQLQGAEEPAAPPTAVSPQPGAFLGLDRFLLGPSGGAGEAPGSPDTEQALSALSDLPESLAAEPREPQQPPSPGGLPVSEAPSLPAAQPAAKDSPSSTAFPFPEAGPGEEAAGAPVRGAGDTDEEGEEDAFEDAPRGSPGEEWAPEVGEDAPQRLGEEPEEEAQGPDAPAAASLPGSPAPSQRCFKPYPLITPCYIKTTTRQLSSPNHSPSQSPNQSPRIKRRPEPSLSRGSRTALASVAAPAKKHRADGGLAAGLSRSADWTEELGARTPRVGGSAHLLERGVASDSGGGVSPALAAKASGAPAAADGFQNVFTGRTLLEKLFSQQENGPPEEAEKFCSRIIAMGLLLPFSDCFREPCNQNAQTNAASFDQDQLYTWAAVSQPTHSLDYSEGQFPRRVPSMGPPSKPPDEEHRLEDAETESQSAVSETPQKRSDAVQKEVVDMKSEGQATVIQQLEQTIEDLRTKIAELERQYPALDTEVASGHQGLENGVTASGDVCLEALRLEEKEVRHHRILEAKSIQTSPTEEGGVLTLPPVDGLPGRPPCPPGAESGPQTKFCSEISLIVSPRRISVQLDSHQPTQSISQPPPPPSLLWSAGQGQPGSQPPHSISTEFQTSHEHSVSSAFKNSCNIPSPPPLPCTESSSSMPGLGMVPPPPPPLPGMTVPTLPSTAIPQPPPLQGTEMLPPPPPPLPGAGIPPPPPLPGAGILPLPPLPGAGIPPPPPLPGAAIPPPPPLPGAGIPLPPPLPGAGIPPPPPLPGAGIPPPPPLPGAGIPPPPPLPGAGIPPPPPLPGAGIPPPPPLPGAGIPPPPPLPGAGIPPPPPLPGAGIPPPPPLPGAGIPPPPPLPGAGIPPPPPLPGAGIPPPPPLPGAGIPPPPPLPGVGIPPPPPLPGAGIPPPPPLPGAGIPPPPPLPGAGIPPPPPLPRVGIPPPPPLPGAGIPPPPPLPGAGIPPPPPLPGVGIPPPPPLPGVGIPPPPPLPGAGIPPPPPLPGMGIPPAPAPPLPPPGTGIPPPPLLPVSGPPLLPQVGSSTLPTPQVCGFLPPPLPSGLFGLGMNQDKGSRKQPIEPCRPMKPLYWTRIQLHSKRDSSTSLIWEKIEEPSIDCHEFEELFSKTAVKERKKPISDTISKTKAKQVVKLLSNKRSQAVGILMSSLHLDMKDIQHAVVNLDNSVVDLETLQALYENRAQSDELEKIEKHGRSSKDKENAKSLDKPEQFLYELSLIPNFSERVFCILFQSTFSESICSIRRKLELLQKLCETLKNGPGVMQVLGLVLAFGNYMNGGNKTRGQADGFGLDILPKLKDVKSSDNSRSLLSYIVSYYLRNFDEDAGKEQCLFPLPEPQDLFQASQMKFEDFQKDLRKLKKDLKACEVEAGKVYQVSSKEHMQPFKENMEQFIIQAKIDQEAEENSLTETHKCFLETTAYFFMKPKLGEKEVSPNAFFSIWHEFSSDFKDFWKKENKLLLQERVKEAEEVCRQKKGKSLYKIKPRHDSGIKAKISMKT

SEQ ID NO: 32707 - protein, 99 aa, Homo sapiens
  Payload ID: 6413
  Gene Symbol: FMN2
  Gene Name: formin 2
  ENSP ID: ENSP00000388922
MVVKLLSNKRSQAVGILMSSLHLDMKDIQHAVVNLDNSVVDLETLQALYENRAQSDELEKIEKHGRSSKDKENAKSLDKPEQFLYELSLIPNFSERVFC

SEQ ID NO: 32708 - protein, 228 aa, Homo sapiens
  Payload ID: 6413
  Gene Symbol: FMN2
  Gene Name: formin 2
  ENSP ID: ENSP00000409308
MGLLLPFSDCFREPCNQNAQTNAASFDQDQLYTWAAVSQPTHSLDYSEGQFPRRVPSMGPPSKPPDEEHRLEDAETEDDGESQSAVSETPQKRSDAVQKEVVDMKSEGQATVIQQLEQTIEDLRTKIAELERQYPALDTEVASGHQGLENGVTASGDVCLEALRLEEKEVRHHRILEAKSIQTSPTEEGGVLTLPPVDGLPGRPPCPPGAESGPQTKFCSEISLIVSP

SEQ ID NO: 32709 - protein, 198 aa, Homo sapiens
  Payload ID: 6413
  Gene Symbol: FMN2
  Gene Name: formin 2
  ENSP ID: ENSP00000437918
MSRAVTIAEAFCHILFRIISEILMRMLEEQCLFPLPEPQDLFQASQMKFEDFQKDLRKLKKDLKACEVEAGKVYQVSSKEHMQPFKENMEQFIIQAKIDQEAEENSLTETHKCFLETTAYFFMKPKLGEKEVSPNAFFSIWHEFSSDFKDFWKKENKLLLQERVKEAEEVCRQKKGKSLYKIKPRHDSGIKAKISMKT

SEQ ID NO: 32710 - protein, 42 aa, Homo sapiens
  Payload ID: 6413
  Gene Symbol: FMN2
  Gene Name: formin 2
  ENSP ID: ENSP00000439136
MCLLPIRVKEAEEVCRQKKGKSLYKIKPRHDSGIKAKISMKT

SEQ ID NO: 32711 - protein, 592 aa, Homo sapiens
  Payload ID: 6414
  Gene Symbol: FNBP1
  Gene Name: formin binding protein 1
  Uniprot ID: Q96RU3
  ENSP ID: ENSP00000347907
MSWGTELWDQFDNLEKHTQWGIDILEKYIKFVKERTEIELSYAKQLRNLSKKYQPKKNSKEEEEYKYTSCKAFISNLNEMNDYAGQHEVISENMASQIIVDLARYVQELKQERKSNFHDGRKAQQHIETCWKQLESSKRRFERDCKEADRAQQYFEKMDADINVTKADVEKARQQAQIRHQMAEDSKADYSSILQKFNHEQHEYYHTHIPNIFQKIQEMEERRIVRMGESMKTYAEVDRQVIPIIGKCLDGIVKAAESIDQKNDSQLVIEAYKSGFEPPGDIEFEDYTQPMKRTVSDNSLSNSRGEGKPDLKFGGKSKGKLWPFIKKNKSPKQQKEPLSHRFNEFMTSKPKIHCFRSLKRGLSLKLGATPEDFSNLPPEQRRKKLQQKVDELNKEIQKEMDQRDAITKMKDVYLKNPQMGDPASLDHKLAEVSQNIEKLRVETQKFEAWLAEVEGRLPARSEQARRQSGLYDSQNPPTVNNCAQDRESPDGSYTEEQSQESEMKVLATDFDDEFDDEEPLPAIGTCKALYTFEGQNEGTISVVEGETLYVIEEDKGDGWTRIRRNEDEEGYVPTSYVEVCLDKNAKGAKTYI

SEQ ID NO: 32712 - protein, 551 aa, Homo sapiens
  Payload ID: 6414
  Gene Symbol: FNBP1
  Gene Name: formin binding protein 1
  ENSP ID: ENSP00000389117
MSWGTELWDQFDNLEKHTQWGIDILEKYIKFVKERTEIELSYAKQLRNLSKKYQPKKNSKEEEEYKYTSCKAFISNLNEMNDYAGQHEVISENMASQIIVDLARYVQELKQERKSNFHDGRKAQQHIETCWKQLESSKRRFERDCKEADRAQQYFEKMDADINVTKADVEKARQQAQIRHQMAEDSKADYSSILQKFNHEQHEYYHTHIPNIFQKIQEMEERRIVRMGESMKTYAEVDRQVIPIIGKCLDGIVKAAESIDQKNDSQLVIEAYKSGFEPPGDIEFEDYTQPMKRTVSDNSLSNSRGEGKPDLKFGGKSKGKLWPFIKKNKGATPEDFSNLPPEQRRKKLQQKVDELNKEIQKEMDQRDAITKMKDVYLKNPQMGDPASLDHKLAEVSQNIEKLRVETQKFEAWLAEVEGRLPARSEQARRQSGLYDSQNPPTVNNCAQDRESPDGSYTEEQSQESEMKVLATDFDDEFDDEEPLPAIGTCKALYTFEGQNEGTISVVEGETLYVIEEDKGDGWTRIRRNEDEEGYVPTSYVEVCLDKNAKDS

SEQ ID NO: 32713 - protein, 612 aa, Homo sapiens
  Payload ID: 6414
  Gene Symbol: FNBP1
  Gene Name: formin binding protein 1
  Uniprot ID: Q96RU3
  ENSP ID: ENSP00000407548
MSWGTELWDQFDNLEKHTQWGIDILEKYIKFVKERTEIELSYAKQLRNLSKKYQPKKNSKEEEEYKYTSCKAFISNLNEMNDYAGQHEVISENMASQIIVDLARYVQELKQERKSNFHDGRKAQQHIETCWKQLESSKRRFERDCKEADRAQQYFEKMDADINVTKADVEKARQQAQIRHQMAEDSKADYSSILQKFNHEQHEYYHTHIPNIFQKIQEMEERRIVRMGESMKTYAEVDRQVIPIIGKCLDGIVKAAESIDQKNDSQLVIEAYKSGFEPPGDIEFEDYTQPMKRTVSDNSLSNSRGEGKPDLKFGGKSKGKLWPFIKKNKLMSLLTSPHQPPPPPPASASPSAVPNGPQSPKQQKEPLSHRFNEFMTSKPKIHCFRSLKRGGATPEDFSNLPPEQRRKKLQQKVDELNKEIQKEMDQRDAITKMKDVYLKNPQMGDPASLDHKLAEVSQNIEKLRVETQKFEAWLAEVEGRLPARSEQARRQSGLYDSQNPPTVNNCAQDRESPDGSYTEEQSQESEMKVLATDFDDEFDDEEPLPAIGTCKALYTFEGQNEGTISVVEGETLYVIEEDKGDGWTRIRRNEDEEGYVPTSYVEVCLDKNAKDS

SEQ ID NO: 32714 - protein, 617 aa, Homo sapiens
  Payload ID: 6414
  Gene Symbol: FNBP1
  Gene Name: formin binding protein 1
  Uniprot ID: Q96RU3
  ENSP ID: ENSP00000413625
MSWGTELWDQFDNLEKHTQWGIDILEKYIKFVKERTEIELSYAKQLRNLSKKYQPKKNSKEEEEYKYTSCKAFISNLNEMNDYAGQHEVISENMASQIIVDLARYVQELKQERKSNFHDGRKAQQHIETCWKQLESSKRRFERDCKEADRAQQYFEKMDADINVTKADVEKARQQAQIRHQMAEDSKADYSSILQKFNHEQHEYYHTHIPNIFQKIQEMEERRIVRMGESMKTYAEVDRQVIPIIGKCLDGIVKAAESIDQKNDSQLVIEAYKSGFEPPGDIEFEDYTQPMKRTVSDNSLSNSRGEGKPDLKFGGKSKGKLWPFIKKNKLMSLLTSPHQPPPPPPASASPSAVPNGPQSPKQQKEPLSHRFNEFMTSKPKIHCFRSLKRGLSLKLGATPEDFSNLPPEQRRKKLQQKVDELNKEIQKEMDQRDAITKMKDVYLKNPQMGDPASLDHKLAEVSQNIEKLRVETQKFEAWLAEVEGRLPARSEQARRQSGLYDSQNPPTVNNCAQDRESPDGSYTEEQSQESEMKVLATDFDDEFDDEEPLPAIGTCKALYTFEGQNEGTISVVEGETLYVIEEDKGDGWTRIRRNEDEEGYVPTSYVEVCLDKNAKDS

SEQ ID NO: 32715 - protein, 568 aa, Homo sapiens
  Payload ID: 6414
  Gene Symbol: FNBP1
  Gene Name: formin binding protein 1
  ENSP ID: ENSP00000415602
  MOD_RES (1)..(1): Any amino acid
XLSYAKQLRNLSKKYQPKKNSKEEEEYKYTSCKAFISNLNEMNDYAGQHEVISENMASQIIVDLARYVQELKQERKSNFHDGRKAQQHIETCWKQLESSKRRFERDCKEADRAQQYFEKMDADINVTKADVEKARQQAQIRHQMAEDSKADYSSILQKFNHEQHEYYHTHIPNIFQKIQEMEERRIVRMGESMKTYAEVDRQVIPIIGKCLDGIVKAAESIDQKNDSQLVIEAYKSGFEPPGDIEFEDYTQPMKRTVSDNSLSNSRGEGKPDLKFGGKSKGKLWPFIKKNKPPPPPPASASPSAVPNGPQSPKQQKEPLSHRFNEFMTSKPKIHCFRSLKRGGATPEDFSNLPPEQRRKKLQQKVDELNKEIQKEMDQRDAITKMKDVYLKNPQMGDPASLDHKLAEVSQNIEKLRVETQKFEAWLAEVEGRLPARSEQARRQSGLYDSQNPPTVNNCAQDRESPDGSYTEEQSQESEMKVLATDFDDEFDDEEPLPAIGTCKALYTFEGQNEGTISVVEGETLYVIEEDKGDGWTRIRRNEDEEGYVPTSYVEVCLDKNAKGAKTYI

SEQ ID NO: 32716 - protein, 551 aa, Homo sapiens
  Payload ID: 6415
  Gene Symbol: FNBP1L
  Gene Name: formin binding protein 1-like
  Uniprot ID: Q5T0N5
  ENSP ID: ENSP00000260506
MSWGTELWDQFDSLDKHTQWGIDFLERYAKFVKERIEIEQNYAKQLRNLVKKYCPKRSSKDEEPRFTSCVAFFNILNELNDYAGQREVVAEEMAHRVYGELMRYAHDLKTERKMHLQEGRKAQQYLDMCWKQMDNSKKKFERECREAEKAQQSYERLDNDTNATKADVEKAKQQLNLRTHMADENKNEYAAQLQNFNGEQHKHFYVVIPQIYKQLQEMDERRTIKLSECYRGFADSERKVIPIISKCLEGMILAAKSVDERRDSQMVVDSFKSGFEPPGDFPFEDYSQHIYRTISDGTISASKQESGKMDAKTTVGKAKGKLWLFGKKPKGPALEDFSHLPPEQRRKKLQQRIDELNRELQKESDQKDALNKMKDVYEKNPQMGDPGSLQPKLAETMNNIDRLRMEIHKNEAWLSEVEGKTGGRGDRRHSSDINHLVTQGRESPEGSYTDDANQEVRGPPQQHGHHNEFDDEFEDDDPLPAIGHCKAIYPFDGHNEGTLAMKEGEVLYIIEEDKGDGWTRARRQNGEEGYVPTSYIDVTLEKNSKGAVTYI

SEQ ID NO: 32717 - protein, 605 aa, Homo sapiens
  Payload ID: 6415
  Gene Symbol: FNBP1L
  Gene Name: formin binding protein 1-like
  Uniprot ID: Q5T0N5
  ENSP ID: ENSP00000271234
MSWGTELWDQFDSLDKHTQWGIDFLERYAKFVKERIEIEQNYAKQLRNLVKKYCPKRSSKDEEPRFTSCVAFFNILNELNDYAGQREVVAEEMAHRVYGELMRYAHDLKTERKMHLQEGRKAQQYLDMCWKQMDNSKKKFERECREAEKAQQSYERLDNDTNATKADVEKAKQQLNLRTHMADENKNEYAAQLQNFNGEQHKHFYVVIPQIYKQLQEMDERRTIKLSECYRGFADSERKVIPIISKCLEGMILAAKSVDERRDSQMVVDSFKSGFEPPGDFPFEDYSQHIYRTISDGTISASKQESGKMDAKTTVGKAKGKLWLFGKKPKPQSPPLTPTSLFTSSTPNGSQFLTFSIEPVHYCMNEIKTGKPRIPSFRSLKRGWSVKMGPALEDFSHLPPEQRRKKLQQRIDELNRELQKESDQKDALNKMKDVYEKNPQMGDPGSLQPKLAETMNNIDRLRMEIHKNEAWLSEVEGKTGGRGDRRHSSDINHLVTQGRESPEGSYTDDANQEVRGPPQQHGHHNEFDDEFEDDDPLPAIGHCKAIYPFDGHNEGTLAMKEGEVLYIIEEDKGDGWTRARRQNGEEGYVPTSYIDVTLEKNSKGS

SEQ ID NO: 32718 - protein, 547 aa, Homo sapiens
  Payload ID: 6415
  Gene Symbol: FNBP1L
  Gene Name: formin binding protein 1-like
  Uniprot ID: Q5T0N5
  ENSP ID: ENSP00000359275
MSWGTELWDQFDSLDKHTQWGIDFLERYAKFVKERIEIEQNYAKQLRNLVKKYCPKRSSKDEEPRFTSCVAFFNILNELNDYAGQREVVAEEMAHRVYGELMRYAHDLKTERKMHLQEGRKAQQYLDMCWKQMDNSKKKFERECREAEKAQQSYERLDNDTNATKADVEKAKQQLNLRTHMADENKNEYAAQLQNFNGEQHKHFYVVIPQIYKQLQEMDERRTIKLSECYRGFADSERKVIPIISKCLEGMILAAKSVDERRDSQMVVDSFKSGFEPPGDFPFEDYSQHIYRTISDGTISASKQESGKMDAKTTVGKAKGKLWLFGKKPKGPALEDFSHLPPEQRRKKLQQRIDELNRELQKESDQKDALNKMKDVYEKNPQMGDPGSLQPKLAETMNNIDRLRMEIHKNEAWLSEVEGKTGGRGDRRHSSDINHLVTQGRESPEGSYTDDANQEVRGPPQQHGHHNEFDDEFEDDDPLPAIGHCKAIYPFDGHNEGTLAMKEGEVLYIIEEDKGDGWTRARRQNGEEGYVPTSYIDVTLEKNSKGS

SEQ ID NO: 32719 - protein, 451 aa, Homo sapiens
  Payload ID: 6415
  Gene Symbol: FNBP1L
  Gene Name: formin binding protein 1-like
  ENSP ID: ENSP00000397451
  MOD_RES (1)..(1): Any amino acid
XRLDNDTNATKADVEKAKQQLNLRTHMADENKNEYAAQLQNFNGEQHKHFYVVIPQIYKQLQEMDERRTIKLSECYRGFADSERKVIPIISKCLEGMILAAKSVDERRDSQMVVDSFKSGFEPPGDFPFEDYSQHIYRTISDGTISASKQESGKMDAKTTVGKAKGKLWLFGKKPKPQSPPLTPTSLFTSSTPNGSQFLTFSIEPVHYCMNEIKTGKPRIPSFRSLKRGWSVKMGPALEDFSHLPPEQRRKKLQQRIDELNRELQKESDQKDALNKMKDVYEKNPQMGDPGSLQPKLAETMNNIDRLRMEIHKNEAWLSEVEGKTGGRGDRRHSSDINHLVTQGRESPEGSYTDDANQEVRGPPQQHGHHNEFDDEFEDDDPLPAIGHCKAIYPFDGHNEGTLAMKEGEVLYIIEEDKGDGWTRARRQNGEEGYVPTSYIDVTLEKNSKGS

SEQ ID NO: 32720 - protein, 609 aa, Homo sapiens
  Payload ID: 6415
  Gene Symbol: FNBP1L
  Gene Name: formin binding protein 1-like
  ENSP ID: ENSP00000473921
MSWGTELWDQFDSLDKHTQWGIDFLERYAKFVKERIEIEQNYAKQLRNLVKKYCPKRSSKDEEPRFTSCVAFFNILNELNDYAGQREVVAEEMAHRVYGELMRYAHDLKTERKMHLQEGRKAQQYLDMCWKQMDNSKKKFERECREAEKAQQSYERLDNDTNATKADVEKAKQQLNLRTHMADENKNEYAAQLQNFNGEQHKHFYVVIPQIYKQLQEMDERRTIKLSECYRGFADSERKVIPIISKCLEGMILAAKSVDERRDSQMVVDSFKSGFEPPGDFPFEDYSQHIYRTISDGTISASKQESGKMDAKTTVGKAKGKLWLFGKKPKPQSPPLTPTSLFTSSTPNGSQFLTFSIEPVHYCMNEIKTGKPRIPSFRSLKRGWSVKMGPALEDFSHLPPEQRRKKLQQRIDELNRELQKESDQKDALNKMKDVYEKNPQMGDPGSLQPKLAETMNNIDRLRMEIHKNEAWLSEVEGKTGGRGDRRHSSDINHLVTQGRESPEGSYTDDANQEVRGPPQQHGHHNEFDDEFEDDDPLPAIGHCKAIYPFDGHNEGTLAMKEGEVLYIIEEDKGDGWTRARRQNGEEGYVPTSYIDVTLEKNSKGAVTYI

SEQ ID NO: 32721 - protein, 1017 aa, Homo sapiens
  Payload ID: 6416
  Gene Symbol: FNBP4
  Gene Name: formin binding protein 4
  Uniprot ID: Q8N3X1
  ENSP ID: ENSP00000263773
MGKKSRAVPGRRPILQLSPPGPRGSTPGRDPEPEPDTEPDSTAAVPSQPAPSAATTTTTAVTAAAASDDSPSEDEQEAVQEVPRVVQNPPKPVMTTRPTAVKATGGLCLLGAYADSDDDDNDVSEKLAQSKETNGNQSTDIDSTLANFLAEIDAITAPQPAAPVGASAPPPTPPRPEPKEAATSTLSSSTSNGTDSTQTSGWQYDTQCSLAGVGIEMGDWQEVWDENTGCYYYWNTQTNEVTWELPQYLATQVQGLQHYQPSSVPGAETSFVVNTDIYSKEKTISVSSSKSGPVIAKREVKKEVNEGIQALSNSEEEKKGVAASLLAPLLPEGIKEEEERWRRKVICKEEPVSEVKETSTTVEEATTIVKPQEIMLDNIEDPSQEDLCSVVQSGESEEEEEQDTLELELVLERKKAELRALEEGDGSVSGSSPRSDISQPASQDGMRRLMSKRGKWKMFVRATSPESTSRSSSKTGRDTPENGETAIGAENSEKIDENSDKEMEVEESPEKIKVQTTPKVEEEQDLKFQIGELANTLTSKFEFLGINRQSISNFHVLLLQTETRIADWREGALNGNYLKRKLQDAAEQLKQYEINATPKGWSCHWDRDHRRYFYVNEQSGESQWEFPDGEEEEEESQAQENRDETLAKQTLKDKTGTDSNSTESSETSTGSLCKESFSGQVSSSSLMPLTPFWTLLQSNVPVLQPPLPLEMPPPPPPPPESPPPPPPPPPPAEDGEIQEVEMEDEGSEEPPAPGTEEDTPLKPSAQTTVVTSQSSVDSTISSSSSTKGIKRKATEISTAVVQRSATIGSSPVLYSQSAIATGHQAAGIGNQATGIGHQTIPVSLPAAGMGHQARGMSLQSNYLGLAAAPAIMSYAECSVPIGVTAPSLQPVQARGAVPTATIIEPPPPPPPPPPPPPPAPKMPPPEKTKKGRKDKAKKSKTKMPSLVKKWQSIQRELDEEDNSSSSEEDRESTAQKRIEEWKQQQLVSGMAERNANFEALPEDWRARLKRRKMAPNT

SEQ ID NO: 32722 - protein, 143 aa, Homo sapiens
  Payload ID: 6416
  Gene Symbol: FNBP4
  Gene Name: formin binding protein 4
  ENSP ID: ENSP00000440181
MGKKSRAVPGRRPILQLSPPGPRGSTPGRDPEPEPDTEPDSTAAVPSQPAPSAATTTTTAVTAAAASDDSPSEDEQEAVQEVPRVVQNPPKPVMTTRPTAVKATGDRCHNSSSACSSCRSFCSTSNSTSTRAKGSSNIYPFFF

SEQ ID NO: 32723 - protein, 1164 aa, Homo sapiens
  Payload ID: 6417
  Gene Symbol: FHOD1
  Gene Name: formin homology 2 domain containing 1
  Uniprot ID: Q9Y613
  ENSP ID: ENSP00000258201
MAGGEDRGDGEPVSVVTVRVQYLEDTDPFACANFPEPRRAPTCSLDGALPLGAQIPAVHRLLGAPLKLEDCALQVSPSGYYLDTELSLEEQREMLEGFYEEISKGRKPTLILRTQLSVRVNAILEKLYSSSGPELRRSLFSLKQIFQEDKDLVPEFVHSEGLSCLIRVGAAADHNYQSYILRALGQLMLFVDGMLGVVAHSDTIQWLYTLCASLSRLVVKTALKLLLVFVEYSENNAPLFIRAVNSVASTTGAPPWANLVSILEEKNGADPELLVYTVTLINKTLAALPDQDSFYDVTDALEQQGMEALVQRHLGTAGTDVDLRTQLVLYENALKLEDGDIEEAPGAGGRRERRKPSSEEGKRSRRSLEGGGCPARAPEPGPTGPASPVGPTSSTGPALLTGPASSPVGPPSGLQASVNLFPTISVAPSADTSSERSIYKARFLENVAAAETEKQVALAQGRAETLAGAMPNEAGGHPDARQLWDSPETAPAARTPQSPAPCVLLRAQRSLAPEPKEPLIPASPKAEPIWELPTRAPRLSIGDLDFSDLGEDEDQDMLNVESVEAGKDIPAPSPPLPLLSGVPPPPPLPPPPPIKGPFPPPPPLPLAAPLPHSVPDSSALPTKRKTVKLFWRELKLAGGHGVSASRFGPCATLWASLDPVSVDTARLEHLFESRAKEVLPSKKAGEGRRTMTTVLDPKRSNAINIGLTTLPPVHVIKAALLNFDEFAVSKDGIEKLLTMMPTEEERQKIEEAQLANPDIPLGPAENFLMTLASIGGLAARLQLWAFKLDYDSMEREIAEPLFDLKVGMEQLVQNATFRCILATLLAVGNFLNGSQSSGFELSYLEKVSEVKDTVRRQSLLHHLCSLVLQTRPESSDLYSEIPALTRCAKVDFEQLTENLGQLERRSRAAEESLRSLAKHELAPALRARLTHFLDQCARRVAMLRIVHRRVCNRFHAFLLYLGYTPQAAREVRIMQFCHTLREFALEYRTCRERVLQQQQKQATYRERNKTRGRMITETEKFSGVAGEAPSNPSVPVAVSSGPGRGDADSHASMKSLLTSRPEDTTHNRRSRGMVQSSSPIMPTVGPSTASPEEPPGSSLPSDTSDEIMDLLVQSVTKSSPRALAARERKRSRGNRKSLRRTLKSGLGDDLVQALGLSKGPGLEV

SEQ ID NO: 32724 - protein, 157 aa, Homo sapiens
  Payload ID: 6417
  Gene Symbol: FHOD1
  Gene Name: formin homology 2 domain containing 1
  ENSP ID: ENSP00000458085
MAGGEDRGDGEPVSVVTVRVQYLEDTDPFACANFPEPRRAPTCSLDGALPLGAQIPAVHRLLGAPLKLEDCALQVSPSGYYLDTELSLEEQREMLEGFYEEISKGRKPTLILRTQLSVRVNAILGFYTLPFAEKLYSSSGPELRRSLFSLKQIFQRG

SEQ ID NO: 32725 - protein, 22 aa, Homo sapiens
  Payload ID: 6417
  Gene Symbol: FHOD1
  Gene Name: formin homology 2 domain containing 1
  ENSP ID: ENSP00000462807
  MOD_RES (1)..(1): Any amino acid
XSKDGIEMTEGSRPMPQASGLH

SEQ ID NO: 32726 - protein, 108 aa, Homo sapiens
  Payload ID: 6417
  Gene Symbol: FHOD1
  Gene Name: formin homology 2 domain containing 1
  ENSP ID: ENSP00000462988
GPCATLWASLDPVSVDTARLEHLFESRAKEVLPSKKAGEGRRTMTTVLDPKRSNAINIGLTTLPPVHVIKAALLNFDEFAVSKDGIEALATSSEATDHDAHGGRAAED

SEQ ID NO: 32727 - protein, 28 aa, Homo sapiens
  Payload ID: 6417
  Gene Symbol: FHOD1
  Gene Name: formin homology 2 domain containing 1
  ENSP ID: ENSP00000464011
  MOD_RES (1)..(1): Any amino acid
XFPTISVAPSADTSSERSIYKLHQTASV

SEQ ID NO: 32728 - protein, 1439 aa, Homo sapiens
  Payload ID: 6418
  Gene Symbol: FHOD3
  Gene Name: formin homology 2 domain containing 3
  Uniprot ID: Q2V2M9
  ENSP ID: ENSP00000257209
MATLACRVQFLDDTDPFNSTNFPEPSRPPLFTFREDLALGTQLAGVHRLLQAPHKLDDCTLQLSHNGAYLDLEATLAEQRDELEGFQDDAGRGKKHSIILRTQLSVRVHACIEKLYNSSGRDLRRALFSLKQIFQDDKDLVHEFVVAEGLTCLIKVGAEADQNYQNYILRALGQIMLYVDGMNGVINRNETIQWLYTLIGSKFRLVVKTALKLLLVFVEYSESNAPLLIQAVTAVDTKRGVKPWSNIMEILEEKDGVDTELLVYAMTLVNKTLSGLPDQDTFYDVVDCLEELGIAAVSQRHLNKKGTDLDLVEQLNIYEVALRHEDGDETTEPPPSGCRDRRRASVCSSGGGEHRGLDRRRSRRHSVQSIKSTLSAPTSPCSQSAPSFKPNQVRDLREKYSNFGNNSYHSSRPSSGSSVPTTPTSSVSPPQEARLERSSPSGLLTSSFRQHQESLAAERERRRQEREERLQRIEREERNKFSRDYLDKREEQRQAREERYKYLEQLAAEEHEKELRSRSVSRGRADLSLDLTSPAAPACLAPLSHSPSSSDSQEALTVSASSPGTPHHPQASAGDPEPESEAEPEAEAGAGQVADEAGQDIASAHEGAETEVEQALEQEPEERASLSEKERQNEGVNERDNCSASSVSSSSSTLEREEKEDKLSRDRTTGLWPAGVQDAGVNGQCGDILTNKRFMLDMLYAHNRKSPDDEEKGDGEAGRTQQEAEAVASLATRISTLQANSQTQDESVRRVDVGCLDNRGSVKAFAEKFNSGDLGRGSISPDAEPNDKVPETAPVQPKTESDYIWDQLMANPRELRIQDMDFTDLGEEDDIDVLDVDLGHREAPGPPPPPPPTFLGLPPPPPPPLLDSIPPPPVPGNLLVPPPPVFNAPQGLGWSQVPRGQPTFTKKKKTIRLFWNEVRPFDWPCKNNRRCREFLWSKLEPIKVDTSRLEHLFESKSKELSVSKKTAADGKRQEIIVLDSKRSNAINIGLTVLPPPRTIKIAILNFDEYALNKEGIEKILTMIPTDEEKQKIQEAQLANPEIPLGSAEQFLLTLSSISELSARLHLWAFKMDYETTEKEVAEPLLDLKEGIDQLENNKTLGFILSTLLAIGNFLNGTNAKAFELSYLEKVPEVKDTVHKQSLLHHVCTMVVENFPDSSDLYSEIGAITRSAKVDFDQLQDNLCQMERRCKASWDHLKAIAKHEMKPVLKQRMSEFLKDCAERIIILKIVHRRIINRFHSFLLFMGHPPYAIREVNINKFCRIISEFALEYRTTRERVLQQKQKRANHRERNKTRGKMITDSGKFSGSSPAPPSQPQGLSYAEDAAEHENMKAVLKTSSPSVEDATPALGVRTRSRASRGSTSSWTMGTDDSPNVTDDAADEIMDRIVKSATQVPSQRVVPRERKRSRANRKSLRRTLKSGLTPEEARALGLVGTSELQL

SEQ ID NO: 32729 - protein, 1422 aa, Homo sapiens
  Payload ID: 6418
  Gene Symbol: FHOD3
  Gene Name: formin homology 2 domain containing 3
  Uniprot ID: Q2V2M9
  ENSP ID: ENSP00000352186
MATLACRVQFLDDTDPFNSTNFPEPSRPPLFTFREDLALGTQLAGVHRLLQAPHKLDDCTLQLSHNGAYLDLEATLAEQRDELEGFQDDAGRGKKHSIILRTQLSVRVHACIEKLYNSSGRDLRRALFSLKQIFQDDKDLVHEFVVAEGLTCLIKVGAEADQNYQNYILRALGQIMLYVDGMNGVINRNETIQWLYTLIGSKFRLVVKTALKLLLVFVEYSESNAPLLIQAVTAVDTKRGVKPWSNIMEILEEKDGVDTELLVYAMTLVNKTLSGLPDQDTFYDVVDCLEELGIAAVSQRHLNKKGTDLDLVEQLNIYEVALRHEDGDETTEPPPSGCRDRRRASVCSSGGGEHRGLDRRRSRRHSVQSIKSTLSAPTSPCSQSAPSFKPNQVRDLREKYSNFGNNSYHSSRPSSGSSVPTTPTSSVSPPQEARLERSSPSGLLTSSFRQHQESLAAERERRRQEREERLQRIEREERNKFRYKYLEQLAAEEHEKELRSRSVSRGRADLSLDLTSPAAPACLAPLSHSPSSSDSQEALTVSASSPGTPHHPQASAGDPEPESEAEPEAEAGAGQVADEAGQDIASAHEGAETEVEQALEQEPEERASLSEKERQNEGVNERDNCSASSVSSSSSTLEREEKEDKLSRDRTTGLWPAGVQDAGVNGQCGDILTNKRFMLDMLYAHNRKSPDDEEKGDGEAGRTQQEAEAVASLATRISTLQANSQTQDESVRRVDVGCLDNRGSVKAFAEKFNSGDLGRGSISPDAEPNDKVPETAPVQPKTESDYIWDQLMANPRELRIQDMDFTDLGEEDDIDVLDVDLGHREAPGPPPPPPPTFLGLPPPPPPPLLDSIPPPPVPGNLLVPPPPVFNAPQGLGWSQVPRGQPTFTKKKKTIRLFWNEVRPFDWPCKNNRRCREFLWSKLEPIKVDTSRLEHLFESKSKELSVSKKTAADGKRQEIIVLDSKRSNAINIGLTVLPPPRTIKIAILNFDEYALNKEGIEKILTMIPTDEEKQKIQEAQLANPEIPLGSAEQFLLTLSSISELSARLHLWAFKMDYETTEKEVAEPLLDLKEGIDQLENNKTLGFILSTLLAIGNFLNGTNAKAFELSYLEKVPEVKDTVHKQSLLHHVCTMVVENFPDSSDLYSEIGAITRSAKVDFDQLQDNLCQMERRCKASWDHLKAIAKHEMKPVLKQRMSEFLKDCAERIIILKIVHRRIINRFHSFLLFMGHPPYAIREVNINKFCRIISEFALEYRTTRERVLQQKQKRANHRERNKTRGKMITDSGKFSGSSPAPPSQPQGLSYAEDAAEHENMKAVLKTSSPSVEDATPALGVRTRSRASRGSTSSWTMGTDDSPNVTDDAADEIMDRIVKSATQVPSQRVVPRERKRSRANRKSLRRTLKSGLTPEEARALGLVGTSELQL

SEQ ID NO: 32730 - protein, 375 aa, Homo sapiens
  Payload ID: 6418
  Gene Symbol: FHOD3
  Gene Name: formin homology 2 domain containing 3
  ENSP ID: ENSP00000465843
  MOD_RES (1)..(1): Any amino acid
XAINIGLTVLPPPRTIKIAILNFDEYALNKEGIEKILTMIPTDEEKQKIQEAQLANPEIPLGSAEQFLLTLSSISELSARLHLWAFKMDYETTEKEVAEPLLDLKEGIDQLENNKTLGFILSTLLAIGNFLNGTNAKAFELSYLEKVPEVKDTVHKQSLLHHVCTMVVENFPDSSDLYSEIGAITRSAKVDFDQLQDNLCQMERRCKASWDHLKAIAKHEMKPVLKQRMSEFLKDCAERIIILKIVHRRIINRFHSFLLFMGHPPYAIREVNINKFCRIISEFALEYRTTRERVLQQKQKRANHRERNKTRGKMITDDPLVPGLWELMTRPMSQMMQLMRSWTASSSQPPKCPVSEWCRGRGNDPGPTGNLCEEP

SEQ ID NO: 32731 - protein, 1622 aa, Homo sapiens
  Payload ID: 6418
  Gene Symbol: FHOD3
  Gene Name: formin homology 2 domain containing 3
  Uniprot ID: Q2V2M9
  ENSP ID: ENSP00000466937
MATLACRVQFLDDTDPFNSTNFPEPSRPPLFTFREDLALGTQLAGVHRLLQAPHKLDDCTLQLSHNGAYLDLEATLAEQRDELEGFQDDAGRGKKHSIILRTQLSVRVHACIEKLYNSSGRDLRRALFSLKQIFQDDKDLVHEFVVAEGLTCLIKVGAEADQNYQNYILRALGQIMLYVDGMNGVINRNETIQWLYTLIGSKFRLVVKTALKLLLVFVEYSESNAPLLIQAVTAVDTKRGVKPWSNIMEILEEKDGVDTELLVYAMTLVNKTLSGLPDQDTFYDVVDCLEELGIAAVSQRHLNKKGTDLDLVEQLNIYEVALRHEDGDETTEPPPSGCRDRRRASVCSSGGGEHRGLDRRRSRRHSVQSIKSTLSAPTSPCSQSAPSFKPNQVRDLREKEEEEEEEQPITEPSSEEEREDDASCQGKDSKVGAASGQSPTGRDAAPKSSALPAVSNASSQGKPLLVGTAGGTTWHSGSSGSEATPSALLSPPASAARPSSATPGSLKVSPTIDKLPYVPHSPFHLFSYDFEDSSLSTKEKEAESQKENSSSDSFSLSTYSASEPYHFRSFSSNRYSNFGNNSYHSSRPSSGSSVPTTPTSSVSPPQEARLERSSPSGLLTSSFRQHQESLAAERERRRQEREERLQRIEREERNKFSRDYLDKREEQRQAREERYKYLEQLAAEEHEKELRSRSVSRGRADLSLDLTSPAAPACLAPLSHSPSSSDSQEALTVSASSPGTPHHPQASAGDPEPESEAEPEAEAGAGQVADEAGQDIASAHEGAETEVEQALEQEPEERASLSEKERQNEGVNERDNCSASSVSSSSSTLEREEKEDKLSRDRTTGLWPAGVQDAGVNGQCGDILTNKRFMLDMLYAHNRKSPDDEEKGDGEAGRTQQEAEAVASLATRISTLQANSQTQDESVRRVDVGCLDNRGSVKAFAEKFNSGDLGRGSISPDAEPNDKVPETAPVQPKTESDYIWDQLMANPRELRIQDMDFTDLGEEDDIDVLDVDLGHREAPGPPPPPPPTFLGLPPPPPPPLLDSIPPPPVPGNLLVPPPPVFNAPQGLGWSQVPRGQPTFTKKKKTIRLFWNEVRPFDWPCKNNRRCREFLWSKLEPIKVDTSRLEHLFESKSKELSVSKKTAADGKRQEIIVLDSKRSNAINIGLTVLPPPRTIKIAILNFDEYALNKEGIEKILTMIPTDEEKQKIQEAQLANPEIPLGSAEQFLLTLSSISELSARLHLWAFKMDYETTEKEVAEPLLDLKEGIDQLENNKTLGFILSTLLAIGNFLNGTNAKAFELSYLEKVPEVKDTVHKQSLLHHVCTMVVENFPDSSDLYSEIGAITRSAKVDFDQLQDNLCQMERRCKASWDHLKAIAKHEMKPVLKQRMSEFLKDCAERIIILKIVHRRIINRFHSFLLFMGHPPYAIREVNINKFCRIISEFALEYRTTRERVLQQKQKRANHRERNKTRGKMITDTDEEEEVESGKFSGSSPAPPSQPQGLSYAEDAAEHENMKAVLKTSSPSVEDATPALGVRTRSRASRGSTSSWTMGTDDSPNVTDDAADEIMDRIVKSATQVPSQRVVPRERKRSRANRKSLRRTLKSGLTPEEARALGLVGTSELQL

SEQ ID NO: 32732 - protein, 635 aa, Homo sapiens
  Payload ID: 6418
  Gene Symbol: FHOD3
  Gene Name: formin homology 2 domain containing 3
  ENSP ID: ENSP00000467195
MAMRPRSHPPVGAGTGGGPACVPVAEASTGAWTAEGAAGTRCRASRAPCRPPPVPAPSQLPASSPTKCEICVKNTAILAITLITPQDPHLDPVPRGQPTFTKKKKTIRLFWNEVRPFDWPCKNNRRCREFLWSKLEPIKVDTSRLEHLFESKSKELSVSKKTAADGKRQEIIVLDSKRSNAINIGLTVLPPPRTIKIAILNFDEYALNKEGIEKILTMIPTDEEKQKIQEAQLANPEIPLGSAEQFLLTLSSISELSARLHLWAFKMDYETTEKEVAEPLLDLKEGIDQLENNKTLGFILSTLLAIGNFLNGTNAKAFELSYLEKVPEVKDTVHKQSLLHHVCTMVVENFPDSSDLYSEIGAITRSAKVDFDQLQDNLCQMERRCKASWDHLKAIAKHEMKPVLKQRMSEFLKDCAERIIILKIVHRRIINRFHSFLLFMGHPPYAIREVNINKFCRIISEFALEYRTTRERVLQQKQKRANHRERNKTRGKMITDSGKFSGSSPAPPSQPQGLSYAEDAAEHENMKAVLKTSSPSVEDATPALGVRTRSRASRGSTSSWTMGTDDSPNVTDDAADEIMDRIVKSATQVPSQRVVPRERKRSRANRKSLRRTLKSGLTPEEARALGLVGTSELQL

SEQ ID NO: 32733 - protein, 528 aa, Homo sapiens
  Payload ID: 6418
  Gene Symbol: FHOD3
  Gene Name: formin homology 2 domain containing 3
  ENSP ID: ENSP00000467462
RLFWNEVRPFDWPCKNNRRCREFLWSKLEPIKVDTSRLEHLFESKSKELSVSKKTAADGKRQEIIVLDSKRSNAINIGLTVLPPPRTIKIAILNFDEYALNKEGIEKILTMIPTDEEKQKIQEAQLANPEIPLGSAEQFLLTLSSISELSARLHLWAFKMDYETTEKEVAEPLLDLKEGIDQLENNKTLGFILSTLLAIGNFLNGTNAKAFELSYLEKVPEVKDTVHKQSLLHHVCTMVVENFPDSSDLYSEIGAITRSAKVDFDQLQDNLCQMERRCKASWDHLKAIAKHEMKPVLKQRMSEFLKDCAERIIILKIVHRRIINRFHSFLLFMGHPPYAIREVNINKFCRIISEFALEYRTTRERVLQQKQKRANHRERNKTRGKMITDSGKFSGSSPAPPSQPQGLSYAEDAAEHENMKAVLKTSSPSVEDATPALGVRTRSRASRGSTSSWTMGTDDSPNVTDDAADEIMDRIVKSATQVPSQRVVPRERKRSRANRKSLRRTLKSGLTPEEARALGLVGTSELQL

SEQ ID NO: 32734 - protein, 1200 aa, Homo sapiens
  Payload ID: 6418
  Gene Symbol: FHOD3
  Gene Name: formin homology 2 domain containing 3
  ENSP ID: ENSP00000468163
  MOD_RES (1)..(1): Any amino acid
XFRLVVKTALKLLLVFVEYSESNAPLLIQAVTAVDTKRGVKPWSNIMEILEEKDGVDTELLVYAMTLVNKTLSGLPDQDTFYDVVDCLEELGIAAVSQRHLNKKGTDLDLVEQLNIYEVALRHEDGDETTEPPPSGCRDRRRASVCSSGGGEHRGLDRRRSRRHSVQSIKSTLSAPTSPCSQSAPSFKPNQVRDLREKSSPSGLLTSSFRQHQESLAAERERRRQEREERLQRIEREERNKFSRDYLDKREEQRQAREERYKYLEQLAAEEHEKELRSRSVSRGRADLSLDLTSPAAPACLAPLSHSPSSSDSQEALTVSASSPGTPHHPQASAGDPEPESEAEPEAEAGAGQVADEAGQDIASAHEGAETEVEQALEQEPEERASLSEKERQNEGVNERDNCSASSVSSSSSTLEREEKEDKLSRDRTTGLWPAGVQDAGVNGQCGDILTNKRFMLDMLYAHNRKSPDDEEKGDGEAGRTQQEAEAVASLATRISTLQANSQTQDESVRRVDVGCLDNRGSVKAFAEKFNSGDLGRGSISPDAEPNDKVPETAPVQPKTESDYIWDQLMANPRELRIQDMDFTDLGEEDDIDVLDVDLGHREAPGPPPPPPPTFLGLPPPPPPPLLDSIPPPPVPGNLLVPPPPVFNAPQGLGWSQVPRGQPTFTKKKKTIRLFWNEVRPFDWPCKNNRRCREFLWSKLEPIKVDTSRLEHLFESKSKELSVSKKTAADGKRQEIIVLDSKRSNAINIGLTVLPPPRTIKIAILNFDEYALNKEGIEKILTMIPTDEEKQKIQEAQLANPEIPLGSAEQFLLTLSSISELSARLHLWAFKMDYETTEKEVAEPLLDLKEGIDQLENNKTLGFILSTLLAIGNFLNGTNAKAFELSYLEKVPEVKDTVHKQSLLHHVCTMVVENFPDSSDLYSEIGAITRSAKVDFDQLQDNLCQMERRCKASWDHLKAIAKHEMKPVLKQRMSEFLKDCAERIIILKIVHRRIINRFHSFLLFMGHPPYAIREVNINKFCRIISEFALEYRTTRERVLQQKQKRANHRERNKTRGKMITDSGKFSGSSPAPPSQPQGLSYAEDAAEHENMKAVLKTSSPSVEDATPALGVRTRSRASRGSTSSWTMGTDDSPNVTDDAADEIMDRIVKSATQVPSQRVVPRERKRSRANRKSLRRTLKSGLTPEEARALGLVGTSELQL

SEQ ID NO: 32735 - protein, 626 aa, Homo sapiens
  Payload ID: 6419
  Gene Symbol: FMNL1
  Gene Name: formin-like 1
  ENSP ID: ENSP00000327442
MGNAAGSAEQPAGPAAPPPKQHRFEKLMEYFRNEDSNIDFMVACMQFINIVVHSVENMNFRVFLQYEFTHLGLDLYLERLRLTESDKLQVQIQAYLDNIFDVGALLEDTETKNAVLEHMEELQEQVALLTERLRDAENESMAKIAELEKQLSQARKELETLRERFSESTAMGPSRRPPEPEKAPPAAPTRPSALELKVEELEEKGLIRILRGPGDAVSIEILPVAVATPSGGDAPTPGVPTGSPSPDLAPAAEPAPGAAPPPPPPPPGGPPDALGRRDSELGPGVKAKKPIQTKFRMPLLNWVALKPSQITGTVFTELNDEKVLQELDMSDFEEQFKTKSQGPSLDLSALKSKAAQKAPSKATLIEANRAKNLAITLRKGNLGAERICQAIEAYDLQALGLDFLELLMRFLPTEYERSLITRFEREQRPMEELSEEDRFMLCFSRIPRLPERMTTLTFLGNFPDTAQLLMPQLNAIIAASMSIKSSDKLRQILEIVLAFGNYMNSSKRGAAYGFRLQSLDALLEMKSTDRKQTLLHYLVKVIAEKYPQLTGFHSDLHFLDKAGSVSLDSVLADVRSLQRGLELTQREFVRQDDCMVLKEFLRANSPTMDKLLADSKTAQAVPTGGL

SEQ ID NO: 32736 - protein, 1100 aa, Homo sapiens
  Payload ID: 6419
  Gene Symbol: FMNL1
  Gene Name: formin-like 1
  Uniprot ID: O95466
  ENSP ID: ENSP00000329219
MGNAAGSAEQPAGPAAPPPKQPAPPKQPMPAAGELEERFNRALNCMNLPPDKVQLLSQYDNEKKWELICDQERFQVKNPPAAYIQKLKSYVDTGGVSRKVAADWMSNLGFKRRVQESTQVLRELETSLRTNHIGWVQEFLNEENRGLDVLLEYLAFAQCSVTYDMESTDNGASNSEKNKPLEQSVEDLSKGPPSSVPKSRHLTIKLTPAHSRKALRNSRIVSQKDDVHVCIMCLRAIMNYQSGFSLVMNHPACVNEIALSLNNKNPRTKALVLELLAAVCLVRGGHDIILAAFDNFKEVCGEQHRFEKLMEYFRNEDSNIDFMVACMQFINIVVHSVENMNFRVFLQYEFTHLGLDLYLERLRLTESDKLQVQIQAYLDNIFDVGALLEDTETKNAVLEHMEELQEQVALLTERLRDAENESMAKIAELEKQLSQARKELETLRERFSESTAMGPSRRPPEPEKAPPAAPTRPSALELKVEELEEKGLIRILRGPGDAVSIEILPVAVATPSGGDAPTPGVPTGSPSPDLAPAAEPAPGAAPPPPPPLPGLPSPQEAPPSAPPQAPPLPGSPEPPPAPPLPGDLPPPPPPPPPPPGTDGPVPPPPPPPPPPPGGPPDALGRRDSELGPGVKAKKPIQTKFRMPLLNWVALKPSQITGTVFTELNDEKVLQELDMSDFEEQFKTKSQGPSLDLSALKSKAAQKAPSKATLIEANRAKNLAITLRKGNLGAERICQAIEAYDLQALGLDFLELLMRFLPTEYERSLITRFEREQRPMEELSEEDRFMLCFSRIPRLPERMTTLTFLGNFPDTAQLLMPQLNAIIAASMSIKSSDKLRQILEIVLAFGNYMNSSKRGAAYGFRLQSLDALLEMKSTDRKQTLLHYLVKVIAEKYPQLTGFHSDLHFLDKAGSVSLDSVLADVRSLQRGLELTQREFVRQDDCMVLKEFLRANSPTMDKLLADSKTAQEAFESVVEYFGENPKTTSPGLFFSLFSRFIKAYKKAEQEVEQWKKEAAAQEAGADTPGKGEPPAPKSPPKARRPQMDLISELKRRQQKEPLIYESDRDGAIEDIITVIKTVPFTARTGKRTSRLLCEASLGEEMPL

SEQ ID NO: 32737 - protein, 488 aa, Homo sapiens
  Payload ID: 6419
  Gene Symbol: FMNL1
  Gene Name: formin-like 1
  ENSP ID: ENSP00000465137
ELDMSDFEEQFKTKSQGPSLDLSALKSKAAQKAPSKATLIEANRAKNLAITLRKGNLGAERICQAIEAYDLQALGLDFLELLMRFLPTEYERSLITRFEREQRPMEELSEEDRFMLCFSRIPRLPERMTTLTFLGNFPDTAQLLMPQLNAIIAASMSIKSSDKLRQILEIVLAFGNYMNSSKRGAAYGFRLQSLDALLEMKSTDRKQTLLHYLVKVIAEKYPQLTGFHSDLHFLDKAGSVSLDSVLADVRSLQRGLELTQREFVRQDDCMVLKEFLRANSPTMDKLLADSKTAQEAFESVVEYFGENPKTTSPGLFFSLFSRFIKAYKKAEQEVEQWKKEAAAQEAGADTPGKGEPPAPKSPPKARRPQMDLISELKRRQQKEPLIYESDRDGAIEDIITGKGLARPWSYPQSVLLCFLLTQCAILWGTGCHTASCYLFCFSFLFPFSTPLHLPHPHSVIKTVPFTARTGKRTSRLLCEASLGEEMPL

SEQ ID NO: 32738 - protein, 682 aa, Homo sapiens
  Payload ID: 6419
  Gene Symbol: FMNL1
  Gene Name: formin-like 1
  ENSP ID: ENSP00000465474
MAKIAELEKQLSQARKELETLRERFSESTAMGPSRRPPEPEKAPPAAPTRPSALELKVEELEEKGLIRILRGPGDAVSIEILPVAVATPSGGDAPTPGVPTGSPSPDLAPAAEPAPGAAPPPPPPLPGLPSPQEAPPSAPPQAPPLPGSPEPPPAPPLPGDLPPPPPPPPPPPGTDGPVPPPPPPPPPPPGGPPDALGRRDSELGPGVKAKKPIQTKFRMPLLNWVALKPSQITGTVFTELNDEKVLQELDMSDFEEQFKTKSQGPSLDLSALKSKAAQKAPSKATLIEANRAKNLAITLRKGNLGAERICQAIEAYDLQALGLDFLELLMRFLPTEYERSLITRFEREQRPMEELSEEDRFMLCFSRIPRLPERMTTLTFLGNFPDTAQLLMPQLNAIIAASMSIKSSDKLRQILEIVLAFGNYMNSSKRGAAYGFRLQSLDALLEMKSTDRKQTLLHYLVKVIAEKYPQLTGFHSDLHFLDKAGSVSLDSVLADVRSLQRGLELTQREFVRQDDCMVLKEFLRANSPTMDKLLADSKTAQEAFESVVEYFGENPKTTSPGLFFSLFSRFIKAYKKAEQEVEQWKKEAAAQEAGADTPGKGEPPAPKSPPKARRPQMDLISELKRRQQKEPLIYESDRDGAIEDIITDLRNQPYIRADTGRRSARRRPPGPPLQVTSDLSL

SEQ ID NO: 32739 - protein, 127 aa, Homo sapiens
  Payload ID: 6419
  Gene Symbol: FMNL1
  Gene Name: formin-like 1
  ENSP ID: ENSP00000466711
VRQDDCMVLKEFLRANSPTMDKLLADSKTAQKAEQEVEQWKKEAAAQEAGADTPGKGEPPAPKVGNCSWAWYWAAGMHGISSPSGATPTPSLLQTDPAPGAWDGKGFFLLKPAVLAVGDQADIPGFW

SEQ ID NO: 32740 - protein, 151 aa, Homo sapiens
  Payload ID: 6419
  Gene Symbol: FMNL1
  Gene Name: formin-like 1
  ENSP ID: ENSP00000468301
  MOD_RES (1)..(1): Any amino acid
XRQDDCMVLKEFLRANSPTMDKLLADSKTAQKAEQEVEQWKKEAAAQEAGADTPGKGEPPAPKSPPKARRPQMDLISELKRRQQKEPLIYESDRDGAIEDIITGKGLARPWSYPQSVLLCFLLTQCAILWGTGCHTASCYLFCFSFLFPFS

SEQ ID NO: 32741 - protein, 1092 aa, Homo sapiens
  Payload ID: 6420
  Gene Symbol: FMNL2
  Gene Name: formin-like 2
  Uniprot ID: Q96PY5
  ENSP ID: ENSP00000288670
MGNAGSMDSQQTDFRAHNVPLKLPMPEPGELEERFAIVLNAMNLPPDKARLLRQYDNEKKWELICDQERFQVKNPPHTYIQKLKGYLDPAVTRKKFRRRVQESTQVLRELEISLRTNHIGWVREFLNEENKGLDVLVEYLSFAQYAVTFDFESVESTVESSVDKSKPWSRSIEDLHRGSNLPSPVGNSVSRSGRHSALRYNTLPSRRTLKNSRLVSKKDDVHVCIMCLRAIMNYQYGFNMVMSHPHAVNEIALSLNNKNPRTKALVLELLAAVCLVRGGHEIILSAFDNFKEVCGEKQRFEKLMEHFRNEDNNIDFMVASMQFINIVVHSVEDMNFRVHLQYEFTKLGLDEYLDKLKHTESDKLQVQIQAYLDNVFDVGALLEDAETKNAALERVEELEENISHLSEKLQDTENEAMSKIVELEKQLMQRNKELDVVREIYKDANTQVHTLRKMVKEKEEAIQRQSTLEKKIHELEKQGTIKIQKKGDGDIAILPVVASGTLSMGSEVVAGNSVGPTMGAASSGPLPPPPPPLPPSSDTPETVQNGPVTPPMPPPPPPPPPPPPPPPPPPPPPLPGPAAETVPAPPLAPPLPSAPPLPGTSSPTVVFNSGLAAVKIKKPIKTKFRMPVFNWVALKPNQINGTVFNEIDDERILEDLNVDEFEEIFKTKAQGPAIDLSSSKQKIPQKGSNKVTLLEANRAKNLAITLRKAGKTADEICKAIHVFDLKTLPVDFVECLMRFLPTENEVKVLRLYERERKPLENLSDEDRFMMQFSKIERLMQKMTIMAFIGNFAESIQMLTPQLHAIIAASVSIKSSQKLKKILEIILALGNYMNSSKRGAVYGFKLQSLDLLLDTKSTDRKQTLLHYISNVVKEKYHQVSLFYNELHYVEKAAAVSLENVLLDVKELQRGMDLTKREYTMHDHNTLLKEFILNNEGKLKKLQDDAKIAQDAFDDVVKYFGENPKTTPPSVFFPVFVRFVKAYKQAEEENELRKKQEQALMEKLLEQEALMEQQDPKSPSHKSKRQQQELIAELRRRQVKDNRHVYEGKDGAIEDIITDLRNQPYRRADAVRRSVRRRFDDQNLRSVNGAEITM

SEQ ID NO: 32742 - protein, 461 aa, Homo sapiens
  Payload ID: 6420
  Gene Symbol: FMNL2
  Gene Name: formin-like 2
  ENSP ID: ENSP00000418959
MPVFNWVALKPNQINGTVFNEIDDERILEDLNVDEFEEIFKTKAQGPAIDLSSSKQKIPQKGSNKVTLLEANRAKNLAITLRKAGKTADEICKAIHVFDLKTLPVDFVECLMRFLPTENEVKVLRLYERERKPLENLSDEDRFMMQFSKIERLMQKMTIMAFIGNFAESIQMLTPQLHAIIAASVSIKSSQKLKKILEIILALGNYMNSSKRGAVYGFKLQSLDLLLDTKSTDRKQTLLHYISNVVKEKYHQVSLFYNELHYVEKAAAVSLENVLLDVKELQRGMDLTKREYTMHDHNTLLKEFILNNEGKLKKLQDDAKIAQDAFDDVVKYFGENPKTTPPSVFFPVFVRFVKAYKQAEEENELRKKQEQALMEKLLEQEALMEQQDPKSPSHKSKRQQQELIAELRRRQVKDNRHVYEGKDGAIEDIITVLKTVPFTARTAKRGSRFFCEPVLTEEYHY

SEQ ID NO: 32743 - protein, 1027 aa, Homo sapiens
  Payload ID: 6421
  Gene Symbol: FMNL3
  Gene Name: formin-like 3
  Uniprot ID: Q8IVF7
  ENSP ID: ENSP00000335655
MGNLESAEGVPGEPPSVPLLLPPGKMPMPEPCELEERFALVLSSMNLPPDKARLLRQYDNEKKWDLICDQERFQVKNPPHTYIQKLQSFLDPSVTRKKFRRRVQESTKVLRELEISLRTNHIGWVREFLNDENKGLDVLVDYLSFAQCSVMFDFEGLESGDDGAFDKLRSWSRSIEDLQPPSALSAPFTNSLARSARQSVLRYSTLPGRRALKNSRLVSQKDDVHVCILCLRAIMNYQYGFNLVMSHPHAVNEIALSLNNKNPRTKALVLELLAAVCLVRGGHEIILAAFDNFKEVCKELHRFEKLMEYFRNEDSNIDFMVACMQFINIVVHSVEDMNFRVHLQYEFTKLGLEEFLQKSRHTESEKLQVQIQAYLDNVFDVGGLLEDAETKNVALEKVEELEEHVSHLTEKLLDLENENMMRVAELEKQLLQREKELESIKETYENTSHQVHTLRRLIKEKEEAFQRRCHLEPNVRGLESVDSEALARVGPAELSEGMPPSDLDLLAPAPPPEEVLPLPPPPAPPLPPPPPPLPDKCPPAPPLPGAAPSVVLTVGLSAIRIKKPIKTKFRLPVFNWTALKPNQISGTVFSELDDEKILEDLDLDKFEELFKTKAQGPALDLICSKNKTAQKAASKVTLLEANRAKNLAITLRKAGRSAEEICRAIHTFDLQTLPVDFVECLMRFLPTEAEVKLLRQYERERQPLEELAAEDRFMLLFSKVERLTQRMAGMAFLGNFQDNLQMLTPQLNAIIAASASVKSSQKLKQMLEIILALGNYMNSSKRGAVYGFKLQSLDLLLDTKSTDRKMTLLHFIALTVKEKYPDLANFWHELHFVEKAAAVSLENVLLDVKELGRGMELIRRECSIHDNSVLRNFLSTNEGKLDKLQRDAKTAEEAYNAVVRYFGESPKTTPPSVFFPVFVRFIRSYKEAEQENEARKKQEEVMREKQLAQEAKKLDAKTPSQRNKWQQQELIAELRRRQAKEHRPVYEGKDGTIEDIITGLHCQPMVVRHQARSAAPPSGPPRAPGPH

SEQ ID NO: 32744 - protein, 976 aa, Homo sapiens
  Payload ID: 6421
  Gene Symbol: FMNL3
  Gene Name: formin-like 3
  Uniprot ID: Q8IVF7
  ENSP ID: ENSP00000344311
MGNLESAEGVPGEPPSVPLLLPPGKMPMPEPCELEERFALVLSSMNLPPDKARLLRQYDNEKKWDLICDQERFQVKNPPHTYIQKLQSFLDPSVTRKKFRRRVQESTKVLRELEISLRTNHIGWVREFLNDENKGLDVLVDYLSFAQCSVMYSTLPGRRALKNSRLVSQKDDVHVCILCLRAIMNYQYGFNLVMSHPHAVNEIALSLNNKNPRTKALVLELLAAVCLVRGGHEIILAAFDNFKEVCKELHRFEKLMEYFRNEDSNIDFMVACMQFINIVVHSVEDMNFRVHLQYEFTKLGLEEFLQKSRHTESEKLQVQIQAYLDNVFDVGGLLEDAETKNVALEKVEELEEHVSHLTEKLLDLENENMMRVAELEKQLLQREKELESIKETYENTSHQVHTLRRLIKEKEEAFQRRCHLEPNVRGLESVDSEALARVGPAELSEGMPPSDLDLLAPAPPPEEVLPLPPPPAPPLPPPPPPLPDKCPPAPPLPGAAPSVVLTVGLSAIRIKKPIKTKFRLPVFNWTALKPNQISGTVFSELDDEKILEDLDLDKFEELFKTKAQGPALDLICSKNKTAQKAASKVTLLEANRAKNLAITLRKAGRSAEEICRAIHTFDLQTLPVDFVECLMRFLPTEAEVKLLRQYERERQPLEELAAEDRFMLLFSKVERLTQRMAGMAFLGNFQDNLQMLTPQLNAIIAASASVKSSQKLKQMLEIILALGNYMNSSKRGAVYGFKLQSLDLLLDTKSTDRKMTLLHFIALTVKEKYPDLANFWHELHFVEKAAAVSLENVLLDVKELGRGMELIRRECSIHDNSVLRNFLSTNEGKLDKLQRDAKTAEEAYNAVVRYFGESPKTTPPSVFFPVFVRFIRSYKEAEQENEARKKQEEVMREKQLAQEAKKLDAKTPSQRNKWQQQELIAELRRRQAKEHRPVYEGKDGTIEDIITGLHCQPMVVRHQARSAAPPSGPPRAPGPH

SEQ ID NO: 32745 - protein, 1027 aa, Homo sapiens
  Payload ID: 6421
  Gene Symbol: FMNL3
  Gene Name: formin-like 3
  ENSP ID: ENSP00000447479
MGNLESAEGVPGEPPSVPLLLPPGKMPMPEPCELEERFALVLSSMNLPPDKARLLRQYDNEKKWDLICDQERFQVKNPPHTYIQKLQSFLDPSVTRKKFRRRVQESTKVLRELEISLRTNHIGWVREFLNDENKGLDVLVDYLSFAQCSVMFDFEGLESGDDGAFDKLRSWSRSIEDLQPPSALSAPFTNSLARSARQSVLRYSTLPGRRALKNSRLVSQKDDVHVCILCLRAIMNYQYGFNLVMSHPHAVNEIALSLNNKNPRTKALVLELLAAVCLVRGGHEIILAAFDNFKEVCKELHRFEKLMEYFRNEDSNIDFMVACMQFINIVVHSVEDMNFRVHLQYEFTKLGLEEFLQKSRHTESEKLQVQIQAYLDNVFDVGGLLEDAETKNVALEKVEELEEHVSHLTEKLLDLENENMMRVAELEKQLLQREKELESIKETYENTSHQVHTLRRLIKEKEEAFQRRCHLEPNVRGLESVDSEALARVGPAELSEGMPPSDLDLLAPAPPPEEVLPLPPPPAPPLPPPPPPLPDKCPPAPPLPGAAPSVVLTVGLSAIRIKKPIKTKFRLPVFNWTALKPNQISGTVFSELDDEKILEDLDLDKFEELFKTKAQGPALDLICSKNKTAQKAASKVTLLEANRAKNLAITLRKAGRSAEEICRAIHTFDLQTLPVDFVECLMRFLPTEAEVKLLRQYERERQPLEELAAEDRFMLLFSKVERLTQRMAGMAFLGNFQDNLQMLTPQLNAIIAASASVKSSQKLKQMLEIILALGNYMNSSKRGAVYGFKLQSLDLLLDTKSTDRKMTLLHFIALTVKEKYPDLANFWHELHFVEKAAAVSLENVLLDVKELGRGMELIRRECSIHDNSVLRNFLSTNEGKLDKLQRDAKTAEAYNAVVRYFGESPKTTPPSVFFPVFVRFIRSYKEAEQENEARKKQEEVMREKQLAQEAKKLDAKTPSQRNKWQQQELIAELRRRQAKEHRPVYEGKDGTIEDIITVLKSVPFTARTAKRGSRFFCDAAHHDESNC

SEQ ID NO: 32746 - protein, 55 aa, Homo sapiens
  Payload ID: 6421
  Gene Symbol: FMNL3
  Gene Name: formin-like 3
  ENSP ID: ENSP00000448939
MLRRVREGIGKSSMNLPPDKARLLRQYDNEKKWDLICDQERFQVKNPPHTYIQKL

SEQ ID NO: 32747 - protein, 350 aa, Homo sapiens
  Payload ID: 6422
  Gene Symbol: FPR1
  Gene Name: formyl peptide receptor 1
  Uniprot ID: P21462
  ENSP ID: ENSP00000302707
METNSSLPTNISGGTPAVSAGYLFLDIITYLVFAVTFVLGVLGNGLVIWVAGFRMTHTVTTISYLNLAVADFCFTSTLPFFMVRKAMGGHWPFGWFLCKFVFTIVDINLFGSVFLIALIALDRCVCVLHPVWTQNHRTVSLAKKVIIGPWVMALLLTLPVIIRVTTVPGKTGTVACTFNFSPWTNDPKERINVAVAMLTVRGIIRFIIGFSAPMSIVAVSYGLIATKIHKQGLIKSSRPLRVLSFVAAAFFLCWSPYQVVALIATVRIRELLQGMYKEIGIAVDVTSALAFFNSCLNPMLYVFMGQDFRERLIHALPASLERALTEDSTQTSDTATNSTLPSAEVELQAK

SEQ ID NO: 32748 - protein, 39 aa, Homo sapiens
  Payload ID: 6422
  Gene Symbol: FPR1
  Gene Name: formyl peptide receptor 1
  ENSP ID: ENSP00000470750
METNSSLPTNISGGTPAVSAGYLFLDIITYLVFAVTFVL

SEQ ID NO: 32749 - protein, 350 aa, Homo sapiens; identical to SEQ ID NO: 32747
  Payload ID: 6422
  Gene Symbol: FPR1
  Gene Name: formyl peptide receptor 1
  Uniprot ID: P21462
  ENSP ID: ENSP00000471493

SEQ ID NO: 32750 - protein, 191 aa, Homo sapiens
  Payload ID: 6422
  Gene Symbol: FPR1
  Gene Name: formyl peptide receptor 1
  ENSP ID: ENSP00000472936
METNSSLPTNISGGTPAVSAGYLFLDIITYLVFAVTFVLGVLGNGLVIWVAGFRMTHTVTTISYLNLAVADFCFTSTLPFFMVRKAMGGHWPFGWFLCKFVFTIVDINLFGSVFLIALIALDRCVCVLHPVWTQNHRTVSLAKKVIIGPWVMALLLTLPVIIRVTTVPGKTGTVACTFNFSPWTNDPKERI

SEQ ID NO: 32751 - protein, 351 aa, Homo sapiens
  Payload ID: 6423
  Gene Symbol: FPR2
  Gene Name: formyl peptide receptor 2
  Uniprot ID: P25090
  ENSP ID: ENSP00000340191
METNFSTPLNEYEEVSYESAGYTVLRILPLVVLGVTFVLGVLGNGLVIWVAGFRMTRTVTTICYLNLALADFSFTATLPFLIVSMAMGEKWPFGWFLCKLIHIVVDINLFGSVFLIGFIALDRCICVLHPVWAQNHRTVSLAMKVIVGPWILALVLTLPVFLFLTTVTIPNGDTYCTFNFASWGGTPEERLKVAITMLTARGIIRFVIGFSLPMSIVAICYGLIAAKIHKKGMIKSSRPLRVLTAVVASFFICWFPFQLVALLGTVWLKEMLFYGKYKIIDILVNPTSSLAFFNSCLNPMLYVFVGQDFRERLIHSLPTSLERALSEDSAPTNDTAANSASPPAETELQAM

SEQ ID NO: 32752 - protein, 351 aa, Homo sapiens; identical to SEQ ID NO: 32751
  Payload ID: 6423
  Gene Symbol: FPR2
  Gene Name: formyl peptide receptor 2
  Uniprot ID: P25090
  ENSP ID: ENSP00000468876

SEQ ID NO: 32753 - protein, 351 aa, Homo sapiens; identical to SEQ ID NO: 32751
  Payload ID: 6423
  Gene Symbol: FPR2
  Gene Name: formyl peptide receptor 2
  Uniprot ID: P25090
  ENSP ID: ENSP00000468897

SEQ ID NO: 32754 - protein, 136 aa, Homo sapiens
  Payload ID: 6423
  Gene Symbol: FPR2
  Gene Name: formyl peptide receptor 2
  ENSP ID: ENSP00000469085
METNFSTPLNEYEEVSYESAGYTVLRILPLVVLGVTFVLGVLGNGLVIWVAGFRMTRTVTTICYLNLALADFSFTATLPFLIVSMAMGEKWPFGWFLCKLIHIVVDINLFGSVFLIGFIALDRCICVLHPVWAQNH

SEQ ID NO: 32755 - protein, 88 aa, Homo sapiens
  Payload ID: 6423
  Gene Symbol: FPR2
  Gene Name: formyl peptide receptor 2
  ENSP ID: ENSP00000470373
METNFSTPLNEYEEVSYESAGYTVLRILPLVVLGVTFVLGVLGNGLVIWVAGFRMTRTVTTICYLNLALADFSFTATLPFLIVSMAMG

SEQ ID NO: 32756 - protein, 124 aa, Homo sapiens
  Payload ID: 6423
  Gene Symbol: FPR2
  Gene Name: formyl peptide receptor 2
  ENSP ID: ENSP00000472259
METNFSTPLNEYEEVSYESAGYTVLRILPLVVLGVTFVLGVLGNGLVIWVAGFRMTRTVTTICYLNLALADFSFTATLPFLIVSMAMGEKWPFGWFLCKLIHIVVDINLFGSVFLIGFIALDRC

SEQ ID NO: 32757 - protein, 353 aa, Homo sapiens
  Payload ID: 6424
  Gene Symbol: FPR3
  Gene Name: formyl peptide receptor 3
  Uniprot ID: P25089
  ENSP ID: ENSP00000341821
METNFSIPLNETEEVLPEPAGHTVLWIFSLLVHGVTFVFGVLGNGLVIWVAGFRMTRTVNTICYLNLALADFSFSAILPFRMVSVAMREKWPFGSFLCKLVHVMIDINLFVSVYLITIIALDRCICVLHPAWAQNHRTMSLAKRVMTGLWIFTIVLTLPNFIFWTTISTTNGDTYCIFNFAFWGDTAVERLNVFITMAKVFLILHFIIGFSVPMSIITVCYGIIAAKIHRNHMIKSSRPLRVFAAVVASFFICWFPYELIGILMAVWLKEMLLNGKYKIILVLINPTSSLAFFNSCLNPILYVFMGRNFQERLIRSLPTSLERALTEVPDSAQTSNTDTTSASPPEETELQAM

SEQ ID NO: 32758 - protein, 353 aa, Homo sapiens; identical to SEQ ID NO: 32757
  Payload ID: 6424
  Gene Symbol: FPR3
  Gene Name: formyl peptide receptor 3
  Uniprot ID: P25089
  ENSP ID: ENSP00000470471

SEQ ID NO: 32759 - protein, 318 aa, Homo sapiens
  Payload ID: 6425
  Gene Symbol: FYTTD1
  Gene Name: forty-two-three domain containing 1
  Uniprot ID: Q96QD9
  ENSP ID: ENSP00000241502
MNRFGTRLVGATATSSPPPKARSNENLDKIDMSLDDIIKLNRKEGKKQNFPRLNRRLLQQSGAQQFRMRVRWGIQQNSGFGKTSLNRRGRVMPGKRRPNGVITGLAARKTTGIRKGISPMNRPPLSDKNIEQYFPVLKRKANLLRQNEGQRKPVAVLKRPSQLSRKNNIPANFTRSGNKLNHQKDTRQATFLFRRGLKVQAQLNTEQLLDDVVAKRTRQWRTSTTNGGILTVSIDNPGAVQCPVTQKPRLTRTAVPSFLTKREQSDVKKVPKGVPLQFDINSVGKQTGMTLNERFGILKEQRATLTYNKGGSRFVTVG

SEQ ID NO: 32760 - protein, 71 aa, Homo sapiens
  Payload ID: 6425
  Gene Symbol: FYTTD1
  Gene Name: forty-two-three domain containing 1
  ENSP ID: ENSP00000389557
MRVRWGIQQNSGFGKTSLNRRGRVMPGKRRPNGVITGLAARKTTGIRKGISPMNRPPLSDKNIEQYFPVLK

SEQ ID NO: 32761 - protein, 292 aa, Homo sapiens
  Payload ID: 6425
  Gene Symbol: FYTTD1
  Gene Name: forty-two-three domain containing 1
  Uniprot ID: Q96QD9
  ENSP ID: ENSP00000393746
MEPSVIMGNDIIKLNRKEGKKQNFPRLNRRLLQQSGAQQFRMRVRWGIQQNSGFGKTSLNRRGRVMPGKRRPNGVITGLAARKTTGIRKGISPMNRPPLSDKNIEQYFPVLKRKANLLRQNEGQRKPVAVLKRPSQLSRKNNIPANFTRSGNKLNHQKDTRQATFLFRRGLKVQAQLNTEQLLDDVVAKRTRQWRTSTTNGGILTVSIDNPGAVQCPVTQKPRLTRTAVPSFLTKREQSDVKKVPKGVPLQFDINSVGKQTGMTLNERFGILKEQRATLTYNKGGSRFVTVG

SEQ ID NO: 32762 - protein, 251 aa, Homo sapiens
  Payload ID: 6425
  Gene Symbol: FYTTD1
  Gene Name: forty-two-three domain containing 1
  Uniprot ID: Q96QD9
  ENSP ID: ENSP00000394631
MRVRWGIQQNSGFGKTSLNRRGRVMPGKRRPNGVITGLAARKTTGIRKGISPMNRPPLSDKNIEQYFPVLKRKANLLRQNEGQRKPVAVLKRPSQLSRKNNIPANFTRSGNKLNHQKDTRQATFLFRRGLKVQAQLNTEQLLDDVVAKRTRQWRTSTTNGGILTVSIDNPGAVQCPVTQKPRLTRTAVPSFLTKREQSDVKKVPKGVPLQFDINSVGKQTGMTLNERFGILKEQRATLTYNKGGSRFVTVG

SEQ ID NO: 32763 - protein, 176 aa, Homo sapiens
  Payload ID: 6425
  Gene Symbol: FYTTD1
  Gene Name: forty-two-three domain containing 1
  ENSP ID: ENSP00000399896
MRVRWGIQQNSGFGKTSLNRRGRVMPGKRRPNGVITGLAARKTTGIRKGISPMNRPPLSDKNIEQYFPVLKRKANLLRQNEGQRKPVAVLKRPSQLSRKNNIPANFTRSGNKLNHQKDTRQATFLFRRGLKVQAQLNTEQLLDDVVAKRTRQWRTSTTNGGILTVSIDNPGAVQCP

SEQ ID NO: 32764 - protein, 129 aa, Homo sapiens
  Payload ID: 6425
  Gene Symbol: FYTTD1
  Gene Name: forty-two-three domain containing 1
  Uniprot ID: Q96QD9
  ENSP ID: ENSP00000400191
MNRFGTRLVGATATSSPPPKARSNENLDKIDMSLDDIIKLNRKEGKKQNFPRLNRRLLQQSGAQQFRMRVRWGIQQNSGFGKTSLNRRGRVMPGKRRPNGVITGLAARKTTGIRKGISPMNRPPLSDKK

SEQ ID NO: 32765 - protein, 121 aa, Homo sapiens
  Payload ID: 6425
  Gene Symbol: FYTTD1
  Gene Name: forty-two-three domain containing 1
  ENSP ID: ENSP00000409257
MNRFGTRLVGATATSSPPPKARSNENLDKIDMSLDDIIKLNRKEGKKQNFPRLNRRLLQQSGAQQFRMRVRWGIQQNSDTKTLESSIVKHMKRFVLVIPALWEVRARGLLKPRTSGPAWAT

SEQ ID NO: 32766 - protein, 126 aa, Homo sapiens
  Payload ID: 6425
  Gene Symbol: FYTTD1
  Gene Name: forty-two-three domain containing 1
  ENSP ID: ENSP00000417742
GCVAVGAKGSCVPKYRGPVCSRRDSKDTEDYITEGIRFRDDIIKLNRKEGKKQNFPRLNRRLLQQSGAQQFRMRVRWGIQQNSDTKTLESSIVKHMKRFVLVIPALWEVRARGLLKPRTSGPAWAT

SEQ ID NO: 32767 - protein, 271 aa, Homo sapiens
  Payload ID: 6426
  Gene Symbol: FOSL1
  Gene Name: FOS-like antigen 1
  Uniprot ID: P15407
  ENSP ID: ENSP00000310170
MFRDFGEPGPSSGNGGGYGGPAQPPAAAQAAQQKFHLVPSINTMSGSQELQWMVQPHFLGPSSYPRPLTYPQYSPPQPRPGVIRALGPPPGVRRRPCEQISPEEEERRRVRRERNKLAAAKCRNRRKELTDFLQAETDKLEDEKSGLQREIEELQKQKERLELVLEAHRPICKIPEGAKEGDTGSTSGTSSPPAPCRPVPCISLSPGPVLEPEALHTPTLMTTPSLTPFTPSLVFTYPSTPEPCASAHRKSSSSSGDPSSDPLGSPTLLAL

SEQ ID NO: 32768 - protein, 169 aa, Homo sapiens
  Payload ID: 6426
  Gene Symbol: FOSL1
  Gene Name: FOS-like antigen 1
  Uniprot ID: P15407
  ENSP ID: ENSP00000393302
MFRDFGEPGPSSGNGGGYGGPAQPPAAAQAAQQETDKLEDEKSGLQREIEELQKQKERLELVLEAHRPICKIPEGAKEGDTGSTSGTSSPPAPCRPVPCISLSPGPVLEPEALHTPTLMTTPSLTPFTPSLVFTYPSTPEPCASAHRKSSSSSGDPSSDPLGSPTLLAL

SEQ ID NO: 32769 - protein, 135 aa, Homo sapiens
  Payload ID: 6426
  Gene Symbol: FOSL1
  Gene Name: FOS-like antigen 1
  ENSP ID: ENSP00000431594
MFRDFGEPGPSSGNGGGYGGPAQPPAAAQAAQQKFHLVPSINTMSGSQELQWMVQPHFLGPSSYPRPLTYPQYSPPQPRPGVIRALGPPPGVRRRPCEQPGGRGAPPSKARAEQAGCGQVQEPEEGTDRLPAGGD

SEQ ID NO: 32770 - protein, 12 aa, Homo sapiens
  Payload ID: 6426
  Gene Symbol: FOSL1
  Gene Name: FOS-like antigen 1
  ENSP ID: ENSP00000434350
MTTPSLTPFTPS

SEQ ID NO: 32771 - protein, 235 aa, Homo sapiens
  Payload ID: 6426
  Gene Symbol: FOSL1
  Gene Name: FOS-like antigen 1
  ENSP ID: ENSP00000436276
MFRDFGEPGPSSGNGGGYGGPAQPPAAAQAAQQKFHLVPSINTMSGSQELQWMVQPHFLGPSSYPRPLTYPQYSPPQPRPGVIRALGPPPGVRRRPCEQETDKLEDEKSGLQREIEELQKQKERLELVLEAHRPICKIPEGAKEGDTGSTSGTSSPPAPCRPVPCISLSPGPVLEPEALHTPTLMTTPSLTPFTPSLVFTYPSTPEPCASAHRKSSSSSGDPSSDPLGSPTLLAL

SEQ ID NO: 32772 - protein, 326 aa, Homo sapiens
  Payload ID: 6427
  Gene Symbol: FOSL2
  Gene Name: FOS-like antigen 2
  Uniprot ID: P15408
  ENSP ID: ENSP00000264716
MYQDYPGNFDTSSRGSSGSPAHAESYSSGGGGQQKFRVDMPGSGSAFIPTINAITTSQDLQWMVQPTVITSMSNPYPRSHPYSPLPGLASVPGHMALPRPGVIKTIGTTVGRRRRDEQLSPEEEEKRRIRRERNKLAAAKCRNRRRELTEKLQAETEELEEEKSGLQKEIAELQKEKEKLEFMLVAHGPVCKISPEERRSPPAPGLQPMRSGGGSVGAVVVKQEPLEEDSPSSSSAGLDKAQRSVIKPISIAGGFYGEEPLHTPIVVTSTPAVTPGTSNLVFTYPSVLEQESPASPSESCSKAHRRSSSSGDQSSDSLNSPTLLAL

SEQ ID NO: 32773 - protein, 318 aa, Homo sapiens
  Payload ID: 6427
  Gene Symbol: FOSL2
  Gene Name: FOS-like antigen 2
  Uniprot ID: P15408
  ENSP ID: ENSP00000368939
MVQGWRIKSKFRVDMPGSGSAFIPTINAITTSQDLQWMVQPTVITSMSNPYPRSHPYSPLPGLASVPGHMALPRPGVIKTIGTTVGRRRRDEQLSPEEEEKRRIRRERNKLAAAKCRNRRRELTEKLQAIGPWQVAVPHIPLFPWQETEELEEEKSGLQKEIAELQKEKEKLEFMLVAHGPVCKISPEERRSPPAPGLQPMRSGGGSVGAVVVKQEPLEEDSPSSSSAGLDKAQRSVIKPISIAGGFYGEEPLHTPIVVTSTPAVTPGTSNLVFTYPSVLEQESPASPSESCSKAHRRSSSSGDQSSDSLNSPTLLAL

SEQ ID NO: 32774 - protein, 202 aa, Homo sapiens
  Payload ID: 6427
  Gene Symbol: FOSL2
  Gene Name: FOS-like antigen 2
  ENSP ID: ENSP00000396497
MPGSGSAFIPTINAITTSQDLQWMVQPTVITSMSNPYPRSHPYSPLPGLASVPGHMALPRPGVIKTIGTTVGRRRRDEQLSPEEEEKRRIRRERNKLAAAKCRNRRRELTEKLQAETEELEEEKSGLQKEIAELQKEKEKLEFMLVAHGPVCKISPEERRSPPAPGLQPMRSGGGSVGAVVVKQEPLEEDSPSSSSAGLDKA

SEQ ID NO: 32775 - protein, 323 aa, Homo sapiens
  Payload ID: 6428
  Gene Symbol: FHL1
  Gene Name: four and a half LIM domains 1
  Uniprot ID: Q13642
  ENSP ID: ENSP00000071281
MAEKFDCHYCRDPLQGKKYVQKDGHHCCLKCFDKFCANTCVECRKPIGADSKEVHYKNRFWHDTCFRCAKCLHPLANETFVAKDNKILCNKCTTREDSPKCKGCFKAIVAGDQNVEYKGTVWHKDCFTCSNCKQVIGTGSFFPKGEDFYCVTCHETKFAKHCVKCNKAITSGGITYQDQPWHADCFVCVTCSKKLAGQRFTAVEDQYYCVDCYKNFVAKKCAGCKNPITGKRTVSRVSHPVSKARKPPVCHGKRLPLTLFPSANLRGRHPGGERTCPSWVVVLYRKNRSLAAPRGPGLVKAPVWWPMKDNPGTTTASTAKNAP

SEQ ID NO: 32776 - protein, 257 aa, Homo sapiens
  Payload ID: 6428
  Gene Symbol: FHL1
  Gene Name: four and a half LIM domains 1
  ENSP ID: ENSP00000359708
MAEKFDCHYCRDPLQGKKYVQKDGHHCCLKCFDKFCANTCVECRKPIGADSKEVHYKNRFWHDTCFRCAKCLHPLANETFVAKDNKILCNKCTTREDSPKCKGCFKAIVAGDQNVEYKGTVWHKDCFTCSNCKQVIGTGSFFPKGEDFYCVTCHETKFAKHCVKCNKAITSGGITYQDQPWHADCFVCVTCSKKLAGQRFTAVEDQYYCVDCYKNFVAKKCAGCKNPITGFGKGSSVVAYEGQSWHDYCFHCKKCSV

SEQ ID NO: 32777 - protein, 210 aa, Homo sapiens
  Payload ID: 6428
  Gene Symbol: FHL1
  Gene Name: four and a half LIM domains 1
  ENSP ID: ENSP00000359710
MASHRHSGPSSYKVGTMAEKFDCHYCRDPLQGKKYVQKDGHHCCLKCFDKFCANTCVECRKPIGADSKEVHYKNRFWHDTCFRCAKCLHPLANETFVAKDNKILCNKCTTREDSPKCKGCFKAIVAGDQNVEYKGTVWHKDCFTCSNCKQVIGTGSFFPKGEDFYCVTCHETKFAKHCVKCNKGLVKAPVWWPMKDNPGTTTASTAKNAP

SEQ ID NO: 32778 - protein, 296 aa, Homo sapiens
  Payload ID: 6428
  Gene Symbol: FHL1
  Gene Name: four and a half LIM domains 1
  Uniprot ID: Q13642
  ENSP ID: ENSP00000359717
MASHRHSGPSSYKVGTMAEKFDCHYCRDPLQGKKYVQKDGHHCCLKCFDKFCANTCVECRKPIGADSKEVHYKNRFWHDTCFRCAKCLHPLANETFVAKDNKILCNKCTTREDSPKCKGCFKAIVAGDQNVEYKGTVWHKDCFTCSNCKQVIGTGSFFPKGEDFYCVTCHETKFAKHCVKCNKAITSGGITYQDQPWHADCFVCVTCSKKLAGQRFTAVEDQYYCVDCYKNFVAKKCAGCKNPITGFGKGSSVVAYEGQSWHDYCFHCKKCSVNLANKRFVFHQEQVYCPDCAKKL

SEQ ID NO: 32779 - protein, 280 aa, Homo sapiens
  Payload ID: 6428
  Gene Symbol: FHL1
  Gene Name: four and a half LIM domains 1
  Uniprot ID: Q13642
  ENSP ID: ENSP00000359724
MAEKFDCHYCRDPLQGKKYVQKDGHHCCLKCFDKFCANTCVECRKPIGADSKEVHYKNRFWHDTCFRCAKCLHPLANETFVAKDNKILCNKCTTREDSPKCKGCFKAIVAGDQNVEYKGTVWHKDCFTCSNCKQVIGTGSFFPKGEDFYCVTCHETKFAKHCVKCNKAITSGGITYQDQPWHADCFVCVTCSKKLAGQRFTAVEDQYYCVDCYKNFVAKKCAGCKNPITGFGKGSSVVAYEGQSWHDYCFHCKKCSVNLANKRFVFHQEQVYCPDCAKKL

SEQ ID NO: 32780 - protein, 280 aa, Homo sapiens; identical to SEQ ID NO: 32779
  Payload ID: 6428
  Gene Symbol: FHL1
  Gene Name: four and a half LIM domains 1
  Uniprot ID: Q13642
  ENSP ID: ENSP00000377709

SEQ ID NO: 32781 - protein, 323 aa, Homo sapiens; identical to SEQ ID NO: 32775
  Payload ID: 6428
  Gene Symbol: FHL1
  Gene Name: four and a half LIM domains 1
  Uniprot ID: Q13642
  ENSP ID: ENSP00000377710

SEQ ID NO: 32782 - protein, 155 aa, Homo sapiens
  Payload ID: 6428
  Gene Symbol: FHL1
  Gene Name: four and a half LIM domains 1
  ENSP ID: ENSP00000389920
MAEKFDCHYCRDPLQGKKYVQKDGHHCCLKCFDKFCANTCVECRKPIGADSKEVHYKNRFWHDTCFRCAKCLHPLANETFVAKDNKILCNKCTTREDSPKCKGCFKAIVAGDQNVEYKGTVWHKDCFTCSNCKQVIGTGSFFPKGEDFYCVTCHE

SEQ ID NO: 32783 - protein, 204 aa, Homo sapiens
  Payload ID: 6428
  Gene Symbol: FHL1
  Gene Name: four and a half LIM domains 1
  ENSP ID: ENSP00000391779
MAEKFDCHYCRDPLQGKKYVQKDGHHCCLKCFDKFCANTCVECRKPIGADSKEVHYKNRFWHDTCFRCAKCLHPLANETFVAKDNKILCNKCTTREDSPKCKGCFKAIVAGDQNVEYKGTVWHKDCFTCSNCKQVIGTGSFFPKGEDFYCVTCHETKFAKHCVKCNKAITSGGITYQDQPWHADCFVCVTCSKKLAGQRFTAVE

SEQ ID NO: 32784 - protein, 207 aa, Homo sapiens
  Payload ID: 6428
  Gene Symbol: FHL1
  Gene Name: four and a half LIM domains 1
  ENSP ID: ENSP00000408038
MAEKFDCHYCRDPLQGKKYVQKDGHHCCLKCFDKFCANTCVECRKPIGADSKEVHYKNRFWHDTCFRCAKCLHPLANETFVAKDNKILCNKCTTREDSPKCKGCFKAIVAGDQNVEYKGTVWHKDCFTCSNCKQVIGTGSFFPKGEDFYCVTCHETKFAKHCVKCNKAITSGGITYQDQPWHADCFVCVTCSKKLAGQRFTAVEDQY

SEQ ID NO: 32785 - protein, 205 aa, Homo sapiens
  Payload ID: 6428
  Gene Symbol: FHL1
  Gene Name: four and a half LIM domains 1
  ENSP ID: ENSP00000412642
MAEKFDCHYCRDPLQGKKYVQKDGHHCCLKCFDKFCANTCVECRKPIGADSKEVHYKNRFWHDTCFRCAKCLHPLANETFVAKDNKILCNKCTTREDSPKCKGCFKAIVAGDQNVEYKGTVWHKDCFTCSNCKQVIGTGSFFPKGEDFYCVTCHETKFAKHCVKCNKAITSGGITYQDQPWHADCFVCVTCSKKLAGQRFTAVED

SEQ ID NO: 32786 - protein, 207 aa, Homo sapiens; identical to SEQ ID NO: 32784
  Payload ID: 6428
  Gene Symbol: FHL1
  Gene Name: four and a half LIM domains 1
  ENSP ID: ENSP00000413798

SEQ ID NO: 32787 - protein, 141 aa, Homo sapiens
  Payload ID: 6428
  Gene Symbol: FHL1
  Gene Name: four and a half LIM domains 1
  ENSP ID: ENSP00000414604
MAEKFDCHYCRDPLQGKKYVQKDGHHCCLKCFDKFCANTCVECRKPIGADSKEVHYKNRFWHDTCFRCAKCLHPLANETFVAKDNKILCNKCTTREDSPKCKGCFKAIVAGDQNVEYKGTVWHKDCFTCSNCKQVIGTGSF

SEQ ID NO: 32788 - protein, 309 aa, Homo sapiens
  Payload ID: 6428
  Gene Symbol: FHL1
  Gene Name: four and a half LIM domains 1
  Uniprot ID: Q13642
  ENSP ID: ENSP00000437673
MTFYVASLALELIWMLSSPAGPSSYKVGTMAEKFDCHYCRDPLQGKKYVQKDGHHCCLKCFDKFCANTCVECRKPIGADSKEVHYKNRFWHDTCFRCAKCLHPLANETFVAKDNKILCNKCTTREDSPKCKGCFKAIVAGDQNVEYKGTVWHKDCFTCSNCKQVIGTGSFFPKGEDFYCVTCHETKFAKHCVKCNKAITSGGITYQDQPWHADCFVCVTCSKKLAGQRFTAVEDQYYCVDCYKNFVAKKCAGCKNPITGFGKGSSVVAYEGQSWHDYCFHCKKCSVNLANKRFVFHQEQVYCPDCAKKL

SEQ ID NO: 32789 - protein, 280 aa, Homo sapiens; identical to SEQ ID NO: 32779
  Payload ID: 6428
  Gene Symbol: FHL1
  Gene Name: four and a half LIM domains 1
  Uniprot ID: Q13642
  ENSP ID: ENSP00000443333

SEQ ID NO: 32790 - protein, 280 aa, Homo sapiens; identical to SEQ ID NO: 32779
  Payload ID: 6428
  Gene Symbol: FHL1
  Gene Name: four and a half LIM domains 1
  Uniprot ID: Q13642
  ENSP ID: ENSP00000444815

SEQ ID NO: 32791 - protein, 194 aa, Homo sapiens
  Payload ID: 6428
  Gene Symbol: FHL1
  Gene Name: four and a half LIM domains 1
  Uniprot ID: Q13642
  ENSP ID: ENSP00000477609
MAEKFDCHYCRDPLQGKKYVQKDGHHCCLKCFDKFCANTCVECRKPIGADSKEVHYKNRFWHDTCFRCAKCLHPLANETFVAKDNKILCNKCTTREDSPKCKGCFKAIVAGDQNVEYKGTVWHKDCFTCSNCKQVIGTGSFFPKGEDFYCVTCHETKFAKHCVKCNKGLVKAPVWWPMKDNPGTTTASTAKNAP

SEQ ID NO: 32792 - protein, 280 aa, Homo sapiens; identical to SEQ ID NO: 32779
  Payload ID: 6428
  Gene Symbol: FHL1
  Gene Name: four and a half LIM domains 1
  Uniprot ID: Q13642
  ENSP ID: ENSP00000485897

SEQ ID NO: 32793 - protein, 66 aa, Homo sapiens
  Payload ID: 6428
  Gene Symbol: FHL1
  Gene Name: four and a half LIM domains 1
  ENSP ID: ENSP00000486134
MAEKFDCHYCRDPLQGKKYVQKDGHHCCLKCFDKFCANTCVECRKPIGADSKEVHYKNRFWHDTCF

SEQ ID NO: 32794 - protein, 152 aa, Homo sapiens
  Payload ID: 6428
  Gene Symbol: FHL1
  Gene Name: four and a half LIM domains 1
  ENSP ID: ENSP00000486436
MAEKFDCHYCRDPLQGKKYVQKDGHHCCLKCFDKFCANTCVECRKPIGADSKEVHYKNRFWHDTCFRCAKCLHPLANETFVAKDNKILCNKCTTREDSPKCKGCFKAIVAGDQNVEYKGTVWHKDCFTCSNCKQVIGTGSFFPKGEDFYCVT

SEQ ID NO: 32795 - protein, 280 aa, Homo sapiens; identical to SEQ ID NO: 32779
  Payload ID: 6428
  Gene Symbol: FHL1
  Gene Name: four and a half LIM domains 1
  Uniprot ID: Q13642
  ENSP ID: ENSP00000486439

SEQ ID NO: 32796 - protein, 147 aa, Homo sapiens
  Payload ID: 6428
  Gene Symbol: FHL1
  Gene Name: four and a half LIM domains 1
  ENSP ID: ENSP00000486631
MAEKFDCHYCRDPLQGKKYVQKDGHHCCLKCFDKFCANTCVECRKPIGADSKEVHYKNRFWHDTCFRCAKCLHPLANETFVAKDNKILCNKCTTREDSPKCKGCFKAIVAGDQNVEYKGTVWHKDCFTCSNCKQVIGTGSFFPKGED

SEQ ID NO: 32797 - protein, 280 aa, Homo sapiens; identical to SEQ ID NO: 32779
  Payload ID: 6428
  Gene Symbol: FHL1
  Gene Name: four and a half LIM domains 1
  Uniprot ID: Q13642
  ENSP ID: ENSP00000486782

SEQ ID NO: 32798 - protein, 175 aa, Homo sapiens
  Payload ID: 6428
  Gene Symbol: FHL1
  Gene Name: four and a half LIM domains 1
  ENSP ID: ENSP00000487030
MAEKFDCHYCRDPLQGKKYVQKDGHHCCLKCFDKFCANTCVECRKPIGADSKEVHYKNRFWHDTCFRCAKCLHPLANETFVAKDNKILCNKCTTREDSPKCKGCFKAIVAGDQNVEYKGTVWHKDCFTCSNCKQVIGTGSFFPKGEDFYCVTCHETKFAKHCVKCNKAITSGGIT

SEQ ID NO: 32799 - protein, 130 aa, Homo sapiens
  Payload ID: 6428
  Gene Symbol: FHL1
  Gene Name: four and a half LIM domains 1
  ENSP ID: ENSP00000487147
MAEKFDCHYCRDPLQGKKYVQKDGHHCCLKCFDKFCANTCVECRKPIGADSKEVHYKNRFWHDTCFRCAKCLHPLANETFVAKDNKILCNKCTTREDSPKCKGCFKAIVAGDQNVEYKGTVWHKDCFTCS

SEQ ID NO: 32800 - protein, 138 aa, Homo sapiens
  Payload ID: 6428
  Gene Symbol: FHL1
  Gene Name: four and a half LIM domains 1
  ENSP ID: ENSP00000487318
MAEKFDCHYCRDPLQGKKYVQKDGHHCCLKCFDKFCANTCVECRKPIGADSKEVHYKNRFWHDTCFRCAKCLHPLANETFVAKDNKILCNKCTTREDSPKCKGCFKAIVAGDQNVEYKGTVWHKDCFTCSNCKQVIGT

SEQ ID NO: 32801 - protein, 18 aa, Homo sapiens
  Payload ID: 6428
  Gene Symbol: FHL1
  Gene Name: four and a half LIM domains 1
  ENSP ID: ENSP00000487360
MAEKFDCHYCRDPLQGKK

SEQ ID NO: 32802 - protein, 78 aa, Homo sapiens
  Payload ID: 6428
  Gene Symbol: FHL1
  Gene Name: four and a half LIM domains 1
  ENSP ID: ENSP00000487377
MAEKFDCHYCRDPLQGKKYVQKDGHHCCLKCFDKFCANTCVECRKPIGADSKEVHYKNRFWHDTCFRCAKCLHPLANE

SEQ ID NO: 32803 - protein, 279 aa, Homo sapiens
  Payload ID: 6429
  Gene Symbol: FHL2
  Gene Name: four and a half LIM domains 2
  Uniprot ID: Q14192
  ENSP ID: ENSP00000322909
MTERFDCHHCNESLFGKKYILREESPYCVVCFETLFANTCEECGKPIGCDCKDLSYKDRHWHEACFHCSQCRNSLVDKPFAAKEDQLLCTDCYSNEYSSKCQECKKTIMPGTRKMEYKGSSWHETCFICHRCQQPIGTKSFIPKDNQNFCVPCYEKQHAMQCVQCKKPITTGGVTYREQPWHKECFVCTACRKQLSGQRFTARDDFAYCLNCFCDLYAKKCAGCTNPISGLGGTKYISFEERQWHNDCFNCKKCSLSLVGRGFLTERDDILCPDCGKDI

SEQ ID NO: 32804 - protein, 389 aa, Homo sapiens
  Payload ID: 6429
  Gene Symbol: FHL2
  Gene Name: four and a half LIM domains 2
  ENSP ID: ENSP00000344266
MTRRGFSRAGAAQRSTRPAAEPQPPAARALQPRPGVPGPLRCREYLQPPAPRREAEGLSHQGSEVGAESGARPKERGAEPELGRLWLRTVSSWRLGWHFDFGVAEKPGVKMTERFDCHHCNESLFGKKYILREESPYCVVCFETLFANTCEECGKPIGCDCKDLSYKDRHWHEACFHCSQCRNSLVDKPFAAKEDQLLCTDCYSNEYSSKCQECKKTIMPGTRKMEYKGSSWHETCFICHRCQQPIGTKSFIPKDNQNFCVPCYEKQHAMQCVQCKKPITTGGVTYREQPWHKECFVCTACRKQLSGQRFTARDDFAYCLNCFCDLYAKKCAGCTNPISGLGGTKYISFEERQWHNDCFNCKKCSLSLVGRGFLTERDDILCPDCGKDI

SEQ ID NO: 32805 - protein, 151 aa, Homo sapiens
  Payload ID: 6429
  Gene Symbol: FHL2
  Gene Name: four and a half LIM domains 2
  Uniprot ID: Q14192
  ENSP ID: ENSP00000350846
MTERFDCHHCNESLFGKKYILREESPYCVVCFETLFANTCEECGKPIGCDCKVPARWSTRAAAGMRPASSATAASSQLEPRVSSPKTIRISVCPAMRNNMPCSAFSAKSPSPREGSLTGSSPGTRSASCAPPAGSSCLGSASQLAMTLPTA

SEQ ID NO: 32806 - protein, 279 aa, Homo sapiens; identical to SEQ ID NO: 32803
  Payload ID: 6429
  Gene Symbol: FHL2
  Gene Name: four and a half LIM domains 2
  Uniprot ID: Q14192
  ENSP ID: ENSP00000377020

SEQ ID NO: 32807 - protein, 279 aa, Homo sapiens; identical to SEQ ID NO: 32803
  Payload ID: 6429
  Gene Symbol: FHL2
  Gene Name: four and a half LIM domains 2
  Uniprot ID: Q14192
  ENSP ID: ENSP00000377021

SEQ ID NO: 32808 - protein, 279 aa, Homo sapiens; identical to SEQ ID NO: 32803
  Payload ID: 6429
  Gene Symbol: FHL2
  Gene Name: four and a half LIM domains 2
  Uniprot ID: Q14192
  ENSP ID: ENSP00000386633

SEQ ID NO: 32809 - protein, 279 aa, Homo sapiens; identical to SEQ ID NO: 32803
  Payload ID: 6429
  Gene Symbol: FHL2
  Gene Name: four and a half LIM domains 2
  Uniprot ID: Q14192
  ENSP ID: ENSP00000386665

SEQ ID NO: 32810 - protein, 395 aa, Homo sapiens
  Payload ID: 6429
  Gene Symbol: FHL2
  Gene Name: four and a half LIM domains 2
  ENSP ID: ENSP00000386892
MVICGVHFVKKHLQGKKEKRPPCKYIPGTCLLRSDPLLPPPPPARPGASPVSRSWDQAEIPAWADPCHRAQASSETRAREPTPEATLPITTVLPRPGGHEERSPGKQRVAEKPGVKMTERFDCHHCNESLFGKKYILREESPYCVVCFETLFANTCEECGKPIGCDCKDLSYKDRHWHEACFHCSQCRNSLVDKPFAAKEDQLLCTDCYSNEYSSKCQECKKTIMPGTRKMEYKGSSWHETCFICHRCQQPIGTKSFIPKDNQNFCVPCYEKQHAMQCVQCKKPITTGGVTYREQPWHKECFVCTACRKQLSGQRFTARDDFAYCLNCFCDLYAKKCAGCTNPISGLGGTKYISFEERQWHNDCFNCKKCSLSLVGRGFLTERDDILCPDCGKDI

SEQ ID NO: 32811 - protein, 19 aa, Homo sapiens
  Payload ID: 6429
  Gene Symbol: FHL2
  Gene Name: four and a half LIM domains 2
  ENSP ID: ENSP00000397083
MTERFDCHHCNESLFGKKY

SEQ ID NO: 32812 - protein, 54 aa, Homo sapiens
  Payload ID: 6429
  Gene Symbol: FHL2
  Gene Name: four and a half LIM domains 2
  ENSP ID: ENSP00000414872
MTERFDCHHCNESLFGKKYILREESPYCVVCFETLFANTCEECGKPIGCDCKAC

SEQ ID NO: 32813 - protein, 144 aa, Homo sapiens
  Payload ID: 6429
  Gene Symbol: FHL2
  Gene Name: four and a half LIM domains 2
  ENSP ID: ENSP00000433567
MTRRGFSRAGAAQRSTRPAAEPQPPAARALQPRPGVPGPLRCREYLQPPAPRREAEGLSHQGSEVGAESGARPKERGAEPELGRLWLRTVSSWRLGWHFDFGTESRFVAQAGVQWHDLSSLQALPLGSRHSPAPASQVAGTTGC

SEQ ID NO: 32814 - protein, 65 aa, Homo sapiens
  Payload ID: 6429
  Gene Symbol: FHL2
  Gene Name: four and a half LIM domains 2
  ENSP ID: ENSP00000476199
MTERFDCHHCNESLFGKKYILREESPYCVVCFETLFANTCEECGKPIGCDCKVPAAGLCGSPALP

SEQ ID NO: 32815 - protein, 280 aa, Homo sapiens
  Payload ID: 6430
  Gene Symbol: FHL3
  Gene Name: four and a half LIM domains 3
  Uniprot ID: Q13643
  ENSP ID: ENSP00000362107
MSESFDCAKCNESLYGRKYIQTDSGPYCVPCYDNTFANTCAECQQLIGHDSRELFYEDRHFHEGCFRCCRCQRSLADEPFTCQDSELLCNDCYCSAFSSQCSACGETVMPGSRKLEYGGQTWHEHCFLCSGCEQPLGSRSFVPDKGAHYCVPCYENKFAPRCARCSKTLTQGGVTYRDQPWHRECLVCTGCQTPLAGQQFTSRDEDPYCVACFGELFAPKCSSCKRPIVGLGGGKYVSFEDRHWHHNCFSCARCSTSLVGQGFVPDGDQVLCQGCSQAGP

SEQ ID NO: 32816 - protein, 284 aa, Homo sapiens
  Payload ID: 6431
  Gene Symbol: FHL5
  Gene Name: four and a half LIM domains 5
  Uniprot ID: Q5TD97
  ENSP ID: ENSP00000326022
MTTAHFYCQYCTASLLGKKYVLKDDSPYCVTCYDRVFSNYCEECKKPIESDSKDLCYKDRHWHEGCFKCTKCNHSLVEKPFAAKDERLLCTECYSNECSSKCFHCKRTIMPGSRKMEFKGNYWHETCFVCENCRQPIGTKPLISKESGNYCVPCFEKEFAHYCNFCKKVITSGGITFCDQLWHKECFLCSGCRKDLCEEQFMSRDDYPFCVDCYNHLYANKCVACSKPISGLTGAKFICFQDSQWHSECFNCGKCSVSLVGKGFLTQNKEIFCQKCGSGMDTDI

SEQ ID NO: 32817 - protein, 210 aa, Homo sapiens
  Payload ID: 6431
  Gene Symbol: FHL5
  Gene Name: four and a half LIM domains 5
  ENSP ID: ENSP00000396390
MTTAHFYCQYCTASLLGKKYVLKDDSPYCVTCYDRVFSNYCEECKKPIESDSKDLCYKDRHWHEGCFKCTKCNHSLVEKPFAAKDERLLCTECYSNECSSKCFHCKRTIMPGSRKMEFKGNYWHETCFVCENCRQPIGTKPLISKESGNYCVPCFEKEFAHYCNFCKKVITSGGITFCDQLWHKECFLCSGCRKDLCEEQFMSRDDYPFC

SEQ ID NO: 32818 - protein, 284 aa, Homo sapiens; identical to SEQ ID NO: 32816
  Payload ID: 6431
  Gene Symbol: FHL5
  Gene Name: four and a half LIM domains 5
  Uniprot ID: Q5TD97
  ENSP ID: ENSP00000442357

SEQ ID NO: 32819 - protein, 437 aa, Homo sapiens
  Payload ID: 6432
  Gene Symbol: FJX1
  Gene Name: four jointed box 1
  Uniprot ID: Q86VR8
  ENSP ID: ENSP00000400223
MGRRMRGAAATAGLWLLALGSLLALWGGLLPPRTELPASRPPEDRLPRRPARSGGPAPAPRFPLPPPLAWDARGGSLKTFRALLTLAAGADGPPRQSRSEPRWHVSARQPRPEESAAVHGGVFWSRGLEEQVPPGFSEAQAAAWLEAARGARMVALERGGCGRSSNRLARFADGTRACVRYGINPEQIQGEALSYYLARLLGLQRHVPPLALARVEARGAQWAQVQEELRAAHWTEGSVVSLTRWLPNLTDVVVPAPWRSEDGRLRPLRDAGGELANLSQAELVDLVQWTDLILFDYLTANFDRLVSNLFSLQWDPRVMQRATSNLHRGPGGALVFLDNEAGLVHGYRVAGMWDKYNEPLLQSVCVFRERTARRVLELHRGQDAAARLLRLYRRHEPRFPELAALADPHAQLLQRRLDFLAKHILHCKAKYGRRSGT

SEQ ID NO: 32820 - protein, 175 aa, Homo sapiens
  Payload ID: 6433
  Gene Symbol: FOXL2NB
  Gene Name: FOXL2 neighbor
  Uniprot ID: Q6ZUU3
  ENSP ID: ENSP00000372651
MTRTPVGSARTRPKPRKLGPQRGKALQASSRLSESPALVKKRMPDACTLGRAGIGLPKMCLHMAVRHSKAQKTGPGILQQRQKPPAPRASGGPALLGKRRGCSEAGSASLEPLSSSRAAAGCLNQVPLSPFLAGPRNTRRLPAPERERIELAATLCLEGWPLRCLASKGKLHCVY

SEQ ID NO: 32821 - protein, 41 aa, Homo sapiens
  Payload ID: 6433
  Gene Symbol: FOXL2NB
  Gene Name: FOXL2 neighbor
  ENSP ID: ENSP00000418272
MTRTPVGSARTRPKPRKLGPQRGKALQASSRLSEEQNPQPW

SEQ ID NO: 32822 - protein, 165 aa, Homo sapiens
  Payload ID: 6434
  Gene Symbol:
  Gene Name: FP325317.1
  ENSP ID: ENSP00000439534
MNAAVSFTNCALGRVPWRKFPVYVLGQFLGSFLAAATIYRLFYMAILHFSGGELMVTGPVATAGIFATYLPDHMTLWRGFLNEEWLTGMLQLCLFAITDREKNPALPGTHALVIGILVVIIRVSHGMNTGYAINPSRDLPPRIFTFIAGWGKQVFRYFPCPGPFL

SEQ ID NO: 32823 - protein, 151 aa, Homo sapiens
  Payload ID: 6435
  Gene Symbol: FPGT-TNNI3K
  Gene Name: FPGT-TNNI3K readthrough
  ENSP ID: ENSP00000359930
MAAARDPPEVSLREATQRKLRRFSELRGKLVARGEFWDIVAITAADEKQELAYNQQLSEKLKRKELPLGVQYHVFVDPAGAKIGNGGSTLCALQCLEKLYGDKWNSFTILLIHSDEWKKKVSESYVITIERLEDDLQIKEKELTELRNIFG

SEQ ID NO: 32824 - protein, 697 aa, Homo sapiens
  Payload ID: 6435
  Gene Symbol: FPGT-TNNI3K
  Gene Name: FPGT-TNNI3K readthrough
  ENSP ID: ENSP00000359932
MAAARDPPEVSLREATQRKLRRFSELRGKLVARGEFWDIVAITAADEKQELAYNQQLSEKLKRKELPLGVQYHVFVDPAGAKIGNGGSTLCALQCLEKLYGDKWNSFTILLIHSDEWKKKVSESYVITIERLEDDLQIKEKELTELRNIFGSDEAFSKVNLNYRTENGLSLLHLCCICGGKKSHIRTLMLKGLRPSRLTRNGFTALHLAVYKDNAELITSLLHSGADIQQVGYGGLTALHIATIAGHLEAADVLLQHGANVNIQDAVFFTPLHIAAYYGHEQVTRLLLKFGADVNVSGEVGDRPLHLASAKGFLNIAKLLMEEGSKADVNAQDNEDHVPLHFCSRFGHHDIVKYLLQSDLEVQPHVVNIYGDTPLHLACYNGKFEVAKEIIQISGTESLTKENIFSETAFHSACTYGKSIDLVKFLLDQNVININHQGRDGHTGLHSACYHGHIRLVQFLLDNGADMNLVACDPSRSSGEKDEQTCLMWAYEKGHDAIVTLLKHYKRPQDELPCNEYSQPGGDGSYVSVPSPLGKIKSMTKEKADILLLRAGLPSHFHLQLSEIEFHEIIGSGSFGKVYKGRCRNKIVAIKRYRANTYCSKSDVDMFCREVSILCQLNHPCVIQFVGACLNDPSQFAIVTQYISGGSLFSLLHEQKRILDLQSKLIIAVDVAKGMEYLHNLTQPIIHRDLNRYFFPK

SEQ ID NO: 32825 - protein, 843 aa, Homo sapiens
  Payload ID: 6435
  Gene Symbol: FPGT-TNNI3K
  Gene Name: FPGT-TNNI3K readthrough
  ENSP ID: ENSP00000359936
MAAARDPPEVSLREATQRKLRRFSELRGKLVARGEFWDIVAITAADEKQELAYNQQLSEKLKRKELPLGVQYHVFVDPAGAKIGNGGSTLCALQCLEKLYGDKWNSFTILLIHSDEWKKKVSESYVITIERLEDDLQIKEKELTELRNIFGSDEAFSKVNLNYRTENGLSLLHLCCICGGKKSHIRTLMLKGLRPSRLTRNGFTALHLAVYKDNAELITSLLHSGADIQQVGYGGLTALHIATIAGHLEAADVLLQHGANVNIQDAVFFTPLHIAAYYGHEQVTRLLLKFGADVNVSGEVGDRPLHLASAKGFLNIAKLLMEEGSKADVNAQDNEDHVPLHFCSRFGHHDIVKYLLQSDLEVQPHVVNIYGDTPLHLACYNGKFEVAKEIIQISGTESLTKENIFSETAFHSACTYGKSIDLVKFLLDQNVININHQGRDGHTGLHSACYHGHIRLVQFLLDNGADMNLVACDPSRSSGEKDEQTCLMWAYEKGHDAIVTLLKHYKRPQDELPCNEYSQPGGDGSYVSVPSPLGKIKSMTKEKADILLLRAGLPSHFHLQLSEIEFHEIIGSGSFGKVYKGRCRNKIVAIKRYRANTYCSKSDVDMFCREVSILCQLNHPCVIQFVGACLNDPSQFAIVTQYISGGSLFSLLHEQKRILDLQSKLIIAVDVAKGMEYLHNLTQPIIHRDLNSHNILLYEDGHAVVADFGESRFLQSLDEDNMTKQPGNLRWMAPEVFTQCTRYTIKADVFSYALCLWEILTGEIPFAHLKPAAAAADMAYHHIRPPIGYSIPKPISSLLIRGWNACPEAKSRPSHYPVSSVYTETLKKKNEDRFGMWIEYLRR

SEQ ID NO: 32826 - protein, 162 aa, Homo sapiens
  Payload ID: 6435
  Gene Symbol: FPGT-TNNI3K
  Gene Name: FPGT-TNNI3K readthrough
  ENSP ID: ENSP00000433587
MAAARDPPEVSLREATQRKLRRFSELRGKLVARGEFWDIVAITAADEKQELAYNQQLSEKLKRKELPLGVQYHVFVDPAGAKIGNGGSTLCALQCLEKLYGDKWNSFTILLIHSGHDAIVTLLKHYKRPQDELPCNEYSQPGGDGSYVSVPSPLGKIKSMTK

SEQ ID NO: 32827 - protein, 949 aa, Homo sapiens
  Payload ID: 6435
  Gene Symbol: FPGT-TNNI3K
  Gene Name: FPGT-TNNI3K readthrough
  ENSP ID: ENSP00000450895
MRAVRRGLREGGAMAAARDPPEVSLREATQRKLRRFSELRGKLVARGEFWDIVAITAADEKQELAYNQQLSEKLKRKELPLGVQYHVFVDPAGAKIGNGGSTLCALQCLEKLYGDKWNSFTILLIHSDEWKKKVSESYVITIERLEDDLQIKEKELTELRNIFGSDEAFSKVNLNYRTENGLSLLHLCCICGGKKSHIRTLMLKGLRPSRLTRNGFTALHLAVYKDNAELITSLLHSGADIQQVGYGGLTALHIATIAGHLEAADVLLQHGANVNIQDAVFFTPLHIAAYYGHEQVTRLLLKFGADVNVSGEVGDRPLHLASAKGFLNIAKLLMEEGSKADVNAQDNEDHVPLHFCSRFGHHDIVKYLLQSDLEVQPHVVNIYGDTPLHLACYNGKFEVAKEIIQISGTESLTKENIFSETAFHSACTYGKSIDLVKFLLDQNVININHQGRDGHTGLHSACYHGHIRLVQFLLDNGADMNLVACDPSRSSGEKDEQTCLMWAYEKGHDAIVTLLKHYKRPQDELPCNEYSQPGGDGSYVSVPSPLGKIKSMTKEKADILLLRAGLPSHFHLQLSEIEFHEIIGSGSFGKVYKGRCRNKIVAIKRYRANTYCSKSDVDMFCREVSILCQLNHPCVIQFVGACLNDPSQFAIVTQYISGGSLFSLLHEQKRILDLQSKLIIAVDVAKGMEYLHNLTQPIIHRDLNSHNILLYEDGHAVVADFGESRFLQSLDEDNMTKQPGNLRWMAPEVFTQCTRYTIKADVFSYALCLWEILTGEIPFAHLKPAAAAADMAYHHIRPPIGYSIPKPISSLLIRGWNACPEGRPEFSEVVMKLEECLCNIELMSPASSNSSGSLSPSSSSDCLVNRGGPGRSHVAALRSRFELEYALNARSYAALSQSAGQYSSQGLSLEEMKRSLQYTPIDKYGYVSDPMSSMHFHSCRNSSSFEDSS

SEQ ID NO: 32828 - protein, 58 aa, Homo sapiens
  Payload ID: 6436
  Gene Symbol: FHIT
  Gene Name: fragile histidine triad
  ENSP ID: ENSP00000342087
VLVCPLRPVERFHDLRPDEVADLFQTTQRVGTVVEKHFHGTSLTFSMQDGPEAGQTVK

SEQ ID NO: 32829 - protein, 147 aa, Homo sapiens
  Payload ID: 6436
  Gene Symbol: FHIT
  Gene Name: fragile histidine triad
  Uniprot ID: P49789
  ENSP ID: ENSP00000417480
MSFRFGQHLIKPSVVFLKTELSFALVNRKPVVPGHVLVCPLRPVERFHDLRPDEVADLFQTTQRVGTVVEKHFHGTSLTFSMQDGPEAGQTVKHVHVHVLPRKAGDFHRNDSIYEELQKHDKEDFPASWRSEEEMAAEAAALRVYFQ

SEQ ID NO: 32830 - protein, 147 aa, Homo sapiens; identical to SEQ ID NO: 32829
  Payload ID: 6436
  Gene Symbol: FHIT
  Gene Name: fragile histidine triad
  Uniprot ID: P49789
  ENSP ID: ENSP00000417557

SEQ ID NO: 32831 - protein, 147 aa, Homo sapiens; identical to SEQ ID NO: 32829
  Payload ID: 6436
  Gene Symbol: FHIT
  Gene Name: fragile histidine triad
  Uniprot ID: P49789
  ENSP ID: ENSP00000418582

SEQ ID NO: 32832 - protein, 78 aa, Homo sapiens
  Payload ID: 6436
  Gene Symbol: FHIT
  Gene Name: fragile histidine triad
  ENSP ID: ENSP00000418596
MSFRFGQHLIKPSVVFLKTELSFALVNRKPVVPGHVLVCPLRPVERFHDLRPDEVADLFQTTQRVGTVVEKHFHGTSL

SEQ ID NO: 32833 - protein, 315 aa, Homo sapiens
  Payload ID: 6437
  Gene Symbol: FRA10AC1
  Gene Name: fragile site, folic acid type, rare, fra(10)(q23.3) or fra(10)(q24.2) candidate 1
  Uniprot ID: Q70Z53
  ENSP ID: ENSP00000360488
MHGHGGYDSDFSDDERCGESSKRKKRTVEDDLLLQKPFQKEKHGKVAHKQVAAELLDREEARNRRFHLIAMDAYQRHTKFVNDYILYYGGKKEDFKRLGENDKTDLDVIRENHRFLWNEEDEMDMTWEKRLAKKYYDKLFKEYCIADLSKYKENKFGFRWRVEKEVISGKGQFFCGNKYCDKKEGLKSWEVNFGYIEHGEKRNALVKLRLCQECSIKLNFHHRRKEIKSKKRKDKTKKDCEESSHKKSRLSSAEEASKKKDKGHSSSKKSEDSLLRNSDEEESASESELWKGPLPETDEKSQEEEFDEYFQDLFL

SEQ ID NO: 32834 - protein, 611 aa, Homo sapiens
  Payload ID: 6438
  Gene Symbol: FMR1
  Gene Name: fragile X mental retardation 1
  Uniprot ID: Q06787
  ENSP ID: ENSP00000218200
MEELVVEVRGSNGAFYKAFVKDVHEDSITVAFENNWQPDRQIPFHDVRFPPPVGYNKDINESDEVEVYSRANEKEPCCWWLAKVRMIKGEFYVIEYAACDATYNEIVTIERLRSVNPNKPATKDTFHKIKLDVPEDLRQMCAKEAAHKDFKKAVGAFSVTYDPENYQLVILSINEVTSKRAHMLIDMHFRSLRTKLSLIMRNEEASKQLESSRQLASRFHEQFIVREDLMGLAIGTHGANIQQARKVPGVTAIDLDEDTCTFHIYGEDQDAVKKARSFLEFAEDVIQVPRNLVGKVIGKNGKLIQEIVDKSGVVRVRIEAENEKNVPQEEEIMPPNSLPSNNSRVGPNAPEEKKHLDIKENSTHFSQPNSTKVQRGMVPFVFVGTKDSIANATVLLDYHLNYLKEVDQLRLERLQIDEQLRQIGASSRPPPNRTDKEKSYVTDDGQGMGRGSRPYRNRGHGRRGPGYTSGTNSEASNASETESDHRDELSDWSLAPTEEERESFLRRGDGRRRGGGGRGQGGRGRGGGFKGNDDHSRTDNRPRNPREAKGRTTDGSLQIRVDCNNERSVHTKTLQNTSSEGSRLRTGKDRNQKKEKPDSVDGQQPLVNGVP

SEQ ID NO: 32835 - protein, 297 aa, Homo sapiens
  Payload ID: 6438
  Gene Symbol: FMR1
  Gene Name: fragile X mental retardation 1
  ENSP ID: ENSP00000355115
MEELVVEVRGSNGAFYKAFVKDVHEDSITVAFENNWQPDRQIPFHDVRFPPPVGYNKDINESDEVEVYSRANEKEPCCWWLAKVRMIKGEFYVIEYAACDATYNEIVTIERLRSVNPNKPATKDTFHKIKLDVPEDLRQMCAKEAAHKDFKKAVGAFSVTYDPENYQLVILSINEVTSKRAHMLIDMHFRSLRTKLSLIMRNEEASKQLESSRQLASRFHEQFIVREDLMGLAIGTHGANIQQARKVPGVTAIDLDEDTCTFHIYGEDQDAVKKARSFLEFAEDVIQVPRNLVGLKI

SEQ ID NO: 32836 - protein, 590 aa, Homo sapiens
  Payload ID: 6438
  Gene Symbol: FMR1
  Gene Name: fragile X mental retardation 1
  Uniprot ID: Q06787
  ENSP ID: ENSP00000359501
MEELVVEVRGSNGAFYKAFVKDVHEDSITVAFENNWQPDRQIPFHDVRFPPPVGYNKDINESDEVEVYSRANEKEPCCWWLAKVRMIKGEFYVIEYAACDATYNEIVTIERLRSVNPNKPATKDTFHKIKLDVPEDLRQMCAKEAAHKDFKKAVGAFSVTYDPENYQLVILSINEVTSKRAHMLIDMHFRSLRTKLSLIMRNEEASKQLESSRQLASRFHEQFIVREDLMGLAIGTHGANIQQARKVPGVTAIDLDEDTCTFHIYGEDQDAVKKARSFLEFAEDVIQVPRNLVGKVIGKNGKLIQEIVDKSGVVRVRIEAENEKNVPQEEEIMPPNSLPSNNSRVGPNAPEEKKHLDIKENSTHFSQPNSTKVQRVLVASSVVAGESQKPELKAWQGMVPFVFVGTKDSIANATVLLDYHLNYLKEVDQLRLERLQIDEQLRQIGASSRPPPNRTDKEKSYVTDDGQGMGRGSRPYRNRGHGRRGPGYTSAPTEEERESFLRRGDGRRRGGGGRGQGGRGRGGGFKGNDDHSRTDNRPRNPREAKGRTTDGSLQNTSSEGSRLRTGKDRNQKKEKPDSVDGQQPLVNGVP

SEQ ID NO: 32837 - protein, 537 aa, Homo sapiens
  Payload ID: 6438
  Gene Symbol: FMR1
  Gene Name: fragile X mental retardation 1
  ENSP ID: ENSP00000359502
MEELVVEVRGSNGAFYKAFVKDVHEDSITVAFENNWQPDRQIPFHDVRFPPPVGYNKDINESDEVEVYSRANEKEPCCWWLAKVRMIKGEFYVIEYAACDATYNEIVTIERLRSVNPNKPATKDTFHKIKLDVPEDLRQMCAKEAAHKDFKKAVGAFSVTYDPENYQLVILSINEVTSKRAHMLIDMHFRSLRTKLSLIMRNEEASKQLESSRQLASRFHEQFIVREDLMGLAIGTHGANIQQARKVPGVTAIDLDEDTCTFHIYGEDQDAVKKARSFLEFAEDVIQVPRNLVGKVIGKNGKLIQEIVDKSGVVRVRIEAENEKNVPQEEEIMPPNSLPSNNSRVGPNAPEEKKHLDIKENSTHFSQPNSTKVQRVLVASSVVAGESQKPELKAWQGMVPFVFVGTKDSIANATVLLDYHLNYLKLQQRKRGRASCAEETDGGVEGEEEDKEEEDVEEASKETTITPEQIIVHVIQERLKEEQQMDPFRSELTAIMKGVSTLKHYRIPPVKVVGCARVKIVTRRKRSQTAWMVSNHS

SEQ ID NO: 32838 - protein, 632 aa, Homo sapiens [sequence omitted]

SEQ ID NO: 32839 - protein, 582 aa, Homo sapiens
  Payload ID: 6438
  Gene Symbol: FMR1
  Gene Name: fragile X mental retardation 1
  ENSP ID: ENSP00000359508
MEELVVEVRGSNGAFYKAFVKDVHEDSITVAFENNWQPDRQIPFHDVRFPPPVGYNKDINESDEVEVYSRANEKEPCCWWLAKVRMIKGEFYVIEYAACDATYNEIVTIERLRSVNPNKPATKDTFHKIKLDVPEDLRQMCAKEAAHKDFKKAVGAFSVTYDPENYQLVILSINEVTSKRAHMLIDMHFRSLRTKLSLIMRNEEASKQLESSRQLASRFHEQFIVREDLMGLAIGTHGANIQQARKVPGVTAIDLDEDTCTFHIYGEDQDAVKKARSFLEFAEDVIQVPRNLVGKVIGKNGKLIQEIVDKSGVVRVRIEAENEKNVPQEEEIMPPNSLPSNNSRVGPNAPEEKKHLDIKENSTHFSQPNSTKVQRGMVPFVFVGTKDSIANATVLLDYHLNYLKEVDQLRLERLQIDEQLRQIGASSRPPPNRTDKEKSYVTDDGQGMGRGSRPYRNRGHGRRGPGYTSESDHRDELSDWSLAPTEEERESFLRRGDGRRRGGGGRGQGGRGRGGGFKGNDDHSRTDNRPRNPREAKGRTTDGSLQNTSSEGSRLRTGKDRNQKKEKPDSVDGQQPLVNGVP

SEQ ID NO: 32840 - protein, 592 aa, Homo sapiens
  Payload ID: 6438
  Gene Symbol: FMR1
  Gene Name: fragile X mental retardation 1
  ENSP ID: ENSP00000395923
MEELVVEVRGSNGAFYKAFVKDVHEDSITVAFENNWQPDRQIPFHDVRFPPPVGYNKDINESDEVEVYSRANEKEPCCWWLAKVRMIKGEFYVIEYAACDATYNEIVTIERLRSVNPNKPATKDTFHKIKLDVPEDLRQMCAKEAAHKDFKKAVGAFSVTYDPENYQLVILSINEVTSKRAHMLIDMHFRSLRTKLSLIMRNEEASKQLESSRQLASRFHEQFIVREDLMGLAIGTHGANIQQARKVPGVTAIDLDEDTCTFHIYGEDQDAVKKARSFLEFAEDVIQVPRNLVVIGKNGKLIQEIVDKSGVVRVRIEAENEKNVPQEEEIMPPNSLPSNNSRVGPNAPEEKKHLDIKENSTHFSQPNSTKVQRGMVPFVFVGTKDSIANATVLLDYHLNYLKEVDQLRLERLQIDEQLRQIGASSRPPPNRTDKEKSYVTDDGQGMGRGSRPYRNRGHGRRGPGYTSGTNSEASNASETESDHRDELSDWSLAPTEEERESFLRRGDGRRRGGGGRGQGGRGRGGGFKGNDDHSRTDNRPRNPREAKGRTTDGSLQNTSSEGSRLRTGKDRNQKKEKPDSVDGQQPLVNGVP

SEQ ID NO: 32841 - protein, 586 aa, Homo sapiens
  Payload ID: 6438
  Gene Symbol: FMR1
  Gene Name: fragile X mental retardation 1
  Uniprot ID: Q06787
  ENSP ID: ENSP00000413764
MEELVVEVRGSNGAFYKAFVKDVHEDSITVAFENNWQPDRQIPFHDVRFPPPVGYNKDINESDEVEVYSRANEKEPCCWWLAKVRMIKGEFYVIEYAACDATYNEIVTIERLRSVNPNKPATKDTFHKIKLDVPEDLRQMCAKEAAHKDFKKAVGAFSVTYDPENYQLVILSINEVTSKRAHMLIDMHFRSLRTKLSLIMRNEEASKQLESSRQLASRFHEQFIVREDLMGLAIGTHGANIQQARKVPGVTAIDLDEDTCTFHIYGEDQDAVKKARSFLEFAEDVIQVPRNLVGKVIGKNGKLIQEIVDKSGVVRVRIEAENEKNVPQEEEIMPPNSLPSNNSRVGPNAPEEKKHLDIKENSTHFSQPNSTKVQRGMVPFVFVGTKDSIANATVLLDYHLNYLKEVDQLRLERLQIDEQLRQIGASSRPPPNRTDKEKSYVTDDGQGMGRGSRPYRNRGHGRRGPGYTSAPTEEERESFLRRGDGRRRGGGGRGQGGRGRGGGFKGNDDHSRTDNRPRNPREAKGRTTDGSLQIRVDCNNERSVHTKTLQNTSSEGSRLRTGKDRNQKKEKPDSVDGQQPLVNGVP

SEQ ID NO: 32842 - protein, 297 aa, Homo sapiens; identical to SEQ ID NO: 32835
  Payload ID: 6438
  Gene Symbol: FMR1
  Gene Name: fragile X mental retardation 1
  ENSP ID: ENSP00000477839

SEQ ID NO: 32843 - protein, 544 aa, Homo sapiens
  Payload ID: 6438
  Gene Symbol: FMR1
  Gene Name: fragile X mental retardation 1
  ENSP ID: ENSP00000479528
MEELVVEVRGSNGAFYKAFVKDVHEDSITVAFENNWQPDRQIPFHDVRFPPPVGYNKDINESDEVEVYSRANEKEPCCWWLAKVRMIKGEFYVIEYAACDATYNEIVTIERLRSVNPNKPATKDTFHKIKLDVPEDLRQMCAKEAAHKDFKKAVGAFSVTYDPENYQLVILSINEVTSKRAHMLIDMHFRSLRTKLSLIMRNEEASKQLESSRQLASRFHEQFIVREDLMGLAIGTHGANIQQARKVPGVTAIDLDEDTCTFHIYGEDQDAVKKARSFLEFAEDVIQVPRNLVGKVIGKNGKLIQEIVDKSGVVRVRIEAENEKNVPQEEGMVPFVFVGTKDSIANATVLLDYHLNYLKEVDQLRLERLQIDEQLRQIGASSRPPPNRTDKEKSYVTDDGQGMGRGSRPYRNRGHGRRGPGYTSGTNSEASNASETESDHRDELSDWSLAPTEEERESFLRRGDGRRRGGGGRGQGGRGRGGGFKGNDDHSRTDNRPRNPREAKGRTTDGSLQIPPVKVVGCARVKIVTRRKRSQTAWMVSNHS

SEQ ID NO: 32844 - protein, 102 aa, Homo sapiens
  Payload ID: 6438
  Gene Symbol: FMR1
  Gene Name: fragile X mental retardation 1
  ENSP ID: ENSP00000480450
  MOD_RES (1)..(1): Any amino acid
XSLIMRNEEASKQLESSRQLASRFHEQFIVREDLMGLAIGTHGANIQQARKVPGVTAIDLDEDTCTFHIYGEDQDAVKKARSFLEFAEDVIQVPRNLVGLKI

SEQ ID NO: 32845 - protein, 76 aa, Homo sapiens
  Payload ID: 6438
  Gene Symbol: FMR1
  Gene Name: fragile X mental retardation 1
  ENSP ID: ENSP00000480513
MEELVVEVRGSNGAFYKAFVKDVHEDSITVAFENKLSPSGFCGLGDPTIPVHADNVILISIQLPTARIDHLVGSKI

SEQ ID NO: 32846 - protein, 119 aa, Homo sapiens
  Payload ID: 6438
  Gene Symbol: FMR1
  Gene Name: fragile X mental retardation 1
  ENSP ID: ENSP00000480886
DDGQGMGRGSRPYRNRGHGRRGPGYTSGTNSEASNASETESDHRDELSDWSLAPTEEERESFLRRGDGRRRGGGGRGQGGRGRGGGFKGNDDHSRTDNRPRNPREAKGRTTDGSLQKKT

SEQ ID NO: 32847 - protein, 419 aa, Homo sapiens [sequence omitted]

SEQ ID NO: 32848 - protein, 252 aa, Homo sapiens
  Payload ID: 6438
  Gene Symbol: FMR1
  Gene Name: fragile X mental retardation 1
  ENSP ID: ENSP00000481474
MEELVVEVRGSNGAFYKAFVKDVHEDSITVAFENNWQPDRQIPFHDVRFPPPVGYNKDINESDEVEFYVIEYAACDATYNEIVTIERLRSVNPNKPATKDTFHKIKLDVPEDLRQMCAKEAAHKDFKKAVGAFSVTYDPENYQLVILSINEVTSKRAHMLIDMHFRSLRTKLSLIMRNEEASKQLESSRQLASRFHEQFIVREDLMGLAIGTHGANIQQARKVPGVTAIDLDEDTCTFHIYGEDQDAVKKAR

SEQ ID NO: 32849 - protein, 31 aa, Homo sapiens
  Payload ID: 6438
  Gene Symbol: FMR1
  Gene Name: fragile X mental retardation 1
  ENSP ID: ENSP00000484324
MEELVVEVRGSNGAFYKHWDFGELHCSGRGL

SEQ ID NO: 32850 - protein, 255 aa, Homo sapiens
  Payload ID: 6439
  Gene Symbol: FMR1NB
  Gene Name: fragile X mental retardation 1 neighbor
  Uniprot ID: Q8N0W7
  ENSP ID: ENSP00000359498
MSSHRRKAKGRNRRSHRAMRVAHLELATYELAATESNPESSHPGYEAAMADRPQPGWRESLKMRVSKPFGMLMLSIWILLFVCYYLSYYLCSGSSYFVLANGHILPNSENAHGQSLEEDSALEALLNFFFPTTCNLRENQVAKPCNELQDLSESECLRHKCCFSSSGTTSFKCFAPFRDVPKQMMQMFGLGAISLILVCLPIYCRSLFWRSEPADDLQRQDNRVVTGLKKQRRKRKRKSEMLQKAARGREEHGDE

SEQ ID NO: 32851 - protein, 85 aa, Homo sapiens
  Payload ID: 6439
  Gene Symbol: FMR1NB
  Gene Name: fragile X mental retardation 1 neighbor
  ENSP ID: ENSP00000435769
  MOD_RES (1)..(1): Any amino acid
XKCFAPFRDVPKQMMQMFGLGAISLILVCLPIYCRSLFWRSEPADDLQRQDNRVVTGLKKQRRKRKRKSEMLQKAARGREEHGDE

SEQ ID NO: 32852 - protein, 536 aa, Homo sapiens
  Payload ID: 6440
  Gene Symbol: FXR1
  Gene Name: fragile X mental retardation, autosomal homolog 1
  Uniprot ID: P51114
  ENSP ID: ENSP00000307633
MMKGEFYVIEYAACDATYNEIVTFERLRPVNQNKTVKKNTFFKCTVDVPEDLREACANENAHKDFKKAVGACRIFYHPETTQLMILSASEATVKRVNILSDMHLRSIRTKLMLMSRNEEATKHLECTKQLAAAFHEEFVVREDLMGLAIGTHGSNIQQARKVPGVTAIELDEDTGTFRIYGESADAVKKARGFLEFVEDFIQVPRNLVGKVIGKNGKVIQEIVDKSGVVRVRIEGDNENKLPREDGMVPFVFVGTKESIGNVQVLLEYHIAYLKEVEQLRMERLQIDEQLRQIGSRSYSGRGRGRRGPNYTSGYGTNSELSNPSETESERKDELSDWSLAGEDDRDSRHQRDSRRRPGGRGRSVSGGRGRGGPRGGKSSISSVLKDPDSNPYSLLDNTESDQTADTDASESHHSTNRRRRSRRRRTDEDAVLMDGMTESDTASVNENGLVTVADYISRAESQSRQRNLPRETLAKNKKEMAKDVIEEHGPSEKAINGPTSASGDDISKLQRTPGEEKINTLKEENTQEAAVLNGVS

SEQ ID NO: 32853 - protein, 621 aa, Homo sapiens
  Payload ID: 6440
  Gene Symbol: FXR1
  Gene Name: fragile X mental retardation, autosomal homolog 1
  Uniprot ID: P51114
  ENSP ID: ENSP00000350170
MAELTVEVRGSNGAFYKGFIKDVHEDSLTVVFENNWQPERQVPFNEVRLPPPPDIKKEISEGDEVEVYSRANDQEPCGWWLAKVRMMKGEFYVIEYAACDATYNEIVTFERLRPVNQNKTVKKNTFFKCTVDVPEDLREACANENAHKDFKKAVGACRIFYHPETTQLMILSASEATVKRVNILSDMHLRSIRTKLMLMSRNEEATKHLECTKQLAAAFHEEFVVREDLMGLAIGTHGSNIQQARKVPGVTAIELDEDTGTFRIYGESADAVKKARGFLEFVEDFIQVPRNLVGKVIGKNGKVIQEIVDKSGVVRVRIEGDNENKLPREDGMVPFVFVGTKESIGNVQVLLEYHIAYLKEVEQLRMERLQIDEQLRQIGSRSYSGRGRGRRGPNYTSGYGTNSELSNPSETESERKDELSDWSLAGEDDRDSRHQRDSRRRPGGRGRSVSGGRGRGGPRGGKSSISSVLKDPDSNPYSLLDNTESDQTADTDASESHHSTNRRRRSRRRRTDEDAVLMDGMTESDTASVNENGLVTVADYISRAESQSRQRNLPRETLAKNKKEMAKDVIEEHGPSEKAINGPTSASGDDISKLQRTPGEEKINTLKEENTQEAAVLNGVS

SEQ ID NO: 32854 - protein, 539 aa, Homo sapiens
  Payload ID: 6440
  Gene Symbol: FXR1
  Gene Name: fragile X mental retardation, autosomal homolog 1
  Uniprot ID: P51114
  ENSP ID: ENSP00000388828
MAELTVEVRGSNGAFYKGFIKDVHEDSLTVVFENNWQPERQVPFNEVRLPPPPDIKKEISEGDEVEVYSRANDQEPCGWWLAKVRMMKGEFYVIEYAACDATYNEIVTFERLRPVNQNKTVKKNTFFKCTVDVPEDLREACANENAHKDFKKAVGACRIFYHPETTQLMILSASEATVKRVNILSDMHLRSIRTKLMLMSRNEEATKHLECTKQLAAAFHEEFVVREDLMGLAIGTHGSNIQQARKVPGVTAIELDEDTGTFRIYGESADAVKKARGFLEFVEDFIQVPRNLVGKVIGKNGKVIQEIVDKSGVVRVRIEGDNENKLPREDGMVPFVFVGTKESIGNVQVLLEYHIAYLKEVEQLRMERLQIDEQLRQIGSRSYSGRGRGRRGPNYTSGYGTNSELSNPSETESERKDELSDWSLAGEDDRDSRHQRDSRRRPGGRGRSVSGGRGRGGPRGGKSSISSVLKDPDSNPYSLLDNTESDQTADTDASESHHSTNRRRRSRRRRTDEDAVLMDGMTESDTASVNENGLGKRCD

SEQ ID NO: 32855 - protein, 75 aa, Homo sapiens
  Payload ID: 6440
  Gene Symbol: FXR1
  Gene Name: fragile X mental retardation, autosomal homolog 1
  ENSP ID: ENSP00000417125
MMKGEFYVIEYAACDATYNEIVTFERLRPVNQNKTVKKNTFFKCTVDVPEDLREACANENAHKDFKKAVGACRIF

SEQ ID NO: 32856 - protein, 151 aa, Homo sapiens
  Payload ID: 6440
  Gene Symbol: FXR1
  Gene Name: fragile X mental retardation, autosomal homolog 1
  ENSP ID: ENSP00000417513
MRAVNILVYFFGFFWWFFNVQGFIKDVHEDSLTVVFENNWQPERQVPFNEVRLPPPPDIKKEISEGDEVEVYSRANDQEPCGWWLAKVRMMKGEFYVIEYAACDATYNEIVTFERLRPVNQNKTVKKNTFFKCTVDVPEDLREACANENAH

SEQ ID NO: 32857 - protein, 246 aa, Homo sapiens
  Payload ID: 6440
  Gene Symbol: FXR1
  Gene Name: fragile X mental retardation, autosomal homolog 1
  ENSP ID: ENSP00000418027
  MOD_RES (1)..(1): Any amino acid
XTNSELSNPSETESERKDELSDWSLAGEDDRDSRHQRDSRRRPGGRGRSVSGGRGRGGPRGGKSSISSVLKDPDSNPYSLLDNTESDQTADTDASESHHSTNRRRRSRRRRTDEDAVLMDGMTESDTASVNENGLDDSEKKPQRRNRSRRRRFRGQAEDRQPVTVADYISRAESQSRQRNLPRETLAKNKKEMAKDVIEEHGPSEKAINGPTSASGDDISKLQRTPGEEKINTLKEENTQEAAVLN

SEQ ID NO: 32858 - protein, 608 aa, Homo sapiens
  Payload ID: 6440
  Gene Symbol: FXR1
  Gene Name: fragile X mental retardation, autosomal homolog 1
  ENSP ID: ENSP00000418097
MVTEGFIKDVHEDSLTVVFENNWQPERQVPFNEVRLPPPPDIKKEISEGDEVEVYSRANDQEPCGWWLAKVRMMKGEFYVIEYAACDATYNEIVTFERLRPVNQNKTVKKNTFFKCTVDVPEDLREACANENAHKDFKKAVGACRIFYHPETTQLMILSASEATVKRVNILSDMHLRSIRTKLMLMSRNEEATKHLECTKQLAAAFHEEFVVREDLMGLAIGTHGSNIQQARKVPGVTAIELDEDTGTFRIYGESADAVKKARGFLEFVEDFIQVPRNLVGKVIGKNGKVIQEIVDKSGVVRVRIEGDNENKLPREDGMVPFVFVGTKESIGNVQVLLEYHIAYLKEVEQLRMERLQIDEQLRQIGSRSYSGRGRGRRGPNYTSGYGTNSELSNPSETESERKDELSDWSLAGEDDRDSRHQRDSRRRPGGRGRSVSGGRGRGGPRGGKSSISSVLKDPDSNPYSLLDNTESDQTADTDASESHHSTNRRRRSRRRRTDEDAVLMDGMTESDTASVNENGLVTVADYISRAESQSRQRNLPRETLAKNKKEMAKDVIEEHGPSEKAINGPTSASGDDISKLQRTPGEEKINTLKEENTQEAAVLNGVS

SEQ ID NO: 32859 - protein, 94 aa, Homo sapiens
  Payload ID: 6440
  Gene Symbol: FXR1
  Gene Name: fragile X mental retardation, autosomal homolog 1
  ENSP ID: ENSP00000418724
MMKGEFYVIEYAACDATYNEIVTFERLRPVNQNKTVKKNTFFKCTVDVPEDLREACANENAHKDFKKAVGACRIFYHPETTQLMILSASEATVK

SEQ ID NO: 32860 - protein, 19 aa, Homo sapiens
  Payload ID: 6440
  Gene Symbol: FXR1
  Gene Name: fragile X mental retardation, autosomal homolog 1
  ENSP ID: ENSP00000419047
MAELTVEVRGSNGAFYKAI

SEQ ID NO: 32861 - protein, 119 aa, Homo sapiens
  Payload ID: 6440
  Gene Symbol: FXR1
  Gene Name: fragile X mental retardation, autosomal homolog 1
  ENSP ID: ENSP00000419793
MMKGEFYVIEYAACDATYNEIVTFERLRPVNQNKTVKKNTFFKCTVDVPEDLREACANENAHKDFKKAVGACRIFYHPETTQLMILSASEATVKRVNILSDMHLRSIRTKLMLMSRNEE

SEQ ID NO: 32862 - protein, 123 aa, Homo sapiens
  Payload ID: 6440
  Gene Symbol: FXR1
  Gene Name: fragile X mental retardation, autosomal homolog 1
  ENSP ID: ENSP00000419933
MMKGEFYVIEYAACDATYNEIVTFERLRPVNQNKTVKKNTFFKCTVDVPEDLREACANENAHKDFKKAVGACRIFYHPETTQLMILSASEATVKRVNILSDMHLRSIRTKLMLMSRNEEATKH

SEQ ID NO: 32863 - protein, 454 aa, Homo sapiens
  Payload ID: 6440
  Gene Symbol: FXR1
  Gene Name: fragile X mental retardation, autosomal homolog 1
  ENSP ID: ENSP00000420515
MMKGEFYVIEYAACDATYNEIVTFERLRPVNQNKTVKKNTFFKCTVDVPEDLREACANENAHKDFKKAVGACRIFYHPETTQLMILSASEATVKRVNILSDMHLRSIRTKLMLMSRNEEATKHLECTKQLAAAFHEEFVVREDLMGLAIGTHGSNIQQARKVPGVTAIELDEDTGTFRIYGESADAVKKARGFLEFVEDFIQVPRNLVGKVIGKNGKVIQEIVDKSGVVRVRIEGDNENKLPREDGMVPFVFVGTKESIGNVQVLLEYHIAYLKEVEQLRMERLQIDEQLRQIGSRSYSGRGRGRRGPNYTSGYGTNSELSNPSETESERKDELSDWSLAGEDDRDSRHQRDSRRRPGGRGRSVSGGRGRGGPRGGKSSISSVLKDPDSNPYSLLDNTESDQTADTDASESHHSTNRRRRSRRRRTDEDAVLMDGMTESDTASVNENGLGKRCD

SEQ ID NO: 32864 - protein, 490 aa, Homo sapiens
  Payload ID: 6440
  Gene Symbol: FXR1
  Gene Name: fragile X mental retardation, autosomal homolog 1
  ENSP ID: ENSP00000420643
MAELTVEVRGSNGAFYKVYSRANDQEPCGWWLAKVRMMKGEFYVIEYAACDATYNEIVTFERLRPVNQNKTVKKNTFFKCTVDVPEDLREACANENAHKDFKKAVGACRIFYHPETTQLMILSASEATVKRVNILSDMHLRSIRTKLMLMSRNEEATKHLECTKQLAAAFHEEFVVREDLMGLAIGTHGSNIQQARKVPGVTAIELDEDTGTFRIYGESADAVKKARGFLEFVEDFIQVPRNLVGKVIGKNGKVIQEIVDKSGVVRVRIEGDNENKLPREDGMVPFVFVGTKESIGNVQVLLEYHIAYLKEVEQLRMERLQIDEQLRQIGSRSYSGRGRGRRGPNYTSGYGTNSELSNPSETESERKDELSDWSLAGEDDRDSRHQRDSRRRPGGRGRSVSGGRGRGGPRGGKSSISSVLKDPDSNPYSLLDNTESDQTADTDASESHHSTNRRRRSRRRRTDEDAVLMDGMTESDTASVNENGLGKRCD

SEQ ID NO: 32865 - protein, 673 aa, Homo sapiens
  Payload ID: 6441
  Gene Symbol: FXR2
  Gene Name: fragile X mental retardation, autosomal homolog 2
  Uniprot ID: P51116
  ENSP ID: ENSP00000250113
MGGLASGGDVEPGLPVEVRGSNGAFYKGFVKDVHEDSVTIFFENNWQSERQIPFGDVRLPPPADYNKEITEGDEVEVYSRANEQEPCGWWLARVRMMKGDFYVIEYAACDATYNEIVTLERLRPVNPNPLATKGSFFKVTMAVPEDLREACSNENVHKEFKKALGANCIFLNITNSELFILSTTEAPVKRASLLGDMHFRSLRTKLLLMSRNEEATKHLETSKQLAAAFQEEFTVREDLMGLAIGTHGANIQQARKVPGVTAIELGEETCTFRIYGETPEACRQARSYLEFSEDSVQVPRNLVGKVIGKNGKVIQEIVDKSGVVRVRVEGDNDKKNPREEGMVPFIFVGTRENISNAQALLEYHLSYLQEVEQLRLERLQIDEQLRQIGLGFRPPGSGRGSGGSDKAGYSTDESSSSSLHATRTYGGSYGGRGRGRRTGGPAYGPSSDVSTASETESEKREEPNRAGPGDRDPPTRGEESRRRPTGGRGRGPPPAPRPTSRYNSSSISSVLKDPDSNPYSLLDTSEPEPPVDSEPGEPPPASARRRRSRRRRTDEDRTVMDGGLESDGPNMTENGLEDESRPQRRNRSRRRRNRGNRTDGSISGDRQPVTVADYISRAESQSRQRPPLERTKPSEDSLSGQKGDSVSKLPKGPSENGELSAPLELGSMVNGVS

SEQ ID NO: 32866 - protein, 118 aa, Homo sapiens
  Payload ID: 6441
  Gene Symbol: FXR2
  Gene Name: fragile X mental retardation, autosomal homolog 2
  ENSP ID: ENSP00000459230
MSWQSERQIPFGDVRLPPPADYNKEITEGDEVEVYSRANEQEPCGWWLARVRMMKGDFYVIEYAACDATYNEIVTLERLRPVNPNPLATKGSFFKVTMAVPEDLREACSNENVHKEFK

SEQ ID NO: 32867 - protein, 1335 aa, Homo sapiens
  Payload ID: 6442
  Gene Symbol: FREM1
  Gene Name: FRAS1 related extracellular matrix 1
  ENSP ID: ENSP00000370257
MNSLSWGAANAVLLLLLLAWASPTFISINRGVRVMKGHSAFLSGDDLKFAIPKEKDACKVEVVMNEPITQRVGKLTPQVFDCHFLPNEVKYVHNGCPILDEDTVKLRLYRFTERDTFIETFILWVYLLEPDCNIIHMSNNVLEVPEFNGLSQAIDKNLLRFDYDRMASLECTVSLDTARTRLPAHGQMVLGEPRPEEPRGDQPHSFFPESQLRAKLKCPGGSCTPGLKKIGSLKVSCEEFLLMGLRYQHLDPPSPNIDYISIQLDLTDTRSKIVYKSESAWLPVYIRAGIPNQIPKAAFMAVFILEVDQFILTSLTTSVLDCEEDETPKPLLVFNITKAPLQGYVTHLLDHTRPISSFTWKDLSDMQIAYQPPNSSHSERRHDEVELEVYDFFFERSAPMTVHISIRTADTNAPRVSWNTGLSLLEGQSRAITWEQFQVVDNDDIGAVRLVTVGGLQHGWLTLRGGKGFLFTVADLQAGVVRYHHDDSDSTKDFVVFRIFDGHHSIRHKFPINVLPKDDSPPFLITNVVIELEEGQTILIQGSMLRASDVDASDDYIFFNITKPPQAGEIMKKPGPGLIGYPVHGFLQRDLFNGIIYYRHFGGEIFEDSFQFVLWDSHEPPNLSVPQVATIHITPVDDQLPKEAPGVSRHLVVKETEVAYITKKQLHFIDSESYDRELVYTITTPPFFSFSHRHLDAGKLFMVDSIPKVVKNPTALELRSFTQHAVNYMKVAYMPPMQDIGPHCRDVQFTFSVSNQHGGTLHGICFNITILPVDNQVPEAFTNPLKVTEGGQSIISTEHILISDADTKLDNIDLSLRELPLHGRVELNGFPLNSGGTFSWGDLHTLKVRYQHDGTEVLQDDLLLEVTDGTNSAEFVLHVEVFPVNDEPPVLKADLMPVMNCSEGGEVVITSEYIFATDVDSDNLKLMFVIAREPQHGVVRRAGVTVDQFSQRDVISEAVTYKHTGGEIGLMPCFDTITLVVSDGEAGPFVNGCCYNGPNPSVPLHASFPVYDLNITVYPVDNQPPSIAIGPVFVVDEGCSTALTVNHLSATDPDTAADDLEFVLVSPPQFGYLENILPSVGFEKSNIGISIDSFQWKDMNAFHINYVQSRHLRIEPTADQFTVYVTDGKHHSLEIPFSIIINPTNDEAPDFVVQNITVCEGQMKELDSSIISAVDLDIPQDALLFSITQKPRHGLLIDRGFSKDFSENKQPANPHQKHAPVHSFSMELLKTGMRLTYMHDDSESLADDFTIQLSDGKHKILKTISVEVIPVNDEKPMLSKKAEIAMNMGETRIISSAILSAIDEDSPREKIYYVFERLPQNGQLQLKECQLRCGI

SEQ ID NO: 32868 - protein, 2179 aa, Homo sapiens
  Payload ID: 6442
  Gene Symbol: FREM1
  Gene Name: FRAS1 related extracellular matrix 1
  Uniprot ID: Q5H8C1
  ENSP ID: ENSP00000370262
MNSLSWGAANAVLLLLLLAWASPTFISINRGVRVMKGHSAFLSGDDLKFAIPKEKDACKVEVVMNEPITQRVGKLTPQVFDCHFLPNEVKYVHNGCPILDEDTVKLRLYRFTERDTFIETFILWVYLLEPDCNIIHMSNNVLEVPEFNGLSQAIDKNLLRFDYDRMASLECTVSLDTARTRLPAHGQMVLGEPRPEEPRGDQPHSFFPESQLRAKLKCPGGSCTPGLKKIGSLKVSCEEFLLMGLRYQHLDPPSPNIDYISIQLDLTDTRSKIVYKSESAWLPVYIRAGIPNQIPKAAFMAVFILEVDQFILTSLTTSVLDCEEDETPKPLLVFNITKAPLQGYVTHLLDHTRPISSFTWKDLSDMQIAYQPPNSSHSERRHDEVELEVYDFFFERSAPMTVHISIRTADTNAPRVSWNTGLSLLEGQSRAITWEQFQVVDNDDIGAVRLVTVGGLQHGWLTLRGGKGFLFTVADLQAGVVRYHHDDSDSTKDFVVFRIFDGHHSIRHKFPINVLPKDDSPPFLITNVVIELEEGQTILIQGSMLRASDVDASDDYIFFNITKPPQAGEIMKKPGPGLIGYPVHGFLQRDLFNGIIYYRHFGGEIFEDSFQFVLWDSHEPPNLSVPQVATIHITPVDDQLPKEAPGVSRHLVVKETEVAYITKKQLHFIDSESYDRELVYTITTPPFFSFSHRHLDAGKLFMVDSIPKVVKNPTALELRSFTQHAVNYMKVAYMPPMQDIGPHCRDVQFTFSVSNQHGGTLHGICFNITILPVDNQVPEAFTNPLKVTEGGQSIISTEHILISDADTKLDNIDLSLRELPLHGRVELNGFPLNSGGTFSWGDLHTLKVRYQHDGTEVLQDDLLLEVTDGTNSAEFVLHVEVFPVNDEPPVLKADLMPVMNCSEGGEVVITSEYIFATDVDSDNLKLMFVIAREPQHGVVRRAGVTVDQFSQRDVISEAVTYKHTGGEIGLMPCFDTITLVVSDGEAGPFVNGCCYNGPNPSVPLHASFPVYDLNITVYPVDNQPPSIAIGPVFVVDEGCSTALTVNHLSATDPDTAADDLEFVLVSPPQFGYLENILPSVGFEKSNIGISIDSFQWKDMNAFHINYVQSRHLRIEPTADQFTVYVTDGKHHSLEIPFSIIINPTNDEAPDFVVQNITVCEGQMKELDSSIISAVDLDIPQDALLFSITQKPRHGLLIDRGFSKDFSENKQPANPHQKHAPVHSFSMELLKTGMRLTYMHDDSESLADDFTIQLSDGKHKILKTISVEVIPVNDEKPMLSKKAEIAMNMGETRIISSAILSAIDEDSPREKIYYVFERLPQNGQLQLKIGRDWVPLSPGMKCTQEEVDLNLLRYTHTGAMDSQNQDSFTFYLWDGNNRSPALDCQITIKDMEKGDIVILTKPLVVSKGDRGFLTTTTLLAVDGTDKPEELLYVITSPPRYGQIEYVHYPGVPITNFSQMDVVGQTVCYVHKSKVTVSSDRFRFIISNGLRTEHGVFEITLETVDRALPVVTRNKGLRLAQGAVGLLSPDLLQLTDPDTPAENLTFLLVQLPQHGQLYLWGTGLLQHNFTQQDVDSKNVAYRHSGGDSQTDCFTFMATDGTNQGFIVNGRVWEEPVLFTIQVDQLDKTAPRITLLHSPSQVGLLKNGCYGIYITSRVLKASDPDTEDDQIIFKILQGPKHGHLENTTTGEFIHEKFSQKDLNSKTILYIINPSLEVNSDTVEFQIMDPTGNSATPQILELKWSHIEWSQTEYEVCENVGLLPLEIIRRGYSMDSAFVGIKVNQVSAAVGKDFTVIPSKLIQFDPGMSTKMWNIAITYDGLEEDDEVFEVILNSPVNAVLGTKTKAAVKILDSKGGQCHPSYSSNQSKHSTWEKGIWHLLPPGSSSSTTSGSFHLERRPLPSSMQLAVIRGDTLRGFDSTDLSQRKLRTRGNGKTVRPSSVYRNGTDIIYNYHGIVSLKLEDDSFPTHKRKAKVSIISQPQKTIKVAELPQADKVESTTDSHFPRQDQLPSFPKNCTLELKGLFHFEEGIQKLYQCNGIAWKAWSPQTKDVEDKSCPAGWHQHSGYCHILITEQKGTWNAAAQACREQYLGNLVTVFSRQHMRWLWDIGGRKSFWIGLNDQVHAGHWEWIGGEPVAFTNGRRGPSQRSKLGKSCVLVQRQGKWQTKDCRRAKPHNYVCSRKL

SEQ ID NO: 32869 - protein, 715 aa, Homo sapiens
  Payload ID: 6442
  Gene Symbol: FREM1
  Gene Name: FRAS1 related extracellular matrix 1
  Uniprot ID: Q5H8C1
  ENSP ID: ENSP00000370278
MVTQESMLKAALPLFTRFIISNGLRTEHGVFEITLETVDRALPVVTRNKGLRLAQGAVGLLSPDLLQLTDPDTPAENLTFLLVQLPQHGQLYLWGTGLLQHNFTQQDVDSKNVAYRHSGGDSQTDCFTFMATDGTNQGFIVNGRVWEEPVLFTIQVDQLDKTAPRITLLHSPSQVGLLKNGCYGIYITSRVLKASDPDTEDDQIIFKILQGPKHGHLENTTTGEFIHEKFSQKDLNSKTILYIINPSLEVNSDTVEFQIMDPTGNSATPQILELKWSHIEWSQTEYEVCENVGLLPLEIIRRGYSMDSAFVGIKVNQVSAAVGKDFTVIPSKLIQFDPGMSTKMWNIAITYDGLEEDDEVFEVILNSPVNAVLGTKTKAAVKILDSKGGQCHPSYSSNQSKHSTWEKGIWHLLPPGSSSSTTSGSFHLERRPLPSSMQLAVIRGDTLRGFDSTDLSQRKLRTRGNGKTVRPSSVYRNGTDIIYNYHGIVSLKLEDDSFPTHKRKAKVSIISQPQKTIKVAELPQADKVESTTDSHFPRQDQLPSFPKNCTLELKGLFHFEEGIQKLYQCNGIAWKAWSPQTKDVEDKSCPAGWHQHSGYCHILITEQKGTWNAAAQACREQYLGNLVTVFSRQHMRWLWDIGGRKSFWIGLNDQVHAGHWEWIGGEPVAFTNGRRGPSQRSKLGKSCVLVQRQGKWQTKDCRRAKPHNYVCSRKL

SEQ ID NO: 32870 - protein, 222 aa, Homo sapiens
  Payload ID: 6442
  Gene Symbol: FREM1
  Gene Name: FRAS1 related extracellular matrix 1
  Uniprot ID: Q5H8C1
  ENSP ID: ENSP00000412597
MLDESLAVRRSKKCKEMIMHWEKKEDIDIVNTVDQLDKTAPRITLLHSPSQVGLLKNGCYGIYITSRVLKASDPDTEDDQIIFKILQGPKHGHLENTTTGEFIHEKFSQKDLNSKTILYIINPSLEVNSDTVEFQIMDPTGNSATPQILELKWSHIEWSQTEYEVCENVGLLPLEIIRRGYSMDSAFVGIKVNQVSAAVGKDFTVIPSKLIQFDPGSSILCL

SEQ ID NO: 32871 - protein, 2179 aa, Homo sapiens; identical to SEQ ID NO: 32868
  Payload ID: 6442
  Gene Symbol: FREM1
  Gene Name: FRAS1 related extracellular matrix 1
  Uniprot ID: Q5H8C1
  ENSP ID: ENSP00000412940

SEQ ID NO: 32872 - protein, 2139 aa, Homo sapiens
  Payload ID: 6443
  Gene Symbol: FREM3
  Gene Name: FRAS1 related extracellular matrix 3
  Uniprot ID: P0C091
  ENSP ID: ENSP00000332886
MAGASRHPTGTPRQLLVALACLLLSRPALQGRASSLGTEPDPALYLPARGALDGTRPDGPSVLIANPGLRVPLGRSLWLDPLRDLVIGVQPGDRCEVTVLDALPRLKGALSPRRFPCTFGPRQVQYTHFGSHSPGRARVLLQLRYDAPTHTLVLPFTLAVDLVFSQLELVTRNRPLVVEKLRSWSRAIDRRVLDFASLKSGATATRRCRLTPLPHEDGPLPKYGRLVDAVGAPLPRGKGVDCEAFLRAGVRYQHTATSSPNRDYVPMMVELLGPEGQDAGSAGVLVREHFQLLVRIRGGAENTPPRPSFMATMMMEVDPLVLTALTPDALAAEDVESDPGDLVFNILNAPTHPPGHPGQQGYVVSTDDPLGLPVSFFTQQELRELKIAYQPPAENSHGERLFQLELEVVDGDGAASDPFAFMVTVKSMNTLVPVASHNRGLVLFEGQSRPLSSTHSIPISDKDNLEEVKMAAVRGLRHGQLVVFGAPAGCKYFTPADLAAGRVVYQHDGSNTYSDNIIFRMEDGHHQVDFLFPLTILPVDDEPPMVNTNTGLSLTEGQVVQISPFVLSATDIDSEDSTIHFVLENQPLKGNEEEPQWELAPGSSHSGHYLGDLLLQQAELPLSTEDEDWHYMEKEGLYEKVVTEWLQRDIMEGRLFYRHLGPHSPQSVMVQLAFHVQDDHDPPNLSKQHIFTIKVQPVDILSPQLYPGTTLEMTVQEYQLTHFQKNFLRYIDQDSDDQNLWYTLLTLPTDTDGNHQVRAGEIVLTDSPDTLIMHFTQAQVNQHKVAYQPPQKLGIAPRVVQFTYQVEDAAGNSVPGTFTLFLQPVDNQPPEVTNRGFAILEGGSFNLSSNELHVTDPDTDIDQIVFILVRGPQHGHLQYFKRCMVPGESFMQADVINGSVSYQHGRDQTTTSDTFHLEVSDGVHHIPITIPISVHPNVANRSPRISLRSSSLLDVSIDVLENKATEITMGVIHGKRKDVGDLMLSFIVKDSPKLGTILVNGLPTERFTQEDLINGRVAYAHTAGEVGFQKQHDAFSLILSKDSYQWVVGNSIIEKVQVQVTVLPVDNVGPKVFVGESFIVYEGEKNSLTLQHLHVEDVDTHQDELLCTVTSQPASGYLEKIASAPGSKMSQSGSPISAFSLRDIQVRHINYVQSIHKGVEPQEDQFTFYCSDGINFSPNVFFPIIILPTNDEQPKLFAHEFKVLEGMSLVIDTQLLNGADADLPPNELHFQLTALPRHGRIIQQLATGSQPIHSFTLKEIQEASTIVYEHDDSETKEDSFEVWLSDGKHTTHRKVPIVVTLVDDETPHLTVNNGLKVEKGHSEIITNRILKATDLDSDDKSLSFVLHSGPQQGLLQRLRKPRGEVRNNLTLGMNFTQDEINRGLICYIHTGQEGIVDIIKFDVTDGVNTLTDHYFYVTIGNLDSVFPEVISKRITLIEGARVTLTNNLLTNSDINSSDEHHFSITRAPSLGHLESSDYAGEPIASFTQLQLASNKISYVHTSNDEKKMDSFEFQVIGELYPVFRTFRIFITDVDNKKPILTIHRLTLQKEDSQLITLLELTVEDSDTPDDLILFTITQVPMHGKILYNGSRPVTTFTKQDLNKNLISYKHDGSETTEDSFSLTVTDGTHTDFYVLPDTALATHKPQVMRVQIRSLDNRLPQITTNRGAPALKRLHTGHMGFLITSKSLKAEDQDSPHRLLKYKVTRGPEHGFIIKTGLGNQSTRVFTQADIDEMKISYVLNEGSNASKDIFYFSVEDNGGNKLTNQPFHLNWAWICLEKEYYIVDEDSTFLEVTLTRRGYLGETSFISIGTKDETAKKDKDFKWKTNKQIQFNPGQTTATWRVRIIPDNEYETSETFQIILSEPLMAVLEFPEMATVEIVDPGDESTVYIPEAEYKIEEDIGELLIPVRRSGDASQELIVICSTRQGSATGTISSTVLFSDYISRPEDHTSILHFDKNETQKTCQVLIIDDSLYEEEESFSVSLRLPVGGQLGARFPTTKVTILADRYDEPVLHFGDAEYHVNESARYVEVCVWRRGTDLSQPSSIAVRSRKSEQESAEAGTDYVGISRNLDFAPGVRMQTFQVTILDDLGQPTLEGPEKFELLLQMPMGAVLGEPNKTTIFIEDTITDCKQSACSSFD

SEQ ID NO: 32873 - protein, 3169 aa, Homo sapiens
  Payload ID: 6444
  Gene Symbol: FREM2
  Gene Name: FRAS1 related extracellular matrix protein 2
  Uniprot ID: Q5SZK8
  ENSP ID: ENSP00000280481
MHSAGTPGLSSRRTGNSTSFQPGPPPPPRLLLLLLLLLSLVSRVPAQPAAFGRALLSPGLAGAAGVPAEEAIVLANRGLRVPFGREVWLDPLHDLVLQVQPGDRCAVSVLDNDALAQRPGRLSPKRFPCDFGPGEVRYSHLGARSPSRDRVRLQLRYDAPGGAVVLPLVLEVEVVFTQLEVVTRNLPLVVEELLGTSNALDARSLEFAFQPETEECRVGILSGLGALPRYGELLHYPQVPGGAREGGAPETLLMDCKAFQELGVRYRHTAASRSPNRDWIPMVVELRSRGAPVGSPALKREHFQVLVRIRGGAENTAPKPSFVAMMMMEVDQFVLTALTPDMLAAEDAESPSDLLIFNLTSPFQPGQGYLVSTDDRSLPLSSFTQRDLRLLKIAYQPPSEDSDQERLFELELEVVDLEGAASDPFAFMVVVKPMNTMAPVVTRNTGLILYEGQSRPLTGPAGSGPQNLVISDEDDLEAVRLEVVAGLRHGHLVILGASSGSSAPKSFTVAELAAGQVVYQHDDRDGSLSDNLVLRMVDGGGRHQVQFLFPITLVPVDDQPPVLNANTGLTLAEGETVPILPLSLSATDMDSDDSLLLFVLESPFLTTGHLLLRQTHPPHEKQELLRGLWRKEGAFYERTVTEWQQQDITEGRLFYRHSGPHSPGPVTDQFTFRVQDNHDPPNQSGLQRFVIRIHPVDRLPPELGSGCPLRMVVQESQLTPLRKKWLRYTDLDTDDRELRYTVTQPPTDTDENHLPAPLGTLVLTDNPSVVVTHFTQAQINHHKIAYRPPGQELGVATRVAQFQFQVEDRAGNVAPGTFTLYLHPVDNQPPEILNTGFTIQEKGHHILSETELHVNDVDTDVAHISFTLTQAPKHGHMRVSGQILHVGGLFHLEDIKQGRVSYAHNGDKSLTDSCSLEVSDRHHVVPITLRVNVRPVDDEVPILSHPTGTLESYLDVLENGATEITANVIKGTNEETDDLMLTFLLEDPPLYGEILVNGIPAEQFTQRDILEGSVVYTHTSGEIGLLPKADSFNLSLSDMSQEWRIGGNTIQGVTIWVTILPVDSQAPEIFVGEQLIVMEGDKSVITSVHISAEDVDSLNDDILCTIVIQPTSGYVENISPAPGSEKSRAGIAISAFNLKDLRQGHINYVQSVHKGVEPVEDRFVFRCSDGINFSERQFFPIVIIPTNDEQPEMFMREFMVMEGMSLVIDTPILNAADADVPLDDLTFTITQFPTHGHIMNQLINGTVLVESFTLDQIIESSSIIYEHDDSETQEDSFVIKLTDGKHSVEKTVLIIVIPVDDETPRMTINNGLEIEIGDTKIINNKILMATDLDSEDKSLVYIIRYGPGHGLLQRRKPTGAFENITLGMNFTQDEVDRNLIQYVHLGQEGIRDLIKFDVTDGINPLIDRYFYVSIGSIDIVFPDVISKGVSLKEGGKVTLTTDLLSTSDLNSPDENLVFTITRAPMRGHLECTDQPGVSITSFTQLQLAGNKIYYIHTADDEVKMDSFEFQVTDGRNPVFRTFRISISDVDNKKPVVTIHKLVVSESENKLITPFELTVEDRDTPDKLLKFTITQVPIHGHLLFNNTRPVMVFTKQDLNENLISYKHDGTESSEDSFSFTVTDGTHTDFYVFPDTVFETRRPQVMKIQVLAVDNSVPQIAVNKGASTLRTLATGHLGFMITSKILKVEDRDSLHISLRFIVTEAPQHGYLLNLDKGNHSITQFTQADIDDMKICYVLREGANATSDMFYFAVEDGGGNKLTYQNFRLNWAWISFEKEYYLVNEDSKFLDVVLKRRGYLGETSFISIGTRDRTAEKDKDFKGKAQKQVQFNPGQTRATWRVRILSDGEHEQSETFQVVLSEPVLAALEFPTVATVEIVDPGDEPTVFIPQSKYSVEEDVGELFIPIRRSGDVSQELMVVCYTQQGTATGTVPTSVLSYSDYISRPEDHTSVVRFDKDEREKLCRIVIIDDSLYEEEETFHVLLSMPMGGRIGSEFPGAQVTIVPDKDDEPIFYFGDVEYSVDESAGYVEVQVWRTGTDLSKSSSVTVRSRKTDPPSADAGTDYVGISRNLDFAPGVNMQPVRVVILDDLGQPALEGIEKFELVLRMPMNAALGEPSKATVSINDSVSDLPKMQFKERIYTGSESDGQIVTMIHRTGDVQYRSSVRCYTRQGSAQVMMDFEERPNTDTSIITFLPGETEKPCILELMDDVLYEEVEELRLVLGTPQSNSPFGAAVGEQNETLIRIRDDADKTVIKFGETKFSVTEPKEPGESVVIRIPVIRQGDTSKVSIVRVHTKDGSATSGEDYHPVSEEIEFKEGETQHVVEIEVTFDGVREMREAFTVHLKPDENMIAEMQLTKAIVYIEEMSSMADVTFPSVPQIVSLLMYDDTSKAKESAEPMSGYPVICITACNPKYSDYDKTGSICASENINDTLTRYRWLISAPAGPDGVTSPMREVDFDTFFTSSKMVTLDSIYFQPGSRVQCAARAVNTNGDEGLELMSPIVTISREEGLCQPRVPGVVGAEPFSAKLRYTGPEDADYTNLIKLTVTMPHIDGMLPVISTRELSNFELTLSPDGTRVGNHKCSNLLDYTEVKTHYGFLTDATKNPEIIGETYPYQYSLSIRGSTTLRFYRNLNLEACLWEFVSYYDMSELLADCGGTIGTDGQVLNLVQSYVTLRVPLYVSYVFHSPVGVGGWQHFDLKSELRLTFVYDTAILWNDGIGSPPEAELQGSLYPTSMRIGDEGRLAVHFKTEAQFHGLFVLSHPASFTSSVIMSADHPGLTFSLRLIRSEPTYNQPVQQWSFVSDFAVRDYSGTYTVKLVPCTAPSHQEYRLPVTCNPREPVTFDLDIRFQQVSDPVAAEFSLNTQMYLLSKKSLWLSDGSMGFGQESDVAFAEGDIIYGRVMVDPVQNLGDSFYCSIEKVFLCTGADGYVPKYSPMNAEYGCLADSPSLLYRFKIVDKAQPETQATSFGNVLFNAKLAVDDPEAILLVNQPGSDGFKVDSTPLFQVALGREWYIHTIYTVRSKDNANRGIGKRSVEYHSLVSQGKPQSTTKSRKKREIRSTPSLAWEIGAENSRGTNIQHIALDRTKRQIPHGRAPPDGILPWELNSPSSAVSLVTVVGGTTVGLLTICLTVIAVLMCRGKESFRGKDAPKGSSSSEPMVPPQSHHNDSSEV

SEQ ID NO: 32874 - protein, 317 aa, Homo sapiens
  Payload ID: 6445
  Gene Symbol: FRAS1
  Gene Name: Fraser extracellular matrix complex subunit 1
  ENSP ID: ENSP00000264899
MGVLKVWLGLALALAEFAVLPHHSEGACVYQDSLLADATIWKPDSCQSCRCHGDIVICKPAVCRNPQCAFEKGEVLQIAANQCCPECVLRTPGSCHHEKKIHEHGTEWASSPCSVCSCNHGEVRCTPQPCPPLSCGHQELAFIPEGSCCPVCVGLGKPCSYEGHVFQDGEDWRLSRCAKCLCRNGVAQCFTAQCQPLFCNQDETVVRVPGKCCPQCSARSCSAAGQVYEHGEQWSENACTTCICDRGEVRCHKQACLPLRCGKGQSRARRHGQCCEECVSPALASQSVGITGMSHHAQSLLGPFLTQIKKPHFSCLE

SEQ ID NO: 32875 - protein, 1976 aa, Homo sapiens
  Payload ID: 6445
  Gene Symbol: FRAS1
  Gene Name: Fraser extracellular matrix complex subunit 1
  Uniprot ID: Q86XX4
  ENSP ID: ENSP00000326330
MGVLKVWLGLALALAEFAVLPHHSEGACVYQDSLLADATIWKPDSCQSCRCHGDIVICKPAVCRNPQCAFEKGEVLQIAANQCCPECVLRTPGSCHHEKKIHEHGTEWASSPCSVCSCNHGEVRCTPQPCPPLSCGHQELAFIPEGSCCPVCVGLGKPCSYEGHVFQDGEDWRLSRCAKCLCRNGVAQCFTAQCQPLFCNQDETVVRVPGKCCPQCSARSCSAAGQVYEHGEQWSENACTTCICDRGEVRCHKQACLPLRCGKGQSRARRHGQCCEECVSPAGSCSYDGVVRYQDEMWKGSACEFCMCDHGQVTCQTGECAKVECARDEELIHLDGKCCPECISRNGYCVYEETGEFMSSNASEVKRIPEGEKWEDGPCKVCECRGAQVTCYEPSCPPCPVGTLALEVKGQCCPDCTSVHCHPDCLTCSQSPDHCDLCQDPTKLLQNGWCVHSCGLGFYQAGSLCLACQPQCSTCTSGLECSSCQPPLLMRHGQCVPTCGDGFYQDRHSCAVCHESCAGCWGPTEKHCLACRDPLHVLRDGGCESSCGKGFYNRQGTCSACDQSCDSCGPSSPRCLTCTEKTVLHDGKCMSECPGGYYADATGRCKVCHNSCASCSGPTPSHCTACSPPKALRQGHCLPRCGEGFYSDHGVCKACHSSCLACMGPAPSHCTGCKKPEEGLQVEQLSDVGIPSGECLAQCRAHFYLESTGICEACHQSCFRCAGKSPHNCTDCGPSHVLLDGQCLSQCPDGYFHQEGSCTECHPTCRQCHGPLESDCISCYPHISLTNGNCRTSCREEQFLNLVGYCADCHHLCQHCAADLHNTGSICLRCQNAHYLLLGDHCVPDCPSGYYAERGACKKCHSSCRTCQGRGPFSCSSCDTNLVLSHTGTCSTTCFPGHYLDDNHVCQPCNTHCGSCDSQASCTSCRDPNKVLLFGECQYESCAPQYYLDFSTNTCKECDWSCSACSGPLKTDCLQCMDGYVLQDGACVEQCLSSFYQDSGLCKNCDSYCLQCQGPHECTRCKGPFLLLEAQCVQECGKGYFADHAKHKCTACPQGCLQCSHRDRCHLCDHGFFLKSGLCVYNCVPGFSVHTSNETCSGKIHTPSLHVNGSLILPIGSIKPLDFSLLNVQDQEGRVEDLLFHVVSTPTNGQLVLSRNGKEVQLDKAGRFSWKDVNEKKVRFVHSKEKLRKGYLFLKISDQQFFSEPQLINIQAFSTQAPYVLRNEVLHISRGERATITTQMLDIRDDDNPQDVVIEIIDPPLHGQLLQTLQSPATPIYQFQLDELSRGLLHYAHDGSDSTSDVAVLQANDGHSFHNILFQVKTVPQNDRGLQLVANSMVWVPEGGMLQITNRILQAEAPGASAEEIIYKITQDYPQFGEVVLLVNMPADSPADEGQHLPDGRTATPTSTFTQQDINEGIVWYRHSGAPAQSDSFRFEVSSASNAQTRLESHMFNIAILPQTPEAPKVSLEASLHMTAREDGLTVIQPHSLSFINSEKPSGKIVYNITLPLHPNQGIIEHRDHPHSPIRYFTQEDINQGKVMYRPPPAAPHLQELMAFSFAGLPESVKFHFTVSDGEHTSPEMVLTIHLLPSDQQLPVFQVTAPRLAVSPGGSTSVGLQVVVRDAETAPKELFFELRRPPQHGVLLKHTAEFRRPMATGDTFTYEDVEKNALQYIHDGSSTREDSMEISVTDGLTVTMLEVRVEVSLSEDRGPRLAAGSSLSITVASKSTAIITRSHLAYVDDSSPDPEIWIQLNYLPSYGTLLRISGSEVEELSEVSNFTMEDINNKKIRYSAVFETDGHLVTDSFYFSVSDMDHNHLDNQIFTIMITPAENPPPVIAFADLITVDEGGRAPLSFHHFFATDDDDNLQRDAIIKLSALPKYGCIENTGTGDRFGPETASDLEASFPIQDVLENYIYYFQSVHESIEPTHDIFSFYVSDGTSRSEIHSINITIEVKTLEVGKVEPLTTIFHTIRELSL

SEQ ID NO: 32876 - protein, 426 aa, Homo sapiens
  Payload ID: 6445
  Gene Symbol: FRAS1
  Gene Name: Fraser extracellular matrix complex subunit 1
  ENSP ID: ENSP00000422221
  MOD_RES (1)..(1): Any amino acid
XTLPLHPNQGLPESVKFHFTVSDGEHTSPEMVLTIHLLPSDQQLPVFQVTAPRLAVSPGGSTSVGLQVVVRDAETAPKELFFELRRPPQHGVLLKHTAEFRRPMATGDTFTYEDVEKNALQYIHDGSSTREDSMEISVTDGLTVTMLEVRVEVSLSEDRGPRLAAGSSLSITVASKSTAIITRSHLAYVDDSSPDPEIWIQLNYLPSYGTLLRISGSEVEELSEVSNFTMEDINNKKIRYSAVFETDGHLVTDSFYFSVSDMDHNHLDNQIFTIMITPAENPPPVIAFADLITVDEGGRAPLSFHHFFATDDDDNLQRDAIIKLSALPKYGCIENTGTGDRFGPETASDLEASFPIQDVLENYIYYFQSVHESIEPTHDIFSFYVSDGTSRSEIHSINITIEVKTLEVGKVEPLTTIFHTIRELSL

SEQ ID NO: 32877 - protein, 4012 aa, Homo sapiens
  Payload ID: 6445
  Gene Symbol: FRAS1
  Gene Name: Fraser extracellular matrix complex subunit 1
  Uniprot ID: Q86XX4
  ENSP ID: ENSP00000422834
MGVLKVWLGLALALAEFAVLPHHSEGACVYQDSLLADATIWKPDSCQSCRCHGDIVICKPAVCRNPQCAFEKGEVLQIAANQCCPECVLRTPGSCHHEKKIHEHGTEWASSPCSVCSCNHGEVRCTPQPCPPLSCGHQELAFIPEGSCCPVCVGLGKPCSYEGHVFQDGEDWRLSRCAKCLCRNGVAQCFTAQCQPLFCNQDETVVRVPGKCCPQCSARSCSAAGQVYEHGEQWSENACTTCICDRGEVRCHKQACLPLRCGKGQSRARRHGQCCEECVSPAGSCSYDGVVRYQDEMWKGSACEFCMCDHGQVTCQTGECAKVECARDEELIHLDGKCCPECISRNGYCVYEETGEFMSSNASEVKRIPEGEKWEDGPCKVCECRGAQVTCYEPSCPPCPVGTLALEVKGQCCPDCTSVHCHPDCLTCSQSPDHCDLCQDPTKLLQNGWCVHSCGLGFYQAGSLCLACQPQCSTCTSGLECSSCQPPLLMRHGQCVPTCGDGFYQDRHSCAVCHESCAGCWGPTEKHCLACRDPLHVLRDGGCESSCGKGFYNRQGTCSACDQSCDSCGPSSPRCLTCTEKTVLHDGKCMSECPGGYYADATGRCKVCHNSCASCSGPTPSHCTACSPPKALRQGHCLPRCGEGFYSDHGVCKACHSSCLACMGPAPSHCTGCKKPEEGLQVEQLSDVGIPSGECLAQCRAHFYLESTGICEACHQSCFRCAGKSPHNCTDCGPSHVLLDGQCLSQCPDGYFHQEGSCTECHPTCRQCHGPLESDCISCYPHISLTNGNCRTSCREEQFLNLVGYCADCHHLCQHCAADLHNTGSICLRCQNAHYLLLGDHCVPDCPSGYYAERGACKKCHSSCRTCQGRGPFSCSSCDTNLVLSHTGTCSTTCFPGHYLDDNHVCQPCNTHCGSCDSQASCTSCRDPNKVLLFGECQYESCAPQYYLDFSTNTCKECDWSCSACSGPLKTDCLQCMDGYVLQDGACVEQCLSSFYQDSGLCKNCDSYCLQCQGPHECTRCKGPFLLLEAQCVQECGKGYFADHAKHKCTACPQGCLQCSHRDRCHLCDHGFFLKSGLCVYNCVPGFSVHTSNETCSGKIHTPSLHVNGSLILPIGSIKPLDFSLLNVQDQEGRVEDLLFHVVSTPTNGQLVLSRNGKEVQLDKAGRFSWKDVNEKKVRFVHSKEKLRKGYLFLKISDQQFFSEPQLINIQAFSTQAPYVLRNEVLHISRGERATITTQMLDIRDDDNPQDVVIEIIDPPLHGQLLQTLQSPATPIYQFQLDELSRGLLHYAHDGSDSTSDVAVLQANDGHSFHNILFQVKTVPQNDRGLQLVANSMVWVPEGGMLQITNRILQAEAPGASAEEIIYKITQDYPQFGEVVLLVNMPADSPADEGQHLPDGRTATPTSTFTQQDINEGIVWYRHSGAPAQSDSFRFEVSSASNAQTRLESHMFNIAILPQTPEAPKVSLEASLHMTAREDGLTVIQPHSLSFINSEKPSGKIVYNITLPLHPNQGIIEHRDHPHSPIRYFTQEDINQGKVMYRPPPAAPHLQELMAFSFAGLPESVKFHFTVSDGEHTSPEMVLTIHLLPSDQQLPVFQVTAPRLAVSPGGSTSVGLQVVVRDAETAPKELFFELRRPPQHGVLLKHTAEFRRPMATGDTFTYEDVEKNALQYIHDGSSTREDSMEISVTDGLTVTMLEVRVEVSLSEDRGPRLAAGSSLSITVASKSTAIITRSHLAYVDDSSPDPEIWIQLNYLPSYGTLLRISGSEVEELSEVSNFTMEDINNKKIRYSAVFETDGHLVTDSFYFSVSDMDHNHLDNQIFTIMITPAENPPPVIAFADLITVDEGGRAPLSFHHFFATDDDDNLQRDAIIKLSALPKYGCIENTGTGDRFGPETASDLEASFPIQDVLENYIYYFQSVHESIEPTHDIFSFYVSDGTSRSEIHSINITIERKNDEPPRMTLQPLRVQLSSGVVISNSSLSLQDLDTPDNELIFVLTKKPDHGHVLWRQTASEPLENGRVLVQGSTFTYQDILAGLVGYVPSVPGMVVDEFQFSLTDGLHVDTGRMKIYTELPASDTPHLAINQGLQLSAGSVARITEQHLKVTDIDSDDHQVMYIMKEDPGAGRLQMMKHGNLEQISIKGPIRSFTQADISQGHVEYSHGTGEPGGSFAFKFDVVDGEGNRLIDKSFSISILEDKSPPVITTNKGLVLDENSVKKITTLQLSATDQDSGPTELIYRITRQPQLGHLEHAASPGIQISSFTQADLTSRNVQYVHSSEAEKHSDAFSFTLSDGVSEVTQTFHITLHPVDDSLPVVQNLGMRVQEGMRKTITEFELKAVDADTEAESVTFTIVQPPRHGTIERTSNGQHFHLTSTFTMKDIYQNRVSYSHDGSNSLKDRFTFTVSDGTNPFFIIEEGGKEIMTAAPQPFRVDILPVDDGTPRIVTNLGLQWLEYMDGKATNLITKKELLTMDPDTEDAQLVYEITTGPKHGFVENKLQPGRAAATFTQEDVNLGLIRYVLHKEKIREMMDSFQFLVKDSKPNVVSDNVFHIQWSLISFKYTSYNVSEKAGSVSVTVQRTGNLNQYAIVLCRTEQGTASSSSRVSSQPGQQDYVEYAGQVQFDEREDTKSCTIVINDDDVFENVESFTVELSMPAYALLGEFTQAKVIINDTEDEPTLEFDKKIYWVNESAGFLFAPIERKGDASSIVSAICYTVPKSAMGSSLYALESGSDFKSRGMSAASRVIFGPGVTMSTCDVMLIDDSEYEEEEEFEIALADASDNARIGRVATAKVLISGPNDASTVSLGNTAFTVSEDAGTVKIPVIRHGTDLSTFASVWCATRPSDPASATPGVDYVPSSRKVEFGPGVIEQYCTLTILDDTQYPVIEGLETFVVFLSSAQGAELTKPFQAVIAINDTFQDVPSMQFAKDLLLVKEKEGVLHVPITRSGDLSYESSVRCYTQSHSAQVMEDFEERQNADSSRITFLKGDKVKNCTVYIHDDSMFEPEEQFRVYLGLPLGNHWSGARIGKNNMATITISNDEDAPTIEFEEAAYQVREPAGPDAIAILNIKVIRRGDQNRTSKVRCSTRDGSAQSGVDYYPKSRVLKFSPGVDHIFFKVEILSNEDREWHESFSLVLGPDDPVEAVLGDVTTATVTILDQEAAGSLILPAPPIVVTLADYDHVEEVTKEGVKKSPSPGYPLVCVTPCDPHFPRYAVMKERCSEAGINQTSVQFSWEVAAPTDGNGARSPFETITDNTPFTSVNHMVLDSIYFSRRFHVRCVAKAVDKVGHVGTPLRSNIVTIGTDSAICHTPVVAGTSRGFQAQSFIATLKYLDVKHKEHPNRIHISVQIPHQDGMLPLISTMPLHNLHFLLSESIYRHQHVCSNLVTTYDLRGISEAGFLDDVVYDSTALGPGYDRPFQFDPSVREPKTIQLYKHLNLKSCVWTFDAYYDMTELIDVCGGSVTADFQVRDSAQSFLTVHVPLYVSYIYVTAPRGWASLEHHTEMEFSFFYDTVLWRTGIQTDSVLSARLQIIRIYIREDGRLVIEFKTHAKFRGQFVMEHHTLPEVKSFVLTPDHLGGIEFDLQLLWSAQTFDSPHQLWRATSSYNRKDYSGEYTIYLIPCTVQPTQPWVDPGEKPLACTAHAPERFLIPIAFQQTNRPVPVVYSLNTEFQLCNNEKVFLMDPNTSDMSLAEMDYKGAFSKGQILYGRVLWNPEQNLNSAYKLQLEKVYLCTGKDGYVPFFDPTGTIYNEGPQYGCIQPNKHLKHRFLLLDRNQPEVTDKYFHDVPFEAHFASELPDFHVVSNMPGVDGFTLKVDALYKVEAGHQWYLQVIYIIGPDTISGPRVQRSLTAPLRRNRRDLVEPDGQLILDDSLIYDNEGDQVKNGTNMKSLNLEMQELAVAASLSQTGASIGSALAAIMLLLLVFLVACFINRKCQKQRKKKPAEDILEEYPLNTKVEVPKRHPDRVEKNVNRHYCTVRNVNILSEPEAAYTFKGAKVKRLNLEVRVHNNLQDGTEV

SEQ ID NO: 32878 - protein, 666 aa, Homo sapiens
  Payload ID: 6445
  Gene Symbol: FRAS1
  Gene Name: Fraser extracellular matrix complex subunit 1
  ENSP ID: ENSP00000423645
  MOD_RES (1)..(1): Any amino acid
XGEVLQIAANQCCPECVLRTPGSCHHEKKIHEHGTEWASSPCSVCSCNHGEVRCTPQPCPPLSCGHQELAFIPEGSCCPVCVGLGKPCSYEGHVFQDGEDWRLSRCAKCLCRNGVAQCFTAQCQPLFCNQDETVVRVPGKCCPQCSARSCSAAGQVYEHGEQWSENACTTCICDRGEVRCHKQACLPLRCGKGQSRARRHGQCCEECVSPAGSCSYDGVVRYQDEMWKGSACEFCMCDHGQVTCQTGECAKVECARDEELIHLDGKCCPECISRNGYCVYEETGEFMSSNASEVKRIPEGEKWEDGPCKVCECRGAQVTCYEPSCPPCPVGTLALEVKGQCCPDCTSVHCHPDCLTCSQSPDHCDLCQDPTKLLQNGWCVHSCGLGFYQAGSLCLACQPQCSTCTSGLECSSCQPPLLMRHGQCVPTCGDGFYQDRHSCAVCHESCAGCWGPTEKHCLACRDPLHVLRDGGCESSCGKGFYNRQGTCSACDQSCDSCGPSSPRCLTCTEKTVLHDGKCMSECPGGYYADATGRCKVCHNSCASCSGPTPSHCTACSPPKALRQGHCLPRCGEGFYSDHGVCKACHSSCLACMGPAPSHCTGCKKPEEGLQVEQLSDVGIPSGECLAQCRAHFYLESTGICEGQNLDFCQNLEVISAVCLGISSTEN

SEQ ID NO: 32879 - protein, 652 aa, Homo sapiens
  Payload ID: 6445
  Gene Symbol: FRAS1
  Gene Name: Fraser extracellular matrix complex subunit 1
  ENSP ID: ENSP00000423809
  MOD_RES (1)..(1): Any amino acid
XCSYEGHVFQDGEDWRLSRCAKCLCRNGVAQCFTAQCQPLFCNQDETVVRVPGKCCPQCSARSCSAAGQVYEHGEQWSENACTTCICDRGEVRCHKQACLPLRCGKGQSRARRHGQCCEECVSPAGSCSYDGVVRYQDEMWKGSACEFCMCDHGQVTCQTGECAKVECARDEELIHLDGKCCPECISRNGYCVYEETGEFMSSNASEVKRIPEGEKWEDGPCKVCECRGAQVTCYEPSCPPCPVGTLALEVKGQCCPDCTSVHCHPDCLTCSQSPDHCDLCQDPTKLLQNGWCVHSCGLGFYQAGSLCLACQPQCSTCTSGLECSSCQPPLLMRHGQCVPTCGDGFYQDRHSCAVCHESCAGCWGPTEKHCLACRDPLHVLRDGGCESSCGKGFYNRQGTCSACDQSCDSCGPSSPRCLTCTEKTVLHDGKCMSECPGGYYADATGRCKVCHNSCASCSGPTPSHCTACSPPKALRQGHCLPRCGEGFYSDHGVCKACHSSCLACMGPAPSHCTGCKKPEEGLQVEQLSDVGIPSGECLAQCRAHFYLESTGICEACHQSCFRCAGKSPHNCTDCGPSHVLLDGQCLSQCPDGYFHQEGSCTECHPTCRQCHGPLESDCISCYPHISLTNGNCRTSCREEQFLNLVGYCAGE

SEQ ID NO: 32880 - protein, 39 aa, Homo sapiens
  Payload ID: 6445
  Gene Symbol: FRAS1
  Gene Name: Fraser extracellular matrix complex subunit 1
  ENSP ID: ENSP00000425583
MGVLKVWLGLALALAEFAVLPHHSEGACVYQDSLLAEGG

SEQ ID NO: 32881 - protein, 210 aa, Homo sapiens
  Payload ID: 6446
  Gene Symbol: FXN
  Gene Name: frataxin
  Uniprot ID: Q16595
  ENSP ID: ENSP00000366482
MWTLGRRAVAGLLASPSPAQAQTLTRVPRPAELAPLCGRRGLRTDIDATCTPRRASSNQRGLNQIWNVKKQSVYLMNLRKSGTLGHPGSLDETTYERLAEETLDSLAEFFEDLADKPYTFEDYDVSFGSGVLTVKLGGDLGTYVINKQTPNKQIWLSSPSSGPKRYDWTGKNWVYSHDGVSLHELLAAELTKALKTKLDLSSLAYSGKDA

SEQ ID NO: 32882 - protein, 171 aa, Homo sapiens
  Payload ID: 6446
  Gene Symbol: FXN
  Gene Name: frataxin
  Uniprot ID: Q16595
  ENSP ID: ENSP00000379650
MWTLGRRAVAGLLASPSPAQAQTLTRVPRPAELAPLCGRRGLRTDIDATCTPRRASSNQRGLNQIWNVKKQSVYLMNLRKSGTLGHPGSLDETTYERLAEETLDSLAEFFEDLADKPYTFEDYDVSFGSGVLTVKLGGDLGTYVINKQTPNKQIWLSSPSRLTWLLWLFHP

SEQ ID NO: 32883 - protein, 196 aa, Homo sapiens
  Payload ID: 6446
  Gene Symbol: FXN
  Gene Name: frataxin
  Uniprot ID: Q16595
  ENSP ID: ENSP00000379652
MWTLGRRAVAGLLASPSPAQAQTLTRVPRPAELAPLCGRRGLRTDIDATCTPRRASSNQRGLNQIWNVKKQSVYLMNLRKSGTLGHPGSLDETTYERLAEETLDSLAEFFEDLADKPYTFEDYDVSFGSGVLTVKLGGDLGTYVINKQTPNKQIWLSSPSRYVVDLSVMTGLGKTGCTPTTACPSMSCWPQSSLKP

SEQ ID NO: 32884 - protein, 135 aa, Homo sapiens
  Payload ID: 6446
  Gene Symbol: FXN
  Gene Name: frataxin
  ENSP ID: ENSP00000418015
MNLRKSGTLGHPGSLDETTYERLAEETLDSLAEFFEDLADKPYTFEDYDVSFGSGVLTVKLGGDLGTYVINKQTPNKQIWLSSPSSGPKRYDWTGKNWVYSHDGVSLHELLAAELTKALKTKLDLSSLAYSGKDA

SEQ ID NO: 32885 - protein, 108 aa, Homo sapiens
  Payload ID: 6446
  Gene Symbol: FXN
  Gene Name: frataxin
  ENSP ID: ENSP00000419243
  MOD_RES (1)..(1): Any amino acid
XPDLECQKAECLFDEFEEIWNFGPPRSGVLTVKLGGDLGTYVINKQTPNKQIWLSSPSSGPKRYDWTGKNWVYSHDGVSLHELLAAELTKALKTKLDLSSLAYSGKDA

SEQ ID NO: 32886 - protein, 300 aa, Homo sapiens
  Payload ID: 6447
  Gene Symbol: FFAR1
  Gene Name: free fatty acid receptor 1
  Uniprot ID: O14842
  ENSP ID: ENSP00000246553
MDLPPQLSFGLYVAAFALGFPLNVLAIRGATAHARLRLTPSLVYALNLGCSDLLLTVSLPLKAVEALASGAWPLPASLCPVFAVAHFFPLYAGGGFLAALSAGRYLGAAFPLGYQAFRRPCYSWGVCAAIWALVLCHLGLVFGLEAPGGWLDHSNTSLGINTPVNGSPVCLEAWDPASAGPARFSLSLLLFFLPLAITAFCYVGCLRALARSGLTHRRKLRAAWVAGGALLTLLLCVGPYNASNVASFLYPNLGGSWRKLGLITGAWSVVLNPLVTGYLGRGPGLKTVCAARTQGGKSQK

SEQ ID NO: 32887 - protein, 330 aa, Homo sapiens
  Payload ID: 6448
  Gene Symbol: FFAR2
  Gene Name: free fatty acid receptor 2
  Uniprot ID: O15552
  ENSP ID: ENSP00000246549
MLPDWKSSLILMAYIIIFLTGLPANLLALRAFVGRIRQPQPAPVHILLLSLTLADLLLLLLLPFKIIEAASNFRWYLPKVVCALTSFGFYSSIYCSTWLLAGISIERYLGVAFPVQYKLSRRPLYGVIAALVAWVMSFGHCTIVIIVQYLNTTEQVRSGNEITCYENFTDNQLDVVLPVRLELCLVLFFIPMAVTIFCYWRFVWIMLSQPLVGAQRRRRAVGLAVVTLLNFLVCFGPYNVSHLVGYHQRKSPWWRSIAVVFSSLNASLDPLLFYFSSSVVRRAFGRGLQVLRNQGSSLLGRRGKDTAEGTNEDRGVGQGEGMPSSDFTTE

SEQ ID NO: 32888 - protein, 330 aa, Homo sapiens; identical to SEQ ID NO: 32887
  Payload ID: 6448
  Gene Symbol: FFAR2
  Gene Name: free fatty acid receptor 2
  Uniprot ID: O15552
  ENSP ID: ENSP00000473159

SEQ ID NO: 32889 - protein, 346 aa, Homo sapiens
  Payload ID: 6449
  Gene Symbol: FFAR3
  Gene Name: free fatty acid receptor 3
  Uniprot ID: O14843
  ENSP ID: ENSP00000328230
MDTGPDQSYFSGNHWFVFSVYLLTFLVGLPLNLLALVVFVGKLQRRPVAVDVLLLNLTASDLLLLLFLPFRMVEAANGMHWPLPFILCPLSGFIFFTTIYLTALFLAAVSIERFLSVAHPLWYKTRPRLGQAGLVSVACWLLASAHCSVVYVIEFSGDISHSQGTNGTCYLEFRKDQLAILLPVRLEMAVVLFVVPLIITSYCYSRLVWILGRGGSHRRQRRVAGLLAATLLNFLVCFGPYNVSHVVGYICGESPAWRIYVTLLSTLNSCVDPFVYYFSSSGFQADFHELLRRLCGLWGQWQQESSMELKEQKGGEEQRADRPAERKTSEHSQGCGTGGQVACAES

SEQ ID NO: 32890 - protein, 346 aa, Homo sapiens; identical to SEQ ID NO: 32889
  Payload ID: 6449
  Gene Symbol: FFAR3
  Gene Name: free fatty acid receptor 3
  Uniprot ID: O14843
  ENSP ID: ENSP00000469522

SEQ ID NO: 32891 - protein, 361 aa, Homo sapiens [sequence omitted]

SEQ ID NO: 32892 - protein, 377 aa, Homo sapiens
  Payload ID: 6450
  Gene Symbol: FFAR4
  Gene Name: free fatty acid receptor 4
  Uniprot ID: Q5NUL3
  ENSP ID: ENSP00000360538
MSPECARAAGDAPLRSLEQANRTRFPFFSDVKGDHRLVLAAVETTVLVLIFAVSLLGNVCALVLVARRRRRGATACLVLNLFCADLLFISAIPLVLAVRWTEAWLLGPVACHLLFYVMTLSGSVTILTLAAVSLERMVCIVHLQRGVRGPGRRARAVLLALIWGYSAVAALPLCVFFRVVPQRLPGADQEISICTLIWPTIPGEISWDVSFVTLNFLVPGLVIVISYSKILQTSEHLLDARAVVTHSEITKASRKRLTVSLAYSESHQIRVSQQDFRLFRTLFLLMVSFFIMWSPIIITILLILIQNFKQDLVIWPSLFFWVVAFTFANSALNPILYNMTLCRNEWKKIFCCFWFPEKGAILTDTSVKRNDLSIISG

SEQ ID NO: 32893 - protein, 236 aa, Homo sapiens
  Payload ID: 6450
  Gene Symbol: FFAR4
  Gene Name: free fatty acid receptor 4
  ENSP ID: ENSP00000474477
MSPECARAAGDAPLRSLEQANRTRFPFFSDVKGDHRLVLAAVETTVLVLIFAVSLLGNVCALVLVARRRRRGATACLVLNLFCADLLFISAIPLVLAVRWTEAWLLGPVACHLLFYVMTLSGSVTILTLAAVSLERMVCIVHLQRGVRGPGRRARAVLLALIWGYSAVAALPLCVFFRVVPQRLPGADQEISICTLIWPTIPGEISWDVSFVTLNFLVPGLVIVISYSKILQGPHW

SEQ ID NO: 32894 - protein, 279 aa, Homo sapiens
  Payload ID: 6451
  Gene Symbol: FRAT1
  Gene Name: frequently rearranged in advanced T-cell lymphomas 1
  Uniprot ID: Q92837
  ENSP ID: ENSP00000360060
MPCRREEEEEAGEEAEGEEEEEDSFLLLQQSVALGSSGEVDRLVAQIGETLQLDAAQHSPASPCGPPGAPLRAPGPLAAAVPADKARSPAVPLLLPPALAETVGPAPPGVLRCALGDRGRVRGRAAPYCVAELATGPSALSPLPPQADLDGPPGAGKQGIPQPLSGPCRRGWLRGAAASRRLQQRRGSQPETRTGDDDPHRLLQQLVLSGNLIKEAVRRLHSRRLQLRAKLPQRPLLGPLSAPVHEPPSPRSPRAACSDPGASGRAQLRTGDGVLVPGS

SEQ ID NO: 32895 - protein, 233 aa, Homo sapiens
  Payload ID: 6452
  Gene Symbol: FRAT2
  Gene Name: frequently rearranged in advanced T-cell lymphomas 2
  Uniprot ID: O75474
  ENSP ID: ENSP00000360058
MPCRREEEEEAGEEAEGEEEEDDSFLLLQQSVTLGSSGEVDRLVAQIGETLQLDAAQDSPASPCAPPGVPLRAPGPLAAAVPADKARPPAVPLLLPPASAETVGPAPSGALRCALGDRGRVRGRAAPYCVAEVAAGPSALPGPCRRGWLRDAVTSRRLQQRRWTQAGARAGDDDPHRLLQQLVLSGNLIKEAVRRLQRAVAAVAATGPASAPGPGGGRSGPDRIALQPSGSLL

SEQ ID NO: 32896 - protein, 647 aa, Homo sapiens
  Payload ID: 6453
  Gene Symbol: FZD1
  Gene Name: frizzled class receptor 1
  Uniprot ID: Q9UP38
  ENSP ID: ENSP00000287934
MAEEEAPKKSRAAGGGASWELCAGALSARLAEEGSGDAGGRRRPPVDPRRLARQLLLLLWLLEAPLLLGVRAQAAGQGPGQGPGPGQQPPPPPQQQQSGQQYNGERGISVPDHGYCQPISIPLCTDIAYNQTIMPNLLGHTNQEDAGLEVHQFYPLVKVQCSAELKFFLCSMYAPVCTVLEQALPPCRSLCERARQGCEALMNKFGFQWPDTLKCEKFPVHGAGELCVGQNTSDKGTPTPSLLPEFWTSNPQHGGGGHRGGFPGGAGASERGKFSCPRALKVPSYLNYHFLGEKDCGAPCEPTKVYGLMYFGPEELRFSRTWIGIWSVLCCASTLFTVLTYLVDMRRFSYPERPIIFLSGCYTAVAVAYIAGFLLEDRVVCNDKFAEDGARTVAQGTKKEGCTILFMMLYFFSMASSIWWVILSLTWFLAAGMKWGHEAIEANSQYFHLAAWAVPAIKTITILALGQVDGDVLSGVCFVGLNNVDALRGFVLAPLFVYLFIGTSFLLAGFVSLFRIRTIMKHDGTKTEKLEKLMVRIGVFSVLYTVPATIVIACYFYEQAFRDQWERSWVAQSCKSYAIPCPHLQAGGGAPPHPPMSPDFTVFMIKYLMTLIVGITSGFWIWSGKTLNSWRKFYTRLTNSKQGETTV

SEQ ID NO: 32897 - protein, 581 aa, Homo sapiens
  Payload ID: 6454
  Gene Symbol: FZD10
  Gene Name: frizzled class receptor 10
  Uniprot ID: Q9ULW2
  ENSP ID: ENSP00000229030
MQRPGPRLWLVLQVMGSCAAISSMDMERPGDGKCQPIEIPMCKDIGYNMTRMPNLMGHENQREAAIQLHEFAPLVEYGCHGHLRFFLCSLYAPMCTEQVSTPIPACRVMCEQARLKCSPIMEQFNFKWPDSLDCRKLPNKNDPNYLCMEAPNNGSDEPTRGSGLFPPLFRPQRPHSAQEHPLKDGGPGRGGCDNPGKFHHVEKSASCAPLCTPGVDVYWSREDKRFAVVWLAIWAVLCFFSSAFTVLTFLIDPARFRYPERPIIFLSMCYCVYSVGYLIRLFAGAESIACDRDSGQLYVIQEGLESTGCTLVFLVLYYFGMASSLWWVVLTLTWFLAAGKKWGHEAIEANSSYFHLAAWAIPAVKTILILVMRRVAGDELTGVCYVGSMDVNALTGFVLIPLACYLVIGTSFILSGFVALFHIRRVMKTGGENTDKLEKLMVRIGLFSVLYTVPATCVIACYFYERLNMDYWKILAAQHKCKMNNQTKTLDCLMAASIPAVEIFMVKIFMLLVVGITSGMWIWTSKTLQSWQQVCSRRLKKKSRRKPASVITSGGIYKKAQHPQKTHHGKYEIPAQSPTCV

SEQ ID NO: 32898 - protein, 454 aa, Homo sapiens
  Payload ID: 6454
  Gene Symbol: FZD10
  Gene Name: frizzled class receptor 10
  ENSP ID: ENSP00000438460
MPAHRDPDVQGHRLQHDSYAQPDGPREPARGSHPVARVRAAGGVRLPRPPPLLPVLAVRADVHRAGLYPHPRLPGHVRAGPAQVLPDYGAVQLQVARLPGLPETPQQERPQLPVHGGAQQRLGRAHPGLGPVPAAVPAAAAPQRAGAPAEGRGPRARRLRQPGQVPPRGEERVVRAALHARRGRVLEPRGQALRSGLAGHLGGAVLLLQRLHRAHLPHRPGPLPLPRAPHHLPLHVLLRLLRGLPHPPLRRRREHRLRPGQRPALCHPGGTGEHRLHAGLPGPLLLRHGQLAVVGGPHAHLVPGRRQEVGPRGHRSQQQLLPPGSLGHPGGEDHPDPGHAQGGGGRAHRGLLRGQHGRQRAHRLRAHSPGLLPGHRHVLHPLGLRGPVPHPEGDEDGRREHGQAGEAHGAYRALLCAVHRAGHLCDRLLLLRTPQHGLLEDPGGAAQVQNEQPD

SEQ ID NO: 32899 - protein, 565 aa, Homo sapiens
  Payload ID: 6455
  Gene Symbol: FZD2
  Gene Name: frizzled class receptor 2
  Uniprot ID: Q14332
  ENSP ID: ENSP00000323901
MRPRSALPRLLLPLLLLPAAGPAQFHGEKGISIPDHGFCQPISIPLCTDIAYNQTIMPNLLGHTNQEDAGLEVHQFYPLVKVQCSPELRFFLCSMYAPVCTVLEQAIPPCRSICERARQGCEALMNKFGFQWPERLRCEHFPRHGAEQICVGQNHSEDGAPALLTTAPPPGLQPGAGGTPGGPGGGGAPPRYATLEHPFHCPRVLKVPSYLSYKFLGERDCAAPCEPARPDGSMFFSQEETRFARLWILTWSVLCCASTFFTVTTYLVDMQRFRYPERPIIFLSGCYTMVSVAYIAGFVLQERVVCNERFSEDGYRTVVQGTKKEGCTILFMMLYFFSMASSIWWVILSLTWFLAAGMKWGHEAIEANSQYFHLAAWAVPAVKTITILAMGQIDGDLLSGVCFVGLNSLDPLRGFVLAPLFVYLFIGTSFLLAGFVSLFRIRTIMKHDGTKTEKLERLMVRIGVFSVLYTVPATIVIACYFYEQAFREHWERSWVSQHCKSLAIPCPAHYTPRMSPDFTVYMIKYLMTLIVGITSGFWIWSGKTLHSWRKFYTRLTNSRHGETTV

SEQ ID NO: 32900 - protein, 666 aa, Homo sapiens
  Payload ID: 6456
  Gene Symbol: FZD3
  Gene Name: frizzled class receptor 3
  Uniprot ID: Q9NPG1
  ENSP ID: ENSP00000240093
MAMTWIVFSLWPLTVFMGHIGGHSLFSCEPITLRMCQDLPYNTTFMPNLLNHYDQQTAALAMEPFHPMVNLDCSRDFRPFLCALYAPICMEYGRVTLPCRRLCQRAYSECSKLMEMFGVPWPEDMECSRFPDCDEPYPRLVDLNLAGEPTEGAPVAVQRDYGFWCPRELKIDPDLGYSFLHVRDCSPPCPNMYFRREELSFARYFIGLISIICLSATLFTFLTFLIDVTRFRYPERPIIFYAVCYMMVSLIFFIGFLLEDRVACNASIPAQYKASTVTQGSHNKACTMLFMILYFFTMAGSVWWVILTITWFLAAVPKWGSEAIEKKALLFHASAWGIPGTLTIILLAMNKIEGDNISGVCFVGLYDVDALRYFVLAPLCLYVVVGVSLLLAGIISLNRVRIEIPLEKENQDKLVKFMIRIGVFSILYLVPLLVVIGCYFYEQAYRGIWETTWIQERCREYHIPCPYQVTQMSRPDLILFLMKYLMALIVGIPSVFWVGSKKTCFEWASFFHGRRKKEIVNESRQVLQEPDFAQSLLRDPNTPIIRKSRGTSTQGTSTHASSTQLAMVDDQRSKAGSIHSKVSSYHGSLHRSRDGRYTPCSYRGMEERLPHGSMSRLTDHSRHSSSHRLNEQSRHSSIRDLSNNPMTHITHGTSMNRVIEEDGTSA

SEQ ID NO: 32901 - protein, 35 aa, Homo sapiens
  Payload ID: 6456
  Gene Symbol: FZD3
  Gene Name: frizzled class receptor 3
  ENSP ID: ENSP00000430125
MAMTWIVFSLWPLTVFMGHIGGHSLFSCEPITLRM

SEQ ID NO: 32902 - protein, 666 aa, Homo sapiens; identical to SEQ ID NO: 32900
  Payload ID: 6456
  Gene Symbol: FZD3
  Gene Name: frizzled class receptor 3
  Uniprot ID: Q9NPG1
  ENSP ID: ENSP00000437489

SEQ ID NO: 32903 - protein, 537 aa, Homo sapiens
  Payload ID: 6457
  Gene Symbol: FZD4
  Gene Name: frizzled class receptor 4
  Uniprot ID: Q9ULV1
  ENSP ID: ENSP00000434034
MAWRGAGPSVPGAPGGVGLSLGLLLQLLLLLGPARGFGDEEERRCDPIRISMCQNLGYNVTKMPNLVGHELQTDAELQLTTFTPLIQYGCSSQLQFFLCSVYVPMCTEKINIPIGPCGGMCLSVKRRCEPVLKEFGFAWPESLNCSKFPPQNDHNHMCMEGPGDEEVPLPHKTPIQPGEECHSVGTNSDQYIWVKRSLNCVLKCGYDAGLYSRSAKEFTDIWMAVWASLCFISTAFTVLTFLIDSSRFSYPERPIIFLSMCYNIYSIAYIVRLTVGRERISCDFEEAAEPVLIQEGLKNTGCAIIFLLMYFFGMASSIWWVILTLTWFLAAGLKWGHEAIEMHSSYFHIAAWAIPAVKTIVILIMRLVDADELTGLCYVGNQNLDALTGFVVAPLFTYLVIGTLFIAAGLVALFKIRSNLQKDGTKTDKLERLMVKIGVFSVLYTVPATCVIACYFYEISNWALFRYSADDSNMAVEMLKIFMSLLVGITSGMWIWSAKTLHTWQKCSNRLVNSGKVKREKRGNGWVKPGKGSETVV

SEQ ID NO: 32904 - protein, 585 aa, Homo sapiens
  Payload ID: 6458
  Gene Symbol: FZD5
  Gene Name: frizzled class receptor 5
  Uniprot ID: Q13467
  ENSP ID: ENSP00000354607
MARPDPSAPPSLLLLLLAQLVGRAAAASKAPVCQEITVPMCRGIGYNLTHMPNQFNHDTQDEAGLEVHQFWPLVEIQCSPDLRFFLCSMYTPICLPDYHKPLPPCRSVCERAKAGCSPLMRQYGFAWPERMSCDRLPVLGRDAEVLCMDYNRSEATTAPPRPFPAKPTLPGPPGAPASGGECPAGGPFVCKCREPFVPILKESHPLYNKVRTGQVPNCAVPCYQPSFSADERTFATFWIGLWSVLCFISTSTTVATFLIDMERFRYPERPIIFLSACYLCVSLGFLVRLVVGHASVACSREHNHIHYETTGPALCTIVFLLVYFFGMASSIWWVILSLTWFLAAGMKWGNEAIAGYAQYFHLAAWLIPSVKSITALALSSVDGDPVAGICYVGNQNLNSLRGFVLGPLVLYLLVGTLFLLAGFVSLFRIRSVIKQGGTKTDKLEKLMIRIGIFTLLYTVPASIVVACYLYEQHYRESWEAALTCACPGHDTGQPRAKPEYWVLMLKYFMCLVVGITSGVWIWSGKTVESWRRFTSRCCCRPRRGHKSGGAMAAGDYPEASAALTGRTGPPGPAATYHKQVSLSHV

SEQ ID NO: 32905 - protein, 706 aa, Homo sapiens
  Payload ID: 6459
  Gene Symbol: FZD6
  Gene Name: frizzled class receptor 6
  Uniprot ID: O60353
  ENSP ID: ENSP00000351605
MEMFTFLLTCIFLPLLRGHSLFTCEPITVPRCMKMAYNMTFFPNLMGHYDQSIAAVEMEHFLPLANLECSPNIETFLCKAFVPTCIEQIHVVPPCRKLCEKVYSDCKKLIDTFGIRWPEELECDRLQYCDETVPVTFDPHTEFLGPQKKTEQVQRDIGFWCPRHLKTSGGQGYKFLGIDQCAPPCPNMYFKSDELEFAKSFIGTVSIFCLCATLFTFLTFLIDVRRFRYPERPIIYYSVCYSIVSLMYFIGFLLGDSTACNKADEKLELGDTVVLGSQNKACTVLFMLLYFFTMAGTVWWVILTITWFLAAGRKWSCEAIEQKAVWFHAVAWGTPGFLTVMLLAMNKVEGDNISGVCFVGLYDLDASRYFVLLPLCLCVFVGLSLLLAGIISLNHVRQVIQHDGRNQEKLKKFMIRIGVFSGLYLVPLVTLLGCYVYEQVNRITWEITWVSDHCRQYHIPCPYQAKAKARPELALFMIKYLMTLIVGISAVFWVGSKKTCTEWAGFFKRNRKRDPISESRRVLQESCEFFLKHNSKVKHKKKHYKPSSHKLKVISKSMGTSTGATANHGTSAVAITSHDYLGQETLTEIQTSPETSMREVKADGASTPRLREQDCGEPASPAASISRLSGEQVDGKGQAGSVSESARSEGRISPKSDITDTGLAQSNNLQVPSSSEPSSLKGSTSLLVHPVSGVRKEQGGGCHSDT

SEQ ID NO: 32906 - protein, 60 aa, Homo sapiens
  Payload ID: 6459
  Gene Symbol: FZD6
  Gene Name: frizzled class receptor 6
  ENSP ID: ENSP00000427733
MEMFTFLLTCIFLPLLRGHSLFTCEPITVPRCMKMAYNMTFFPNLMGHYDQSIAAVEMEL

SEQ ID NO: 32907 - protein, 64 aa, Homo sapiens
  Payload ID: 6459
  Gene Symbol: FZD6
  Gene Name: frizzled class receptor 6
  ENSP ID: ENSP00000428188
MEMFTFLLTCIFLPLLRGHSLFTCEPITVPRCMKMAYNMTFFPNLMGHYDQSIAAVEMEGTQTG

SEQ ID NO: 32908 - protein, 100 aa, Homo sapiens
  Payload ID: 6459
  Gene Symbol: FZD6
  Gene Name: frizzled class receptor 6
  ENSP ID: ENSP00000428257
MKMAYNMTFFPNLMGHYDQSIAAVEMEHFLPLANLECSPNIETFLCKAFVPTCIEQIHVVPPCRKLCEKVYSDCKKLIDTFGIRWPEELECDSCRKKMEL

SEQ ID NO: 32909 - protein, 467 aa, Homo sapiens
  Payload ID: 6459
  Gene Symbol: FZD6
  Gene Name: frizzled class receptor 6
  ENSP ID: ENSP00000428301
MEMFTFLLTCIFLPLLRGHSLFTCEPITVPRCMKMAYNMTFFPNLMGHYDQSIAAVEMEHFLPLANLECSPNIETFLCKAFVPTCIEQIHVVPPCRKLCEKVYSDCKKLIDTFGIRWPEELECDRLQYCDETVPVTFDPHTEFLGPQKKTEQVQRDIGFWCPRHLKTSGGQGYKFLGIDQCAPPCPNMYFKSDELEFAKSFIGTVSIFCLCATLFTFLTFLIDVRRFRYPERPIIYYSVCYSIVSLMYFIGFLLGDSTACNKADEKLELGDTVVLGSQNKACTVLFMLLYFFTMAGTVWWVILTITWFLAAGRKWSCEAIEQKAVWFHAVAWGTPGFLTVMLLAMNKVEGDNISGVCFVGLYDLDASRYFVLLPLCLCVFVGLSLLLAGIISLNHVRQVIQHDGRNQEKLKKFMIRIGVFSGLYLVPLVTLLGCYVYEQVNRITWEITWVSDHCRQYHIPCPYQSNQ

SEQ ID NO: 32910 - protein, 706 aa, Homo sapiens; identical to SEQ ID NO: 32905
  Payload ID: 6459
  Gene Symbol: FZD6
  Gene Name: frizzled class receptor 6
  Uniprot ID: O60353
  ENSP ID: ENSP00000429055

SEQ ID NO: 32911 - protein, 674 aa, Homo sapiens
  Payload ID: 6459
  Gene Symbol: FZD6
  Gene Name: frizzled class receptor 6
  Uniprot ID: O60353
  ENSP ID: ENSP00000429528
MKMAYNMTFFPNLMGHYDQSIAAVEMEHFLPLANLECSPNIETFLCKAFVPTCIEQIHVVPPCRKLCEKVYSDCKKLIDTFGIRWPEELECDRLQYCDETVPVTFDPHTEFLGPQKKTEQVQRDIGFWCPRHLKTSGGQGYKFLGIDQCAPPCPNMYFKSDELEFAKSFIGTVSIFCLCATLFTFLTFLIDVRRFRYPERPIIYYSVCYSIVSLMYFIGFLLGDSTACNKADEKLELGDTVVLGSQNKACTVLFMLLYFFTMAGTVWWVILTITWFLAAGRKWSCEAIEQKAVWFHAVAWGTPGFLTVMLLAMNKVEGDNISGVCFVGLYDLDASRYFVLLPLCLCVFVGLSLLLAGIISLNHVRQVIQHDGRNQEKLKKFMIRIGVFSGLYLVPLVTLLGCYVYEQVNRITWEITWVSDHCRQYHIPCPYQAKAKARPELALFMIKYLMTLIVGISAVFWVGSKKTCTEWAGFFKRNRKRDPISESRRVLQESCEFFLKHNSKVKHKKKHYKPSSHKLKVISKSMGTSTGATANHGTSAVAITSHDYLGQETLTEIQTSPETSMREVKADGASTPRLREQDCGEPASPAASISRLSGEQVDGKGQAGSVSESARSEGRISPKSDITDTGLAQSNNLQVPSSSEPSSLKGSTSLLVHPVSGVRKEQGGGCHSDT

SEQ ID NO: 32912 - protein, 574 aa, Homo sapiens
  Payload ID: 6460
  Gene Symbol: FZD7
  Gene Name: frizzled class receptor 7
  Uniprot ID: O75084
  ENSP ID: ENSP00000286201
MRDPGAAAPLSSLGLCALVLALLGALSAGAGAQPYHGEKGISVPDHGFCQPISIPLCTDIAYNQTILPNLLGHTNQEDAGLEVHQFYPLVKVQCSPELRFFLCSMYAPVCTVLDQAIPPCRSLCERARQGCEALMNKFGFQWPERLRCENFPVHGAGEICVGQNTSDGSGGPGGGPTAYPTAPYLPDLPFTALPPGASDGRGRPAFPFSCPRQLKVPPYLGYRFLGERDCGAPCEPGRANGLMYFKEEERRFARLWVGVWSVLCCASTLFTVLTYLVDMRRFSYPERPIIFLSGCYFMVAVAHVAGFLLEDRAVCVERFSDDGYRTVAQGTKKEGCTILFMVLYFFGMASSIWWVILSLTWFLAAGMKWGHEAIEANSQYFHLAAWAVPAVKTITILAMGQVDGDLLSGVCYVGLSSVDALRGFVLAPLFVYLFIGTSFLLAGFVSLFRIRTIMKHDGTKTEKLEKLMVRIGVFSVLYTVPATIVLACYFYEQAFREHWERTWLLQTCKSYAVPCPPGHFPPMSPDFTVFMIKYLMTMIVGITTGFWIWSGKTLQSWRRFYHRLSHSSKGETAV

SEQ ID NO: 32913 - protein, 694 aa, Homo sapiens
  Payload ID: 6461
  Gene Symbol: FZD8
  Gene Name: frizzled class receptor 8
  Uniprot ID: Q9H461
  ENSP ID: ENSP00000363826
MEWGYLLEVTSLLAALALLQRSSGAAAASAKELACQEITVPLCKGIGYNYTYMPNQFNHDTQDEAGLEVHQFWPLVEIQCSPDLKFFLCSMYTPICLEDYKKPLPPCRSVCERAKAGCAPLMRQYGFAWPDRMRCDRLPEQGNPDTLCMDYNRTDLTTAAPSPPRRLPPPPPGEQPPSGSGHGRPPGARPPHRGGGRGGGGGDAAAPPARGGGGGGKARPPGGGAAPCEPGCQCRAPMVSVSSERHPLYNRVKTGQIANCALPCHNPFFSQDERAFTVFWIGLWSVLCFVSTFATVSTFLIDMERFKYPERPIIFLSACYLFVSVGYLVRLVAGHEKVACSGGAPGAGGAGGAGGAAAGAGAAGAGAGGPGGRGEYEELGAVEQHVRYETTGPALCTVVFLLVYFFGMASSIWWVILSLTWFLAAGMKWGNEAIAGYSQYFHLAAWLVPSVKSIAVLALSSVDGDPVAGICYVGNQSLDNLRGFVLAPLVIYLFIGTMFLLAGFVSLFRIRSVIKQQDGPTKTHKLEKLMIRLGLFTVLYTVPAAVVVACLFYEQHNRPRWEATHNCPCLRDLQPDQARRPDYAVFMLKYFMCLVVGITSGVWVWSGKTLESWRSLCTRCCWASKGAAVGGGAGATAAGGGGGPGGGGGGGPGGGGGPGGGGGSLYSDVSTGLTWRSGTASSVSYPKQMPLSQV

SEQ ID NO: 32914 - protein, 591 aa, Homo sapiens
  Payload ID: 6462
  Gene Symbol: FZD9
  Gene Name: frizzled class receptor 9
  Uniprot ID: O00144
  ENSP ID: ENSP00000345785
MAVAPLRGALLLWQLLAAGGAALEIGRFDPERGRGAAPCQAVEIPMCRGIGYNLTRMPNLLGHTSQGEAAAELAEFAPLVQYGCHSHLRFFLCSLYAPMCTDQVSTPIPACRPMCEQARLRCAPIMEQFNFGWPDSLDCARLPTRNDPHALCMEAPENATAGPAEPHKGLGMLPVAPRPARPPGDLGPGAGGSGTCENPEKFQYVEKSRSCAPRCGPGVEVFWSRRDKDFALVWMAVWSALCFFSTAFTVLTFLLEPHRFQYPERPIIFLSMCYNVYSLAFLIRAVAGAQSVACDQEAGALYVIQEGLENTGCTLVFLLLYYFGMASSLWWVVLTLTWFLAAGKKWGHEAIEAHGSYFHMAAWGLPALKTIVILTLRKVAGDELTGLCYVASTDAAALTGFVLVPLSGYLVLGSSFLLTGFVALFHIRKIMKTGGTNTEKLEKLMVKIGVFSILYTVPATCVIVCYVYERLNMDFWRLRATEQPCAAAAGPGGRRDCSLPGGSVPTVAVFMLKIFMSLVVGITSGVWVWSSKTFQTWQSLCYRKIAAGRARAKACRAPGSYGRGTHCHYKAPTVVLHMTKTDPSLENPTHL

SEQ ID NO: 32915 - protein, 325 aa, Homo sapiens
  Payload ID: 6463
  Gene Symbol: FRZB
  Gene Name: frizzled-related protein
  Uniprot ID: Q92765
  ENSP ID: ENSP00000295113
MVCGSPGGMLLLRAGLLALAALCLLRVPGARAAACEPVRIPLCKSLPWNMTKMPNHLHHSTQANAILAIEQFEGLLGTHCSPDLLFFLCAMYAPICTIDFQHEPIKPCKSVCERARQGCEPILIKYRHSWPENLACEELPVYDRGVCISPEAIVTADGADFPMDSSNGNCRGASSERCKCKPIRATQKTYFRNNYNYVIRAKVKEIKTKCHDVTAVVEVKEILKSSLVNIPRDTVNLYTSSGCLCPPLNVNEEYIIMGYEDEERSRLLLVEGSIAEKWKDRLGKKVKRWDMKLRHLGLSKSDSSNSDSTQSQKSGRNSNPRQARN

SEQ ID NO: 32916 - protein, 309 aa, Homo sapiens
  Payload ID: 6464
  Gene Symbol: FN3K
  Gene Name: fructosamine 3 kinase
  Uniprot ID: Q9H479
  ENSP ID: ENSP00000300784
MEQLLRAELRTATLRAFGGPGAGCISEGRAYDTDAGPVFVKVNRRTQARQMFEGEVASLEALRSTGLVRVPRPMKVIDLPGGGAAFVMEHLKMKSLSSQASKLGEQMADLHLYNQKLREKLKEEENTVGRRGEGAEPQYVDKFGFHTVTCCGFIPQVNEWQDDWPTFFARHRLQAQLDLIEKDYADREARELWSRLQVKIPDLFCGLEIVPALLHGDLWSGNVAEDDVGPIIYDPASFYGHSEFELAIALMFGGFPRSFFTAYHRKIPKAPGFDQRLLLYQLFNYLNHWNHFGREYRSPSLGTMRRLLK

SEQ ID NO: 32917 - protein, 309 aa, Homo sapiens
  Payload ID: 6465
  Gene Symbol: FN3KRP
  Gene Name: fructosamine 3 kinase related protein
  Uniprot ID: Q9HA64
  ENSP ID: ENSP00000269373
MEELLRRELGCSSVRATGHSGGGCISQGRSYDTDQGRVFVKVNPKAEARRMFEGEMASLTAILKTNTVKVPKPIKVLDAPGGGSVLVMEHMDMRHLSSHAAKLGAQLADLHLDNKKLGEMRLKEAGTVGRGGGQEERPFVARFGFDVVTCCGYLPQVNDWQEDWVVFYARQRIQPQMDMVEKESGDREALQLWSALQLKIPDLFRDLEIIPALLHGDLWGGNVAEDSSGPVIFDPASFYGHSEYELAIAGMFGGFSSSFYSAYHGKIPKAPGFEKRLQLYQLFHYLNHWNHFGSGYRGSSLNIMRNLVK

SEQ ID NO: 32918 - protein, 145 aa, Homo sapiens
  Payload ID: 6465
  Gene Symbol: FN3KRP
  Gene Name: fructosamine 3 kinase related protein
  ENSP ID: ENSP00000458550
MEELLRRELGCSSVRATGHSGGGCISQGRSYDTDQGRVFVKVNPKAEARRMFEGEMASLTAILKTNTVKVPKPIKVLDAPGGGSVLVMEHMDMRHLSSHAAKLGAQLADLHLDNKKLGEMRLKEAGTVEHNALSGSREFSGILIC

SEQ ID NO: 32919 - protein, 127 aa, Homo sapiens
  Payload ID: 6465
  Gene Symbol: FN3KRP
  Gene Name: fructosamine 3 kinase related protein
  ENSP ID: ENSP00000459653
MFEGEMASLTAILKTNTVKVPKPIKVLDAPGGGSVLVMEHMDMRHLSSHAAKLGAQLADLHLDNKKLGEMRLKEAGTVGRGGGQEERPFVARFGFDVVTCCGYLPQAPGFEKRLQLYQLFHYLNHWN

SEQ ID NO: 32920 - protein, 50 aa, Homo sapiens
  Payload ID: 6465
  Gene Symbol: FN3KRP
  Gene Name: fructosamine 3 kinase related protein
  ENSP ID: ENSP00000459751
FGSGYRGSSLNIMRNLVKAPQQKAEQNRVPLECWFLCGVRKDRECGQFPT

SEQ ID NO: 32921 - protein, 124 aa, Homo sapiens
  Payload ID: 6465
  Gene Symbol: FN3KRP
  Gene Name: fructosamine 3 kinase related protein
  ENSP ID: ENSP00000460243
MDMVEKESGDREALQLWSALQLKIPDLFRDLEIIPALLHGDLWGGNVAEDSSGPVIFDPASFYGHSEYELAIAGMFGGFSSSFYSAYHGKIPKAPGFEKRLQLYQLFHYLNHWNHFGSGYRGSS

SEQ ID NO: 32922 - protein, 102 aa, Homo sapiens
  Payload ID: 6465
  Gene Symbol: FN3KRP
  Gene Name: fructosamine 3 kinase related protein
  ENSP ID: ENSP00000460777
  MOD_RES (1)..(1): Any amino acid
XELLRRELGCSSVRATGHSGGGCISQGRSYDTDQGRVFVKVNPKAEARRMFEGEMASLTAILKTNTVKVPKPIKVLDAPGGGSVLVMEHMDMRHLSSCCRLI

SEQ ID NO: 32923 - protein, 56 aa, Homo sapiens
  Payload ID: 6465
  Gene Symbol: FN3KRP
  Gene Name: fructosamine 3 kinase related protein
  ENSP ID: ENSP00000460869
MEELLRRELGCSSVRATGHSGGGCISQGRSYDTDQGRVFVKVNPKAEVKSDPRSLA

SEQ ID NO: 32924 - protein, 338 aa, Homo sapiens [sequence omitted]

SEQ ID NO: 32925 - protein, 338 aa, Homo sapiens [sequence omitted]

SEQ ID NO: 32926 - protein, 151 aa, Homo sapiens
  Payload ID: 6466
  Gene Symbol: FBP1
  Gene Name: fructose-1,6-bisphosphatase 1
  ENSP ID: ENSP00000411619
MLKSSFATCVLVSEEDKHAIIVEPEKRGKYVVCFDPLDGSSNIDCLVSVGTIFGIYRKKSTDEPSEKDALQPGRNLVAAGYALYGSATMLVLAMDCGVNCFMLDPAIGEFILVDKDVKIKKKGKIYSLNEGYARDFDPAVTEYIQRKKFPP

SEQ ID NO: 32927 - protein, 339 aa, Homo sapiens
  Payload ID: 6467
  Gene Symbol: FBP2
  Gene Name: fructose-1,6-bisphosphatase 2
  Uniprot ID: O00757
  ENSP ID: ENSP00000364486
MTDRSPFETDMLTLTRYVMEKGRQAKGTGELTQLLNSMLTAIKAISSAVRKAGLAHLYGIAGSVNVTGDEVKKLDVLSNSLVINMVQSSYSTCVLVSEENKDAIITAKEKRGKYVVCFDPLDGSSNIDCLASIGTIFAIYRKTSEDEPSEKDALQCGRNIVAAGYALYGSATLVALSTGQGVDLFMLDPALGEFVLVEKDVKIKKKGKIYSLNEGYAKYFDAATTEYVQKKKFPEDGSAPYGARYVGSMVADVHRTLVYGGIFLYPANQKSPKGKLRLLYECNPVAYIIEQAGGLATTGTQPVLDVKPEAIHQRVPLILGSPEDVQEYLTCVQKNQAGS

SEQ ID NO: 32928 - protein, 3013 aa, Homo sapiens
  Payload ID: 6468
  Gene Symbol: FRYL
  Gene Name: FRY-like
  Uniprot ID: O94915
  ENSP ID: ENSP00000351113
MSNITIDPDVKPGEYVIKSLFAEFAVQAEKKIEVVMAEPLEKLLSRSLQRGEDLQFDQLISSMSSVAEHCLPSLLRTLFDWYRRQNGTEDESYEYRPRSSTKSKGDEQQRERDYLLERRDLAVDFIFCLVLVEVLKQIPVHPVPDPLVHEVLNLAFKHFKHKEGYSGTNTGNVHIIADLYAEVIGVLAQSKFQAVRKKFVTELKELRQKEQSPHVVQSVISLIMGMKFFRVKMYPVEDFEASFQFMQECAQYFLEVKDKDIKHALAGLFVEILIPVAAAVKNEVNVPCLKNFVEMLYQTTFELSSRKKHSLALYPLITCLLCVSQKQFFLNNWHIFLQNCLSHLKNKDPKMSRVALESLYRLLWVYVIRIKCESNTVTQSRLMSIVSALFPKGSRSVVPRDTPLNIFVKIIQFIAQERLDFAMKEIIFDLLSVGKSTKTFTINPERMNIGLRVFLVIADSLQQKDGEPPMPTTGVILPSGNTLRVKKIFLNKTLTDEEAKVIGMSVYYPQVRKALDSILRHLDKEVGRPMCMTSVQMSNKEPEDMITGERKPKIDLFRTCIAAIPRLIPDGMSRTDLIELLARLTIHMDEELRALAFNTLQALMLDFPDWREDVLSGFVYFIVREVTDVHPTLLDNAVKMLVQLINQWKQAAQMHNKNQDTQHGVANGASHPPPLERSPYSNVFHVVEGFALVILCSSRPATRRLAVSVLREIRALFALLEIPKGDDELAIDVMDRLSPSILESFIHLTGADQTTLLYCPSSIDLQTLAEWNSSPISHQFDVISPSHIWIFAHVTQGQDPWIISLSSFLKQENLPKHCSTAVSYAWMFAYTRLQLLSPQVDINSPINAKKVNTTTSSDSYIGLWRNYLILCCSAATSSSSTSAGSVRCSPPETLASTPDSGYSIDSKIIGIPSPSSLFKHIVPMMRSESMEITESLVLGLGRTNPGAFRELIEELHPIIKEALERRPENMKRRRRRDILRVQLVRIFELLADAGVISHSASGGLDNETHFLNNTLLEYVDLTRQLLEAENEKDSDTLKDIRCHFSALVANIIQNVPVHQRRSIFPQQSLRHSLFMLFSHWAGPFSIMFTPLDRYSDRNMQINRHQYCALKAMSAVLCCGPVADNVGLSSDGYLYKWLDNILDSLDKKVHQLGCEAVTLLLELNPDQSNLMYWAVDRCYTGSGRVAAGCFKAIANVFQNRDYQCDTVMLLNLILFKAADSSRSIYEVAMQLLQILEPKMFRYAHKLEVQRTDGVLSQLSPLPHLYSVSYYQLSEELARAYPELTLAIFSEISQRIQTAHPAGRQVMLHYLLPWMNNIELVDLKPLPTARRHDEDEDDSLKDRELMVTSRRWLRGEGWGSPQATAMVLNNLMYMTAKYGDELAWSEVENVWTTLADGWPKNLKIILHFLISICGVNSEPSLLPYVKKVIVYLGRDKTMQLLEELVSELQLTDPVSSGVTHMDNPPYYRITSSYKIPSVTSGTTSSSNTMVAPTDGNPDNKPIKENIEESYVHLDIYSGLNSHLNRQHHRLESRYSSSSGGSYEEEKSDSMPLYSNWRLKVMEHNQGEPLPFPPAGGCWSPLVDYVPETSSPGLPLHRCNIAVILLTDLIIDHSVKVEWGSYLHLLLHAIFIGFDHCHPEVYEHCKRLLLHLLIVMGPNSNIRTVASVLLRNKEFNEPRVLTVKQVAHLDYNFTAGINDFIPDYQPSPMTDSGLSSSSTSSSISLGNNSAAISHLHTTILNEVDISVEQDGKVKTLMEFITSRKRGPLWNHEDVSAKNPSIKSAEQLTTFLKHVVSVFKQSSSEGIHLEHHLSEVALQTALSCSSRHYAGRSFQIFRALKQPLTATTLSDVLSRLVETVGDPGEDAQGFVIELLLTLESAIDTLAETMKHYDLLSALSQTSYHDPIMGNKYAANRKSTGQLNLSTSPINSSSYLGYNSNARSNSLRLSLIGDRRGDRRRSNTLDIMDGRINHSSSLARTRSLSSLREKGMYDVQSTTEPTNLMATIFWIAASLLESDYEYEYLLALRLLNKLLIHLPLDKSESREKIENVQSKLKWTNFPGLQQLFLKGFTSASTQEMTVHLLSKLISVSKHTLVDPSQLSGFPLNILCLLPHLIQHFDSPTQFCKETASRIAKVCAEEKCPTLVNLAHMMSLYSTHTYSRDCSNWINVVCRYLHDSFSDTTFNLVTYLAELLEKGLSSMQQSLLQIIYSLLSHIDLSAAPAKQFNLEIIKIIGKYVQSPYWKEALNILKLVVSRSASLVVPSDIPKTYGGDTGSPEISFTKIFNNVSKELPGKTLDFHFDISETPIIGNKYGDQHSAAGRNGKPKVIAVTRSTSSTSSGSNSNALVPVSWKRPQLSQRRTREKLMNVLSLCGPESGLPKNPSVVFSSNEDLEVGDQQTSLISTTEDINQEEEVAVEDNSSEQQFGVFKDFDFLDVELEDAEGESMDNFNWGVRRRSLDSIDKGDTPSLQEYQCSSSTPSLNLTNQEDTDESSEEEAALTASQILSRTQMLNSDSATDETIPDHPDLLLQSEDSTGSITTEEVLQIRDETPTLEASLDNANSRLPEDTTSVLKEEHVTTFEDEGSYIIQEQQESLVCQGILDLEETEMPEPLAPESYPESVCEEDVTLALKELDERCEEEEADFSGLSSQDEEEQDGFPEVQTSPLPSPFLSAIIAAFQPVAYDDEEEAWRCHVNQMLSDTDGSSAVFTFHVFSRLFQTIQRKFGEITNEAVSFLGDSLQRIGTKFKSSLEVMMLCSECPTVFVDAETLMSCGLLETLKFGVLELQEHLDTYNVKREAAEQWLDDCKRTFGAKEDMYRINTDAQQMEILAELELCRRLYKLHFQLLLLFQAYCKLINQVNTIKNEAEVINMSEELAQLESILKEAESASENEEIDISKAAQTTIETAIHSLIETLKNKEFISAVAQVKAFRSLWPSDIFGSCEDDPVQTLLHIYFHHQTLGQTGSFAVIGSNLDMSEANYKLMELNLEIRESLRMVQSYQLLAQAKPMGNMVSTGF

SEQ ID NO: 32929 - protein, 1553 aa, Homo sapiens
  Payload ID: 6468
  Gene Symbol: FRYL
  Gene Name: FRY-like
  ENSP ID: ENSP00000421584
MSNITIDPDVKPGEYVIKSLFAEFAVQAEKKIEVVMAEPLEKLLSRSLQRGEDLQFDQLISSMSSVAEHCLPSLLRTLFDWYRRQNGTEDESYEYRPRSSTKSKGDEQQRERDYLLERRDLAVDFIFCLVLVEVLKQIPVHPVPDPLVHEVLNLAFKHFKHKEGYSGTNTGNVHIIADLYAEVIGVLAQSKFQAVRKKFVTELKELRQKEQSPHVVQSVISLIMGMKFFRVKMYPVEDFEASFQFMQECAQYFLEVKDKDIKHALAGLFVEILIPVAAAVKNEVNVPCLKNFVEMLYQTTFELSSRKKHSLALYPLITCLLCVSQKQFFLNNWHIFLQNCLSHLKNKDPKMSRVALESLYRLLWVYVIRIKCESNTVTQSRLMSIVSALFPKGSRSVVPRDTPLNIFVKIIQFIAQERLDFAMKEIIFDLLSVGKSTKTFTINPERMNIGLRVFLVIADSLQQKDGEPPMPTTGVILPSGNTLRVKKIFLNKTLTDEEAKVIGMSVYYPQVRKALDSILRHLDKEVGRPMCMTSVQMSNKEPEDMITGERKPKIDLFRTCIAAIPRLIPDGMSRTDLIELLARLTIHMDEELRALAFNTLQALMLDFPDWREDVLSGFVYFIVREVTDVHPTLLDNAVKMLVQLINQWKQAAQMHNKNQDTQHGVANGASHPPPLERSPYSNVFHVVEGFALVILCSSRPATRRLAVSVLREIRALFALLEIPKGDDELAIDVMDRLSPSILESFIHLTGADQTTLLYCPSSIDLQTLAEWNSSPISHQFDVISPSHIWIFAHVTQGQDPWIISLSSFLKQENLPKHCSTAVSYAWMFAYTRLQLLSPQVDINSPINAKKVNTTTSSDSYIGLWRNYLILCCSAATSSSSTSAGSVRCSPPETLASTPDSGYSIDSKIIGIPSPSSLFKHIVPMMRSESMEITESLVLGLGRTNPGAFRELIEELHPIIKEALERRPENMKRRRRRDILRVQLVRIFELLADAGVISHSASGGLDNETHFLNNTLLEYVDLTRQLLEAENEKDSDTLKDIRCHFSALVANIIQNVPVHQRRSIFPQQSLRHSLFMLFSHWAGPFSIMFTPLDRYSDRNMQINRHQYCALKAMSAVLCCGPVADNVGLSSDGYLYKWLDNILDSLDKKVHQLGCEAVTLLLELNPDQSNLMYWAVDRCYTGSGRVAAGCFKAIANVFQNRDYQCDTVMLLNLILFKAADSSRSIYEVAMQLLQILEPKMFRYAHKLEVQRTDGVLSQLSPLPHLYSVSYYQLSEELARAYPELTLAIFSEISQRIQTAHPAGRQVMLHYLLPWMNNIELVDLKPLPTARRHDEDEDDSLKDRELMVTSRRWLRGEGWGSPQATAMVLNNLMYMTAKYGDELAWSEVENVWTTLADGWPKNLKIILHFLISICGVNSEPSLLPYVKKVIVYLGRDKTMQLLEELVSELQLTDPVSSGVTHMDNPPYYRITSSYKIPSVTSGTTSSSNTMVAPTDGNPDNKPIKENIEESYVHLDIYSGLNSHLNRQHHRLESRYSSSSGGSYEEEKSNKFQMFLI

SEQ ID NO: 32930 - protein, 403 aa, Homo sapiens
  Payload ID: 6468
  Gene Symbol: FRYL
  Gene Name: FRY-like
  Uniprot ID: O94915
  ENSP ID: ENSP00000422408
MPEPLAPESYPESVCEEDVTLALKELDERCEEEEADFSGLSSQDEEEQDGFPEVQTSPLPSPFLSAIIAAFQPVAYDDEEEAWRCHVNQMLSDTDGSSAVFTFHVFSRLFQTIQRKFGEITNEAVSFLGDSLQRIGTKFKSSLEVMMLCSECPTVFVDAETLMSCGLLETLKFGVLELQEHLDTYNVKREAAEQWLDDCKRTFGAKEDMYRINTDAQELELCRRLYKLHFQLLLLFQAYCKLINQVNTIKNEAEVINMSEELAQLESILKEAESASENEEIDISKAAQTTIETAIHSLIETLKNKEFISAVAQVKAFRSLWPSDIFGSCEDDPVQTLLHIYFHHQTLGQTGSFAVIGSNLDMSEANYKLMELNLEIRESLRMVQSYQLLAQAKPMGNMVSTGF

SEQ ID NO: 32931 - protein, 190 aa, Homo sapiens
  Payload ID: 6468
  Gene Symbol: FRYL
  Gene Name: FRY-like
  ENSP ID: ENSP00000422988
MDFLKRVVPPILSGDVVLDTSTEESSPRLVKMKRLSSLSSEKTVDEQGGTNFCHSNYDKYEHQQLASAPVSKVNKYCASSNFHSTWGKKNIIMSNITIDPDVKPGEYVIKSLFAEFAVQAEKKIEVVMAEPLEKLLSRSLQRGEDLQFDQLISSMSSVAEHCLPSLLRTLFDWYRRQNGTEDESYEYRPR

SEQ ID NO: 32932 - protein, 1455 aa, Homo sapiens
  Payload ID: 6468
  Gene Symbol: FRYL
  Gene Name: FRY-like
  ENSP ID: ENSP00000425344
  MOD_RES (1)..(1): Any amino acid
XGYLYKWLDNILDSLDKKVHQLGCEAVTLLLELNPDQSNLMYWAVDRCYTGSGRVAAGCFKAIANVFQNRDYQCDTVMLLNLILFKAADSSRSIYEVAMQLLQILEPKMFRYAHKLEVQRTDGVLSQLSPLPHLYSVSYYQLSEELARAYPELTLAIFSEISQRIQTAHPAGRQVMLHYLLPWMNNIELVDLKPLPTARRHDEDEDDSLKDRELMVTSRRWLRGEGWGSPQATAMVLNNLMYMTAKYGDELAWSEVENVWTTLADGWPKNLKIILHFLISICGVNSEPSLLPYVKKVIVYLGRDKTMQLLEELVSELQLTDPVSSGVTHMDNPPYYRITSSYKIPSVTSGTTSSSNTMVAPTDGNPDNKPIKENIEESYVHLDIYSGLNSHLNRQHHRLESRYSSSSGGSYEEEKSDSMPLYSNWRLKVMEHNQGEPLPFPPAGGCWSPLVDYVPETSSPGLPLHRCNIAVILLTDLIIDHSVKVEWGSYLHLLLHAIFIGFDHCHPEVYEHCKRLLLHLLIVMGPNSNIRTVASVLLRNKEFNEPRVLTVKQVAHLDYNFTGINDFIPDYQPSPMTDSGLSSSSTSSSISLGNNSAAISHLHTTILNEVDISVEQDGKVKTLMEFITSRKRGPLWNHEDVSAKNPSIKSAEQLTTFLKHVVSVFKQSSSEGIHLEHHLSEVALQTALSCSSRHYAGRSFQIFRALKQPLTATTLSDVLSRLVETVGDPGEDAQGFVIELLLTLESAIDTLAETMKHYDLLSALSQTSYHDPIMGNKYAANRKSTGQLNLSTSPINSSSYLGYNSNARSNSLRLSLIGDRRGDRRRSNTLDIMDGRINHSSSLARTRSLSSLREKGMYDVQSTTEPTNLMATIFWIAASLLESDYEYEYLLALRLLNKLLIHLPLDKSESREKIENVQSKLKWTNFPGLQQLFLKGFTSASTQEMTVHLLSKLISVSKHTLVDPSQLSGFPLNILCLLPHLIQHFDSPTQFCKETASRIAKVCAEEKCPTLVNLAHMMSLYSTHTYSRDCSNWINVVCRYLHDSFSDTTFNLVTYLAELLEKGLSSMQQSLLQIIYSLLSHIDLSAAPAKQFNLEIIKIIGKYVQSPYWKEALNILKLVVSRSASLVVPSDIPKTYGGDTGSPEISFTKIFNNVSKELPGKTLDFHFDISETPIIGNKYGDQHSAAGRNGKPKVIAVTRSTSSTSSGSNSNALVPVSWKRPQLSQRRTREKLMNVLSLCGPESGLPKNPSVVFSSNEDLEVGDQQTSLISTTEDINQEEEVAVEDNSSEQQFGVFKDFDFLDVELEDAEGESMDNFNWGVRRRSLDSIDKGDTPSLQEYQCSSSTPSLNLTNQEDTDESSEEEAALTASQILSRTQMLNSDSATDETIPDHPDLLLQSEDSTGSITTEEVLQIRDETPTLEASLDNANSRLPEDTTSVLKEEHVTTFEDEGSYII

SEQ ID NO: 32933 - protein, 471 aa, Homo sapiens
  Payload ID: 6468
  Gene Symbol: FRYL
  Gene Name: FRY-like
  ENSP ID: ENSP00000425592
MLYQTTFELSSRKKHSLALYPLITCLLCVSQKQFFLNNWHIFLQNCLSHLKNKDPKMSRVALESLYRLLWVYVIRIKCESNTVTQSRLMSIVSALFPKGSRSVVPRDTPLNIFVKIIQFIAQERLDFAMKEIIFDLLSVGKSTKTFTINPERMNIGLRVFLVIADSLQQKDGEPPMPTTGVILPSGNTLRVKKIFLNKTLTDEEAKVIGMSVYYPQVRKALDSILRHLDKEVGRPMCMTSVQMSNKEPEDMITGERKPKIDLFRTCIAAIPRLIPDGMSRTDLIELLARLTIHMDEELRALAFNTLQALMLDFPDWREDVLSGFVYFIVREVTDVHPTLLDNAVKMLVQLINQWKQAAQMHNKNQDTQHGVANGASHPPPLERSPYSNVFHVVEGFALVILCSSRPATRRLAVSVLREIRALFALLEIPKGDDELAIDVMDRLSPSILESFIHLTGADQVTIVTSFYPILF

SEQ ID NO: 32934 - protein, 3013 aa, Homo sapiens; identical to SEQ ID NO: 32928
  Payload ID: 6468
  Gene Symbol: FRYL
  Gene Name: FRY-like
  Uniprot ID: O94915
  ENSP ID: ENSP00000426064

SEQ ID NO: 32935 - protein, 258 aa, Homo sapiens
  Payload ID: 6469
  Gene Symbol: FRG1
  Gene Name: FSHD region gene 1
  Uniprot ID: Q14331
  ENSP ID: ENSP00000226798
MAEYSYVKSTKLVLKGTKTKSKKKKSKDKKRKREEDEETQLDIVGIWWTVTNFGEISGTIAIEMDKGTYIHALDNGLFTLGAPHKEVDEGPSPPEQFTAVKLSDSRIALKSGYGKYLGINSDGLVVGRSDAIGPREQWEPVFQNGKMALLASNSCFIRCNEAGDIEAKSKTAGEEEMIKIRSCAERETKKKDDIPEEDKGNVKQCEINYVKKFQSFQDHKLKISKEDSKILKKARKDGFLHETLLDRRAKLKADRYCK

SEQ ID NO: 32936 - protein, 102 aa, Homo sapiens
  Payload ID: 6469
  Gene Symbol: FRG1
  Gene Name: FSHD region gene 1
  ENSP ID: ENSP00000435067
MHSTMVFLPWELHTKKGKMALLASNSCFIRCNEAGDIEAKSKTAGEEEMIKIRSCAERETKKKDDIPEEDKGNVKQCEINYVKKFQSFQDHKLKISKEDSKI

SEQ ID NO: 32937 - protein, 116 aa, Homo sapiens
  Payload ID: 6469
  Gene Symbol: FRG1
  Gene Name: FSHD region gene 1
  ENSP ID: ENSP00000435943
MDKGTYIHALDNGLFTLGAPHKEVDEGPSPPEQFTAVKLSDSRIALKSGYGKYLGINSDGLVVGRSDAIGPREQWEPVFQNGKMALLASNSCFIRCNEAGDIEAKSKTAGEEEMIK

SEQ ID NO: 32938 - protein, 42 aa, Homo sapiens
  Payload ID: 6469
  Gene Symbol: FRG1
  Gene Name: FSHD region gene 1
  ENSP ID: ENSP00000436535
MAEYSYVKSTKLVLKGTKTKRFARGTYKCRVFPPGLRDKQRF

SEQ ID NO: 32939 - protein, 84 aa, Homo sapiens
  Payload ID: 6469
  Gene Symbol: FRG1
  Gene Name: FSHD region gene 1
  ENSP ID: ENSP00000462603
IRSCAERETKKKDDIPEEDKGNVKQCEINYVWSLALSPRLECHGAISAHRNLRFPGSCDSPASASRVAGTTERNFRASKTTNLK

SEQ ID NO: 32940 - protein, 258 aa, Homo sapiens; identical to SEQ ID NO: 32935
  Payload ID: 6469
  Gene Symbol: FRG1
  Gene Name: FSHD region gene 1
  Uniprot ID: Q14331
  ENSP ID: ENSP00000483471

SEQ ID NO: 32941 - protein, 102 aa, Homo sapiens; identical to SEQ ID NO: 32936
  Payload ID: 6469
  Gene Symbol: FRG1
  Gene Name: FSHD region gene 1
  ENSP ID: ENSP00000485342

SEQ ID NO: 32942 - protein, 42 aa, Homo sapiens; identical to SEQ ID NO: 32938
  Payload ID: 6469
  Gene Symbol: FRG1
  Gene Name: FSHD region gene 1
  ENSP ID: ENSP00000486096

SEQ ID NO: 32943 - protein, 116 aa, Homo sapiens; identical to SEQ ID NO: 32937
  Payload ID: 6469
  Gene Symbol: FRG1
  Gene Name: FSHD region gene 1
  ENSP ID: ENSP00000486212

SEQ ID NO: 32944 - protein, 84 aa, Homo sapiens; identical to SEQ ID NO: 32939
  Payload ID: 6469
  Gene Symbol: FRG1
  Gene Name: FSHD region gene 1
  ENSP ID: ENSP00000487528

SEQ ID NO: 32945 - protein, 278 aa, Homo sapiens
  Payload ID: 6470
  Gene Symbol: FRG2
  Gene Name: FSHD region gene 2
  Uniprot ID: Q64ET8
  ENSP ID: ENSP00000368039
MGKGNEDSDLHCSSIQCSTDQPPFQQISFTEKGSDEKKPFKEKGKTAFSHSSEKHIQRQGSEPNPNKENSEETKLKAGNSTAGSEPESSSYRENCRKRKMSSKDSCQDTAGNCPEKECSLSLNKKSRSSTAVHNSEIQETCDAHHRGHSRACTGHSKRHRSRALGVQTPSIRKSLVTSVRAMSEAVYQDLAQVWAQQIHSPLTCEQLTLLTRLRGPLCAQVQTLYSMATQAAYVFPAESWLVPATLPGPGESALDREAHPFPGQEITETVSGSDEAKL

SEQ ID NO: 32946 - protein, 279 aa, Homo sapiens
  Payload ID: 6470
  Gene Symbol: FRG2
  Gene Name: FSHD region gene 2
  Uniprot ID: Q64ET8
  ENSP ID: ENSP00000424015
MGKGNEDSDLHCSSIQCSTDQPPFQQISFTEKGSDEKKPFKEKGKTAFSHSSEKHIQRQAGSEPNPNKENSEETKLKAGNSTAGSEPESSSYRENCRKRKMSSKDSCQDTAGNCPEKECSLSLNKKSRSSTAVHNSEIQETCDAHHRGHSRACTGHSKRHRSRALGVQTPSIRKSLVTSVRAMSEAVYQDLAQVWAQQIHSPLTCEQLTLLTRLRGPLCAQVQTLYSMATQAAYVFPAESWLVPATLPGPGESALDREAHPFPGQEITETVSGSDEAKL

SEQ ID NO: 32947 - protein, 278 aa, Homo sapiens; identical to SEQ ID NO: 32945
  Payload ID: 6470
  Gene Symbol: FRG2
  Gene Name: FSHD region gene 2
  Uniprot ID: Q64ET8
  ENSP ID: ENSP00000482196

SEQ ID NO: 32948 - protein, 279 aa, Homo sapiens; identical to SEQ ID NO: 32946
  Payload ID: 6470
  Gene Symbol: FRG2
  Gene Name: FSHD region gene 2
  Uniprot ID: Q64ET8
  ENSP ID: ENSP00000485877

SEQ ID NO: 32949 - protein, 278 aa, Homo sapiens
  Payload ID: 6471
  Gene Symbol: FRG2B
  Gene Name: FSHD region gene 2 family, member B
  Uniprot ID: Q96QU4
  ENSP ID: ENSP00000401310
MGKGNEDPDLHCSSIQCSTDQPPFQQISFTEKGSDEKKPFKEKGKTAFSHSSEKHIQRQGSEPNPNKENSEETKLKAGNSTAGSEPESSSYRENCRKRKMSSKDSCQDTAGNCPEKECSLSLNKKSRSSTPVHNSEIQETCDAHHRGRSRACTGRSKRHRSRALGVQTPSIRKSLVTSVRAMSEAVYQDLAQVWAQQIHSPLTCEQLTLLTRLRGPLCAQVQTLYSMATQAAYVFPAESWLVPATLPGPGESALDREAHPFPGQEITETVSGSDEAKL

SEQ ID NO: 32950 - protein, 279 aa, Homo sapiens
  Payload ID: 6471
  Gene Symbol: FRG2B
  Gene Name: FSHD region gene 2 family, member B
  ENSP ID: ENSP00000408343
MGKGNEDPDLHCSSIQCSTDQPPFQQISFTEKGSDEKKPFKEKGKTAFSHSSEKHIQRQAGSEPNPNKENSEETKLKAGNSTAGSEPESSSYRENCRKRKMSSKDSCQDTAGNCPEKECSLSLNKKSRSSTPVHNSEIQETCDAHHRGRSRACTGRSKRHRSRALGVQTPSIRKSLVTSVRAMSEAVYQDLAQVWAQQIHSPLTCEQLTLLTRLRGPLCAQVQTLYSMATQAAYVFPAESWLVPATLPGPGESALDREAHPFPGQEITETVSGSDEAKL

SEQ ID NO: 32951 - protein, 282 aa, Homo sapiens
  Payload ID: 6472
  Gene Symbol: FRG2C
  Gene Name: FSHD region gene 2 family, member C
  Uniprot ID: A6NGY1
  ENSP ID: ENSP00000312299
MGKGNEDPDLHCSSIQCSTDQPPFQQISFTEKGSDEKKPFKGKGKTAFSHSSEKHTQRQAGSDPNPNKENSEETKLKAGNSTAGSEPESSSYQENCRKRKISSKDICQDRAGNCPEEECNLTLNKKSRSSTAVHNSEIQETCDAHHRGSSRACTGRSKRHRSRALEVQTPSLRKSLVTSVRAMSEAVYQDLAQVWAQQIHSPLTCEQLTLLTRLRGPLCAQVQTLYSMATQAAYVFPAESWLVPATLPGPGDSALDREAHPFPGQEITEPVSGSDEAKLGAP

SEQ ID NO: 32952 - protein, 281 aa, Homo sapiens
  Payload ID: 6472
  Gene Symbol: FRG2C
  Gene Name: FSHD region gene 2 family, member C
  ENSP ID: ENSP00000419432
MGKGNEDPDLHCSSIQCSTDQPPFQQISFTEKGSDEKKPFKGKGKTAFSHSSEKHTQRQGSDPNPNKENSEETKLKAGNSTAGSEPESSSYQENCRKRKISSKDICQDRAGNCPEEECNLTLNKKSRSSTAVHNSEIQETCDAHHRGSSRACTGRSKRHRSRALEVQTPSLRKSLVTSVRAMSEAVYQDLAQVWAQQIHSPLTCEQLTLLTRLRGPLCAQVQTLYSMATQAAYVFPAESWLVPATLPGPGDSALDREAHPFPGQEITEPVSGSDEAKLGAP

SEQ ID NO: 32953 - protein, 847 aa, Homo sapiens
  Payload ID: 6473
  Gene Symbol: FTSJ3
  Gene Name: FtsJ homolog 3 (E. coli)
  Uniprot ID: Q8IY81
  ENSP ID: ENSP00000396673
MGKKGKVGKSRRDKFYHLAKETGYRSRSAFKLIQLNRRFQFLQKARALLDLCAAPGGWLQVAAKFMPVSSLIVGVDLVPIKPLPNVVTLQQDITTERCRQALRKELKTWKVDVVLNDGAPNVGASWVHDAYSQAHLTLMALRLACDFLARGGSFITKVFRSRDYQPLLWIFQQLFRRVQATKPQASRHESAEIFVVCQGFLAPDKVDSKFFDPKFAFKEVEVQAKTVTELVTKKKPKAEGYAEGDLTLYHRTSVTDFLRAANPVDFLSKASEIMVDDEELAQHPATTEDIRVCCQDIRVLGRKELRSLLNWRTKLRRYVAKKLKEQAKALDISLSSGEEDEGDEEDSTAGTTKQPSKEEEEEEEEEQLNQTLAEMKAQEVAELKRKKKKLLREQRKQRERVELKMDLPGVSIADEGETGMFSLSTIRGHQLLEEVTQGDMSAADTFLSDLPRDDIYVSDVEDDGDDTSLDSDLDPEELAGVRGHQGLRDQKRMRLTEVQDDKEEEEEENPLLVPLEEKAVLQEEQANLWFSKGSFAGIEDDADEALEISQAQLLFENRRKGRQQQQKQQLPQTPPSCLKTEIMSPLYQDEAPKGTEASSGTEAATGLEGEEKDGISDSDSSTSSEEEESWEPLRGKKRSRGPKSDDDGFEIVPIEDPAKHRILDPEGLALGAVIASSKKAKRDLIDNSFNRYTFNEDEGELPEWFVQEEKQHRIRQLPVGKKEVEHYRKRWREINARPIKKVAEAKARKKRRMLKRLEQTRKKAEAVVNTVDISEREKVAQLRSLYKKAGLGKEKRHVTYVVAKKGVGRKVRRPAGVRGHFKVVDSRMKKDQRAQQRKEQKKKHKRK

SEQ ID NO: 32954 - protein, 29 aa, Homo sapiens
  Payload ID: 6473
  Gene Symbol: FTSJ3
  Gene Name: FtsJ homolog 3 (E. coli)
  ENSP ID: ENSP00000462212
DLPGVSIADEGETGMFSLSTIRGHQYATY

SEQ ID NO: 32955 - protein, 151 aa, Homo sapiens
  Payload ID: 6473
  Gene Symbol: FTSJ3
  Gene Name: FtsJ homolog 3 (E. coli)
  ENSP ID: ENSP00000462290
MGKKGKVGKSRRDKFYHLAKETGYRSRSAFKLIQLNRRFQFLQKARALLDLCAAPGGWLQVAAKFMPVSSLIVGVDLVPIKPLPNVVTLQQDITTERCRQALRKELKTWKVDVVLNDGAPNVGASWVHDAYSQAHLTLMALRLACDFLARG

SEQ ID NO: 32956 - protein, 67 aa, Homo sapiens
  Payload ID: 6473
  Gene Symbol: FTSJ3
  Gene Name: FtsJ homolog 3 (E. coli)
  ENSP ID: ENSP00000462342
MGKKGKVGKSRRDKFYHLAKETGYRSRSAFKLIQLNRRFQFLQKARALLDLCAAPGGWFVTLATGCR

SEQ ID NO: 32957 - protein, 19 aa, Homo sapiens
  Payload ID: 6473
  Gene Symbol: FTSJ3
  Gene Name: FtsJ homolog 3 (E. coli)
  ENSP ID: ENSP00000463229
MGKKGKVGKSRRDKFYHLA

SEQ ID NO: 32958 - protein, 40 aa, Homo sapiens
  Payload ID: 6473
  Gene Symbol: FTSJ3
  Gene Name: FtsJ homolog 3 (E. coli)
  ENSP ID: ENSP00000463980
MGKKGKVGKSRRDKFYHLAKETVCALGCFVQVTVPDLLSS

SEQ ID NO: 32959 - protein, 33 aa, Homo sapiens
  Payload ID: 6473
  Gene Symbol: FTSJ3
  Gene Name: FtsJ homolog 3 (E. coli)
  ENSP ID: ENSP00000464361
MGKKGKVGKSRRDKFYHLAKETGYRSRSAFKLI

SEQ ID NO: 32960 - protein, 115 aa, Homo sapiens
  Payload ID: 6473
  Gene Symbol: FTSJ3
  Gene Name: FtsJ homolog 3 (E. coli)
  ENSP ID: ENSP00000464648
MGKKGKVGKSRRDKFYHLAKETGYRSRSAFKLIQLNRRFQFLQKARALLDLCAAPGGWLQVAAKFMPVSSLIVGVDLVPIKPLPNVVTLQQDITTERCRQALRKELKTWKVDVVL

SEQ ID NO: 32961 - protein, 327 aa, Homo sapiens
  Payload ID: 6474
  Gene Symbol: FTSJ1
  Gene Name: FtsJ RNA methyltransferase homolog 1 (E. coli)
  Uniprot ID: Q9UET6
  ENSP ID: ENSP00000019019
MGRTSKDKRDVYYRLAKENGWRARSAFKLLQLDKEFQLFQGVTRAVDLCAAPGSWSQVLSQKIGGQGSGHVVAVDLQAMAPLPGVVQIQGDITQLSTAKEIIQHFKGCPADLVVCDGAPDVTGLHDVDEYMQAQLLLAALNIATHVLKPGGCFVAKIFRGRDVTLLYSQLQVFFSSVLCAKPRSSRNSSIEAFAVCQGYDPPEGFIPDLSKPLLDHSYDFNQLDGPTRIIVPFVTCGDLSSYDSDRSYPLDLEGGSEYKYTPPTQPPISPPYQEACTLKRKGQLAKEIRPQDCPISRVDTFPQPLAAPQCHTLLAPEMEDNEMSCSP

SEQ ID NO: 32962 - protein, 329 aa, Homo sapiens
  Payload ID: 6474
  Gene Symbol: FTSJ1
  Gene Name: FtsJ RNA methyltransferase homolog 1 (E. coli)
  Uniprot ID: Q9UET6
  ENSP ID: ENSP00000326948
MGRTSKDKRDVYYRLAKENGWRARSAFKLLQLDKEFQLFQGVTRAVDLCAAPGSWSQVLSQKIGGQGSGHVVAVDLQAMAPLPGVVQIQGDITQLSTAKEIIQHFKGCPADLVVCDGAPDVTGLHDVDEYMQAQLLLAALNIATHVLKPGGCFVAKIFRGRDVTLLYSQLQVFFSSVLCAKPRSSRNSSIEAFAVCQGYDPPEGFIPDLSKPLLDHSYDPDFNQLDGPTRIIVPFVTCGDLSSYDSDRSYPLDLEGGSEYKYTPPTQPPISPPYQEACTLKRKGQLAKEIRPQDCPISRVDTFPQPLAAPQCHTLLAPEMEDNEMSCSP

SEQ ID NO: 32963 - protein, 192 aa, Homo sapiens
  Payload ID: 6474
  Gene Symbol: FTSJ1
  Gene Name: FtsJ RNA methyltransferase homolog 1 (E. coli)
  ENSP ID: ENSP00000380103
MALNIATHVLKPGGCFVAKIFRGRDVTLLYSQLQVFFSSVLCAKPRSSRNSSIEAFAVCQGYDPPEGFIPDLSKPLLDHSYDPDFNQLDGPTRIIVPFVTCGDLSSYDSDRSYPLDLEGGSEYKYTPPTQPPISPPYQEACTLKRKGQLAKEIRPQDCPISRVDTFPQPLAAPQCHTLLAPEMEDNEMSCSP

SEQ ID NO: 32964 - protein, 246 aa, Homo sapiens
  Payload ID: 6475
  Gene Symbol: FTSJ2
  Gene Name: FtsJ RNA methyltransferase homolog 2 (E. coli)
  Uniprot ID: Q9UI43
  ENSP ID: ENSP00000242257
MAGYLKLVCVSFQRQGFHTVGSRCKNRTGAEHLWLTRHLRDPFVKAAKVESYRCRSAFKLLEVNERHQILRPGLRVLDCGAAPGAWSQVAVQKVNAAGTDPSSPVGFVLGVDLLHIFPLEGATFLCPADVTDPRTSQRILEVLPGRRADVILSDMAPNATGFRDLDHDRLISLCLTLLSVTPDILQPGGTFLCKTWAGSQSRRLQRRLTEEFQNVRIIKPEASRKESSEVYFLATQYHGRKGTVKQ

SEQ ID NO: 32965 - protein, 152 aa, Homo sapiens
  Payload ID: 6475
  Gene Symbol: FTSJ2
  Gene Name: FtsJ RNA methyltransferase homolog 2 (E. coli)
  ENSP ID: ENSP00000384423
MRPPADPSSPVGFVLGVDLLHIFPLEGATFLCPADVTDPRTSQRILEVLPGRRADVILSDMAPNATGFRDLDHDRLISLCLTLLSVTPDILQPGGTFLCKTWAGSQSRRLQRRLTEEFQNVRIIKPEASRKESSEVYFLATQYHGRKGTVKQ

SEQ ID NO: 32966 - protein, 246 aa, Homo sapiens; identical to SEQ ID NO: 32964
  Payload ID: 6475
  Gene Symbol: FTSJ2
  Gene Name: FtsJ RNA methyltransferase homolog 2 (E. coli)
  Uniprot ID: Q9UI43
  ENSP ID: ENSP00000392343

SEQ ID NO: 32967 - protein, 1084 aa, Homo sapiens
  Payload ID: 6476
  Gene Symbol: FUK
  Gene Name: fucokinase
  Uniprot ID: Q8N0W3
  ENSP ID: ENSP00000288078
MEQPKGVDWTVIILTCQYKDSVQVFQRELEVRQKREQIPAGTLLLAVEDPEKRVGSGGATLNALLVAAEHLSARAGFTVVTSDVLHSAWILILHMGRDFPFDDCGRAFTCLPVENPEAPVEALVCNLDCLLDIMTYRLGPGSPPGVWVCSTDMLLSVPANPGISWDSFRGARVIALPGSPAYAQNHGVYLTDPQGLVLDIYYQGTEAEIQRCVRPDGRVPLVSGVVFFSVETAERLLATHVSPPLDACTYLGLDSGARPVQLSLFFDILHCMAENVTREDFLVGRPPELGQGDADVAGYLQSARAQLWRELRDQPLTMAYVSSGSYSYMTSSASEFLLSLTLPGAPGAQIVHSQVEEQQLLAAGSSVVSCLLEGPVQLGPGSVLQHCHLQGPIHIGAGCLVTGLDTAHSKALHGRELRDLVLQGHHTRLHGSPGHAFTLVGRLDSWERQGAGTYLNVPWSEFFKRTGVRAWDLWDPETLPAEYCLPSARLFPVLHPSRELGPQDLLWMLDHQEDGGEALRAWRASWRLSWEQLQPCLDRAATLASRRDLFFRQALHKARHVLEARQDLSLRPLIWAAVREGCPGPLLATLDQVAAGAGDPGVAARALACVADVLGCMAEGRGGLRSGPAANPEWMRPFSYLECGDLAAGVEALAQERDKWLSRPALLVRAARHYEGAGQILIRQAVMSAQHFVSTEQVELPGPGQWVVAECPARVDFSGGWSDTPPLAYELGGAVLGLAVRVDGRRPIGARARRIPEPELWLAVGPRQDEMTVKIVCRCLADLRDYCQPHAPGALLKAAFICAGIVHVHSELQLSEQLLRTFGGGFELHTWSELPHGSGLGTSSILAGTALAALQRAAGRVVGTEALIHAVLHLEQVLTTGGGWQDQVGGLMPGIKVGRSRAQLPLKVEVEEVTVPEGFVQKLNDHLLLVYTGKTRLARNLLQDVLRSWYARLPAVVQNAHSLVRQTEECAEGFRQGSLPLLGQCLTSYWEQKKLMAPGCEPLTVRRMMDVLAPHVHGQSLAGAGGGGFLYLLTKEPQQKEALEAVLAKTEGLGNYSIHLVEVDTQGLSLKLLGTEASTCCPFP

SEQ ID NO: 32968 - protein, 1090 aa, Homo sapiens
  Payload ID: 6476
  Gene Symbol: FUK
  Gene Name: fucokinase
  Uniprot ID: Q8N0W3
  ENSP ID: ENSP00000368192
MEQPKGVDWTVIILTCQYKDSVQVFQRELEVRQKREQIPAGTLLLAVEDPEKRVGSGGATLNALLVAAEHLSARAGFTWICVGVSLWIRGCHPPGRLPEASVHRAFPLLQVVTSDVLHSAWILILHMGRDFPFDDCGRAFTCLPVENPEAPVEALVCNLDCLLDIMTYRLGPGSPPGVWVCSTDMLLSVPANPGISWDSFRGARVIALPGSPAYAQNHGVYLTDPQGLVLDIYYQGTEAEIQRCVRPDGRVPLVSGVVFFSVETAERLLATHVSPPLDACTYLGLDSGARPVQLSLFFDILHCMAENVTREDFLVGRPPELGQGDADVAGYLQSARAQLWRELRDQPLTMAYVSSGSYSYMTSSASEFLLSLTLPGAPGAQIVHSQVEEQQLLAAGSSVVSCLLEGPVQLGPGSVLQHCHLQGPIHIGAGCLVTGLDTAHSKALHGRELRDLVLQGHHTRLHGSPGHAFTLVGRLDSWERQGAGTYLNVPWSEFFKRTGVRAWDLWDPETLPAEYCLPSARLFPVLHPSRELGPQDLLWMLDHQEDGGEALRAWRASWRLSWEQLQPCLDRAATLASRRDLFFRQALHKARHVLEARQDLSLRPLIWAAVREGCPGPLLATLDQVAAGAGDPGVAARALACVADVLGCMAEGRGGLRSGPAANPEWMRPFSYLECGDLAAGVEALAQERDKWLSRPALLVRAARHYEGAGQILIRQAVMSAQHFVSTEQVELPGPGQWVVAECPARVDFSGGWSDTPPLAYELGGAVLGLAVRVDGRRPIGARARRIPEPELWLAVGPRQDEMTVKIVCRCLADLRDYCQPHAPGALLKAAFICAGIVHVHSELQLSTSSILAGTALAALQRAAGRVVGTEALIHAVLHLEQVLTTGGGWQDQVGGLMPGIKVGRSRAQLPLKVEVEEVTVPEGFVQKLNDHLLLVYTGKTRLARNLLQDVLRSWYARLPAVVQNAHSLVRQTEECAEGFRQGSLPLLGQCLTSYWEQKKLMAPGCEPLTVRRMMDVLAPHVHGQSLAGAGGGGFLYLLTKEPQQKEALEAVLAKTEGLGNYSIHLVEVDTQGLSLKLLGTEASTCCPFP

SEQ ID NO: 32969 - protein, 120 aa, Homo sapiens
  Payload ID: 6476
  Gene Symbol: FUK
  Gene Name: fucokinase
  ENSP ID: ENSP00000458483
MEQPKGVDWTVIILTCQYKDSVQVFQRELEVRQKREQIPAGTLLLAVEDPEKRVGSGGATLNALLVAAEHLSARAGFTVVTSDVLHSAWILILHMGRDFPFDDCGRAFTCLPVENPEAPV

SEQ ID NO: 32970 - protein, 146 aa, Homo sapiens
  Payload ID: 6476
  Gene Symbol: FUK
  Gene Name: fucokinase
  ENSP ID: ENSP00000458622
MEQPKGVDWTVIILTCQYKDSVQVFQRELEVRQKREQIPAGTLLLAVEDPEKRVGSGGATLNALLVAAEHLSARAGFTVVTSDVLHSAWILILHMGRDFPFDDCGRAFTCLPVENPEAPVEALVCNLDCLLDIMTYRLGPGSPPGV

SEQ ID NO: 32971 - protein, 156 aa, Homo sapiens
  Payload ID: 6476
  Gene Symbol: FUK
  Gene Name: fucokinase
  ENSP ID: ENSP00000459168
MEQPKGVDWTVIILTCQYKDSVQVFQRELEVRQKREQIPAGTLLLAVEDPEKRVGSGGATLNALLVAAEHLSARAGFTVVTSDVLHSAWILILHMGRDFPFDDCGRAFTCLPVENPEAPVEALVCNLDCLLDIMTYRLGPGSPPGVWVCSTDMLLS

SEQ ID NO: 32972 - protein, 109 aa, Homo sapiens
  Payload ID: 6476
  Gene Symbol: FUK
  Gene Name: fucokinase
  ENSP ID: ENSP00000460484
MEQPKGVDWTVIILTCQYKDSVQVFQRELEVRQKREQIPAGTLLLAVEDPEKRVGSGGATLNALLVAAEHLSARAGFTVVTSDVLHSAWILILHMGRDFPFDDCGRAFT

SEQ ID NO: 32973 - protein, 575 aa, Homo sapiens
  Payload ID: 6476
  Gene Symbol: FUK
  Gene Name: fucokinase
  ENSP ID: ENSP00000462584
MLDHQEDGGEALRAWRASWRLSWEQLQPCLDRAATLASRRDLFFRQALHKARHVLEARQDLSLRPLIWAAVREGCPGPLLATLDQAGAGDPGVAARALACVADVLGCMAEGRGGLRSGPAANPEWMRPFSYLECGDLAAGVEALAQERDKWLSRPALLVRAARHYEGAGQILIRQAVMSAQHFVSTEQVELPGPGQWVVAECPARVDFSGGWSDTPPLAYELGGAVLGLAVRVDGRRPIGARARRIPEPELWLAVGPRQDEMTVKIVCRCLADLRDYCQPHAPGALLKAAFICAGIVHVHSELQLSEQLLRTFGGGFELHTWSELPHGSGLGTSSILAGTALAALQRAAGRVVGTEALIHAVLHLEQVLTTGGGWQDQVGGLMPGIKVGRSRAQLPLKVEVEEVTVPEGFVQKLNDHLLLVYTGKTRLARNLLQDVLRSWYARLPAVVQNAHSLVRQTEECAEGFRQGSLPLLGQCLTSYWEQKKLMAPGCEPLTVRRMMDVLAPHVHGQSLAGAGGGGFLYLLTKEPQQKEALEAVLAKTEGLGNYSIHLVEVDTQGLSLKLLGTEASTCCPFP

SEQ ID NO: 32974 - protein, 203 aa, Homo sapiens
  Payload ID: 6476
  Gene Symbol: FUK
  Gene Name: fucokinase
  ENSP ID: ENSP00000463088
EQVELPGPGQWVVAECPARVDFSGGWSDTPPLAYELGGAVLGLAVRVDGRRPIGARARRIPEPELWLAVGPRQDEMTVKIVCRCLADLRDYCQPHAPGALLKAAFICAGIVHVHSELQLSEQLLRTFGGGFELHTWSELPHGSGLGTSSILAGTALAALQRAAGRVVGTEALIHAVLHLEQVLTTVETGFHRVSQDGLDLLTS

SEQ ID NO: 32975 - protein, 154 aa, Homo sapiens
  Payload ID: 6477
  Gene Symbol: FUOM
  Gene Name: fucose mutarotase
  Uniprot ID: A2VDF0
  ENSP ID: ENSP00000278025
MVALKGVPALLSPELLYALARMGHGDEIVLADLNFPASSICQCGPMEIRADGLGIPQLLEAVLKLLPLDTYVESPAAVMELVPSDKERGLQTPVWTEYESILRRAGCVRALAKIERFEFYERAKKAFAVVATGETALYGNLILRKGVLALNPLL

SEQ ID NO: 32976 - protein, 109 aa, Homo sapiens
  Payload ID: 6477
  Gene Symbol: FUOM
  Gene Name: fucose mutarotase
  ENSP ID: ENSP00000357539
MEIRADGLGIPQLLEAVLKLLPLDTYVESPAAVMELVPSDKERGLQTPVWTEYESILRRAGCVRALAKIERFEFYERAKKAFAVVATGETALYGNLILRKGVLALNPLL

SEQ ID NO: 32977 - protein, 134 aa, Homo sapiens
  Payload ID: 6477
  Gene Symbol: FUOM
  Gene Name: fucose mutarotase
  Uniprot ID: A2VDF0
  ENSP ID: ENSP00000357540
MVALKGVPALLSPELLYALARMGHGDEIVLADLNFPASSICQCGPMEIRADGLGIPQLLEAVLKLLPLDTYVESPAAVMELVPSDKERGLQTPVWTEYESILRRAGCVRALAKIERFEFYERAKKAFAVVATGC

SEQ ID NO: 32978 - protein, 127 aa, Homo sapiens
  Payload ID: 6477
  Gene Symbol: FUOM
  Gene Name: fucose mutarotase
  ENSP ID: ENSP00000413379
KGVPALLSPELLYALARMGHGDEIGLGIPQLLEAVLKLLPLDTYVESPAAVMELVPSDKERGLQTPVWTEYESILRRAGCVRALAKIERFEFYERAKKAFAVVATGETALYGNLILRKGVLALNPLL

SEQ ID NO: 32979 - protein, 169 aa, Homo sapiens
  Payload ID: 6478
  Gene Symbol: FPGT
  Gene Name: fucose-1-phosphate guanylyltransferase
  Uniprot ID: O14772
  ENSP ID: ENSP00000359931
MAAARDPPEVSLREATQRKLRRFSELRGKLVARGEFWDIVAITAADEKQELAYNQQLSEKLKRKELPLGVQYHVFVDPAGAKIGNGGSTLCALQCLEKLYGDKWNSFTILLIHSVSFQIYQNALAKHPVSFKAYWIQDVLWHLAQLWSIPDWGLMFQLGKTALLVVLTS

SEQ ID NO: 32980 - protein, 607 aa, Homo sapiens
  Payload ID: 6478
  Gene Symbol: FPGT
  Gene Name: fucose-1-phosphate guanylyltransferase
  ENSP ID: ENSP00000359935
MRAVRRGLREGGAMAAARDPPEVSLREATQRKLRRFSELRGKLVARGEFWDIVAITAADEKQELAYNQQLSEKLKRKELPLGVQYHVFVDPAGAKIGNGGSTLCALQCLEKLYGDKWNSFTILLIHSGGYSQRLPNASALGKIFTALPLGNPIYQMLELKLAMYIDFPLNMNPGILVTCADDIELYSIGEFEFIRFDKPGFTALAHPSSLTIGTTHGVFVLDPFDDLKHRDLEYRSCHRFLHKPSIEKMYQFNAVCRPGNFCQQDFAGGDIADLKLDSDYVYTDSLFYMDHKSAKMLLAFYEKIGTLSCEIDAYGDFLQALGPGATVEYTRNTSNVIKEESELVEMRQRIFHLLKGTSLNVVVLNNSKFYHIGTTEEYLFYFTSDNSLKSELGLQSITFSIFPDIPECSGKTSCIIQSILDSRCSVAPGSVVEYSRLGPDVSVGENCIISGSYILTKAALPAHSFVCSLSLKMNRCLKYATMAFGVQDNLKKSVKTLSDIKLLQFFGVCFLSCLDVWNLKVTEELFSGNKTCLSLWTARIFPVCSSLSDSVITSLKMLNAVKNKSAFSLNSYKLLSIEEMLIYKDVEDMITYREQIFLEISLKSSLM

SEQ ID NO: 32981 - protein, 101 aa, Homo sapiens
  Payload ID: 6478
  Gene Symbol: FPGT
  Gene Name: fucose-1-phosphate guanylyltransferase
  ENSP ID: ENSP00000431733
MAAARDPPEVSLREATQRKLRRFSELRGKLVARGEFWDIVAITAADEKQELAYNQQLSEKLKRKELPLGVQYHVFVDPAGAKIVETGFHHVSQDGLYLLTS

SEQ ID NO: 32982 - protein, 340 aa, Homo sapiens
  Payload ID: 6478
  Gene Symbol: FPGT
  Gene Name: fucose-1-phosphate guanylyltransferase
  Uniprot ID: O14772
  ENSP ID: ENSP00000432819
MAAARDPPEVSLREATQRKLRRFSELRGKLVARGEFWDIVAITAADEKQELAYNQQLSEKLKRKELPLGVQYHVFVDPAGAKIGNGGSTLCALQCLEKLYGDKWNSFTILLIHSGGYSQRLPNASALGKIFTALPLDIPECSGKTSCIIQSILDSRCSVAPGSVVEYSRLGPDVSVGENCIISGSYILTKAALPAHSFVCSLSLKMNRCLKYATMAFGVQDNLKKSVKTLSDIKLLQFFGVCFLSCLDVWNLKVTEELFSGNKTCLSLWTARIFPVCSSLSDSVITSLKMLNAVKNKSAFSLNSYKLLSIEEMLIYKDVEDMITYREQIFLEISLKSSLM

SEQ ID NO: 32983 - protein, 137 aa, Homo sapiens
  Payload ID: 6478
  Gene Symbol: FPGT
  Gene Name: fucose-1-phosphate guanylyltransferase
  ENSP ID: ENSP00000433044
MAAARDPPEVSLREATQRKLRRFSELRGTREGTGVLLGNAEGGCFYVPGGKLVARGEFWDIVAITAADEKQELAYNQQLSEKLKRKELPLGVQYHVFVDPAGAKIGTRFMEMEDQHFVPFNVWKSYMEINGILLPSY

SEQ ID NO: 32984 - protein, 174 aa, Homo sapiens
  Payload ID: 6478
  Gene Symbol: FPGT
  Gene Name: fucose-1-phosphate guanylyltransferase
  ENSP ID: ENSP00000433499
ELRGTREGTGVLLGNAEGGCFYVPGGKLVARGEFWDIVAITAADEKQELAYNQQLSEKLKRKELPLGVQYHVFVDPAGAKIGNGGSTLCALQCLEKLYGDKWNSFTILLIHSGGYSQRLPNASALGKIFTALPLGNPIYQMLELKLAMYIDFPLNMNPGILVTCADDIELYSIG

SEQ ID NO: 32985 - protein, 128 aa, Homo sapiens
  Payload ID: 6478
  Gene Symbol: FPGT
  Gene Name: fucose-1-phosphate guanylyltransferase
  ENSP ID: ENSP00000434934
MRAVRRGLREGGAMAAARDPPEVSLREATQRKLRRFSELRGKLVARGEFWDIVAITAADEKQELAYNQQLSEKLKRKELPLGVQYHVFVDPAGAKIGTRFMEMEDQHFVPFNVWKSYMEINGILLPSY

SEQ ID NO: 32986 - protein, 466 aa, Homo sapiens
  Payload ID: 6479
  Gene Symbol: FUCA1
  Gene Name: fucosidase, alpha-L- 1, tissue
  Uniprot ID: P04066
  ENSP ID: ENSP00000363603
MRAPGMRSRPAGPALLLLLLFLGAAESVRRAQPPRRYTPDWPSLDSRPLPAWFDEAKFGVFIHWGVFSVPAWGSEWFWWHWQGEGRPQYQRFMRDNYPPGFSYADFGPQFTARFFHPEEWADLFQAAGAKYVVLTTKHHEGFTNWPSPVSWNWNSKDVGPHRDLVGELGTALRKRNIRYGLYHSLLEWFHPLYLLDKKNGFKTQHFVSAKTMPELYDLVNSYKPDLIWSDGEWECPDTYWNSTNFLSWLYNDSPVKDEVVVNDRWGQNCSCHHGGYYNCEDKFKPQSLPDHKWEMCTSIDKFSWGYRRDMALSDVTEESEIISELVQTVSLGGNYLLNIGPTKDGLIVPIFQERLLAVGKWLSINGEAIYASKPWRVQWEKNTTSVWYTSKGSAVYAIFLHWPENGVLNLESPITTSTTKITMLGIQGDLKWSTDPDKGLFISLPQLPPSAVPAEFAWTIKLTGVK

SEQ ID NO: 32987 - protein, 467 aa, Homo sapiens
  Payload ID: 6480
  Gene Symbol: FUCA2
  Gene Name: fucosidase, alpha-L- 2, plasma
  Uniprot ID: Q9BTY2
  ENSP ID: ENSP00000002165
MRPQELPRLAFPLLLLLLLLLPPPPCPAHSATRFDPTWESLDARQLPAWFDQAKFGIFIHWGVFSVPSFGSEWFWWYWQKEKIPKYVEFMKDNYPPSFKYEDFGPLFTAKFFNANQWADIFQASGAKYIVLTSKHHEGFTLWGSEYSWNWNAIDEGPKRDIVKELEVAIRNRTDLRFGLYYSLFEWFHPLFLEDESSSFHKRQFPVSKTLPELYELVNNYQPEVLWSDGDGGAPDQYWNSTGFLAWLYNESPVRGTVVTNDRWGAGSICKHGGFYTCSDRYNPGHLLPHKWENCMTIDKLSWGYRREAGISDYLTIEELVKQLVETVSCGGNLLMNIGPTLDGTISVVFEERLRQMGSWLKVNGEAIYETHTWRSQNDTVTPDVWYTSKPKEKLVYAIFLKWPTSGQLFLGHPKAILGATEVKLLGHGQPLNWISLEQNGIMVELPQLTIHQMPCKWGWALALTNVI

SEQ ID NO: 32988 - protein, 109 aa, Homo sapiens
  Payload ID: 6480
  Gene Symbol: FUCA2
  Gene Name: fucosidase, alpha-L- 2, plasma
  ENSP ID: ENSP00000398119
QLVETVSCGGNLLMNIGPTLDGTISVVFEERLRQMGSWLKVNGEAIYETHTWRSQNDTVTPDVWYTSKPKEKLVYAIFLKWPTSGQLFLGHPKAILGATEVRGNFTLFL

SEQ ID NO: 32989 - protein, 365 aa, Homo sapiens
  Payload ID: 6481
  Gene Symbol: FUT1
  Gene Name: fucosyltransferase 1 (galactoside 2-alpha-L -fucosyltransferase, H blood group)
  Uniprot ID: P19526
  ENSP ID: ENSP00000312021
MWLRSHRQLCLAFLLVCVLSVIFFLHIHQDSFPHGLGLSILCPDRRLVTPPVAIFCLPGTAMGPNASSSCPQHPASLSGTWTVYPNGRFGNQMGQYATLLALAQLNGRRAFILPAMHAALAPVFRITLPVLAPEVDSRTPWRELQLHDWMSEEYADLRDPFLKLSGFPCSWTFFHHLREQIRREFTLHDHLREEAQSVLGQLRLGRTGDRPRTFVGVHVRRGDYLQVMPQRWKGVVGDSAYLRQAMDWFRARHEAPVFVVTSNGMEWCKENIDTSQGDVTFAGDGQEATPWKDFALLTQCNHTIMTIGTFGFWAAYLAGGDTVYLANFTLPDSEFLKIFKPEAAFLPEWVGINADLSPLWTLAKP

SEQ ID NO: 32990 - protein, 479 aa, Homo sapiens
  Payload ID: 6482
  Gene Symbol: FUT10
  Gene Name: fucosyltransferase 10 (alpha (1,3) fucosyltransferase)
  Uniprot ID: Q6P4F1
  ENSP ID: ENSP00000332757
MVRIQRRKLLASCLCVTATVFLLVTLQVMVELGKFERKEFKSSSLQDGHTKMEEAPTHLNSFLKKEGLTFNRKRKWELDSYPIMLWWSPLTGETGRLGQCGADACFFTINRTYLHHHMTKAFLFYGTDFNIDSLPLPRKAHHDWAVFHEESPKNNYKLFHKPVITLFNYTATFSRHSHLPLTTQYLESIEVLKSLRYLVPLQSKNKLRKRLAPLVYVQSDCDPPSDRDSYVRELMTYIEVDSYGECLRNKDLPQQLKNPASMDADGFYRIIAQYKFILAFENAVCDDYITEKFWRPLKLGVVPVYYGSPSITDWLPSNKSAILVSEFSHPRELASYIRRLDSDDRLYEAYVEWKLKGEISNQRLLTALRERKWGVQDVNQDNYIDAFECMVCTKVWANIRLQEKGLPPKRWEAEDTHLSCPEPTVFAFSPLRTPPLSSLREMWISSFEQSKKEAQALRWLVDRNQNFSSQEFWGLVFKD

SEQ ID NO: 32991 - protein, 451 aa, Homo sapiens
  Payload ID: 6482
  Gene Symbol: FUT10
  Gene Name: fucosyltransferase 10 (alpha (1,3) fucosyltransferase)
  Uniprot ID: Q6P4F1
  ENSP ID: ENSP00000429870
MVELGKFERKEFKSSSLQDGHTKMEEAPTHLNSFLKKEGLTFNRKRKWELDSYPIMLWWSPLTGETGRLGQCGADACFFTINRTYLHHHMTKAFLFYGTDFNIDSLPLPRKAHHDWAVFHEESPKNNYKLFHKPVITLFNYTATFSRHSHLPLTTQYLESIEVLKSLRYLVPLQSKNKLRKRLAPLVYVQSDCDPPSDRDSYVRELMTYIEVDSYGECLRNKDLPQQLKNPASMDADGFYRIIAQYKFILAFENAVCDDYITEKFWRPLKLGVVPVYYGSPSITDWLPSNKSAILVSEFSHPRELASYIRRLDSDDRLYEAYVEWKLKGEISNQRLLTALRERKWGVQDVNQDNYIDAFECMVCTKVWANIRLQEKGLPPKRWEAEDTHLSCPEPTVFAFSPLRTPPLSSLREMWISSFEQSKKEAQALRWLVDRNQNFSSQEFWGLVFKD

SEQ ID NO: 32992 - protein, 451 aa, Homo sapiens; identical to SEQ ID NO: 32991
  Payload ID: 6482
  Gene Symbol: FUT10
  Gene Name: fucosyltransferase 10 (alpha (1,3) fucosyltransferase)
  Uniprot ID: Q6P4F1
  ENSP ID: ENSP00000430428

SEQ ID NO: 32993 - protein, 492 aa, Homo sapiens
  Payload ID: 6483
  Gene Symbol: FUT11
  Gene Name: fucosyltransferase 11 (alpha (1,3) fucosyltransferase)
  Uniprot ID: Q495W5
  ENSP ID: ENSP00000361932
MAAGPIRVVLVLLGVLSVCAASGHGSVAEREAGGEAEWAEPWDGAVFRPPSALGAVGVTRSSGTPRPGREEAGDLPVLLWWSPGLFPHFPGDSERIECARGACVASRNRRALRDSRTRALLFYGTDFRASAAPLPRLAHQSWALLHEESPLNNFLLSHGPGIRLFNLTSTFSRHSDYPLSLQWLPGTAYLRRPVPPPMERAEWRRRGYAPLLYLQSHCDVPADRDRYVRELMRHIPVDSYGKCLQNRELPTARLQDTATATTEDPELLAFLSRYKFHLALENAICNDYMTEKLWRPMHLGAVPVYRGSPSVRDWMPNNHSVILIDDFESPQKLAEFIDFLDKNDEEYMKYLAYKQPGGITNQFLLDSLKHREWGVNDPLLPNYLNGFECFVCDYELARLDAEKAHAASPGDSPVFEPHIAQPSHMDCPVPTPGFGNVEEIPENDSWKEMWLQDYWQGLDQGEALTAMIHNNETEQTKFWDYLHEIFMKRQHL

SEQ ID NO: 32994 - protein, 476 aa, Homo sapiens
  Payload ID: 6483
  Gene Symbol: FUT11
  Gene Name: fucosyltransferase 11 (alpha (1,3) fucosyltransferase)
  Uniprot ID: Q495W5
  ENSP ID: ENSP00000378270
MAAGPIRVVLVLLGVLSVCAASGHGSVAEREAGGEAEWAEPWDGAVFRPPSALGAVGVTRSSGTPRPGREEAGDLPVLLWWSPGLFPHFPGDSERIECARGACVASRNRRALRDSRTRALLFYGTDFRASAAPLPRLAHQSWALLHEESPLNNFLLSHGPGIRLFNLTSTFSRHSDYPLSLQWLPGTAYLRRPVPPPMERAEWRRRGYAPLLYLQSHCDVPADRDRYVRELMRHIPVDSYGKCLQNRELPTARLQDTATATTEDPELLAFLSRYKFHLALENAICNDYMTEKLWRPMHLGAVPVYRGSPSVRDWMPNNHSVILIDDFESPQKLAEFIDFLDKNDEEYMKYLAYKQPGGITNQFLLDSLKHREWGVNDPLLPNYLNGFECFVCDYELARLDAEKAHAASPGDSPVFEPHIAQPSHMDCPVPTPGFGNVEEIPENDSSLVQVRDHCICLRFLWPHSEKGRTHNYAAVP

SEQ ID NO: 32995 - protein, 343 aa, Homo sapiens
  Payload ID: 6484
  Gene Symbol: FUT2
  Gene Name: fucosyltransferase 2 (secretor status included)
  Uniprot ID: Q10981
  ENSP ID: ENSP00000375748
MLVVQMPFSFPMAHFILFVFTVSTIFHVQQRLAKIQAMWELPVQIPVLASTSKALGPSQLRGMWTINAIGRLGNQMGEYATLYALAKMNGRPAFIPAQMHSTLAPIFRITLPVLHSATASRIPWQNYHLNDWMEEEYRHIPGEYVRFTGYPCSWTFYHHLRQEILQEFTLHDHVREEAQKFLRGLQVNGSRPGTFVGVHVRRGDYVHVMPKVWKGVVADRRYLQQALDWFRARYSSLIFVVTSNGMAWCRENIDTSHGDVVFAGDGIEGSPAKDFALLTQCNHTIMTIGTFGIWAAYLTGGDTIYLANYTLPDSPFLKIFKPEAAFLPEWTGIAADLSPLLKH

SEQ ID NO: 32996 - protein, 343 aa, Homo sapiens; identical to SEQ ID NO: 32995
  Payload ID: 6484
  Gene Symbol: FUT2
  Gene Name: fucosyltransferase 2 (secretor status included)
  Uniprot ID: Q10981
  ENSP ID: ENSP00000387498

SEQ ID NO: 32997 - protein, 220 aa, Homo sapiens
  Payload ID: 6484
  Gene Symbol: FUT2
  Gene Name: fucosyltransferase 2 (secretor status included)
  ENSP ID: ENSP00000430227
MLVVQMPFSFPMAHFILFVFTVSTIFHVQQRLAKIQAMWELPVQIPVLASTSKALGPSQLRGMWTINAIGRLGNQMGEYATLYALAKMNGRPAFIPAQMHSTLAPIFRITLPVLHSATASRIPWQNYHLNDWMEEEYRHIPGEYVRFTGYPCSWTFYHHLRQEILQEFTLHDHVREEAQKFLRGLQVNGSRPGTFVGVHVRRGDYVHVMPKVWKGVVADR

SEQ ID NO: 32998 - protein, 361 aa, Homo sapiens
  Payload ID: 6485
  Gene Symbol: FUT3
  Gene Name: fucosyltransferase 3 (galactoside 3(4)-L-fucosyltransferase, Lewis blood group)
  Uniprot ID: P21217
  ENSP ID: ENSP00000305603
MDPLGAAKPQWPWRRCLAALLFQLLVAVCFFSYLRVSRDDATGSPRAPSGSSRQDTTPTRPTLLILLRTWPFHIPVALSRCSEMVPGTADCHITADRKVYPQADMVIVHHWDIMSNPKSRLPPSPRPQGQRWIWFNLEPPPNCQHLEALDRYFNLTMSYRSDSDIFTPYGWLEPWSGQPAHPPLNLSAKTELVAWAVSNWKPDSARVRYYQSLQAHLKVDVYGRSHKPLPKGTMMETLSRYKFYLAFENSLHPDYITEKLWRNALEAWAVPVVLGPSRSNYERFLPPDAFIHVDDFQSPKDLARYLQELDKDHARYLSYFRWRETLRPRSFSWALDFCKACWKLQQESRYQTVRSIAAWFT

SEQ ID NO: 32999 - protein, 361 aa, Homo sapiens; identical to SEQ ID NO: 32998
  Payload ID: 6485
  Gene Symbol: FUT3
  Gene Name: fucosyltransferase 3 (galactoside 3(4)-L-fucosyltransferase, Lewis blood group)
  Uniprot ID: P21217
  ENSP ID: ENSP00000416443

SEQ ID NO: 33000 - protein, 361 aa, Homo sapiens; identical to SEQ ID NO: 32998
  Payload ID: 6485
  Gene Symbol: FUT3
  Gene Name: fucosyltransferase 3 (galactoside 3(4)-L-fucosyltransferase, Lewis blood group)
  Uniprot ID: P21217
  ENSP ID: ENSP00000465804

SEQ ID NO: 33001 - protein, 107 aa, Homo sapiens
  Payload ID: 6485
  Gene Symbol: FUT3
  Gene Name: fucosyltransferase 3 (galactoside 3(4)-L-fucosyltransferase, Lewis blood group)
  ENSP ID: ENSP00000467081
MDPLGAAKPQWPWRRCLAALLFQLLVAVCFFSYLRVSRDDATGSPRAPSGSSRQDTTPTRPTLLILLRTWPFHIPVALSRCSEMVPGTADCHITADRKVYPQADMVI

SEQ ID NO: 33002 - protein, 44 aa, Homo sapiens
  Payload ID: 6485
  Gene Symbol: FUT3
  Gene Name: fucosyltransferase 3 (galactoside 3(4)-L-fucosyltransferase, Lewis blood group)
  ENSP ID: ENSP00000467633
MDPLGAAKPQWPWRRCLAALLFQLLVAVCFFSYLRVSRDDATGS

SEQ ID NO: 33003 - protein, 361 aa, Homo sapiens; identical to SEQ ID NO: 32998
  Payload ID: 6485
  Gene Symbol: FUT3
  Gene Name: fucosyltransferase 3 (galactoside 3(4)-L-fucosyltransferase, Lewis blood group)
  Uniprot ID: P21217
  ENSP ID: ENSP00000468123

SEQ ID NO: 33004 - protein, 100 aa, Homo sapiens
  Payload ID: 6485
  Gene Symbol: FUT3
  Gene Name: fucosyltransferase 3 (galactoside 3(4)-L-fucosyltransferase, Lewis blood group)
  ENSP ID: ENSP00000468515
MDPLGAAKPQWPWRRCLAALLFQLLVAVCFFSYLRVSRDDATGSPRAPSGSSRQDTTPTRPTLLILLRTWPFHIPVALSRCSEMVPGTADCHITADRKVY

SEQ ID NO: 33005 - protein, 4 aa, Homo sapiens
  Payload ID: 6485
  Gene Symbol: FUT3
  Gene Name: fucosyltransferase 3 (galactoside 3(4)-L-fucosyltransferase, Lewis blood group)
  ENSP ID: ENSP00000468795
MDPL

SEQ ID NO: 33006 - protein, 530 aa, Homo sapiens
  Payload ID: 6486
  Gene Symbol: FUT4
  Gene Name: fucosyltransferase 4 (alpha (1,3) fucosyltransferase, myeloid-specific)
  Uniprot ID: P22083
  ENSP ID: ENSP00000351602
MRRLWGAARKPSGAGWEKEWAEAPQEAPGAWSGRLGPGRSGRKGRAVPGWASWPAHLALAARPARHLGGAGQGPRPLHSGTAPFHSRASGERQRRLEPQLQHESRCRSSTPADAWRAEAALPVRAMGAPWGSPTAAAGGRRGWRRGRGLPWTVCVLAAAGLTCTALITYACWGQLPPLPWASPTPSRPVGVLLWWEPFGGRDSAPRPPPDCRLRFNISGCRLLTDRASYGEAQAVLFHHRDLVKGPPDWPPPWGIQAHTAEEVDLRVLDYEEAAAAAEALATSSPRPPGQRWVWMNFESPSHSPGLRSLASNLFNWTLSYRADSDVFVPYGYLYPRSHPGDPPSGLAPPLSRKQGLVAWVVSHWDERQARVRYYHQLSQHVTVDVFGRGGPGQPVPEIGLLHTVARYKFYLAFENSQHLDYITEKLWRNALLAGAVPVVLGPDRANYERFVPRGAFIHVDDFPSASSLASYLLFLDRNPAVYRRYFHWRRSYAVHITSFWDEPWCRVCQAVQRAGDRPKSIRNLASWFER

SEQ ID NO: 33007 - protein, 374 aa, Homo sapiens
  Payload ID: 6487
  Gene Symbol: FUT5
  Gene Name: fucosyltransferase 5 (alpha (1,3) fucosyltransferase)
  Uniprot ID: Q11128
  ENSP ID: ENSP00000252675
MDPLGPAKPQWLWRRCLAGLLFQLLVAVCFFSYLRVSRDDATGSPRPGLMAVEPVTGAPNGSRCQDSMATPAHPTLLILLWTWPFNTPVALPRCSEMVPGAADCNITADSSVYPQADAVIVHHWDIMYNPSANLPPPTRPQGQRWIWFSMESPSNCRHLEALDGYFNLTMSYRSDSDIFTPYGWLEPWSGQPAHPPLNLSAKTELVAWAVSNWKPDSARVRYYQSLQAHLKVDVYGRSHKPLPKGTMMETLSRYKFYLAFENSLHPDYITEKLWRNALEAWAVPVVLGPSRSNYERFLPPDAFIHVDDFQSPKDLARYLQELDKDHARYLSYFHWRETLRPRSFSWALAFCKACWKLQQESRYQTVRSIAAWFT

SEQ ID NO: 33008 - protein, 374 aa, Homo sapiens; identical to SEQ ID NO: 33007
  Payload ID: 6487
  Gene Symbol: FUT5
  Gene Name: fucosyltransferase 5 (alpha (1,3) fucosyltransferase)
  ENSP ID: ENSP00000466880

SEQ ID NO: 33009 - protein, 359 aa, Homo sapiens
  Payload ID: 6488
  Gene Symbol: FUT6
  Gene Name: fucosyltransferase 6 (alpha (1,3) fucosyltransferase)
  Uniprot ID: P51993
  ENSP ID: ENSP00000286955
MDPLGPAKPQWSWRCCLTTLLFQLLMAVCFFSYLRVSQDDPTVYPNGSRFPDSTGTPAHSIPLILLWTWPFNKPIALPRCSEMVPGTADCNITADRKVYPQADAVIVHHREVMYNPSAQLPRSPRRQGQRWIWFSMESPSHCWQLKAMDGYFNLTMSYRSDSDIFTPYGWLEPWSGQPAHPPLNLSAKTELVAWAVSNWGPNSARVRYYQSLQAHLKVDVYGRSHKPLPQGTMMETLSRYKFYLAFENSLHPDYITEKLWRNALEAWAVPVVLGPSRSNYERFLPPDAFIHVDDFQSPKDLARYLQELDKDHARYLSYFRWRETLRPRSFSWALAFCKACWKLQEESRYQTRGIAAWFT

SEQ ID NO: 33010 - protein, 359 aa, Homo sapiens; identical to SEQ ID NO: 33009
  Payload ID: 6488
  Gene Symbol: FUT6
  Gene Name: fucosyltransferase 6 (alpha (1,3) fucosyltransferase)
  Uniprot ID: P51993
  ENSP ID: ENSP00000313398

SEQ ID NO: 33011 - protein, 359 aa, Homo sapiens; identical to SEQ ID NO: 33009
  Payload ID: 6488
  Gene Symbol: FUT6
  Gene Name: fucosyltransferase 6 (alpha (1,3) fucosyltransferase)
  Uniprot ID: P51993
  ENSP ID: ENSP00000431708

SEQ ID NO: 33012 - protein, 44 aa, Homo sapiens
  Payload ID: 6488
  Gene Symbol: FUT6
  Gene Name: fucosyltransferase 6 (alpha (1,3) fucosyltransferase)
  ENSP ID: ENSP00000431880
MDPLGPAKPQWSWRCCLTTLLFQLLMAVCFFSYLRVSQDDPTVY

SEQ ID NO: 33013 - protein, 69 aa, Homo sapiens
  Payload ID: 6488
  Gene Symbol: FUT6
  Gene Name: fucosyltransferase 6 (alpha (1,3) fucosyltransferase)
  ENSP ID: ENSP00000432161
MDPLGPAKPQWSWRCCLTTLLFQLLMAVCFFSYLRVSQDDPTVYPNGSRFPDSTGTPAHSIPLILLWTW

SEQ ID NO: 33014 - protein, 359 aa, Homo sapiens; identical to SEQ ID NO: 33009
  Payload ID: 6488
  Gene Symbol: FUT6
  Gene Name: fucosyltransferase 6 (alpha (1,3) fucosyltransferase)
  Uniprot ID: P51993
  ENSP ID: ENSP00000432954

SEQ ID NO: 33015 - protein, 30 aa, Homo sapiens
  Payload ID: 6488
  Gene Symbol: FUT6
  Gene Name: fucosyltransferase 6 (alpha (1,3) fucosyltransferase)
  ENSP ID: ENSP00000433811
MDPLGPAKPQWSWRCCLTTLLFQLLMAVCF

SEQ ID NO: 33016 - protein, 66 aa, Homo sapiens
  Payload ID: 6488
  Gene Symbol: FUT6
  Gene Name: fucosyltransferase 6 (alpha (1,3) fucosyltransferase)
  ENSP ID: ENSP00000436413
MDPLGPAKPQWSWRCCLTTLLFQLLMAVCFFSYLRVSQDDPTVYPNGSRFPDSTGTPAHSIPLILL

SEQ ID NO: 33017 - protein, 137 aa, Homo sapiens
  Payload ID: 6488
  Gene Symbol: FUT6
  Gene Name: fucosyltransferase 6 (alpha (1,3) fucosyltransferase)
  ENSP ID: ENSP00000436547
MDPLGPAKPQWSWRCCLTTLLFQLLMAVCFFSYLRVSQDDPTVYPNGSRFPDSTGTPAHSIPLILLWTWPFNKPIALPRCSEMVPGTADCNITADRKVYPQADAVIVHHREVMYNPSAQLPRSPRRQGQRWIWFSME

SEQ ID NO: 33018 - protein, 364 aa, Homo sapiens
  Payload ID: 6488
  Gene Symbol: FUT6
  Gene Name: fucosyltransferase 6 (alpha (1,3) fucosyltransferase)
  Uniprot ID: P51993
  ENSP ID: ENSP00000466016
MDPLGPAKPQWSWRCCLTTLLFQLLMAVCFFSYLRVSQDDPTVYPNGSRFPDSTGTPAHSIPLILLWTWPFNKPIALPRCSEMVPGTADCNITADRKVYPQADAVIVHHREVMYNPSAQLPRSPRRQGQRWIWFSMESPSHCWQLKAMDGYFNLTMSYRSDSDIFTPYGWLEPWSGQPAHPPLNLSAKTELVAWAVSNWGPNSARVRYYQSLQAHLKVDVYGRSHKPLPQGTMMETLSRYKFYLAFENSLHPDYITEKLWRNALEAWAVPVVLGPSRSNYERFLPPDAFIHVDDFQSPKDLARYLQELDKDHARYLSYFRWRETLRPRSFSWALAFCKACWKLQEESSGGLIYLRTRLPEASPA

SEQ ID NO: 33019 - protein, 342 aa, Homo sapiens
  Payload ID: 6489
  Gene Symbol: FUT7
  Gene Name: fucosyltransferase 7 (alpha (1,3) fucosyltransferase)
  Uniprot ID: Q11130
  ENSP ID: ENSP00000318142
MNNAGHGPTRRLRGLGVLAGVALLAALWLLWLLGSAPRGTPAPQPTITILVWHWPFTDQPPELPSDTCTRYGIARCHLSANRSLLASADAVVFHHRELQTRRSHLPLAQRPRGQPWVWASMESPSHTHGLSHLRGIFNWVLSYRRDSDIFVPYGRLEPHWGPSPPLPAKSRVAAWVVSNFQERQLRARLYRQLAPHLRVDVFGRANGRPLCASCLVPTVAQYRFYLSFENSQHRDYITEKFWRNALVAGTVPVVLGPPRATYEAFVPADAFVHVDDFGSARELAAFLTGMNESRYQRFFAWRDRLRVRLFTDWRERFCAICDRYPHLPRSQVYEDLEGWFQA

SEQ ID NO: 33020 - protein, 308 aa, Homo sapiens
  Payload ID: 6490
  Gene Symbol: FUT8
  Gene Name: fucosyltransferase 8 (alpha (1,6) fucosyltransferase)
  Uniprot ID: Q9BYC5
  ENSP ID: ENSP00000345865
MRPWTGSWRWIMLILFAWGTLLFYIGGHLVRDNDHPDHSSRELSKILAKLERLKQQNEDLRRMAESLRIPEGPIDQGPAIGRVRVLEEQLVKAKEQIENYKKQTRNGLGKDHEILRRRIENGAKELWFFLQSELKKLKNLEGNELQRHADEFLLDLGHHERSIMTDLYYLSQTDGAGDWREKEAKDLTELVQRRITYLQNPKDCSKAKKLVCNINKGCGYGCQLHHVVYCFMIAYGTQRTLILESQNWRYATGGWETVFRPVSETCTDRSGISTGHWSGTPIMNLLVITLFPGQLDCTIDTQKIHFVE

SEQ ID NO: 33021 - protein, 446 aa, Homo sapiens
  Payload ID: 6490
  Gene Symbol: FUT8
  Gene Name: fucosyltransferase 8 (alpha (1,6) fucosyltransferase)
  ENSP ID: ENSP00000351057
MAITVSLVNNKRKIVVLAQPTTVKRKRITPYKSIMTDLYYLSQTDGAGDWREKEAKDLTELVQRRITYLQNPKDCSKAKKLVCNINKGCGYGCQLHHVVYCFMIAYGTQRTLILESQNWRYATGGWETVFRPVSETCTDRSGISTGHWSGEVKDKNVQVVELPIVDSLHPRPPYLPLAVPEDLADRLVRVHGDPAVWWVSQFVKYLIRPQPWLEKEIEEATKKLGFKHPVIGVHVRRTDKVGTEAAFHPIEEYMVHVEEHFQLLARRMQVDKKRVYLATDDPSLLKEAKTKYPNYEFISDNSISWSAGLHNRYTENSLRGVILDIHFLSQADFLVCTFSSQVCRVAYEIMQTLHPDASANFHSLDDIYYFGGQNAHNQIAIYAHQPRTADEIPMEPGDIIGVAGNHWDGYSKGVNRKLGRTGLYPSYKVREKIETVKYPTYPEAEK

SEQ ID NO: 33022 - protein, 575 aa, Homo sapiens
  Payload ID: 6490
  Gene Symbol: FUT8
  Gene Name: fucosyltransferase 8 (alpha (1,6) fucosyltransferase)
  Uniprot ID: Q9BYC5
  ENSP ID: ENSP00000353910
MRPWTGSWRWIMLILFAWGTLLFYIGGHLVRDNDHPDHSSRELSKILAKLERLKQQNEDLRRMAESLRIPEGPIDQGPAIGRVRVLEEQLVKAKEQIENYKKQTRNGLGKDHEILRRRIENGAKELWFFLQSELKKLKNLEGNELQRHADEFLLDLGHHERSIMTDLYYLSQTDGAGDWREKEAKDLTELVQRRITYLQNPKDCSKAKKLVCNINKGCGYGCQLHHVVYCFMIAYGTQRTLILESQNWRYATGGWETVFRPVSETCTDRSGISTGHWSGEVKDKNVQVVELPIVDSLHPRPPYLPLAVPEDLADRLVRVHGDPAVWWVSQFVKYLIRPQPWLEKEIEEATKKLGFKHPVIGVHVRRTDKVGTEAAFHPIEEYMVHVEEHFQLLARRMQVDKKRVYLATDDPSLLKEAKTKYPNYEFISDNSISWSAGLHNRYTENSLRGVILDIHFLSQADFLVCTFSSQVCRVAYEIMQTLHPDASANFHSLDDIYYFGGQNAHNQIAIYAHQPRTADEIPMEPGDIIGVAGNHWDGYSKGVNRKLGRTGLYPSYKVREKIETVKYPTYPEAEK

SEQ ID NO: 33023 - protein, 575 aa, Homo sapiens; identical to SEQ ID NO: 33022
  Payload ID: 6490
  Gene Symbol: FUT8
  Gene Name: fucosyltransferase 8 (alpha (1,6) fucosyltransferase)
  Uniprot ID: Q9BYC5
  ENSP ID: ENSP00000378087

SEQ ID NO: 33024 - protein, 15 aa, Homo sapiens
  Payload ID: 6490
  Gene Symbol: FUT8
  Gene Name: fucosyltransferase 8 (alpha (1,6) fucosyltransferase)
  ENSP ID: ENSP00000451577
MRPWTGSWRWIMLIL

SEQ ID NO: 33025 - protein, 40 aa, Homo sapiens
  Payload ID: 6490
  Gene Symbol: FUT8
  Gene Name: fucosyltransferase 8 (alpha (1,6) fucosyltransferase)
  ENSP ID: ENSP00000451689
MRPWTGSWRWIMLILFAWGTLLFYIGGHLVRDNDHPDHSS

SEQ ID NO: 33026 - protein, 50 aa, Homo sapiens
  Payload ID: 6490
  Gene Symbol: FUT8
  Gene Name: fucosyltransferase 8 (alpha (1,6) fucosyltransferase)
  ENSP ID: ENSP00000452105
MRPWTGSWRWIMLILFAWGTLLFYIGGHLVRDNDHPDHSSRELSKILAKL

SEQ ID NO: 33027 - protein, 46 aa, Homo sapiens
  Payload ID: 6490
  Gene Symbol: FUT8
  Gene Name: fucosyltransferase 8 (alpha (1,6) fucosyltransferase)
  ENSP ID: ENSP00000452147
MRPWTGSWRWIMLILFAWGTLLFYIGGHLVRDNDHPDHSSRELSKI

SEQ ID NO: 33028 - protein, 44 aa, Homo sapiens
  Payload ID: 6490
  Gene Symbol: FUT8
  Gene Name: fucosyltransferase 8 (alpha (1,6) fucosyltransferase)
  ENSP ID: ENSP00000452309
MRPWTGSWRWIMLILFAWGTLLFYIGGHLVRDNDHPDHSSRELS

SEQ ID NO: 33029 - protein, 412 aa, Homo sapiens
  Payload ID: 6490
  Gene Symbol: FUT8
  Gene Name: fucosyltransferase 8 (alpha (1,6) fucosyltransferase)
  Uniprot ID: Q9BYC5
  ENSP ID: ENSP00000452433
MTDLYYLSQTDGAGDWREKEAKDLTELVQRRITYLQNPKDCSKAKKLVCNINKGCGYGCQLHHVVYCFMIAYGTQRTLILESQNWRYATGGWETVFRPVSETCTDRSGISTGHWSGEVKDKNVQVVELPIVDSLHPRPPYLPLAVPEDLADRLVRVHGDPAVWWVSQFVKYLIRPQPWLEKEIEEATKKLGFKHPVIGVHVRRTDKVGTEAAFHPIEEYMVHVEEHFQLLARRMQVDKKRVYLATDDPSLLKEAKTKYPNYEFISDNSISWSAGLHNRYTENSLRGVILDIHFLSQADFLVCTFSSQVCRVAYEIMQTLHPDASANFHSLDDIYYFGGQNAHNQIAIYAHQPRTADEIPMEPGDIIGVAGNHWDGYSKGVNRKLGRTGLYPSYKVREKIETVKYPTYPEAEK

SEQ ID NO: 33030 - protein, 29 aa, Homo sapiens
  Payload ID: 6490
  Gene Symbol: FUT8
  Gene Name: fucosyltransferase 8 (alpha (1,6) fucosyltransferase)
  ENSP ID: ENSP00000452597
MRPWTGSWRWIMLILFAWGTLLFYIGGHL

SEQ ID NO: 33031 - protein, 359 aa, Homo sapiens
  Payload ID: 6491
  Gene Symbol: FUT9
  Gene Name: fucosyltransferase 9 (alpha (1,3) fucosyltransferase)
  Uniprot ID: Q9Y231
  ENSP ID: ENSP00000302599
MTSTSKGILRPFLIVCIILGCFMACLLIYIKPTNSWIFSPMESASSVLKMKNFFSTKTDYFNETTILVWVWPFGQTFDLTSCQAMFNIQGCHLTTDRSLYNKSHAVLIHHRDISWDLTNLPQQARPPFQKWIWMNLESPTHTPQKSGIEHLFNLTLTYRRDSDIQVPYGFLTVSTNPFVFEVPSKEKLVCWVVSNWNPEHARVKYYNELSKSIEIHTYGQAFGEYVNDKNLIPTISTCKFYLSFENSIHKDYITEKLYNAFLAGSVPVVLGPSRENYENYIPADSFIHVEDYNSPSELAKYLKEVDKNNKLYLSYFNWRKDFTVNLPRFWESHACLACDHVKRHQEYKSVGNLEKWFWN

SEQ ID NO: 33032 - protein, 461 aa, Homo sapiens
  Payload ID: 6492
  Gene Symbol: FKTN
  Gene Name: fukutin
  Uniprot ID: O75072
  ENSP ID: ENSP00000223528
MSRINKNVVLALLTLTSSAFLLFQLYYYKHYLSTKNGAGLSKSKGSRIGFDSTQWRAVKKFIMLTSNQNVPVFLIDPLILELINKNFEQVKNTSHGSTSQCKFFCVPRDFTAFALQYHLWKNEEGWFRIAENMGFQCLKIESKDPRLDGIDSLSGTEIPLHYICKLATHAIHLVVFHERSGNYLWHGHLRLKEHIDRKFVPFRKLQFGRYPGAFDRPELQQVTVDGLEVLIPKDPMHFVEEVPHSRFIECRYKEARAFFQQYLDDNTVEAVAFRKSAKELLQLAAKTLNKLGVPFWLSSGTCLGWYRQCNIIPYSKDVDLGIFIQDYKSDIILAFQDAGLPLKHKFGKVEDSLELSFQGKDDVKLDVFFFYEETDHMWNGGTQAKTGKKFKYLFPKFTLCWTEFVDMKVHVPCETLEYIEANYGKTWKIPVKTWDWKRSPPNVQPNGIWPISEWDEVIQLY

SEQ ID NO: 33033 - protein, 430 aa, Homo sapiens
  Payload ID: 6492
  Gene Symbol: FKTN
  Gene Name: fukutin
  Uniprot ID: O75072
  ENSP ID: ENSP00000350687
MSRINKNVVLALLTLTSSAFLLFQLYYYKHYLSTKNGAGLSKSKGSRIGFDSTQWRAVKKFIMLTSNQNVPVFLIDPLILELINKNFEQVKNTSHGSTSQCKFFCVPRDFTAFALQYHLWKNEEGWFRIAENMGFQCLKIESKDPRLDGIDSLSGTEIPLHYICKLATHAIHLVVFHERSGNYLWHGHLRLKEHIDRKFVPFRKLQFGRYPGAFDRPELQQVTVDGLEVLIPKDPMHFVEEVPHSRFIECRYKEARAFFQQYLDDNTVEAVAFRKSAKELLQLAAKTLNKLGVPFWLSSGTCLGWYRQCNIIPYSKDVDLGIFIQDYKSDIILAFQDAGLPLKHKFGKVEDSLELSFQGKDDVKLDVFFFYEETDHMWNGGTQAKTGKKFKYLFPKFTLCWTEFVDMKVHVPCETLEYIEANYGKNQQGA

SEQ ID NO: 33034 - protein, 235 aa, Homo sapiens
  Payload ID: 6492
  Gene Symbol: FKTN
  Gene Name: fukutin
  ENSP ID: ENSP00000363837
MILEVGENNGFFSKSLLPRYASKKLKSSLPHSRAVKKFIMLTSNQNVPVFLIDPLILELINKNFEQVKNTSHGSTSQCKFFCVPRDFTAFALQYHLWKNEEGWFRIAENMGFQCLKIESKDPRLDGIDSLSGTEIPLHYICKLATHAIHLVVFHERSGNYLWHGHLRLKEHIDRKFVPFRKLQFGRYPGAFDRPELQQVTVDGLEVLIPKDPMHFVEEVPHSRFIECRYKEARAF

SEQ ID NO: 33035 - protein, 430 aa, Homo sapiens; identical to SEQ ID NO: 33033
  Payload ID: 6492
  Gene Symbol: FKTN
  Gene Name: fukutin
  Uniprot ID: O75072
  ENSP ID: ENSP00000399140

SEQ ID NO: 33036 - protein, 160 aa, Homo sapiens
  Payload ID: 6492
  Gene Symbol: FKTN
  Gene Name: fukutin
  ENSP ID: ENSP00000414114
  MOD_RES (1)..(1): Any amino acid
XWYRQCNIIPYSKDVDLGIFIQDYKSDIILAFQDAGLPLKHKFGKVEDSLELSFQGKDDVKLDVFFFYEETDHMWNGGTQAKTGKKFKYLFPKFTLCWTEFVDMKVHVPCETLEYIEANYGKEAESYILSMLFRTTFWSLADFPLTPENNSSLKNGNLNV

SEQ ID NO: 33037 - protein, 67 aa, Homo sapiens
  Payload ID: 6492
  Gene Symbol: FKTN
  Gene Name: fukutin
  ENSP ID: ENSP00000473347
MSRINKNVVLALLTLTSSAFLLFQLYYYKHYLSTKNGAGLSKSKGSRIGFDSTQWHISPYIENVHLS

SEQ ID NO: 33038 - protein, 461 aa, Homo sapiens; identical to SEQ ID NO: 33032
  Payload ID: 6492
  Gene Symbol: FKTN
  Gene Name: fukutin
  Uniprot ID: O75072
  ENSP ID: ENSP00000473540

SEQ ID NO: 33039 - protein, 495 aa, Homo sapiens
  Payload ID: 6493
  Gene Symbol: FKRP
  Gene Name: fukutin related protein
  Uniprot ID: Q9H9S5
  ENSP ID: ENSP00000326570
MRLTRCQAALAAAITLNLLVLFYVSWLQHQPRNSRARGPRRASAAGPRVTVLVREFEAFDNAVPELVDSFLQQDPAQPVVVAADTLPYPPLALPRIPNVRLALLQPALDRPAAASRPETYVATEFVALVPDGARAEAPGLLERMVEALRAGSARLVAAPVATANPARCLALNVSLREWTARYGAAPAAPRCDALDGDAVVLLRARDLFNLSAPLARPVGTSLFLQTALRGWAVQLLDLTFAAARQPPLATAHARWKAEREGRARRAALLRALGIRLVSWEGGRLEWFGCNKETTRCFGTVVGDTPAYLYEERWTPPCCLRALRETARYVVGVLEAAGVRYWLEGGSLLGAARHGDIIPWDYDVDLGIYLEDVGNCEQLRGAEAGSVVDERGFVWEKAVEGDFFRVQYSESNHLHVDLWPFYPRNGVMTKDTWLDHRQDVEFPEHFLQPLVPLPFAGFVAQAPNNYRRFLELKFGPGVIENPQYPNPALLSLTGSG

SEQ ID NO: 33040 - protein, 495 aa, Homo sapiens; identical to SEQ ID NO: 33039
  Payload ID: 6493
  Gene Symbol: FKRP
  Gene Name: fukutin related protein
  Uniprot ID: Q9H9S5
  ENSP ID: ENSP00000375776

SEQ ID NO: 33041 - protein, 106 aa, Homo sapiens
  Payload ID: 6493
  Gene Symbol: FKRP
  Gene Name: fukutin related protein
  ENSP ID: ENSP00000468825
MRLTRCQAALAAAITLNLLVLFYVSWLQHQPRNSRARGPRRASAAGPRVTVLVREFEAFDNAVPELVDSFLQQDPAQPVVVAADTLPYPPLALPRIPNVRLALLQP

SEQ ID NO: 33042 - protein, 68 aa, Homo sapiens
  Payload ID: 6493
  Gene Symbol: FKRP
  Gene Name: fukutin related protein
  ENSP ID: ENSP00000469373
MRLTRCQAALAAAITLNLLVLFYVSWLQHQPRNSRARGPRRASAAGPRVTVLVREFEAFDNAVPELVD

SEQ ID NO: 33043 - protein, 72 aa, Homo sapiens
  Payload ID: 6493
  Gene Symbol: FKRP
  Gene Name: fukutin related protein
  ENSP ID: ENSP00000470024
MRLTRCQAALAAAITLNLLVLFYVSWLQHQPRNSRARGPRRASAAGPRVTVLVREFEAFDNAVPELVDSFLQ

SEQ ID NO: 33044 - protein, 80 aa, Homo sapiens
  Payload ID: 6493
  Gene Symbol: FKRP
  Gene Name: fukutin related protein
  ENSP ID: ENSP00000470096
MRLTRCQAALAAAITLNLLVLFYVSWLQHQPRNSRARGPRRASAAGPRVTVLVREFEAFDNAVPELVDSFLQQDPAQPVV

SEQ ID NO: 33045 - protein, 162 aa, Homo sapiens
  Payload ID: 6493
  Gene Symbol: FKRP
  Gene Name: fukutin related protein
  ENSP ID: ENSP00000470103
MRLTRCQAALAAAITLNLLVLFYVSWLQHQPRNSRARGPRRASAAGPRVTVLVREFEAFDNAVPELVDSFLQQDPAQPVVVAADTLPYPPLALPRIPNVRLALLQPALDRPAAASRPETYVATEFVALVPDGARAEAPGLLERMVEALRAGSARLVAAPVAT

SEQ ID NO: 33046 - protein, 86 aa, Homo sapiens
  Payload ID: 6493
  Gene Symbol: FKRP
  Gene Name: fukutin related protein
  ENSP ID: ENSP00000470297
MRLTRCQAALAAAITLNLLVLFYVSWLQHQPRNSRARGPRRASAAGPRVTVLVREFEAFDNAVPELVDSFLQQDPAQPVVVAADTL

SEQ ID NO: 33047 - protein, 114 aa, Homo sapiens
  Payload ID: 6493
  Gene Symbol: FKRP
  Gene Name: fukutin related protein
  ENSP ID: ENSP00000470335
MRLTRCQAALAAAITLNLLVLFYVSWLQHQPRNSRARGPRRASAAGPRVTVLVREFEAFDNAVPELVDSFLQQDPAQPVVVAADTLPYPPLALPRIPNVRLALLQPALDRPAAA

SEQ ID NO: 33048 - protein, 137 aa, Homo sapiens
  Payload ID: 6493
  Gene Symbol: FKRP
  Gene Name: fukutin related protein
  ENSP ID: ENSP00000470901
MRLTRCQAALAAAITLNLLVLFYVSWLQHQPRNSRARGPRRASAAGPRVTVLVREFEAFDNAVPELVDSFLQQDPAQPVVVAADTLPYPPLALPRIPNVRLALLQPALDRPAAASRPETYVATEFVALVPDGARAEA

SEQ ID NO: 33049 - protein, 61 aa, Homo sapiens
  Payload ID: 6493
  Gene Symbol: FKRP
  Gene Name: fukutin related protein
  ENSP ID: ENSP00000470929
MRLTRCQAALAAAITLNLLVLFYVSWLQHQPRNSRARGPRRASAAGPRVTVLVREFEAFDN

SEQ ID NO: 33050 - protein, 29 aa, Homo sapiens
  Payload ID: 6493
  Gene Symbol: FKRP
  Gene Name: fukutin related protein
  ENSP ID: ENSP00000471088
MRLTRCQAALAAAITLNLLVLFYVSWLQH

SEQ ID NO: 33051 - protein, 101 aa, Homo sapiens
  Payload ID: 6493
  Gene Symbol: FKRP
  Gene Name: fukutin related protein
  ENSP ID: ENSP00000471209
MRLTRCQAALAAAITLNLLVLFYVSWLQHQPRNSRARGPRRASAAGPRVTVLVREFEAFDNAVPELVDSFLQQDPAQPVVVAADTLPYPPLALPRIPNVRL

SEQ ID NO: 33052 - protein, 70 aa, Homo sapiens
  Payload ID: 6493
  Gene Symbol: FKRP
  Gene Name: fukutin related protein
  ENSP ID: ENSP00000471573
MRLTRCQAALAAAITLNLLVLFYVSWLQHQPRNSRARGPRRASAAGPRVTVLVREFEAFDNAVPELVDSF

SEQ ID NO: 33053 - protein, 35 aa, Homo sapiens
  Payload ID: 6493
  Gene Symbol: FKRP
  Gene Name: fukutin related protein
  ENSP ID: ENSP00000471971
MVEALRAGSARLVAAPVATANPARCLALNVSLREW

SEQ ID NO: 33054 - protein, 59 aa, Homo sapiens
  Payload ID: 6493
  Gene Symbol: FKRP
  Gene Name: fukutin related protein
  ENSP ID: ENSP00000472370
MRLTRCQAALAAAITLNLLVLFYVSWLQHQPRNSRARGPRRASAAGPRVTVLVREFEAF

SEQ ID NO: 33055 - protein, 53 aa, Homo sapiens
  Payload ID: 6493
  Gene Symbol: FKRP
  Gene Name: fukutin related protein
  ENSP ID: ENSP00000472807
MRLTRCQAALAAAITLNLLVLFYVSWLQHQPRNSRARGPRRASAAGPRVTVLV

SEQ ID NO: 33056 - protein, 4 aa, Homo sapiens
  Payload ID: 6493
  Gene Symbol: FKRP
  Gene Name: fukutin related protein
  ENSP ID: ENSP00000472850
MRLT

SEQ ID NO: 33057 - protein, 95 aa, Homo sapiens
  Payload ID: 6493
  Gene Symbol: FKRP
  Gene Name: fukutin related protein
  ENSP ID: ENSP00000472981
MRLTRCQAALAAAITLNLLVLFYVSWLQHQPRNSRARGPRRASAAGPRVTVLVREFEAFDNAVPELVDSFLQQDPAQPVVVAADTLPYPPLALPR

SEQ ID NO: 33058 - protein, 510 aa, Homo sapiens
  Payload ID: 6494
  Gene Symbol: FH
  Gene Name: fumarate hydratase
  Uniprot ID: P07954
  ENSP ID: ENSP00000355518
MYRALRLLARSRPLVRAPAAALASAPGLGGAAVPSFWPPNAARMASQNSFRIEYDTFGELKVPNDKYYGAQTVRSTMNFKIGGVTERMPTPVIKAFGILKRAAAEVNQDYGLDPKIANAIMKAADEVAEGKLNDHFPLVVWQTGSGTQTNMNVNEVISNRAIEMLGGELGSKIPVHPNDHVNKSQSSNDTFPTAMHIAAAIEVHEVLLPGLQKLHDALDAKSKEFAQIIKIGRTHTQDAVPLTLGQEFSGYVQQVKYAMTRIKAAMPRIYELAAGGTAVGTGLNTRIGFAEKVAAKVAALTGLPFVTAPNKFEALAAHDALVELSGAMNTTACSLMKIANDIRFLGSGPRSGLGELILPENEPGSSIMPGKVNPTQCEAMTMVAAQVMGNHVAVTVGGSNGHFELNVFKPMMIKNVLHSARLLGDASVSFTENCVVGIQANTERINKLMNESLMLVTALNPHIGYDKAAKIAKTAHKNGSTLKETAIELGYLTAEQFDEWVKPKDMLGPK

SEQ ID NO: 33059 - protein, 419 aa, Homo sapiens
  Payload ID: 6495
  Gene Symbol: FAH
  Gene Name: fumarylacetoacetate hydrolase (fumarylacetoacetase)
  Uniprot ID: P16930
  ENSP ID: ENSP00000261755
MSFIPVAEDSDFPIHNLPYGVFSTRGDPRPRIGVAIGDQILDLSIIKHLFTGPVLSKHQDVFNQPTLNSFMGLGQAAWKEARVFLQNLLSVSQARLRDDTELRKCAFISQASATMHLPATIGDYTDFYSSRQHATNVGIMFRDKENALMPNWLHLPVGYHGRASSVVVSGTPIRRPMGQMKPDDSKPPVYGACKLLDMELEMAFFVGPGNRLGEPIPISKAHEHIFGMVLMNDWSARDIQKWEYVPLGPFLGKSFGTTVSPWVVPMDALMPFAVPNPKQDPRPLPYLCHDEPYTFDINLSVNLKGEGMSQAATICKSNFKYMYWTMLQQLTHHSVNGCNLRPGDLLASGTISGPEPENFGSMLELSWKGTKPIDLGNGQTRKFLLDGDEVIITGYCQGDGYRIGFGQCAGKVLPALLPS

SEQ ID NO: 33060 - protein, 419 aa, Homo sapiens; identical to SEQ ID NO: 33059
  Payload ID: 6495
  Gene Symbol: FAH
  Gene Name: fumarylacetoacetate hydrolase (fumarylacetoacetase)
  Uniprot ID: P16930
  ENSP ID: ENSP00000385080

SEQ ID NO: 33061 - protein, 161 aa, Homo sapiens
  Payload ID: 6495
  Gene Symbol: FAH
  Gene Name: fumarylacetoacetate hydrolase (fumarylacetoacetase)
  ENSP ID: ENSP00000453152
MSFIPVAEDSDFPIHNLPYGVFSTRGDPRPRIGVAIGDQILDLSIIKHLFTGPVLSKHQDVFNQPTLNSFMGLGQAAWKEARVFLQNLLSVSQARLRDDTELRKCAFISQASATMHLPATIGDYTDFYSSRQHATNVGIMFRDKENALMPNWLHLPVGYHG

SEQ ID NO: 33062 - protein, 419 aa, Homo sapiens; identical to SEQ ID NO: 33059
  Payload ID: 6495
  Gene Symbol: FAH
  Gene Name: fumarylacetoacetate hydrolase (fumarylacetoacetase)
  Uniprot ID: P16930
  ENSP ID: ENSP00000453347

SEQ ID NO: 33063 - protein, 349 aa, Homo sapiens
  Payload ID: 6495
  Gene Symbol: FAH
  Gene Name: fumarylacetoacetate hydrolase (fumarylacetoacetase)
  Uniprot ID: P16930
  ENSP ID: ENSP00000454271
MGLGQAAWKEARVFLQNLLSVSQARLRDDTELRKCAFISQASATMHLPATIGDYTDFYSSRQHATNVGIMFRDKENALMPNWLHLPVGYHGRASSVVVSGTPIRRPMGQMKPDDSKPPVYGACKLLDMELEMAFFVGPGNRLGEPIPISKAHEHIFGMVLMNDWSARDIQKWEYVPLGPFLGKSFGTTVSPWVVPMDALMPFAVPNPKQDPRPLPYLCHDEPYTFDINLSVNLKGEGMSQAATICKSNFKYMYWTMLQQLTHHSVNGCNLRPGDLLASGTISGPEPENFGSMLELSWKGTKPIDLGNGQTRKFLLDGDEVIITGYCQGDGYRIGFGQCAGKVLPALLPS

SEQ ID NO: 33064 - protein, 60 aa, Homo sapiens
  Payload ID: 6495
  Gene Symbol: FAH
  Gene Name: fumarylacetoacetate hydrolase (fumarylacetoacetase)
  ENSP ID: ENSP00000454952
  MOD_RES (1)..(1): Any amino acid
XNLKGEGMSQAATICKSNFKYMYWTMLQQLTHHSVNGCNLRPGDLLASGTISGPVSIWLH

SEQ ID NO: 33065 - protein, 248 aa, Homo sapiens
  Payload ID: 6496
  Gene Symbol: FAHD1
  Gene Name: fumarylacetoacetate hydrolase domain containing 1
  Uniprot ID: Q6P587
  ENSP ID: ENSP00000372112
MGIMAASRPLSRFWEWGKNIVCVGRNYADHVREMRSAVLSEPVLFLKPSTAYAPEGSPILMPAYTRNLHHELELGVVMGKRCRAVPEAAAMDYVGGYALCLDMTARDVQDECKKKGLPWTLAKSFTASCPVSAFVPKEKIPDPHKLKLWLKVNGELRQEGETSSMIFSIPYIISYVSKIITLEEGDIILTGTPKGVGPVKENDEIEAGIHGLRQGLTLSPKLECSSAITAHCSLELPGSSNPPSASRF

SEQ ID NO: 33066 - protein, 226 aa, Homo sapiens
  Payload ID: 6496
  Gene Symbol: FAHD1
  Gene Name: fumarylacetoacetate hydrolase domain containing 1
  Uniprot ID: Q6P587
  ENSP ID: ENSP00000372114
MGIMAASRPLSRFWEWGKNIVCVGRNYADHVREMRSAVLSEPVLFLKPSTAYAPEGSPILMPAYTRNLHHELELGVVMGKRCRAVPEAAAMDYVGGYALCLDMTARDVQDECKKKGLPWTLAKSFTASCPVSAFVPKEKIPDPHKLKLWLKVNGELRQEGETSSMIFSIPYIISYVSKIITLEEGDIILTGTPKGVGPVKENDEIEAGIHGLPKVSSATLPVRLQE

SEQ ID NO: 33067 - protein, 224 aa, Homo sapiens
  Payload ID: 6496
  Gene Symbol: FAHD1
  Gene Name: fumarylacetoacetate hydrolase domain containing 1
  Uniprot ID: Q6P587
  ENSP ID: ENSP00000398053
MGIMAASRPLSRFWEWGKNIVCVGRNYADHVREMRSAVLSEPVLFLKPSTAYAPEGSPILMPAYTRNLHHELELGVVMGKRCRAVPEAAAMDYVGGYALCLDMTARDVQDECKKKGLPWTLAKSFTASCPVSAFVPKEKIPDPHKLKLWLKVNGELRQEGETSSMIFSIPYIISYVSKIITLEEGDIILTGTPKGVGPVKENDEIEAGIHGLVSMTFKVEKPEY

SEQ ID NO: 33068 - protein, 248 aa, Homo sapiens; identical to SEQ ID NO: 33065
  Payload ID: 6496
  Gene Symbol: FAHD1
  Gene Name: fumarylacetoacetate hydrolase domain containing 1
  Uniprot ID: Q6P587
  ENSP ID: ENSP00000482534

SEQ ID NO: 33069 - protein, 314 aa, Homo sapiens
  Payload ID: 6497
  Gene Symbol: FAHD2A
  Gene Name: fumarylacetoacetate hydrolase domain containing 2A
  Uniprot ID: Q96GK7
  ENSP ID: ENSP00000233379
MLVSGRRRLLTVLLQAQKWPFQPSRDMRLVQFRAPHLVGPHLGLETGNGGGVINLNAFDPTLPKTMTQFLEQGEATLSVARRALAAQLPVLPRSEVTFLAPVTRPDKVVCVGMNYVDHCKEQNVPVPKEPIIFSKFASSIVGPYDEVVLPPQSQEVDWEVELAVVIGKKGKHIKATDAMAHVAGFTVAHDVSARDWQMRRNGKQWLLGKTFDTFCPLGPALVTKDSVADPHNLKICCRVNGEVVQSGNTNQMVFKTEDLIAWVSQFVTFYPGDVILTGTPPGVGVFRKPPVFLKKGDEVQCEIEELGVIINKVV

SEQ ID NO: 33070 - protein, 127 aa, Homo sapiens
  Payload ID: 6497
  Gene Symbol: FAHD2A
  Gene Name: fumarylacetoacetate hydrolase domain containing 2A
  ENSP ID: ENSP00000390528
MLVSGRRRLLTVLLQAQKWPFQPSRDMRLVQFRAPHLVGPHLGLETGNGGGVINLNAFDPTLPKTMTQFLEQGEATLSVARRALAAQLPVLPRSEVTFLAPVTRPDKVVCVGMNYVDHCKEQNVPVP

SEQ ID NO: 33071 - protein, 81 aa, Homo sapiens
  Payload ID: 6497
  Gene Symbol: FAHD2A
  Gene Name: fumarylacetoacetate hydrolase domain containing 2A
  ENSP ID: ENSP00000405148
MLVSGRRRLLTVLLQAQKWPFQPSRDMRLVQFRAPHLVGPHLGLETGNGGGVINLNAFDPTLPKTMTQFLEQGEATLSVAR

SEQ ID NO: 33072 - protein, 314 aa, Homo sapiens; identical to SEQ ID NO: 33069
  Payload ID: 6497
  Gene Symbol: FAHD2A
  Gene Name: fumarylacetoacetate hydrolase domain containing 2A
  Uniprot ID: Q96GK7
  ENSP ID: ENSP00000406424

SEQ ID NO: 33073 - protein, 314 aa, Homo sapiens
  Payload ID: 6498
  Gene Symbol: FAHD2B
  Gene Name: fumarylacetoacetate hydrolase domain containing 2B
  Uniprot ID: Q6P2I3
  ENSP ID: ENSP00000272610
MLVSGRRRLLTALLQAQKWPFQPSRDMRLVQFRAPHLVGPHLGLETGNGGGVINLNAFDPTLPKTMTQFLEQGEATLSVARRALAAQLPVLPWSEVTFLAPVTWPDKVVCVGMNYVDHCKEQNVPVPKEPIIFSKFASSIVGPYDEVVLPPQSQEVDWEVELAVVIGKKGKHIKATDAMAHVAGFTVAHDVSARDWLTRRNGKQWLLGKTFDTFCPLGPALVTKDSVADPHNLKICCRVNGEVVQSSNTNQMVFKTEDLIAWVSQFVTFYPGDVILTGTPPGVGVFRKPPVFLKKGDEVQCEIEELGVIINKVV

SEQ ID NO: 33074 - protein, 314 aa, Homo sapiens; identical to SEQ ID NO: 33073
  Payload ID: 6498
  Gene Symbol: FAHD2B
  Gene Name: fumarylacetoacetate hydrolase domain containing 2B
  Uniprot ID: Q6P2I3
  ENSP ID: ENSP00000410470

SEQ ID NO: 33075 - protein, 155 aa, Homo sapiens
  Payload ID: 6499
  Gene Symbol: FUNDC1
  Gene Name: FUN14 domain containing 1
  Uniprot ID: Q8IVP5
  ENSP ID: ENSP00000367284
MATRNPPPQDYESDDDSYEVLDLTEYARRHQWWNRVFGHSSGPMVEKYSVATQIVMGGVTGWCAGFLFQKVGKLAATAVGGGFLLLQIASHSGYVQIDWKRVEKDVNKAKRQIKKRANKAAPEINNLIEEATEFIKQNIVISSGFVGGFLLGLAS

SEQ ID NO: 33076 - protein, 189 aa, Homo sapiens
  Payload ID: 6500
  Gene Symbol: FUNDC2
  Gene Name: FUN14 domain containing 2
  Uniprot ID: Q9BWH2
  ENSP ID: ENSP00000358510
METSAPRAGSQVVATTARHSAAYRADPLRVSSRDKLTEMAASSQGNFEGNFESLDLAEFAKKQPWWRKLFGQESGPSAEKYSVATQLFIGGVTGWCTGFIFQKVGKLAATAVGGGFFLLQLANHTGYIKVDWQRVEKDMKKAKEQLKIRKSNQIPTEVRSKAEEVVSFVKKNVLVTGGFFGGFLLGMAS

SEQ ID NO: 33077 - protein, 94 aa, Homo sapiens
  Payload ID: 6500
  Gene Symbol: FUNDC2
  Gene Name: FUN14 domain containing 2
  ENSP ID: ENSP00000395488
SLDLAEFAKKQPWWRKLFGQESGPSAEKYSVATQLFIGGVTGWCTGFIFQKVGKLAATAVGGGFFLLQLATLTFASLQTILGTSKLTGNEWRRT

SEQ ID NO: 33078 - protein, 794 aa, Homo sapiens
  Payload ID: 6501
  Gene Symbol: FURIN
  Gene Name: furin (paired basic amino acid cleaving enzyme)
  Uniprot ID: P09958
  ENSP ID: ENSP00000268171
MELRPWLLWVVAATGTLVLLAADAQGQKVFTNTWAVRIPGGPAVANSVARKHGFLNLGQIFGDYYHFWHRGVTKRSLSPHRPRHSRLQREPQVQWLEQQVAKRRTKRDVYQEPTDPKFPQQWYLSGVTQRDLNVKAAWAQGYTGHGIVVSILDDGIEKNHPDLAGNYDPGASFDVNDQDPDPQPRYTQMNDNRHGTRCAGEVAAVANNGVCGVGVAYNARIGGVRMLDGEVTDAVEARSLGLNPNHIHIYSASWGPEDDGKTVDGPARLAEEAFFRGVSQGRGGLGSIFVWASGNGGREHDSCNCDGYTNSIYTLSISSATQFGNVPWYSEACSSTLATTYSSGNQNEKQIVTTDLRQKCTESHTGTSASAPLAAGIIALTLEANKNLTWRDMQHLVVQTSKPAHLNANDWATNGVGRKVSHSYGYGLLDAGAMVALAQNWTTVAPQRKCIIDILTEPKDIGKRLEVRKTVTACLGEPNHITRLEHAQARLTLSYNRRGDLAIHLVSPMGTRSTLLAARPHDYSADGFNDWAFMTTHSWDEDPSGEWVLEIENTSEANNYGTLTKFTLVLYGTAPEGLPVPPESSGCKTLTSSQACVVCEEGFSLHQKSCVQHCPPGFAPQVLDTHYSTENDVETIRASVCAPCHASCATCQGPALTDCLSCPSHASLDPVEQTCSRQSQSSRESPPQQQPPRLPPEVEAGQRLRAGLLPSHLPEVVAGLSCAFIVLVFVTVFLVLQLRSGFSFRGVKVYTMDRGLISYKGLPPEAWQEECPSDSEEDEGRGERTAFIKDQSAL

SEQ ID NO: 33079 - protein, 69 aa, Homo sapiens
  Payload ID: 6501
  Gene Symbol: FURIN
  Gene Name: furin (paired basic amino acid cleaving enzyme)
  ENSP ID: ENSP00000452730
MELRPWLLWVVAATGTLVLLAADAQGQKVFTNTWAVRIPGGPAVANSVARKHGFLNLGQIFGDYYHFWH

SEQ ID NO: 33080 - protein, 175 aa, Homo sapiens
  Payload ID: 6501
  Gene Symbol: FURIN
  Gene Name: furin (paired basic amino acid cleaving enzyme)
  ENSP ID: ENSP00000453212
MELRPWLLWVVAATGTLVLLAADAQGQKVFTNTWAVRIPGGPAVANSVARKHGFLNLGQIFGDYYHFWHRGVTKRSLSPHRPRHSRLQREPQWLEQQVAKRRTKRDVYQEPTDPKFPQQWYLSGVTQRDLNVKAAWAQGYTGHGIVVSILDDGIEKNHPDLAGNYDPGASFDVND

SEQ ID NO: 33081 - protein, 216 aa, Homo sapiens
  Payload ID: 6501
  Gene Symbol: FURIN
  Gene Name: furin (paired basic amino acid cleaving enzyme)
  ENSP ID: ENSP00000453942
PNHIHIYSASWGPEDDGKTVDGPARLAEEAFFRGVSQGRGGLGSIFVWASGNGGREHDSCNCDGYTNSIYTLSISSATQFGNVPWYSEACSSTLATTYSSGNQNEKQIVTTDLRQKCTESHTGTSASAPLAAGIIALTLEANKNLTWRDMQHLVVQTSKPAHLNANDWATNGVGRKVSHSYGYGLLDAGAMVALAQNWTTVAPQRKCIIDILTEPK

SEQ ID NO: 33082 - protein, 794 aa, Homo sapiens; identical to SEQ ID NO: 33078
  Payload ID: 6501
  Gene Symbol: FURIN
  Gene Name: furin (paired basic amino acid cleaving enzyme)
  Uniprot ID: P09958
  ENSP ID: ENSP00000483552

SEQ ID NO: 33083 - protein, 794 aa, Homo sapiens; identical to SEQ ID NO: 33078
  Payload ID: 6501
  Gene Symbol: FURIN
  Gene Name: furin (paired basic amino acid cleaving enzyme)
  Uniprot ID: P09958
  ENSP ID: ENSP00000484952

SEQ ID NO: 33084 - protein, 195 aa, Homo sapiens
  Payload ID: 6502
  Gene Symbol: FRY
  Gene Name: furry homolog (Drosophila)
  ENSP ID: ENSP00000369565
MESLAQLELCQRLYKLHFQLLLLFQSYCKLIGQVHEVSSMPELLNMSRELSDLKKHLKEASAVIAADPLYSDGAWSEPTFTSTEAAIQSMLECLKNNELGKALRQIRECRSLWPNDIFGSSSDDEVQTLLNIYFRHQTLGQTGTYALVGSNQSLTEICTKLMELNMEIRDMIRRAQSYRVLTTFLPDSSVSGTSL

SEQ ID NO: 33085 - protein, 3012 aa, Homo sapiens
  Payload ID: 6502
  Gene Symbol: FRY
  Gene Name: furry homolog (Drosophila)
  ENSP ID: ENSP00000369600
MASQQDSGFFEISIKYLLKSWSNTSPVGNGYIKPPVPPASGTHREKGPPTMLPINVDPDSKPGEYVLKSLFVNFTTQAERKIRIIMAEPLEKPLTKSLQRGEDPQFDQVISSMSSLSEYCLPSILRTLFDWYKRQNGIEDESHEYRPRTSNKSKSDEQQRDYLMERRDLAIDFIFSLVLIEVLKQIPLHPVIDSLIHDVINLAFKHFKYKEGYLGPNTGNMHIVADLYAEVIGVLAQAKFPAVKKKFMAELKELRHKEQNPYVVQSIISLIMGMKFFRIKMYPVEDFEASLQFMQECAHYFLEVKDKDIKHALAGLFVEILVPVAAAVKNEVNVPCLRNFVESLYDTTLELSSRKKHSLALYPLVTCLLCVSQKQLFLNRWHIFLNNCLSNLKNKDPKMARVALESLYRLLWVYMIRIKCESNTATQSRLITIITTLFPKGSRGVVPRDMPLNIFVKIIQFIAQERLDFAMKEIIFDFLCVGKPAKAFSLNPERMNIGLRAFLVIADSLQQKDGEPPMPVTGAVLPSGNTLRVKKTYLSKTLTEEEAKMIGMSLYYSQVRKAVDNILRHLDKEVGRCMMLTNVQMLNKEPEDMITGERKPKIDLFRTCVAAIPRLLPDGMSKLELIDLLARLSIHMDDELRHIAQNSLQGLLVDFSDWREDVLFGFTNFLLREVNDMHHTLLDSSLKLLLQLLTQWKLVIQTQGKVYEQANKIRNSELIANGSSHRIQSERGPHCSVLHAVEGFALVLLCSFQVATRKLSVLILKEIRALFIALGQPEDDDRPMIDVMDQLSSSILESFIHVAVSDSATLPLTHNVDLQWLVEWNAVLVNSHYDVKSPSHVWIFAQSVKDPWVLCLFSFLRQENLPKHCPTALSYAWPYAFTRLQSVMPLVDPNSPINAKKTSTAGSGDNYVTLWRNYLILCFGVAKPSIMSPGHLRASTPEIMATTPDGTVSYDNKAIGTPSVGVLLKQLVPLMRLESIEITESLVLGFGRTNSLVFRELVEELHPLMKEALERRPENKKRRERRDLLRLQLLRIFELLADAGVISDSTNGALERDTLALGALFLEYVDLTRMLLEAENDKEVEILKDIRAHFSAMVANLIQCVPVHHRRFLFPQQSLRHHLFILFSQWAGPFSIMFTPLDRYSDRNHQITRYQYCALKAMSAVLCCGPVFDNVGLSPDGYLYKWLDNILACQDLRVHQLGCEVVVLLLELNPDQINLFNWAIDRCYTGSYQLASGCFKAIATVCGSRNYPFDIVTLLNLVLFKASDTNREIYEISMQLMQILEAKLFVYSKKVAEQRPGSILYGTHGPLPPLYSVSLALLSCELARMYPELTLPLFSGKPAIPHNTPQRAPDHAYLPAALAAQHRAGGQQAPPPGSSPSSPEDEVKDREGDVTASHGLRGNGWGSPEATSLVLNNLMYMTAKYGDEVPGPEMENAWNALANNEKWSNNLRITLQFLISLCGVSSDTVLLPYIKKVAIYLCRNNTIQTMEELLFELQQTEPVNPIVQHCDNPPFYRFTASSKASAAASGTTSSSNTVVAGQENFPDAEENKILKESDERFSNVIRAHTRLESRYSNSSGGSYDEDKNDPISPYTGWLLTITETKQPQPLPMPCTGGCWAPLVDYLPETITPRGPLHRCNIAVIFMTEMVVDHSVREDWALHLPLLLHAVFLGLDHYRPEVFEHSKKLLLHLLIALSCNSNFHSIASVLLQTREMGEAKTLTVQPAYQPEYLYTGGFDFLREDQSSPVPDSGLSSSSTSSSISLGGSSGNLPQMTQEVEDVDTAAETDEKANKLIEFLTTRAFGPLWCHEDITPKNQNSKSAEQLTNFLRHVVSVFKDSKSGFHLEHQLSEVALQTALASSSRHYAGRSFQIFRALKQPLSAHALSDLLSRLVEVIGEHGDEIQGYVMEALLTLEAAVDNLSDCLKNSDLLTVLSRSSSPDLSSSSKLTASRKSTGQLNMNPGTTSGNTATAERSRHQRSFSVPKKFGVIDRSSDPPRSATLDRIQACTQQGLSSKTRSSSSLKDSLTDPSHINHPTNLLATIFWVTVALMESDFEFEYLMALRLLSRLLAHMPLDKAENREKLEKLQAQLKWADFSGLQQLLLKGFTSLTTTDLTLQLFSLLTPVSKISMVDASHAIGFPLNVLCLLPQLIQHFENPNQFCKDIAERIAQVCLEEKNPKLSNLAHVMTLYKTHSYTRDCATWVNVVCRYLHEAYADITLNMVTYLAELLEKGLPSVQQPLLQVIYSLLSYMDLSVVPVKQFNVEVLKTIEKYVQSVHWREALNILKLVVSRSASLVLPSYQHSDLSKIEIHRVWTSASKELPGKTLDFHFDISETPIIGRRYDELQNSSGRDGKPRAMAVTRSTSSTSSGSNSNVLVPVSWKRPQYSQKRTKEKLVHVLSLCGQEVGLSKNPSVIFSSCGDLDLLEHQTSLVSSEDGAREQENMDDTNSEQQFRVFRDFDFLDVELEDGEGESMDNFNWGVRRRSLDSLDKCDMQILEERQLSGSTPSLNKMHHEDSDESSEEEDLTASQILEHSDLIMTLSPSEETNPMELLTTACDSTPAEPHSFNTRMSSFDASLPDMNNLQISEGSKAEAVREEEDTTVHEDDLSSSINELPAAFECSDSFSLDMTEGEEKGNRALDQFTLASFGEGDRGVSPPPSPFFSAILAAFQPAACDDAEEAWRSHINQLMCDSDGSCAVYTFHVFSSLFKNIQKRFCFLTCDAASYLGDNLRGIGSKFVSSSQMLTSCSECPTLFVDAETLLSCGLLDKLKFSVLELQEYLDTYNNRKEATLSWLANCKATFAGGSRDGVITCQPGDSEEKQLELCQRLYKLHFQLLLLFQSYCKLIGQVHEVSSMPELLNMSRELSDLKKHLKEASAVIAADPLYSDGAWSEPTFTSTEAAIQSMLECLKNNELGKALRQIRECRSLWPNDIFGSSSDDEVQTLLNIYFRHQTLGQTGTYALVGSNQSLTEICTKLMELNMEIRDMIRRAQSYRVLTTFLPDSSVSGTSL

SEQ ID NO: 33086 - protein, 150 aa, Homo sapiens
  Payload ID: 6502
  Gene Symbol: FRY
  Gene Name: furry homolog (Drosophila)
  ENSP ID: ENSP00000398010
MEITTACWRRSCVISFIKGLASPVGNGYIKPPVPPASGTHREKGPPTMLPINVDPDSKPGEYVLKSLFVNFTTQAERKIRIIMAEPLEKPLTKSLQRGEDPQFDQVISSMSSLSEYCLPSILRTLFDWYKRQNGIEDESHEYRPRTSNKS

SEQ ID NO: 33087 - protein, 132 aa, Homo sapiens
  Payload ID: 6502
  Gene Symbol: FRY
  Gene Name: furry homolog (Drosophila)
  ENSP ID: ENSP00000434694
EPHSFNTRMSSFDASLPDMNNLQISEGSKAEAVREEEDTTVHEDDLSSSINELPAAFECSDSFSLDMTEGEEKGNRALDQFTLASPQPVTMPRRPGAATSTSLCVTQMAPVLCIHFMCSPPCLRIFRKGSAS

SEQ ID NO: 33088 - protein, 3013 aa, Homo sapiens
  Payload ID: 6502
  Gene Symbol: FRY
  Gene Name: furry homolog (Drosophila)
  Uniprot ID: Q5TBA9
  ENSP ID: ENSP00000445043
MASQQDSGFFEISIKYLLKSWSNTSPVGNGYIKPPVPPASGTHREKGPPTMLPINVDPDSKPGEYVLKSLFVNFTTQAERKIRIIMAEPLEKPLTKSLQRGEDPQFDQVISSMSSLSEYCLPSILRTLFDWYKRQNGIEDESHEYRPRTSNKSKSDEQQRDYLMERRDLAIDFIFSLVLIEVLKQIPLHPVIDSLIHDVINLAFKHFKYKEGYLGPNTGNMHIVADLYAEVIGVLAQAKFPAVKKKFMAELKELRHKEQNPYVVQSIISLIMGMKFFRIKMYPVEDFEASLQFMQECAHYFLEVKDKDIKHALAGLFVEILVPVAAAVKNEVNVPCLRNFVESLYDTTLELSSRKKHSLALYPLVTCLLCVSQKQLFLNRWHIFLNNCLSNLKNKDPKMARVALESLYRLLWVYMIRIKCESNTATQSRLITIITTLFPKGSRGVVPRDMPLNIFVKIIQFIAQERLDFAMKEIIFDFLCVGKPAKAFSLNPERMNIGLRAFLVIADSLQQKDGEPPMPVTGAVLPSGNTLRVKKTYLSKTLTEEEAKMIGMSLYYSQVRKAVDNILRHLDKEVGRCMMLTNVQMLNKEPEDMITGERKPKIDLFRTCVAAIPRLLPDGMSKLELIDLLARLSIHMDDELRHIAQNSLQGLLVDFSDWREDVLFGFTNFLLREVNDMHHTLLDSSLKLLLQLLTQWKLVIQTQGKVYEQANKIRNSELIANGSSHRIQSERGPHCSVLHAVEGFALVLLCSFQVATRKLSVLILKEIRALFIALGQPEDDDRPMIDVMDQLSSSILESFIHVAVSDSATLPLTHNVDLQWLVEWNAVLVNSHYDVKSPSHVWIFAQSVKDPWVLCLFSFLRQENLPKHCPTALSYAWPYAFTRLQSVMPLVDPNSPINAKKTSTAGSGDNYVTLWRNYLILCFGVAKPSIMSPGHLRASTPEIMATTPDGTVSYDNKAIGTPSVGVLLKQLVPLMRLESIEITESLVLGFGRTNSLVFRELVEELHPLMKEALERRPENKKRRERRDLLRLQLLRIFELLADAGVISDSTNGALERDTLALGALFLEYVDLTRMLLEAENDKEVEILKDIRAHFSAMVANLIQCVPVHHRRFLFPQQSLRHHLFILFSQWAGPFSIMFTPLDRYSDRNHQITRYQYCALKAMSAVLCCGPVFDNVGLSPDGYLYKWLDNILACQDLRVHQLGCEVVVLLLELNPDQINLFNWAIDRCYTGSYQLASGCFKAIATVCGSRNYPFDIVTLLNLVLFKASDTNREIYEISMQLMQILEAKLFVYSKKVAEQRPGSILYGTHGPLPPLYSVSLALLSCELARMYPELTLPLFSEVSQRFPTTHPNGRQIMLTYLLPWLHNIELVDSRLLLPGSSPSSPEDEVKDREGDVTASHGLRGNGWGSPEATSLVLNNLMYMTAKYGDEVPGPEMENAWNALANNEKWSNNLRITLQFLISLCGVSSDTVLLPYIKKVAIYLCRNNTIQTMEELLFELQQTEPVNPIVQHCDNPPFYRFTASSKASAAASGTTSSSNTVVAGQENFPDAEENKILKESDERFSNVIRAHTRLESRYSNSSGGSYDEDKNDPISPYTGWLLTITETKQPQPLPMPCTGGCWAPLVDYLPETITPRGPLHRCNIAVIFMTEMVVDHSVREDWALHLPLLLHAVFLGLDHYRPEVFEHSKKLLLHLLIALSCNSNFHSIASVLLQTREMGEAKTLTVQPAYQPEYLYTGGFDFLREDQSSPVPDSGLSSSSTSSSISLGGSSGNLPQMTQEVEDVDTAAETDEKANKLIEFLTTRAFGPLWCHEDITPKNQNSKSAEQLTNFLRHVVSVFKDSKSGFHLEHQLSEVALQTALASSSRHYAGRSFQIFRALKQPLSAHALSDLLSRLVEVIGEHGDEIQGYVMEALLTLEAAVDNLSDCLKNSDLLTVLSRSSSPDLSSSSKLTASRKSTGQLNMNPGTTSGNTATAERSRHQRSFSVPKKFGVIDRSSDPPRSATLDRIQACTQQGLSSKTRSSSSLKDSLTDPSHINHPTNLLATIFWVTVALMESDFEFEYLMALRLLSRLLAHMPLDKAENREKLEKLQAQLKWADFSGLQQLLLKGFTSLTTTDLTLQLFSLLTPVSKISMVDASHAIGFPLNVLCLLPQLIQHFENPNQFCKDIAERIAQVCLEEKNPKLSNLAHVMTLYKTHSYTRDCATWVNVVCRYLHEAYADITLNMVTYLAELLEKGLPSVQQPLLQVIYSLLSYMDLSVVPVKQFNVEVLKTIEKYVQSVHWREALNILKLVVSRSASLVLPSYQHSDLSKIEIHRVWTSASKELPGKTLDFHFDISETPIIGRRYDELQNSSGRDGKPRAMAVTRSTSSTSSGSNSNVLVPVSWKRPQYSQKRTKEKLVHVLSLCGQEVGLSKNPSVIFSSCGDLDLLEHQTSLVSSEDGAREQENMDDTNSEQQFRVFRDFDFLDVELEDGEGESMDNFNWGVRRRSLDSLDKCDMQILEERQLSGSTPSLNKMHHEDSDESSEEEDLTASQILEHSDLIMTLSPSEETNPMELLTTACDSTPAEPHSFNTRMSSFDASLPDMNNLQISEGSKAEAVREEEDTTVHEDDLSSSINELPAAFECSDSFSLDMTEGEEKGNRALDQFTLASFGEGDRGVSPPPSPFFSAILAAFQPAACDDAEEAWRSHINQLMCDSDGSCAVYTFHVFSSLFKNIQKRFCFLTCDAASYLGDNLRGIGSKFVSSSQMLTSCSECPTLFVDAETLLSCGLLDKLKFSVLELQEYLDTYNNRKEATLSWLANCKATFAGGSRDGVITCQPGDSEEKQLELCQRLYKLHFQLLLLFQSYCKLIGQVHEVSSMPELLNMSRELSDLKKHLKEASAVIAADPLYSDGAWSEPTFTSTEAAIQSMLECLKNNELGKALRQIRECRSLWPNDIFGSSSDDEVQTLLNIYFRHQTLGQTGTYALVGSNQSLTEICTKLMELNMEIRDMIRRAQSYRVLTTFLPDSSVSGTSL

SEQ ID NO: 33089 - protein, 526 aa, Homo sapiens
  Payload ID: 6503
  Gene Symbol: FUS
  Gene Name: FUS RNA binding protein
  Uniprot ID: P35637
  ENSP ID: ENSP00000254108
MASNDYTQQATQSYGAYPTQPGQGYSQQSSQPYGQQSYSGYSQSTDTSGYGQSSYSSYGQSQNTGYGTQSTPQGYGSTGGYGSSQSSQSSYGQQSSYPGYGQQPAPSSTSGSYGSSSQSSSYGQPQSGSYSQQPSYGGQQQSYGQQQSYNPPQGYGQQNQYNSSSGGGGGGGGGGNYGQDQSSMSSGGGSGGGYGNQDQSGGGGSGGYGQQDRGGRGRGGSGGGGGGGGGGYNRSSGGYEPRGRGGGRGGRGGMGGSDRGGFNKFGGPRDQGSRHDSEQDNSDNNTIFVQGLGENVTIESVADYFKQIGIIKTNKKTGQPMINLYTDRETGKLKGEATVSFDDPPSAKAAIDWFDGKEFSGNPIKVSFATRRADFNRGGGNGRGGRGRGGPMGRGGYGGGGSGGGGRGGFPSGGGGGGGQQRAGDWKCPNPTCENMNFSWRNECNQCKAPKPDGPGGGPGGSHMGGNYGDDRRGGRGGYDRGGYRGRGGDRGGFRGGRGGGDRGGFGPGKMDSRGEHRQDRRERPY

SEQ ID NO: 33090 - protein, 525 aa, Homo sapiens
  Payload ID: 6503
  Gene Symbol: FUS
  Gene Name: FUS RNA binding protein
  Uniprot ID: P35637
  ENSP ID: ENSP00000369594
MASNDYTQQATQSYGAYPTQPGQGYSQQSSQPYGQQSYSGYSQSTDTSGYGQSSYSSYGQSQNSYGTQSTPQGYGSTGGYGSSQSSQSSYGQQSSYPGYGQQPAPSSTSGSYGSSSQSSSYGQPQSGSYSQQPSYGGQQQSYGQQQSYNPPQGYGQQNQYNSSSGGGGGGGGGGNYGQDQSSMSSGGGSGGGYGNQDQSGGGGSGGYGQQDRGGRGRGGSGGGGGGGGGGYNRSSGGYEPRGRGGGRGGRGGMGGSDRGGFNKFGGPRDQGSRHDSEQDNSDNNTIFVQGLGENVTIESVADYFKQIGIIKTNKKTGQPMINLYTDRETGKLKGEATVSFDDPPSAKAAIDWFDGKEFSGNPIKVSFATRRADFNRGGGNGRGGRGRGGPMGRGGYGGGGSGGGGRGGFPSGGGGGGGQQRAGDWKCPNPTCENMNFSWRNECNQCKAPKPDGPGGGPGGSHMGGNYGDDRRGGRGGYDRGGYRGRGGDRGGFRGGRGGGDRGGFGPGKMDSRGEHRQDRRERPY

SEQ ID NO: 33091 - protein, 263 aa, Homo sapiens
  Payload ID: 6503
  Gene Symbol: FUS
  Gene Name: FUS RNA binding protein
  ENSP ID: ENSP00000455073
MASNDYTQQATQSYGAYPTQPGQGYSQQSSQPYGQQSYSGYSQSTDTSGYGQSSYSSYGQSQNTGYGTQSTPQGYGSTGGYGSSQSSQSSYGQQSSYPGYGQQPAPSSTSGSYGSSSQSSSYGQPQSGSYSQQPSYGGQQQSYGQQQSYNPPQGYGQQNQYNSSSGGGGGGGGGGNYGQDQSSMSSGGGSGGGYGNQDQSGGGGSGGYGQQDRGGRGRGGSGGGGGGGGGGYNRSSGGYEPRGRGGGRGGRGGMGPSGPRITS

SEQ ID NO: 33092 - protein, 527 aa, Homo sapiens
  Payload ID: 6503
  Gene Symbol: FUS
  Gene Name: FUS RNA binding protein
  ENSP ID: ENSP00000455282
MASNDYTQQATQSYGAYPTQPGQGYSQQSSQPYGQQSYSGYSQSTDTSGYGQSSYSSYGQSQNTGYGTQSTPQGYGSTGGYGSSQSSQSSYGQQSSYPGYGQQPAPSSTSGSYGSSSQSSSYGQPQSGSYSQQPSYGGQQQSYGQQQSYNPPQGYGQQNQYNSSSGGGGGGGGGGNYGQDQSSMSSGGGSGGGYGNQDQSGGGGSGGYGQQDRGGRGRGGSGGGGGGGGGGYNRSSGGYEPRGRGGGRGGRGGMGGSDRGGFNKFGGPRDQGSRHDSAEQDNSDNNTIFVQGLGENVTIESVADYFKQIGIIKTNKKTGQPMINLYTDRETGKLKGEATVSFDDPPSAKAAIDWFDGKEFSGNPIKVSFATRRADFNRGGGNGRGGRGRGGPMGRGGYGGGGSGGGGRGGFPSGGGGGGGQQRAGDWKCPNPTCENMNFSWRNECNQCKAPKPDGPGGGPGGSHMGGNYGDDRRGGRGGYDRGGYRGRGGDRGGFRGGRGGGDRGGFGPGKMDSRGEHRQDRRERPY

SEQ ID NO: 33093 - protein, 418 aa, Homo sapiens
  Payload ID: 6504
  Gene Symbol: FUZ
  Gene Name: fuzzy planar cell polarity protein
  Uniprot ID: Q9BT04
  ENSP ID: ENSP00000313309
MGEEGTGGTVHLLCLAASSGVPLFCRSSRGGAPARQQLPFSVIGSLNGVHMFGQNLEVQLSSARTENTTVVWKSFHDSITLIVLSSEVGISELRLERLLQMVFGAMVLLVGLEELTNIRNVERLKKDLRASYCLIDSFLGDSELIGDLTQCVDCVIPPEGSLLQEALSGFAEAAGTTFVSLVVSGRVVAATEGWWRLGTPEAVLLPWLVGSLPPQTARDYPVYLPHGSPTVPHRLLTLTLLPSLELCLLCGPSPPLSQLYPQLLERWWQPLLDPLRACLPLGPRALPSGFPLHTDILGLLLLHLELKRCLFTVEPLGDKEPSPEQRRRLLRNFYTLVTSTHFPPEPGPPEKTEDEVYQAQLPRACYLVLGTEEPGTGVRLVALQLGLRRLLLLLSPQSPTHGLRSLATHTLHALTPLL

SEQ ID NO: 33094 - protein, 78 aa, Homo sapiens
  Payload ID: 6504
  Gene Symbol: FUZ
  Gene Name: fuzzy planar cell polarity protein
  ENSP ID: ENSP00000366296
MGEEGTGGTVHLLCLAASSGVPLFCRSSRGGAPARQQLPFSVIGSLNGVHMFGQNLEVQLSSARTENTTVHHPHCSVI

SEQ ID NO: 33095 - protein, 86 aa, Homo sapiens
  Payload ID: 6504
  Gene Symbol: FUZ
  Gene Name: fuzzy planar cell polarity protein
  ENSP ID: ENSP00000431388
MFGQNLEVQLSSARTENTTVVWKSFHDSITLIVLSSEVGISELRLERLLQMVFGAMVLLVGLEELTNIRNVERLKKDLRAGPFFLS

SEQ ID NO: 33096 - protein, 86 aa, Homo sapiens
  Payload ID: 6504
  Gene Symbol: FUZ
  Gene Name: fuzzy planar cell polarity protein
  ENSP ID: ENSP00000431420
MGEEGTGGTVHLLCLAASSGVPLFCRSSRGGAPARQQLPFSVIGSLNGVHMFGQNLEVQLSSARTENTTVVWKSFHDRSFLWDLKN

SEQ ID NO: 33097 - protein, 368 aa, Homo sapiens
  Payload ID: 6504
  Gene Symbol: FUZ
  Gene Name: fuzzy planar cell polarity protein
  ENSP ID: ENSP00000431731
MFGQNLEVQLSSARTENTTVVWKSFHDSITLIVLSSEVGISELRLERLLQMVFGAMVLLVGLEELTNIRNVERLKKDLRASYCLIDSFLGDSELIGDLTQCVDCVIPPEGSLLQEALSGFAEAAGTTFVSLVVSGRVVAATEGWWRLGTPEAVLLPWLVGSLPPQTARDYPVYLPHGSPTVPHRLLTLTLLPSLELCLLCGPSPPLSQLYPQLLERWWQPLLDPLRACLPLGPRALPSGFPLHTDILGLLLLHLELKRCLFTVEPLGDKEPSPEQRRRLLRNFYTLVTSTHFPPEPGPPEKTEDEVYQAQLPRACYLVLGTEEPGTGVRLVALQLGLRRLLLLLSPQSPTHGLRSLATHTLHALTPLL

SEQ ID NO: 33098 - protein, 56 aa, Homo sapiens
  Payload ID: 6504
  Gene Symbol: FUZ
  Gene Name: fuzzy planar cell polarity protein
  ENSP ID: ENSP00000432148
  MOD_RES (1)..(1): Any amino acid
XLLLLHLELKRCLFTVEPLGDKAEPSPEQRRRLLRNFYTLVTSTHFPPVPLHVMKE

SEQ ID NO: 33099 - protein, 86 aa, Homo sapiens; identical to SEQ ID NO: 33096
  Payload ID: 6504
  Gene Symbol: FUZ
  Gene Name: fuzzy planar cell polarity protein
  ENSP ID: ENSP00000433164

SEQ ID NO: 33100 - protein, 86 aa, Homo sapiens; identical to SEQ ID NO: 33096
  Payload ID: 6504
  Gene Symbol: FUZ
  Gene Name: fuzzy planar cell polarity protein
  ENSP ID: ENSP00000433492

SEQ ID NO: 33101 - protein, 382 aa, Homo sapiens
  Payload ID: 6504
  Gene Symbol: FUZ
  Gene Name: fuzzy planar cell polarity protein
  Uniprot ID: Q9BT04
  ENSP ID: ENSP00000435177
MGEEGTGGTVHLLCLAASSGVPLFCRSSRGGAPARQQLPFSVIGSLNGVHMFGQNLEVQLSSARTENTTVVLLVGLEELTNIRNVERLKKDLRASYCLIDSFLGDSELIGDLTQCVDCVIPPEGSLLQEALSGFAEAAGTTFVSLVVSGRVVAATEGWWRLGTPEAVLLPWLVGSLPPQTARDYPVYLPHGSPTVPHRLLTLTLLPSLELCLLCGPSPPLSQLYPQLLERWWQPLLDPLRACLPLGPRALPSGFPLHTDILGLLLLHLELKRCLFTVEPLGDKEPSPEQRRRLLRNFYTLVTSTHFPPEPGPPEKTEDEVYQAQLPRACYLVLGTEEPGTGVRLVALQLGLRRLLLLLSPQSPTHGLRSLATHTLHALTPLL

SEQ ID NO: 33102 - protein, 95 aa, Homo sapiens
  Payload ID: 6504
  Gene Symbol: FUZ
  Gene Name: fuzzy planar cell polarity protein
  ENSP ID: ENSP00000469856
MGEEGTGGTVHLLCLAASSGVPLFCRSSRGGAPARQQLPFSVIGSLNGVHMFGQNLEVQLSSARTENTTVVWKSFHDRSPGGNVGQGQGLGDSPC

SEQ ID NO: 33103 - protein, 78 aa, Homo sapiens
  Payload ID: 6504
  Gene Symbol: FUZ
  Gene Name: fuzzy planar cell polarity protein
  ENSP ID: ENSP00000470155
MGEEGTGGTVHLLCLAASSGVPLFCRSSRGGAPARQQNLEVQLSSARTENTTVVWKSFHDRSPGGNVGQGQGLGDSPC

SEQ ID NO: 33104 - protein, 45 aa, Homo sapiens
  Payload ID: 6504
  Gene Symbol: FUZ
  Gene Name: fuzzy planar cell polarity protein
  ENSP ID: ENSP00000470863
MGEEGTGGTVHLLCLAASSGVPLFCRSSRGGAPARQQHHPHCSVI

SEQ ID NO: 33105 - protein, 45 aa, Homo sapiens
  Payload ID: 6504
  Gene Symbol: FUZ
  Gene Name: fuzzy planar cell polarity protein
  ENSP ID: ENSP00000471319
MFGQNLEVQLSSARTENTTVVWKSFHDRSPGGNVGQGQGLGDSPC

SEQ ID NO: 33106 - protein, 58 aa, Homo sapiens
  Payload ID: 6504
  Gene Symbol: FUZ
  Gene Name: fuzzy planar cell polarity protein
  ENSP ID: ENSP00000471793
MVFGAMVLLVGLEELTNIRNVERLKKDLRASYCLIDSFLGDSELIGDLTQCVDCVIPP

SEQ ID NO: 33107 - protein, 92 aa, Homo sapiens
  Payload ID: 6505
  Gene Symbol: FXYD1
  Gene Name: FXYD domain containing ion transport regulator 1
  Uniprot ID: O00168
  ENSP ID: ENSP00000343314
MASLGHILVFCVGLLTMAKAESPKEHDPFTYDYQSLQIGGLVIAGILFILGILIVLSRRCRCKFNQQQRTGEPDEEEGTFRSSIRRLSTRRR

SEQ ID NO: 33108 - protein, 92 aa, Homo sapiens; identical to SEQ ID NO: 33107
  Payload ID: 6505
  Gene Symbol: FXYD1
  Gene Name: FXYD domain containing ion transport regulator 1
  Uniprot ID: O00168
  ENSP ID: ENSP00000393611

SEQ ID NO: 33109 - protein, 92 aa, Homo sapiens; identical to SEQ ID NO: 33107
  Payload ID: 6505
  Gene Symbol: FXYD1
  Gene Name: FXYD domain containing ion transport regulator 1
  Uniprot ID: O00168
  ENSP ID: ENSP00000465289

SEQ ID NO: 33110 - protein, 92 aa, Homo sapiens; identical to SEQ ID NO: 33107
  Payload ID: 6505
  Gene Symbol: FXYD1
  Gene Name: FXYD domain containing ion transport regulator 1
  Uniprot ID: O00168
  ENSP ID: ENSP00000466398

SEQ ID NO: 33111 - protein, 92 aa, Homo sapiens; identical to SEQ ID NO: 33107
  Payload ID: 6505
  Gene Symbol: FXYD1
  Gene Name: FXYD domain containing ion transport regulator 1
  Uniprot ID: O00168
  ENSP ID: ENSP00000467727

SEQ ID NO: 33112 - protein, 115 aa, Homo sapiens
  Payload ID: 6505
  Gene Symbol: FXYD1
  Gene Name: FXYD domain containing ion transport regulator 1
  ENSP ID: ENSP00000467818
  MOD_RES (1)..(1): Any amino acid
XFCVGLLTMAKAESPKEHDPFTYDYQSLQIGGLVIAGILFILGILIVLTPPLARASWSYSAAWRPPGGSLSFSYLSTPTGRRCRCKFNQQQRTGEPDEEEGTFRSSIRRLSTRRR

SEQ ID NO: 33113 - protein, 92 aa, Homo sapiens; identical to SEQ ID NO: 33107
  Payload ID: 6505
  Gene Symbol: FXYD1
  Gene Name: FXYD domain containing ion transport regulator 1
  Uniprot ID: O00168
  ENSP ID: ENSP00000468535

SEQ ID NO: 33114 - protein, 92 aa, Homo sapiens; identical to SEQ ID NO: 33107
  Payload ID: 6505
  Gene Symbol: FXYD1
  Gene Name: FXYD domain containing ion transport regulator 1
  Uniprot ID: O00168
  ENSP ID: ENSP00000481244

SEQ ID NO: 33115 - protein, 64 aa, Homo sapiens
  Payload ID: 6506
  Gene Symbol: FXYD2
  Gene Name: FXYD domain containing ion transport regulator 2
  Uniprot ID: P54710
  ENSP ID: ENSP00000260287
MDRWYLGGSPKGDVDPFYYDYETVRNGGLIFAGLAFIVGLLILLSRRFRCGGNKKRRQINEDEP

SEQ ID NO: 33116 - protein, 66 aa, Homo sapiens
  Payload ID: 6506
  Gene Symbol: FXYD2
  Gene Name: FXYD domain containing ion transport regulator 2
  Uniprot ID: P54710
  ENSP ID: ENSP00000292079
MTGLSMDGGGSPKGDVDPFYYDYETVRNGGLIFAGLAFIVGLLILLSRRFRCGGNKKRRQINEDEP

SEQ ID NO: 33117 - protein, 64 aa, Homo sapiens; identical to SEQ ID NO: 33115
  Payload ID: 6506
  Gene Symbol: FXYD2
  Gene Name: FXYD domain containing ion transport regulator 2
  Uniprot ID: P54710
  ENSP ID: ENSP00000432430

SEQ ID NO: 33118 - protein, 64 aa, Homo sapiens; identical to SEQ ID NO: 33115
  Payload ID: 6506
  Gene Symbol: FXYD2
  Gene Name: FXYD domain containing ion transport regulator 2
  Uniprot ID: P54710
  ENSP ID: ENSP00000436414

SEQ ID NO: 33119 - protein, 113 aa, Homo sapiens
  Payload ID: 6507
  Gene Symbol: FXYD3
  Gene Name: FXYD domain containing ion transport regulator 3
  Uniprot ID: Q14802
  ENSP ID: ENSP00000328259
MQKVTLGLLVFLAGFPVLDANDLEDKNSPFYYDWHSLQVGGLICAGVLCAMGIIIVMSEWRSSGEQAGRGWGSPPLTTQLSPTGAKCKCKFGQKSGHHPGETPPLITPGSAQS

SEQ ID NO: 33120 - protein, 113 aa, Homo sapiens; identical to SEQ ID NO: 33119
  Payload ID: 6507
  Gene Symbol: FXYD3
  Gene Name: FXYD domain containing ion transport regulator 3
  Uniprot ID: Q14802
  ENSP ID: ENSP00000339499

SEQ ID NO: 33121 - protein, 113 aa, Homo sapiens; identical to SEQ ID NO: 33119
  Payload ID: 6507
  Gene Symbol: FXYD3
  Gene Name: FXYD domain containing ion transport regulator 3
  Uniprot ID: Q14802
  ENSP ID: ENSP00000389770

SEQ ID NO: 33122 - protein, 144 aa, Homo sapiens
  Payload ID: 6507
  Gene Symbol: FXYD3
  Gene Name: FXYD domain containing ion transport regulator 3
  Uniprot ID: Q14802
  ENSP ID: ENSP00000473929
MGRGYSGALQARGGLEEPLERGLRGPSFTQSPLHGAAAAYLSAQRDASLPVPGQRSDMQKVTLGLLVFLAGFPVLDANDLEDKNSPFYYDWHSLQVGGLICAGVLCAMGIIIVMSAKCKCKFGQKSGHHPGETPPLITPGSAQS

SEQ ID NO: 33123 - protein, 61 aa, Homo sapiens
  Payload ID: 6507
  Gene Symbol: FXYD3
  Gene Name: FXYD domain containing ion transport regulator 3
  Uniprot ID: Q14802
  ENSP ID: ENSP00000474055
MQKVTLGLLVFLAGFPVLDANDLEDKNSPFYYGESPCPLSPPHNPTYCLVPRVPIQGWGLT

SEQ ID NO: 33124 - protein, 116 aa, Homo sapiens
  Payload ID: 6507
  Gene Symbol: FXYD3
  Gene Name: FXYD domain containing ion transport regulator 3
  ENSP ID: ENSP00000474223
MQKVTLGLLVFLAGFPVLDANDLEDKNSPFYYGAPYIFVKRMGGQMERTQAGTEVPSTFLLDWHSLQVGGLICAGVLCAMGIIIVMSAKCKCKFGQKSGHHPGETPPLITPGSAQS

SEQ ID NO: 33125 - protein, 87 aa, Homo sapiens
  Payload ID: 6507
  Gene Symbol: FXYD3
  Gene Name: FXYD domain containing ion transport regulator 3
  Uniprot ID: Q14802
  ENSP ID: ENSP00000474438
MQKVTLGLLVFLAGFPVLDANDLEDKNSPFYYDWHSLQVGGLICAGVLCAMGIIIVMSAKCKCKFGQKSGHHPGETPPLITPGSAQS

SEQ ID NO: 33126 - protein, 70 aa, Homo sapiens
  Payload ID: 6507
  Gene Symbol: FXYD3
  Gene Name: FXYD domain containing ion transport regulator 3
  ENSP ID: ENSP00000474514
MQKVTLGLLVFLAGFPVLDANDLEDKNSPFYYDWHSLQVGGLICAGVLCAMGIIIVMSAKCKCKFGQKSG

SEQ ID NO: 33127 - protein, 87 aa, Homo sapiens; identical to SEQ ID NO: 33125
  Payload ID: 6507
  Gene Symbol: FXYD3
  Gene Name: FXYD domain containing ion transport regulator 3
  Uniprot ID: Q14802
  ENSP ID: ENSP00000474526

SEQ ID NO: 33128 - protein, 96 aa, Homo sapiens
  Payload ID: 6507
  Gene Symbol: FXYD3
  Gene Name: FXYD domain containing ion transport regulator 3
  Uniprot ID: Q14802
  ENSP ID: ENSP00000474622
MQKVTLGLLVFLAGFPVLDANDLEDKNSPFYYDWHSLQVGGLICAGVLCAMGIIIVMSEWRSSGEQAGRGWGSPPLTTQLSPTGAKCKCKFGQKSG

SEQ ID NO: 33129 - protein, 87 aa, Homo sapiens; identical to SEQ ID NO: 33125
  Payload ID: 6507
  Gene Symbol: FXYD3
  Gene Name: FXYD domain containing ion transport regulator 3
  Uniprot ID: Q14802
  ENSP ID: ENSP00000474851

SEQ ID NO: 33130 - protein, 61 aa, Homo sapiens; identical to SEQ ID NO: 33123
  Payload ID: 6507
  Gene Symbol: FXYD3
  Gene Name: FXYD domain containing ion transport regulator 3
  Uniprot ID: Q14802
  ENSP ID: ENSP00000474855

SEQ ID NO: 33131 - protein, 116 aa, Homo sapiens; identical to SEQ ID NO: 33124
  Payload ID: 6507
  Gene Symbol: FXYD3
  Gene Name: FXYD domain containing ion transport regulator 3
  ENSP ID: ENSP00000475056

SEQ ID NO: 33132 - protein, 89 aa, Homo sapiens
  Payload ID: 6508
  Gene Symbol: FXYD4
  Gene Name: FXYD domain containing ion transport regulator 4
  Uniprot ID: P59646
  ENSP ID: ENSP00000473361
MERVTLALLLLAGLTALEANDPFANKDDPFYYDWKNLQLSGLICGGLLAIAGIAAVLSGKCKCKSSQKQHSPVPEKAIPLITPGSATTC

SEQ ID NO: 33133 - protein, 89 aa, Homo sapiens; identical to SEQ ID NO: 33132
  Payload ID: 6508
  Gene Symbol: FXYD4
  Gene Name: FXYD domain containing ion transport regulator 4
  Uniprot ID: P59646
  ENSP ID: ENSP00000483791

SEQ ID NO: 33134 - protein, 178 aa, Homo sapiens
  Payload ID: 6509
  Gene Symbol: FXYD5
  Gene Name: FXYD domain containing ion transport regulator 5
  Uniprot ID: Q96DB9
  ENSP ID: ENSP00000344254
MSPSGRLCLLTIVGLILPTRGQTLKDTTSSSSADSTIMDIQVPTRAPDAVYTELQPTSPTPTWPADETPQPQTQTQQLEGTDGPLVTDPETHKSTKAAHPTDDTTTLSERPSPSTDVQTDPQTLKPSGFHEDDPFFYDEHTLRKRGLLVAAVLFITGIIILTSGKCRQLSRLCRNRCR

SEQ ID NO: 33135 - protein, 107 aa, Homo sapiens
  Payload ID: 6509
  Gene Symbol: FXYD5
  Gene Name: FXYD domain containing ion transport regulator 5
  Uniprot ID: Q96DB9
  ENSP ID: ENSP00000376051
MQTLSNIPCFCLHGSLLPSTDLATLSAHPTDDTTTLSERPSPSTDVQTDPQTLKPSGFHEDDPFFYDEHTLRKRGLLVAAVLFITGIIILTSGKCRQLSRLCRNRCR

SEQ ID NO: 33136 - protein, 96 aa, Homo sapiens
  Payload ID: 6509
  Gene Symbol: FXYD5
  Gene Name: FXYD domain containing ion transport regulator 5
  ENSP ID: ENSP00000376052
MSPSGRLCLLTIVGLILPTRGQTLKDTTSSSSADSTIMDIQVPTRAPDAVYTELQPTSPTPTWPADGAYITAYGVTHFLMNMLAVSSFFCLHTAPQ

SEQ ID NO: 33137 - protein, 178 aa, Homo sapiens; identical to SEQ ID NO: 33134
  Payload ID: 6509
  Gene Symbol: FXYD5
  Gene Name: FXYD domain containing ion transport regulator 5
  Uniprot ID: Q96DB9
  ENSP ID: ENSP00000376053

SEQ ID NO: 33138 - protein, 178 aa, Homo sapiens; identical to SEQ ID NO: 33134
  Payload ID: 6509
  Gene Symbol: FXYD5
  Gene Name: FXYD domain containing ion transport regulator 5
  Uniprot ID: Q96DB9
  ENSP ID: ENSP00000393848

SEQ ID NO: 33139 - protein, 178 aa, Homo sapiens; identical to SEQ ID NO: 33134
  Payload ID: 6509
  Gene Symbol: FXYD5
  Gene Name: FXYD domain containing ion transport regulator 5
  Uniprot ID: Q96DB9
  ENSP ID: ENSP00000443390

SEQ ID NO: 33140 - protein, 194 aa, Homo sapiens
  Payload ID: 6509
  Gene Symbol: FXYD5
  Gene Name: FXYD domain containing ion transport regulator 5
  ENSP ID: ENSP00000444839
MSPSGRLCLLTIVGLILPTRGQTLKDTTSSSSADSTIMDIQVPTRAPDAVYTELQPTSPTPTWPADETPQPQTQTQQLEGTDGPLVTDPETHKSTKAAHPTDDTTTLSERPSPSTDVQTDPQTLKPSGFHEDDPFFYDEHTLRKRGLLVAAVLFITGIIILTSENWGWVGRTPRPGGGLMTEGWVLKGPWAILF

SEQ ID NO: 33141 - protein, 123 aa, Homo sapiens
  Payload ID: 6509
  Gene Symbol: FXYD5
  Gene Name: FXYD domain containing ion transport regulator 5
  ENSP ID: ENSP00000465174
MSPSGRLCLLTIVGLILPTRGQTLKDTTSSSSADSTIMDIQVPTRAPGEERDTSIKILSLQITTATKIPNLDQTREFMDLCNEKVQMQSTQNSSPPLQPQPGLLMKHHNPRPRPSNWKERMGL

SEQ ID NO: 33142 - protein, 178 aa, Homo sapiens; identical to SEQ ID NO: 33134
  Payload ID: 6509
  Gene Symbol: FXYD5
  Gene Name: FXYD domain containing ion transport regulator 5
  Uniprot ID: Q96DB9
  ENSP ID: ENSP00000465667

SEQ ID NO: 33143 - protein, 194 aa, Homo sapiens; identical to SEQ ID NO: 33140
  Payload ID: 6509
  Gene Symbol: FXYD5
  Gene Name: FXYD domain containing ion transport regulator 5
  ENSP ID: ENSP00000467053

SEQ ID NO: 33144 - protein, 67 aa, Homo sapiens
  Payload ID: 6509
  Gene Symbol: FXYD5
  Gene Name: FXYD domain containing ion transport regulator 5
  ENSP ID: ENSP00000468168
MSPSGRLCLLTIVGLILPTRGWNRLWGRRQEQGAQEGGCWDVQAGGYRGRTRMGAVELSSTDHMDRR

SEQ ID NO: 33145 - protein, 95 aa, Homo sapiens
  Payload ID: 6510
  Gene Symbol: FXYD6
  Gene Name: FXYD domain containing ion transport regulator 6
  Uniprot ID: Q9H0Q3
  ENSP ID: ENSP00000260282
MELVLVFLCSLLAPMVLASAAEKEKEMDPFHYDYQTLRIGGLVFAVVLFSVGILLILSRRCKCSFNQKPRAPGDEEAQVENLITANATEPQKAEN

SEQ ID NO: 33146 - protein, 95 aa, Homo sapiens; identical to SEQ ID NO: 33145
  Payload ID: 6510
  Gene Symbol: FXYD6
  Gene Name: FXYD domain containing ion transport regulator 6
  Uniprot ID: Q9H0Q3
  ENSP ID: ENSP00000431427

SEQ ID NO: 33147 - protein, 95 aa, Homo sapiens; identical to SEQ ID NO: 33145
  Payload ID: 6510
  Gene Symbol: FXYD6
  Gene Name: FXYD domain containing ion transport regulator 6
  Uniprot ID: Q9H0Q3
  ENSP ID: ENSP00000431446

SEQ ID NO: 33148 - protein, 90 aa, Homo sapiens
  Payload ID: 6510
  Gene Symbol: FXYD6
  Gene Name: FXYD domain containing ion transport regulator 6
  ENSP ID: ENSP00000431913
MELVLVFLCSLLAPMVLASAAEKEKEMDPFHYDYQTLRIGGLVFAVVLFSVGILLILSRRCKCSFNQKPRAPGDEEAQVENLITANGNCP

SEQ ID NO: 33149 - protein, 95 aa, Homo sapiens; identical to SEQ ID NO: 33145
  Payload ID: 6510
  Gene Symbol: FXYD6
  Gene Name: FXYD domain containing ion transport regulator 6
  Uniprot ID: Q9H0Q3
  ENSP ID: ENSP00000433312

SEQ ID NO: 33150 - protein, 111 aa, Homo sapiens
  Payload ID: 6510
  Gene Symbol: FXYD6
  Gene Name: FXYD domain containing ion transport regulator 6
  ENSP ID: ENSP00000436629
MELVLVFLCSLLAPMVLASAEKEKEMDPFHYDYQTLRIGGLVFAVVLFSVGILLILSRRCKCSFNQKPRAPGDEEAQQQSPRKQRTEVQPSGGSLWNLRRLLEPLDANVDA

SEQ ID NO: 33151 - protein, 95 aa, Homo sapiens; identical to SEQ ID NO: 33145
  Payload ID: 6510
  Gene Symbol: FXYD6
  Gene Name: FXYD domain containing ion transport regulator 6
  Uniprot ID: Q9H0Q3
  ENSP ID: ENSP00000442756

SEQ ID NO: 33152 - protein, 95 aa, Homo sapiens; identical to SEQ ID NO: 33145
  Payload ID: 6510
  Gene Symbol: FXYD6
  Gene Name: FXYD domain containing ion transport regulator 6
  Uniprot ID: Q9H0Q3
  ENSP ID: ENSP00000463158

SEQ ID NO: 33153 - protein, 90 aa, Homo sapiens
  Payload ID: 6510
  Gene Symbol: FXYD6
  Gene Name: FXYD domain containing ion transport regulator 6
  ENSP ID: ENSP00000463160
MELVLVFLCSLLAPMVLASAAEKEKEMDPFHYDYQTLRIGGLVFAVVLFSVGILLILSRRCKCSFNQKPRNRAPESRELKCSHQVEASGT

SEQ ID NO: 33154 - protein, 90 aa, Homo sapiens; identical to SEQ ID NO: 33148
  Payload ID: 6510
  Gene Symbol: FXYD6
  Gene Name: FXYD domain containing ion transport regulator 6
  ENSP ID: ENSP00000464144

SEQ ID NO: 33155 - protein, 80 aa, Homo sapiens
  Payload ID: 6511
  Gene Symbol: FXYD7
  Gene Name: FXYD domain containing ion transport regulator 7
  Uniprot ID: P58549
  ENSP ID: ENSP00000270310
MATPTQTPTKAPEEPDPFYYDYNTVQTVGMTLATILFLLGILIVISKKVKCRKADSRSESPTCKSCKSELPSSAPGGGGV

SEQ ID NO: 33156 - protein, 117 aa, Homo sapiens
  Payload ID: 6511
  Gene Symbol: FXYD7
  Gene Name: FXYD domain containing ion transport regulator 7
  ENSP ID: ENSP00000465784
MATPTQTPTKAPEEPDPFYYDYNTVQTVGMTLATILFLLGILIVISKCDPFLGCLSLRFLCWLSSISYPLCPVFLFCLSLPTGKKVKCRKADSRSESPTCKSCKSELPSSAPGGGGV

SEQ ID NO: 33157 - protein, 77 aa, Homo sapiens
  Payload ID: 6511
  Gene Symbol: FXYD7
  Gene Name: FXYD domain containing ion transport regulator 7
  ENSP ID: ENSP00000466915
MATPTQTPTKAPEEPDPFYYDYNTVQTVGMTLATILFLLGILIVISKKVKCRKADSSPTCKSCKSELPSSAPGGGGV

SEQ ID NO: 33158 - protein, 112 aa, Homo sapiens
  Payload ID: 6512
  Gene Symbol: FXYD6-FXYD2
  Gene Name: FXYD6-FXYD2 readthrough
  ENSP ID: ENSP00000463024
MELVLVFLCSLLAPMVLASAAEKEKEMDPFHYDYQTLRIGGLVFAVVLFSVGILLILRPQEMRKPRWRTSSPPMQQSPRKQRTEVQPSGGRRQPQGGRGPVLLWQKIPLWGQ

SEQ ID NO: 33159 - protein, 144 aa, Homo sapiens
  Payload ID: 6512
  Gene Symbol: FXYD6-FXYD2
  Gene Name: FXYD6-FXYD2 readthrough
  ENSP ID: ENSP00000482442
MELVLVFLCSLLAPMVLASAAEKEKEMDPFHYDYQTLRIGGLVFAVVLFSVGILLILSRRCKCSFNQKPRNRAPESRELKCSHQVEGGSPKGDVDPFYYDYETVRNGGLIFAGLAFIVGLLILLSRRFRCGGNKKRRQINEDEP

SEQ ID NO: 33160 - protein, 783 aa, Homo sapiens
  Payload ID: 6513
  Gene Symbol: FYB
  Gene Name: FYN binding protein
  Uniprot ID: O15117
  ENSP ID: ENSP00000316460
MAKYNTGGNPTEDVSVNSRPFRVTGPNSSSGIQARKNLFNNQGNASPPAGPSNVPKFGSPKPPVAVKPSSEEKPDKEPKPPFLKPTGAGQRFGTPASLTTRDPEAKVGFLKPVGPKPINLPKEDSKPTFPWPPGNKPSLHSVNQDHDLKPLGPKSGPTPPTSENEQKQAFPKLTGVKGKFMSASQDLEPKPLFPKPAFGQKPPLSTENSHEDESPMKNVSSSKGSPAPLGVRSKSGPLKPAREDSENKDHAGEISSLPFPGVVLKPAASRGGPGLSKNGEEKKEDRKIDAAKNTFQSKINQEELASGTPPARFPKAPSKLTVGGPWGQSQEKEKGDKNSATPKQKPLPPLFTLGPPPPKPNRPPNVDLTKFHKTSSGNSTSKGQTSYSTTSLPPPPPSHPASQPPLPASHPSQPPVPSLPPRNIKPPFDLKSPVNEDNQDGVTHSDGAGNLDEEQDSEGETYEDIEASKEREKKREKEEKKRLELEKKEQKEKEKKEQEIKKKFKLTGPIQVIHLAKACCDVKGGKNELSFKQGEQIEIIRITDNPEGKWLGRTARGSYGYIKTTAVEIDYDSLKLKKDSLGAPSRPIEDDQEVYDDVAEQDDISSHSQSGSGGIFPPPPDDDIYDGIEEEDADDGFPAPPKQLDMGDEVYDDVDTSDFPVSSAEMSQGTNVGKAKTEEKDLKKLKKQEKEEKDFRKKFKYDGEIRVLYSTKVTTSITSKKWGTRDLQVKPGESLEVIQTTDDTKVLCRNEEGKYGYVLRSYLADNDGEIYDDIADGCIYDND

SEQ ID NO: 33161 - protein, 1 aa, Homo sapiens
  Payload ID: 6513
  Gene Symbol: FYB
  Gene Name: FYN binding protein
  ENSP ID: ENSP00000420989
M

SEQ ID NO: 33162 - protein, 62 aa, Homo sapiens
  Payload ID: 6513
  Gene Symbol: FYB
  Gene Name: FYN binding protein
  ENSP ID: ENSP00000421988
MAKYNTGGNPTEDVSVNSRPFRVTGPNSSSGIQARKNLFNNQGNASPPAGPSNVPKFGSPKP

SEQ ID NO: 33163 - protein, 22 aa, Homo sapiens
  Payload ID: 6513
  Gene Symbol: FYB
  Gene Name: FYN binding protein
  ENSP ID: ENSP00000423888
MAKYNTGGNPTEDVSVNSRPFR

SEQ ID NO: 33164 - protein, 114 aa, Homo sapiens
  Payload ID: 6513
  Gene Symbol: FYB
  Gene Name: FYN binding protein
  ENSP ID: ENSP00000424919
MAKYNTGGNPTEDVSVNSRPFRVTGPNSSSGIQARKNLFNNQGNASPPAGPSNVPKFGSPKPPVAVKPSSEEKPDKEPKPPFLKPTGAGQRFGTPASLTTRDPEAKVGFLKPVG

SEQ ID NO: 33165 - protein, 839 aa, Homo sapiens
  Payload ID: 6513
  Gene Symbol: FYB
  Gene Name: FYN binding protein
  Uniprot ID: O15117
  ENSP ID: ENSP00000425845
MDGKADVKSLMAKYNTGGNPTEDVSVNSRPFRVTGPNSSSGIQARKNLFNNQGNASPPAGPSNVPKFGSPKPPVAVKPSSEEKPDKEPKPPFLKPTGAGQRFGTPASLTTRDPEAKVGFLKPVGPKPINLPKEDSKPTFPWPPGNKPSLHSVNQDHDLKPLGPKSGPTPPTSENEQKQAFPKLTGVKGKFMSASQDLEPKPLFPKPAFGQKPPLSTENSHEDESPMKNVSSSKGSPAPLGVRSKSGPLKPAREDSENKDHAGEISSLPFPGVVLKPAASRGGPGLSKNGEEKKEDRKIDAAKNTFQSKINQEELASGTPPARFPKAPSKLTVGGPWGQSQEKEKGDKNSATPKQKPLPPLFTLGPPPPKPNRPPNVDLTKFHKTSSGNSTSKGQTSYSTTSLPPPPPSHPASQPPLPASHPSQPPVPSLPPRNIKPPFDLKSPVNEDNQDGVTHSDGAGNLDEEQDSEGETYEDIEASKEREKKREKEEKKRLELEKKEQKEKEKKEQEIKKKFKLTGPIQVIHLAKACCDVKGGKNELSFKQGEQIEIIRITDNPEGKWLGRTARGSYGYIKTTAVEIDYDSLKLKKDSLGAPSRPIEDDQEVYDDVAEQDDISSHSQSGSGGIFPPPPDDDIYDGIEEEDADDGSTLQVQEKSNTWSWGILKMLKGKDDRKKSIREKPKVSDSDNNEGSSFPAPPKQLDMGDEVYDDVDTSDFPVSSAEMSQGTNVGKAKTEEKDLKKLKKQEKEEKDFRKKFKYDGEIRVLYSTKVTTSITSKKWGTRDLQVKPGESLEVIQTTDDTKVLCRNEEGKYGYVLRSYLADNDGEIYDDIADGCIYDND

SEQ ID NO: 33166 - protein, 783 aa, Homo sapiens; identical to SEQ ID NO: 33160
  Payload ID: 6513
  Gene Symbol: FYB
  Gene Name: FYN binding protein
  Uniprot ID: O15117
  ENSP ID: ENSP00000426346

SEQ ID NO: 33167 - protein, 174 aa, Homo sapiens
  Payload ID: 6513
  Gene Symbol: FYB
  Gene Name: FYN binding protein
  ENSP ID: ENSP00000426597
MAKYNTGGNPTEDVSVNSRPFRVTGPNSSSGIQARKNLFNNQGNASPPAGPSNVPKFGSPKPPVAVKPSSEEKPDKEPKPPFLKPTGAGQRFGTPASLTTRDPEAKVGFLKPVGPKPINLPKEDSKPTFPWPPGNKPSLHSVNQDHDLKPLGPKSGPTPPTSENEQKQAFPKLT

SEQ ID NO: 33168 - protein, 829 aa, Homo sapiens
  Payload ID: 6513
  Gene Symbol: FYB
  Gene Name: FYN binding protein
  Uniprot ID: O15117
  ENSP ID: ENSP00000427114
MAKYNTGGNPTEDVSVNSRPFRVTGPNSSSGIQARKNLFNNQGNASPPAGPSNVPKFGSPKPPVAVKPSSEEKPDKEPKPPFLKPTGAGQRFGTPASLTTRDPEAKVGFLKPVGPKPINLPKEDSKPTFPWPPGNKPSLHSVNQDHDLKPLGPKSGPTPPTSENEQKQAFPKLTGVKGKFMSASQDLEPKPLFPKPAFGQKPPLSTENSHEDESPMKNVSSSKGSPAPLGVRSKSGPLKPAREDSENKDHAGEISSLPFPGVVLKPAASRGGPGLSKNGEEKKEDRKIDAAKNTFQSKINQEELASGTPPARFPKAPSKLTVGGPWGQSQEKEKGDKNSATPKQKPLPPLFTLGPPPPKPNRPPNVDLTKFHKTSSGNSTSKGQTSYSTTSLPPPPPSHPASQPPLPASHPSQPPVPSLPPRNIKPPFDLKSPVNEDNQDGVTHSDGAGNLDEEQDSEGETYEDIEASKEREKKREKEEKKRLELEKKEQKEKEKKEQEIKKKFKLTGPIQVIHLAKACCDVKGGKNELSFKQGEQIEIIRITDNPEGKWLGRTARGSYGYIKTTAVEIDYDSLKLKKDSLGAPSRPIEDDQEVYDDVAEQDDISSHSQSGSGGIFPPPPDDDIYDGIEEEDADDGSTLQVQEKSNTWSWGILKMLKGKDDRKKSIREKPKVSDSDNNEGSSFPAPPKQLDMGDEVYDDVDTSDFPVSSAEMSQGTNVGKAKTEEKDLKKLKKQEKEEKDFRKKFKYDGEIRVLYSTKVTTSITSKKWGTRDLQVKPGESLEVIQTTDDTKVLCRNEEGKYGYVLRSYLADNDGEIYDDIADGCIYDND

SEQ ID NO: 33169 - protein, 482 aa, Homo sapiens
  Payload ID: 6514
  Gene Symbol: FYN
  Gene Name: FYN proto-oncogene, Src family tyrosine kinase
  Uniprot ID: P06241
  ENSP ID: ENSP00000229471
MGCVQCKDKEATKLTEERDGSLNQSSGYRYGTDPTPQHYPSFGVTSIPNYNNFHAAGGQGLTVFGGVNSSSHTGTLRTRGGTGVTLFVALYDYEARTEDDLSFHKGEKFQILNSSEGDWWEARSLTTGETGYIPSNYVAPVDSIQAEEWYFGKLGRKDAERQLLSFGNPRGTFLIRESETTKGAYSLSIRDWDDMKGDHVKHYKIRKLDNGGYYITTRAQFETLQQLVQHYSGTWNGNTKVAIKTLKPGTMSPESFLEEAQIMKKLKHDKLVQLYAVVSEEPIYIVTEYMNKGSLLDFLKDGEGRALKLPNLVDMAAQVAAGMAYIERMNYIHRDLRSANILVGNGLICKIADFGLARLIEDNEYTARQGAKFPIKWTAPEAALYGRFTIKSDVWSFGILLTELVTKGRVPYPGMNNREVLEQVERGYRMPCPQDCPISLHELMIHCWKKDPEERPTFEYLQSFLEDYFTATEPQYQPGENL

SEQ ID NO: 33170 - protein, 537 aa, Homo sapiens
  Payload ID: 6514
  Gene Symbol: FYN
  Gene Name: FYN proto-oncogene, Src family tyrosine kinase
  Uniprot ID: P06241
  ENSP ID: ENSP00000346671
MGCVQCKDKEATKLTEERDGSLNQSSGYRYGTDPTPQHYPSFGVTSIPNYNNFHAAGGQGLTVFGGVNSSSHTGTLRTRGGTGVTLFVALYDYEARTEDDLSFHKGEKFQILNSSEGDWWEARSLTTGETGYIPSNYVAPVDSIQAEEWYFGKLGRKDAERQLLSFGNPRGTFLIRESETTKGAYSLSIRDWDDMKGDHVKHYKIRKLDNGGYYITTRAQFETLQQLVQHYSERAAGLCCRLVVPCHKGMPRLTDLSVKTKDVWEIPRESLQLIKRLGNGQFGEVWMGTWNGNTKVAIKTLKPGTMSPESFLEEAQIMKKLKHDKLVQLYAVVSEEPIYIVTEYMNKGSLLDFLKDGEGRALKLPNLVDMAAQVAAGMAYIERMNYIHRDLRSANILVGNGLICKIADFGLARLIEDNEYTARQGAKFPIKWTAPEAALYGRFTIKSDVWSFGILLTELVTKGRVPYPGMNNREVLEQVERGYRMPCPQDCPISLHELMIHCWKKDPEERPTFEYLQSFLEDYFTATEPQYQPGENL

SEQ ID NO: 33171 - protein, 537 aa, Homo sapiens; identical to SEQ ID NO: 33170
  Payload ID: 6514
  Gene Symbol: FYN
  Gene Name: FYN proto-oncogene, Src family tyrosine kinase
  Uniprot ID: P06241
  ENSP ID: ENSP00000357656

SEQ ID NO: 33172 - protein, 534 aa, Homo sapiens
  Payload ID: 6514
  Gene Symbol: FYN
  Gene Name: FYN proto-oncogene, Src family tyrosine kinase
  Uniprot ID: P06241
  ENSP ID: ENSP00000357667
MGCVQCKDKEATKLTEERDGSLNQSSGYRYGTDPTPQHYPSFGVTSIPNYNNFHAAGGQGLTVFGGVNSSSHTGTLRTRGGTGVTLFVALYDYEARTEDDLSFHKGEKFQILNSSEGDWWEARSLTTGETGYIPSNYVAPVDSIQAEEWYFGKLGRKDAERQLLSFGNPRGTFLIRESETTKGAYSLSIRDWDDMKGDHVKHYKIRKLDNGGYYITTRAQFETLQQLVQHYSEKADGLCFNLTVIASSCTPQTSGLAKDAWEVARRSLCLEKKLGQGCFAEVWLGTWNGNTKVAIKTLKPGTMSPESFLEEAQIMKKLKHDKLVQLYAVVSEEPIYIVTEYMNKGSLLDFLKDGEGRALKLPNLVDMAAQVAAGMAYIERMNYIHRDLRSANILVGNGLICKIADFGLARLIEDNEYTARQGAKFPIKWTAPEAALYGRFTIKSDVWSFGILLTELVTKGRVPYPGMNNREVLEQVERGYRMPCPQDCPISLHELMIHCWKKDPEERPTFEYLQSFLEDYFTATEPQYQPGENL

SEQ ID NO: 33173 - protein, 534 aa, Homo sapiens; identical to SEQ ID NO: 33172
  Payload ID: 6514
  Gene Symbol: FYN
  Gene Name: FYN proto-oncogene, Src family tyrosine kinase
  Uniprot ID: P06241
  ENSP ID: ENSP00000357671

SEQ ID NO: 33174 - protein, 232 aa, Homo sapiens
  Payload ID: 6514
  Gene Symbol: FYN
  Gene Name: FYN proto-oncogene, Src family tyrosine kinase
  ENSP ID: ENSP00000427993
MGCVQCKDKEATKLTEERDGSLNQSSGYRYGTDPTPQHYPSFGVTSIPNYNNFHAAGGQGLTVFGGVNSSSHTGTLRTRGGTGVTLFVALYDYEARTEDDLSFHKGEKFQILNSSEGDWWEARSLTTGETGYIPSNYVAPVDSIQAEEWYFGKLGRKDAERQLLSFGNPRGTFLIRESETTKGAYSLSIRDWDDMKGDHVKHYKIRKLDNGGYYITTRAQFETLQQLVQHYS

SEQ ID NO: 33175 - protein, 103 aa, Homo sapiens
  Payload ID: 6514
  Gene Symbol: FYN
  Gene Name: FYN proto-oncogene, Src family tyrosine kinase
  ENSP ID: ENSP00000428042
MGCVQCKDKEATKLTEERDGSLNQSSGYRYGTDPTPQHYPSFGVTSIPNYNNFHAAGGQGLTVFGGVNSSSHTGTLRTRGGTGVTLFVALYDYEARTEDDLSF

SEQ ID NO: 33176 - protein, 116 aa, Homo sapiens
  Payload ID: 6514
  Gene Symbol: FYN
  Gene Name: FYN proto-oncogene, Src family tyrosine kinase
  ENSP ID: ENSP00000428045
MGCVQCKDKEATKLTEERDGSLNQSSGYRYGTDPTPQHYPSFGVTSIPNYNNFHAAGGQGLTVFGGVNSSSHTGTLRTRGGTGVTLFVALYDYEARTEDDLSFHKGEKFQILNSSE

SEQ ID NO: 33177 - protein, 145 aa, Homo sapiens
  Payload ID: 6514
  Gene Symbol: FYN
  Gene Name: FYN proto-oncogene, Src family tyrosine kinase
  ENSP ID: ENSP00000428493
MGCVQCKDKEATKLTEERDGSLNQSSGYRYGTDPTPQHYPSFGVTSIPNYNNFHAAGGQGLTVFGGVNSSSHTGTLRTRGGTGVTLFVALYDYEARTEDDLSFHKGEKFQILNSSEGDWWEARSLTTGETGYIPSNYVAPVDSIQ

SEQ ID NO: 33178 - protein, 153 aa, Homo sapiens
  Payload ID: 6514
  Gene Symbol: FYN
  Gene Name: FYN proto-oncogene, Src family tyrosine kinase
  ENSP ID: ENSP00000428695
MGCVQCKDKEATKLTEERDGSLNQSSGYRYGTDPTPQHYPSFGVTSIPNYNNFHAAGGQGLTVFGGVNSSSHTGTLRTRGGTGVTLFVALYDYEARTEDDLSFHKGEKFQILNSSEGDWWEARSLTTGETGYIPSNYVAPVDSIQAEEWYFGK

SEQ ID NO: 33179 - protein, 106 aa, Homo sapiens
  Payload ID: 6514
  Gene Symbol: FYN
  Gene Name: FYN proto-oncogene, Src family tyrosine kinase
  ENSP ID: ENSP00000428983
MGCVQCKDKEATKLTEERDGSLNQSSGYRYGTDPTPQHYPSFGVTSIPNYNNFHAAGGQGLTVFGGVNSSSHTGTLRTRGGTGVTLFVALYDYEARTEDDLSFHKG

SEQ ID NO: 33180 - protein, 186 aa, Homo sapiens
  Payload ID: 6514
  Gene Symbol: FYN
  Gene Name: FYN proto-oncogene, Src family tyrosine kinase
  ENSP ID: ENSP00000429294
MGCVQCKDKEATKLTEERDGSLNQSSGYRYGTDPTPQHYPSFGVTSIPNYNNFHAAGGQGLTVFGGVNSSSHTGTLRTRGGTGVTLFVALYDYEARTEDDLSFHKGEKFQILNSSEGDWWEARSLTTGETGYIPSNYVAPVDSIQAEEWYFGKLGRKDAERQLLSFGNPRGTFLIRESETTKGAYS

SEQ ID NO: 33181 - protein, 70 aa, Homo sapiens
  Payload ID: 6514
  Gene Symbol: FYN
  Gene Name: FYN proto-oncogene, Src family tyrosine kinase
  ENSP ID: ENSP00000429590
MGCVQCKDKEATKLTEERDGSLNQSSGYRYGTDPTPQHYPSFGVTSIPNYNNFHAAGGQGLTVFGGVTLF

SEQ ID NO: 33182 - protein, 118 aa, Homo sapiens
  Payload ID: 6514
  Gene Symbol: FYN
  Gene Name: FYN proto-oncogene, Src family tyrosine kinase
  ENSP ID: ENSP00000429813
MGCVQCKDKEATKLTEERDGSLNQSSGYRYGTDPTPQHYPSFGVTSIPNYNNFHAAGGQGLTVFGGVNSSSHTGTLRTRGGTGVTLFVALYDYEARTEDDLSFHKGEKFQILNSSEGD

SEQ ID NO: 33183 - protein, 175 aa, Homo sapiens
  Payload ID: 6514
  Gene Symbol: FYN
  Gene Name: FYN proto-oncogene, Src family tyrosine kinase
  ENSP ID: ENSP00000429866
MGCVQCKDKEATKLTEERDGSLNQSSGYRYGTDPTPQHYPSFGVTSIPNYNNFHAAGGQGLTVFGGVNSSSHTGTLRTRGGTGVTLFVALYDYEARTEDDLSFHKGEKFQILNSSEGDWWEARSLTTGETGYIPSNYVAPVDSIQAEEWYFGKLGRKDAERQLLSFGNPRGTFLI

SEQ ID NO: 33184 - protein, 139 aa, Homo sapiens
  Payload ID: 6514
  Gene Symbol: FYN
  Gene Name: FYN proto-oncogene, Src family tyrosine kinase
  ENSP ID: ENSP00000429992
MGCVQCKDKEATKLTEERDGSLNQSSGYRYGTDPTPQHYPSFGVTSIPNYNNFHAAGGQGLTVFGGVNSSSHTGTLRTRGGTGVTLFVALYDYEARTEDDLSFHKGEKFQILNSSEGDWWEARSLTTGETGYIPSNYVA

SEQ ID NO: 33185 - protein, 152 aa, Homo sapiens
  Payload ID: 6514
  Gene Symbol: FYN
  Gene Name: FYN proto-oncogene, Src family tyrosine kinase
  ENSP ID: ENSP00000430364
MGCVQCKDKEATKLTEERDGSLNQSSGYRYGTDPTPQHYPSFGVTSIPNYNNFHAAGGQGLTVFGGVNSSSHTGTLRTRGGTGVTLFVALYDYEARTEDDLSFHKGEKFQILNSSEGDWWEARSLTTGETGYIPSNYVAPVDSIQAEEWYFG

SEQ ID NO: 33186 - protein, 64 aa, Homo sapiens
  Payload ID: 6514
  Gene Symbol: FYN
  Gene Name: FYN proto-oncogene, Src family tyrosine kinase
  ENSP ID: ENSP00000430455
MGCVQCKDKEATKLTEERDGSLNQSSGYRYGTDPTPQHYPSFGVTSIPNYNNFHAAGGQGLTVF

SEQ ID NO: 33187 - protein, 534 aa, Homo sapiens; identical to SEQ ID NO: 33172
  Payload ID: 6514
  Gene Symbol: FYN
  Gene Name: FYN proto-oncogene, Src family tyrosine kinase
  Uniprot ID: P06241
  ENSP ID: ENSP00000440646

SEQ ID NO: 33188 - protein, 505 aa, Homo sapiens
  Payload ID: 6515
  Gene Symbol: FRK
  Gene Name: fyn-related Src family tyrosine kinase
  Uniprot ID: P42685
  ENSP ID: ENSP00000476145
MSNICQRLWEYLEPYLPCLSTEADKSTVIENPGALCSPQSQRHGHYFVALFDYQARTAEDLSFRAGDKLQVLDTLHEGWWFARHLEKRRDGSSQQLQGYIPSNYVAEDRSLQAEPWFFGAIGRSDAEKQLLYSENKTGSFLIRESESQKGEFSLSVLDGAVVKHYRIKRLDEGGFFLTRRRIFSTLNEFVSHYTKTSDGLCVKLGKPCLKIQVPAPFDLSYKTVDQWEIDRNSIQLLKRLGSGQFGEVWEGLWNNTTPVAVKTLKPGSMDPNDFLREAQIMKNLRHPKLIQLYAVCTLEDPIYIITELMRHGSLQEYLQNDTGSKIHLTQQVDMAAQVASGMAYLESRNYIHRDLAARNVLVGEHNIYKVADFGLARVFKVDNEDIYESRHEIKLPVKWTAPEAIRSNKFSIKSDVWSFGILLYEIITYGKMPYSGMTGAQVIQMLAQNYRLPQPSNCPQQFYNIMLECWNAEPKERPTFETLRWKLEDYFETDSSYSDANNFIR

SEQ ID NO: 33189 - protein, 1478 aa, Homo sapiens
  Payload ID: 6516
  Gene Symbol: FYCO1
  Gene Name: FYVE and coiled-coil domain containing 1
  Uniprot ID: Q9BQS8
  ENSP ID: ENSP00000296137
MASTNAESQLQRIIRDLQDAVTELSKEFQEAGEPITDDSTSLHKFSYKLEYLLQFDQKEKATLLGNKKDYWDYFCACLAKVKGANDGIRFVKSISELRTSLGKGRAFIRYSLVHQRLADTLQQCFMNTKVTSDWYYARSPFLQPKLSSDIVGQLYELTEVQFDLASRGFDLDAAWPTFARRTLTTGSSAYLWKPPSRSSSMSSLVSSYLQTQEMVSNFDLNSPLNNEALEGFDEMRLELDQLEVREKQLRERMQQLDRENQELRAAVSQQGEQLQTERERGRTAAEDNVRLTCLVAELQKQWEVTQATQNTVKELQTCLQGLELGAAEKEEDYHTALRRLESMLQPLAQELEATRDSLDKKNQHLASFPGWLAMAQQKADTASDTKGRQEPIPSDAAQEMQELGEKLQALERERTKVEEVNRQQSAQLEQLVKELQLKEDARASLERLVKEMAPLQEELSGKGQEADQLWRRLQELLAHTSSWEEELAELRREKKQQQEEKELLEQEVRSLTRQLQFLETQLAQVSQHVSDLEEQKKQLIQDKDHLSQQVGMLERLAGPPGPELPVAGEKNEALVPVNSSLQEAWGKPEEEQRGLQEAQLDDTKVQEGSQEEELRQANRELEKELQNVVGRNQLLEGKLQALQADYQALQQRESAIQGSLASLEAEQASIRHLGDQMEASLLAVRKAKEAMKAQMAEKEAILQSKEGECQQLREEVEQCQQLAEARHRELRALESQCQQQTQLIEVLTAEKGQQGVGPPTDNEARELAAQLALSQAQLEVHQGEVQRLQAQVVDLQAKMRAALDDQDKVQSQLSMAEAVLREHKTLVQQLKEQNEALNRAHVQELLQCSEREGALQEERADEAQQREEELRALQEELSQAKCSSEEAQLEHAELQEQLHRANTDTAELGIQVCALTVEKERVEEALACAVQELQDAKEAASREREGLERQVAGLQQEKESLQEKLKAAKAAAGSLPGLQAQLAQAEQRAQSLQEAAHQELNTLKFQLSAEIMDYQSRLKNAGEECKSLRGQLEEQGRQLQAAEEAVEKLKATQADMGEKLSCTSNHLAECQAAMLRKDKEGAALREDLERTQKELEKATTKIQEYYNKLCQEVTNRERNDQKMLADLDDLNRTKKYLEERLIELLRDKDALWQKSDALEFQQKLSAEERWLGDTEANHCLDCKREFSWMVRRHHCRICGRIFCYYCCNNYVLSKHGGKKERCCRACFQKLSEGPGSPDSSGSGTSQGEPSPALSPASPGPQATGGQGANTDYRPPDDAVFDIITDEELCQIQESGSSLPETPTETDSLDPNAAEQDTTSTSLTPEDTEDMPVGQDSEICLLKSGELMIKVPLTVDEIASFGEGSRELFVRSSTYSLIPITVAEAGLTISWVFSSDPKSISFSVVFQEAEDTPLDQCKVLIPTTRCNSHKENIQGQLKVRTPGIYMLIFDNTFSRFVSKKVFYHLTVDRPVIYDGSDFL

SEQ ID NO: 33190 - protein, 267 aa, Homo sapiens
  Payload ID: 6516
  Gene Symbol: FYCO1
  Gene Name: FYVE and coiled-coil domain containing 1
  ENSP ID: ENSP00000388136
  MOD_RES (1)..(1): Any amino acid
XSKHGGKKERCCRACFQKLSEGPGSPDSSGSGTSQGEPSPALSPASPGPQATGGQGANTDYRPPDDAVFDIITDEELCQIQESGSSLPETPTETDSLDPNAAEQDTTSTSLTPEDTEDMPVGQDSEICLLKSGELMIKVPLTVDEIASFGEGSRELFVRSSTYSLIPITVAEAGLTISWVFSSDPKSISFSVVFQEAEDTPLDQCKVLIPTTRCNSHKENIQGQLKVRTPGIYMLIFDNTFSRFVSKKVFYHLTVDRPVIYDGSDFL

SEQ ID NO: 33191 - protein, 149 aa, Homo sapiens
  Payload ID: 6516
  Gene Symbol: FYCO1
  Gene Name: FYVE and coiled-coil domain containing 1
  ENSP ID: ENSP00000398517
MPVGQDSEICLLKSGELMIKVPLTVDEIASFGEGSRELFVRSSTYSLIPITVAEAGLTISWVFSSDPKSISFSVVFQEAEDTPLDQCKVLIPTTRCNSHKENIQGQLKVRTPGIYMLIFDNTFSRFVSKKVFYHLTVDRPVIYDGSDFL

SEQ ID NO: 33192 - protein, 1498 aa, Homo sapiens
  Payload ID: 6516
  Gene Symbol: FYCO1
  Gene Name: FYVE and coiled-coil domain containing 1
  Uniprot ID: Q9BQS8
  ENSP ID: ENSP00000441178
MASTNAESQLQRIIRDLQDAVTELSKEFQEAGEPITDDSTSLHKFSYKLEYLLQFDQKEKATLLGNKKDYWDYFCACLAKVKGANDGIRFVKSISELRTSLGKGRAFIRYSLVHQRLADTLQQCFMNTKVTSDWYYARSPFLQPKLSSDIVGQLYELTEVQFDLASRGFDLDAAWPTFARRTLTTGSSAYLWKPPSRSSSMSSLVSSYLQTQEMVSNFDLNSPLNNEALEGFDEMRLELDQLEVREKQLRERMQQLDRENQELRAAVSQQGEQLQTERERGRTAAEDNVRLTCLVAELQKQWEVTQATQNTVKELQTCLQGLELGAAEKEEDYHTALRRLESMLQPLAQELEATRDSLDKKNQHLASFPGWLAMAQQKADTASDTKGRQEPIPSDAAQEMQELGEKLQALERERTKVEEVNRQQSAQLEQLVKELQLKEDARASLERLVKEMAPLQEELSGKGQEADQLWRRLQELLAHTSSWEEELAELRREKKQQQEEKELLEQEVRSLTRQLQFLETQLAQVSQHVSDLEEQKKQLIQDKDHLSQQVGMLERLAGPPGPELPVAGEKNEALVPVNSSLQEAWGKPEEEQRGLQEAQLDDTKVQEGSQEEELRQANRELEKELQNVVGRNQLLEGKLQALQADYQALQQRESAIQGSLASLEAEQASIRHLGDQMEASLLAVRKAKEAMKAQMAEKEAILQSKEGECQQLREEVEQCQQLAEARHRELRALESQCQQQTQLIEVLTAEKGQQGVGPPTDNEARELAAQLALSQAQLEVHQGEVQRLQAQVVDLQAKMRAALDDQDKVQSQLSMAEAVLREHKTLVQQLKEQNEALNRAHVQELLQCSEREGALQEERADEAQQREEELRALQEELSQAKCSSEEAQLEHAELQEQLHRANTDTAELGIQVCALTVEKERVEEALACAVQELQDAKEAASREREGLERQVAGLQQEKESLQEKLKAAKAAAGSLPGLQAQLAQAEQRAQSLQEAAHQELNTLKFQLSAEIMDYQSRLKNAGEECKSLRGQLEEQGRQLQAAEEAVEKLKATQADMGEKLSCTSNHLAECQAAMLRKDKEGAALREDLERTQKELEKATTKIQEYYNKLCQEVTNRERNDQKMLADLDDLNRTKKYLEERLIELLRDKDALWQKSDALEFQQKLSAEERWLGDTEANHCLDCKREFSWMVRRHHCRICGRIFCYYCCNNYVLSKHGGKKERCCRACFQKLSEGPGSPDSSGSGTSQGEPSPALSPASPGPQATGGQGANTDYRPPDDAVFDIITDEELCQIQESGSSLPETPTETDSLDPNAAEQASVGASKGLGNLLCESSACRDTTSTSLTPEDTEDMPVGQDSEICLLKSGELMIKVPLTVDEIASFGEGSRELFVRSSTYSLIPITVAEAGLTISWVFSSDPKSISFSVVFQEAEDTPLDQCKVLIPTTRCNSHKENIQGQLKVRTPGIYMLIFDNTFSRFVSKKVFYHLTVDRPVIYDGSDFL

SEQ ID NO: 33193 - protein, 961 aa, Homo sapiens
  Payload ID: 6517
  Gene Symbol: FGD1
  Gene Name: FYVE, RhoGEF and PH domain containing 1
  Uniprot ID: P98174
  ENSP ID: ENSP00000364277
MHGHRAPGGAGPSEPEHPATNPPGAAPPACADSDPGASEPGLLARRGSGSALGGPLDPQFVGPSDTSLGAAPGHRVLPCGPSPQHHRALRFSYHLEGSQPRPGLHQGNRILVKSLSLDPGQSLEPHPEGPQRLRSDPGPPTETPSQRPSPLKRAPGPKPQVPPKPSYLQMPRMPPPLEPIPPPPSRPLPADPRVAKGLAPRAEASPSSAAVSSLIEKFEREPVIVASDRPVPGPSPGPPEPVMLPQPTSQPPVPQLPEGEASRCLFLLAPGPRDGEKVPNRDSGIDSISSPSNSEETCFVSDDGPPSHSLCPGPPALASVPVALADPHRPGSQEVDSDLEEEDDEEEEEEKDREIPVPLMERQESVELTVQQKVFHIANELLQTEKAYVSRLHLLDQVFCARLLEEARNRSSFPADVVHGIFSNICSIYCFHQQFLLPELEKRMEEWDRYPRIGDILQKLAPFLKMYGEYVKNFDRAVELVNTWTERSTQFKVIIHEVQKEEACGNLTLQHHMLEPVQRIPRYELLLKDYLLKLPHGSPDSKDAQKSLELIATAAEHSNAAIRKMERMHKLLKVYELLGGEEDIVSPTKELIKEGHILKLSAKNGTTQDRYLILFNDRLLYCVPRLRLLGQKFSVRARIDVDGMELKESSNLNLPRTFLVSGKQRSLELQARTEEEKKDWVQAINSTLLKHEQTLETFKLLNSTNREDEDTPPNSPNVDLGKRAPTPIREKEVTMCMRCQEPFNSITKRRHHCKACGHVVCGKCSEFRARLVYDNNRSNRVCTDCYVALHGVPGSSPACSQHTPQRRRSILEKQASVAAENSVICSFLHYMEKGGKGWHKAWFVVPENEPLVLYIYGAPQDVKAQRSLPLIGFEVGPPEAGERPDRRHVFKITQSHLSWYFSPETEELQRRWMAVLGRAGRGDTFCPGPTLSEDREMEEAPVAALGATAEPPESPQTRDKT

SEQ ID NO: 33194 - protein, 655 aa, Homo sapiens
  Payload ID: 6518
  Gene Symbol: FGD2
  Gene Name: FYVE, RhoGEF and PH domain containing 2
  Uniprot ID: Q7Z6J4
  ENSP ID: ENSP00000274963
MKGASEEKLASVSNLVTVFENSRTPEAAPRGQRLEDVHHRPECRPPESPGPREKTNVGEAVGSEPRTVSRRYLNSLKNKLSSEAWRKSCQPVTLSGSGTQEPEKKIVQELLETEQAYVARLHLLDQVFFQELLKTARSSKAFPEDVVRVIFSNISSIYQFHSQFFLPELQRRLDDWTANPRIGDVIQKLAPFLKMYSEYVKNFERAAELLATWTDKSPLFQEVLTRIQSSEASGSLTLQHHMLEPVQRIPRYELLLKEYIQKLPAQAPDQADAQKALDMIFSAAQHSNAAITEMERLQDLWEVYQRLGLEDDIVDPSNTLLREGPVLKISFRRNDPMERYLFLFNNMLLYCVPRVIQVGAQFQVRTRIDVAGMKVRELMDAEFPHSFLVSGKQRTLELQARSQEEMISWMQAFQAAIDQIEKRNETFKAAAQGPEGDIQEQELQSEELGLRAPQWVRDKMVTMCMRCQEPFNALTRRRHHCRACGYVVCARCSDYRAELKYDDNRPNRVCLHCYAFLTGNVLPEAKEDKRRGILEKGSSATPDQSLMCSFLQLIGDKWGKSGPRGWCVIPRDDPLVLYVYAAPQDMRAHTSIPLLGYQVTVGPQGDPRVFQLQQSGQLYTFKAETEELKGRWVKAMERAASGWSPSWPNDGDLSD

SEQ ID NO: 33195 - protein, 102 aa, Homo sapiens
  Payload ID: 6518
  Gene Symbol: FGD2
  Gene Name: FYVE, RhoGEF and PH domain containing 2
  ENSP ID: ENSP00000362635
MKGASEEKLASVSNLVTVFENSRTPEAAPRGQRLEDVHHRPECRPPESPGPREKTNVGEAVGSEPRTVSRRYLNSLKNKLSSEAWRKSCQPVTLSGSGTQDS

SEQ ID NO: 33196 - protein, 104 aa, Homo sapiens
  Payload ID: 6518
  Gene Symbol: FGD2
  Gene Name: FYVE, RhoGEF and PH domain containing 2
  ENSP ID: ENSP00000419657
MKGASEEKLASVSNLVTVFENSRTPEAAPRGQRLEDVHHRPECRPPESPGPREKTNVGEAVGSEPRTVSRRYLNSLKNKLSSEAWRKSCQPVTLSGSGTQVPEG

SEQ ID NO: 33197 - protein, 725 aa, Homo sapiens
  Payload ID: 6519
  Gene Symbol: FGD3
  Gene Name: FYVE, RhoGEF and PH domain containing 3
  Uniprot ID: Q5JSP0
  ENSP ID: ENSP00000336914
MESGRGSSTPPGPIAALGMPDTGPGSSSLGKLQALPVGPRAHCGDPVSLAAAGDGSPDIGPTGELSGSLKIPNRDSGIDSPSSSVAGENFPCEEGLEAGPSPTVLGAHAEMALDSQVPKVTPQEEADSDVGEEPDSENTPQKADKDAGLAQHSGPQKLLHIAQELLHTEETYVKRLHLLDQVFCTRLTDAGIPPEVIMGIFSNISSIHRFHGQFLLPELKTRITEEWDTNPRLGDILQKLAPFLKMYGEYVKNFDRAVGLVSTWTQRSPLFKDVVHSIQKQEVCGNLTLQHHMLEPVQRVPRYELLLKDYLKRLPQDAPDRKDAERSLELISTAANHSNAAIRKVEKMHKLLEVYEQLGGEEDIVNPANELIKEGQIQKLSAKNGTPQDRHLFLFNSMILYCVPKLRLMGQKFSVREKMDISGLQVQDIVKPNTAHTFIITGRKRSLELQTRTEEEKKEWIQIIQATIEKHKQNSETFKAFGGAFSQDEDPSLSPDMPITSTSPVEPVVTTEGSSGAAGLEPRKLSSKTRRDKEKQSCKSCGETFNSITKRRHHCKLCGAVICGKCSEFKAENSRQSRVCRDCFLTQPVAPESTEKTPTADPQPSLLCGPLRLSESGETWSEVWAAIPMSDPQVLHLQGGSQDGRLPRTIPLPSCKLSVPDPEERLDSGHVWKLQWAKQSWYLSASSAELQQQWLETLSTAAHGDTAQDSPGALQLQVPMGAAAP

SEQ ID NO: 33198 - protein, 725 aa, Homo sapiens; identical to SEQ ID NO: 33197
  Payload ID: 6519
  Gene Symbol: FGD3
  Gene Name: FYVE, RhoGEF and PH domain containing 3
  Uniprot ID: Q5JSP0
  ENSP ID: ENSP00000364631

SEQ ID NO: 33199 - protein, 724 aa, Homo sapiens
  Payload ID: 6519
  Gene Symbol: FGD3
  Gene Name: FYVE, RhoGEF and PH domain containing 3
  Uniprot ID: Q5JSP0
  ENSP ID: ENSP00000413833
MESGRGSSTPPGPIAALGMPDTGPGSSSLGKLQALPVGPRAHCGDPVSLAAAGDGSPDIGPTGELSGSLKIPNRDSGIDSPSSSVAGENFPCEEGLEAGPSPTVLGAHAEMALDSQVPKVTPQEEADSDVGEEPDSENTPQKADKDAGLAQHSGPQKLLHIAQELLHTEETYVKRLHLLDQVFCTRLTDAGIPPEVIMGIFSNISSIHRFHGQFLLPELKTRITEEWDTNPRLGDILQKLAPFLKMYGEYVKNFDRAVGLVSTWTQRSPLFKDVVHSIQKQEVCGNLTLQHHMLEPVQRVPRYELLLKDYLKRLPQDAPDRKDAERSLELISTAANHSNAAIRKVEKMHKLLEVYEQLGGEEDIVNPANELIKEGQIQKLSAKNGTPQDRHLFLFNSMILYCVPKLRLMGQKFSVREKMDISGLQVQDIVKPNTAHTFIITGRKRSLELQTRTEEEKKEWIQIIQATIEKHKQNSETFKAFGGAFSQDEDPSLSPDMPITSTSPVEPVVTTEGSSGAAGLEPRKLSSKTRRDKEKQSCKSCGETFNSITKRRHHCKLCGAVICGKCSEFKAENSRQSRVCRDCFLTQPVAPESTETPTADPQPSLLCGPLRLSESGETWSEVWAAIPMSDPQVLHLQGGSQDGRLPRTIPLPSCKLSVPDPEERLDSGHVWKLQWAKQSWYLSASSAELQQQWLETLSTAAHGDTAQDSPGALQLQVPMGAAAP

SEQ ID NO: 33200 - protein, 634 aa, Homo sapiens
  Payload ID: 6519
  Gene Symbol: FGD3
  Gene Name: FYVE, RhoGEF and PH domain containing 3
  Uniprot ID: Q5JSP0
  ENSP ID: ENSP00000432310
MESGRGSSTPPGPIAALGMPDTGPGSSSLGKLQALPVGPRAHCGDPVSLAAAGDGSPDIGPTGELSGSLKIPNRDSGIDSPSSSVAGENFPCEEGLEAGPSPTVLGAHAEMALDSQVPKVTPQEEADSDVGEEPDSENTPQKADKDAGLAQHSGPQKLLHIAQELLHTEETYVKRLHLLDQVFCTRLTDAGIPPEVIMGIFSNISSIHRFHGQFLLPELKTRITEEWDTNPRLGDILQKLAPFLKMYGEYVKNFDRAVGLVSTWTQRSPLFKDVVHSIQKQEVCGNLTLQHHMLEPVQRVPRYELLLKDYLKRLPQDAPDRKDAERSLELISTAANHSNAAIRKVEKMHKLLEVYEQLGGEEDIVNPANELIKEGQIQKLSAKNGTPQDRHLFLFNSMILYCVPKLRLMGQKFSVREKMDISGLQVQDIVKPNTAHTFIITGRKRSLELQTRTEEEKKEWIQIIQATIEKHKQNSETFKAFGGAFSQDEDPSLSPDMPITSTSPVEPVVTTEGSSGAAGLEPRKLSSKTRRDKEKQSCKSCGETFNSITKRRHHCKLCGAVICGKCSEFKAENSRQSRVCRDCFLTQPVAPESTEVGAPSSCSPPGGAAEPPDTCSCAPAAPAASAFGVSLGPG

SEQ ID NO: 33201 - protein, 235 aa, Homo sapiens
  Payload ID: 6520
  Gene Symbol: FGD4
  Gene Name: FYVE, RhoGEF and PH domain containing 4
  ENSP ID: ENSP00000379089
MEEIKPASASCVSKEKPSKVSDLISRFEGGSSLSNYSDLKKESAVNLNAPRTPGRHGLTTTPQQKLLSQHLPQRQGNDTDKTQGAQTCVANGVMAAQNQMECEEEKAATLSSDTSIQASEPLLDTHIVNGERDETATAPASPTTDSCDGNASDSSYRTPGIGPVLPLEERGAETETKVQERENGESPLELEQLDQHHEMKETNEQKLHKIANELLLTERAYVNRLDLLDQKIEWR

SEQ ID NO: 33202 - protein, 766 aa, Homo sapiens
  Payload ID: 6520
  Gene Symbol: FGD4
  Gene Name: FYVE, RhoGEF and PH domain containing 4
  Uniprot ID: Q96M96
  ENSP ID: ENSP00000394487
MEEIKPASASCVSKEKPSKVSDLISRFEGGSSLSNYSDLKKESAVNLNAPRTPGRHGLTTTPQQKLLSQHLPQRQGNDTDKTQGAQTCVANGVMAAQNQMECEEEKAATLSSDTSIQASEPLLDTHIVNGERDETATAPASPTTDSCDGNASDSSYRTPGIGPVLPLEERGAETETKVQERENGESPLELEQLDQHHEMKETNEQKLHKIANELLLTERAYVNRLDLLDQVFYCKLLEEANRGSFPAEMVNKIFSNISSINAFHSKFLLPELEKRMQEWETTPRIGDILQKLAPFLKMYGEYVKGFDNAMELVKNMTERIPQFKSVVEEIQKQKICGSLTLQHHMLEPVQRIPRYEMLLKDYLRKLPPDSLDWNDAKKSLEIISTAASHSNSAIRKMENLKKLLEIYEMLGEEEDIVNPSNELIKEGQILKLAARNTSAQERYLFLFNNMLLYCVPKFSLVGSKFTVRTRVGIDGMKIVETQNEEYPHTFQVSGKERTLELQASSAQDKEEWIKALQETIDAFHQRHETFRNAIAKDNDIHSEVSTAELGKRAPRWIRDNEVTMCMKCKEPFNALTRRRHHCRACGYVVCWKCSDYKAQLEYDGGKLSKVCKDCYQIISGFTDSEEKKRKGILEIESAEVSGNSVVCSFLQYMEKSKPWQKAWCVIPKQDPLVLYMYGAPQDVRAQATIPLLGYVVDEMPRSADLPHSFKLTQSKSVHSFAADSEELKQKWLKVILLAVTGETPGGPNEHPATLDDHPEPKKKSEC

SEQ ID NO: 33203 - protein, 851 aa, Homo sapiens
  Payload ID: 6520
  Gene Symbol: FGD4
  Gene Name: FYVE, RhoGEF and PH domain containing 4
  ENSP ID: ENSP00000431323
MGGCSSTCPKIALVPPCSTSSTTTLVGENVSEEEAQGINGNRPAKHSAASPKPQVPPKPLHLQNSPSSNIHQTPRHKALPSAKPRMEEIKPASASCVSKEKPSKVSDLISRFEGGSSLSNYSDLKKESAVNLNAPRTPGRHGLTTTPQQKLLSQHLPQRQGNDTDKTQGAQTCVANGVMAAQNQMECEEEKAATLSSDTSIQASEPLLDTHIVNGERDETATAPASPTTDSCDGNASDSSYRTPGIGPVLPLEERGAETETKVQERENGESPLELEQLDQHHEMKETNEQKLHKIANELLLTERAYVNRLDLLDQVFYCKLLEEANRGSFPAEMVNKIFSNISSINAFHSKFLLPELEKRMQEWETTPRIGDILQKLAPFLKMYGEYVKGFDNAMELVKNMTERIPQFKSVVEEIQKQKICGSLTLQHHMLEPVQRIPRYEMLLKDYLRKLPPDSLDWNDAKKSLEIISTAASHSNSAIRKMENLKKLLEIYEMLGEEEDIVNPSNELIKEGQILKLAARNTSAQERYLFLFNNMLLYCVPKFSLVGSKFTVRTRVGIDGMKIVETQNEEYPHTFQVSGKERTLELQASSAQDKEEWIKALQETIDAFHQRHETFRNAIAKDNDIHSEVSTAELGKRAPRWIRDNEVTMCMKCKEPFNALTRRRHHCRACGYVVCWKCSDYKAQLEYDGGKLSKVCKDCYQIISGFTDSEEKKRKGILEIESAEVSGNSVVCSFLQYMEKSKPWQKAWCVIPKQDPLVLYMYGAPQDVRAQATIPLLGYVVDEMPRSADLPHSFKLTQSKSVHSFAADSEELKQKWLKVILLAVTGETPGGPNEHPATLDDHPEPKKKSEC

SEQ ID NO: 33204 - protein, 878 aa, Homo sapiens
  Payload ID: 6520
  Gene Symbol: FGD4
  Gene Name: FYVE, RhoGEF and PH domain containing 4
  ENSP ID: ENSP00000433666
MNFKRVKPNIFLLNQSRLIISICEIMSTDQGSSTCPKIALVPPCSTSSTTTLVGENVSEEEAQGINGNRPAKHSAASPKPQVPPKPLHLQNSPSSNIHQTPRHKALPSAKPRMEEIKPASASCVSKEKPSKVSDLISRFEGGSSLSNYSDLKKESAVNLNAPRTPGRHGLTTTPQQKLLSQHLPQRQGNDTDKTQGAQTCVANGVMAAQNQMECEEEKAATLSSDTSIQASEPLLDTHIVNGERDETATAPASPTTDSCDGNASDSSYRTPGIGPVLPLEERGAETETKVQERENGESPLELEQLDQHHEMKETNEQKLHKIANELLLTERAYVNRLDLLDQVFYCKLLEEANRGSFPAEMVNKIFSNISSINAFHSKFLLPELEKRMQEWETTPRIGDILQKLAPFLKMYGEYVKGFDNAMELVKNMTERIPQFKSVVEEIQKQKICGSLTLQHHMLEPVQRIPRYEMLLKDYLRKLPPDSLDWNDAKKSLEIISTAASHSNSAIRKMENLKKLLEIYEMLGEEEDIVNPSNELIKEGQILKLAARNTSAQERYLFLFNNMLLYCVPKFSLVGSKFTVRTRVGIDGMKIVETQNEEYPHTFQVSGKERTLELQASSAQDKEEWIKALQETIDAFHQRHETFRNAIAKDNDIHSEVSTAELGKRAPRWIRDNEVTMCMKCKEPFNALTRRRHHCRACGYVVCWKCSDYKAQLEYDGGKLSKVCKDCYQIISGFTDSEEKKRKGILEIESAEVSGNSVVCSFLQYMEKSKPWQKAWCVIPKQDPLVLYMYGAPQDVRAQATIPLLGYVVDEMPRSADLPHSFKLTQSKSVHSFAADSEELKQKWLKVILLAVTGETPGGPNEHPATLDDHPEPKKKSEC

SEQ ID NO: 33205 - protein, 65 aa, Homo sapiens
  Payload ID: 6520
  Gene Symbol: FGD4
  Gene Name: FYVE, RhoGEF and PH domain containing 4
  ENSP ID: ENSP00000434062
  MOD_RES (1)..(1): Any amino acid
XAETETKVQERENGESPLELEQLDQHHEMKETNEQKLHKIANELLLTERAYVNRLDLLDQKIEWR

SEQ ID NO: 33206 - protein, 207 aa, Homo sapiens
  Payload ID: 6520
  Gene Symbol: FGD4
  Gene Name: FYVE, RhoGEF and PH domain containing 4
  ENSP ID: ENSP00000434356
MEEIKPASASCVSKEKPSKVSDLISRFEGGSSLSNYSDLKKESAVNLNAPRTPGRHGLTTTPQQKLLSQHLPQRQGNDTDKTQGAQTCVANGVMAAQNQMECEEEKAATLSSDTSIQASEPLLDTHIVNGERDETATAPASPTTDSCDGNASDSSYRTPGIGPVLPLEERGAETETKVQERENGESPLELEQLDQHHEMKVEHETSS

SEQ ID NO: 33207 - protein, 235 aa, Homo sapiens; identical to SEQ ID NO: 33201
  Payload ID: 6520
  Gene Symbol: FGD4
  Gene Name: FYVE, RhoGEF and PH domain containing 4
  ENSP ID: ENSP00000437109

SEQ ID NO: 33208 - protein, 673 aa, Homo sapiens
  Payload ID: 6520
  Gene Symbol: FGD4
  Gene Name: FYVE, RhoGEF and PH domain containing 4
  ENSP ID: ENSP00000446695
MAAQNQMECEEEKAATLSSDTSIQASEPLLDTHIVNGERDETATAPASPTTDSCDGNASDSSYRTPGIGPVLPLEERGAETETKVQERENGESPLELEQLDQHHEMKETNEQKLHKIANELLLTERAYVNRLDLLDQVFYCKLLEEANRGSFPAEMVNKIFSNISSINAFHSKFLLPELEKRMQEWETTPRIGDILQKLAPFLKMYGEYVKGFDNAMELVKNMTERIPQFKSVVEEIQKQKICGSLTLQHHMLEPVQRIPRYEMLLKDYLRKLPPDSLDWNDAKKSLEIISTAASHSNSAIRKMENLKKLLEIYEMLGEEEDIVNPSNELIKEGQILKLAARNTSAQERYLFLFNNMLLYCVPKFSLVGSKFTVRTRVGIDGMKIVETQNEEYPHTFQVSGKERTLELQASSAQDKEEWIKALQETIDAFHQRHETFRNAIAKDNDIHSEVSTAELGKRAPRWIRDNEVTMCMKCKEPFNALTRRRHHCRACGYVVCWKCSDYKAQLEYDGGKLSKVCKDCYQIISGFTDSEEKKRKGILEIESAEVSGNSVVCSFLQYMEKSKPWQKAWCVIPKQDPLVLYMYGAPQDVRAQATIPLLGYVVDEMPRSADLPHSFKLTQSKSVHSFAADSEELKQKWLKVILLAVTGETPGGPNEHPATLDDHPEPKKKSEC

SEQ ID NO: 33209 - protein, 903 aa, Homo sapiens
  Payload ID: 6520
  Gene Symbol: FGD4
  Gene Name: FYVE, RhoGEF and PH domain containing 4
  ENSP ID: ENSP00000449273
MSDEGGSNFRRVAIRRKSNPSYLPPGVPRPWSRPASHLGRVGTAAFKGQVPSGATGSSTCPKIALVPPCSTSSTTTLVGENVSEEEAQGINGNRPAKHSAASPKPQVPPKPLHLQNSPSSNIHQTPRHKALPSAKPRMEEIKPASASCVSKEKPSKVSDLISRFEGGSSLSNYSDLKKESAVNLNAPRTPGRHGLTTTPQQKLLSQHLPQRQGNDTDKTQGAQTCVANGVMAAQNQMECEEEKAATLSSDTSIQASEPLLDTHIVNGERDETATAPASPTTDSCDGNASDSSYRTPGIGPVLPLEERGAETETKVQERENGESPLELEQLDQHHEMKETNEQKLHKIANELLLTERAYVNRLDLLDQVFYCKLLEEANRGSFPAEMVNKIFSNISSINAFHSKFLLPELEKRMQEWETTPRIGDILQKLAPFLKMYGEYVKGFDNAMELVKNMTERIPQFKSVVEEIQKQKICGSLTLQHHMLEPVQRIPRYEMLLKDYLRKLPPDSLDWNDAKKSLEIISTAASHSNSAIRKMENLKKLLEIYEMLGEEEDIVNPSNELIKEGQILKLAARNTSAQERYLFLFNNMLLYCVPKFSLVGSKFTVRTRVGIDGMKIVETQNEEYPHTFQVSGKERTLELQASSAQDKEEWIKALQETIDAFHQRHETFRNAIAKDNDIHSEVSTAELGKRAPRWIRDNEVTMCMKCKEPFNALTRRRHHCRACGYVVCWKCSDYKAQLEYDGGKLSKVCKDCYQIISGFTDSEEKKRKGILEIESAEVSGNSVVCSFLQYMEKSKPWQKAWCVIPKQDPLVLYMYGAPQDVRAQATIPLLGYVVDEMPRSADLPHSFKLTQSKSVHSFAADSEELKQKWLKVILLAVTGETPGGPNEHPATLDDHPEPKKKSEC

SEQ ID NO: 33210 - protein, 40 aa, Homo sapiens
  Payload ID: 6520
  Gene Symbol: FGD4
  Gene Name: FYVE, RhoGEF and PH domain containing 4
  ENSP ID: ENSP00000449614
MEEIKPASASCVSKEKPSKVSDLISRFEGGRRLMSKNFTK

SEQ ID NO: 33211 - protein, 30 aa, Homo sapiens
  Payload ID: 6520
  Gene Symbol: FGD4
  Gene Name: FYVE, RhoGEF and PH domain containing 4
  ENSP ID: ENSP00000462623
MEEIKPASASCVSKEKPSKVSDLISRFEGG

SEQ ID NO: 33212 - protein, 1462 aa, Homo sapiens
  Payload ID: 6521
  Gene Symbol: FGD5
  Gene Name: FYVE, RhoGEF and PH domain containing 5
  Uniprot ID: Q6ZNL6
  ENSP ID: ENSP00000285046
MFRGPKPPIAPKPRLTAPNEWRASVYLNDSLNKCSNGRLPCVDRGLDEGPRSIPKCSESETDEDYIVVPRVPLREDEPKDEGSVGNKALVSPESSAEEEEEREEGGEACGLEGTGAGEDSVAPAAPGAGALSREGEEGTDLALEDEGEGCADEPGTLEQVSRSEEEEKLVQPHRECSLEDSGPWAGEGVFQSDLLLPHIHGEDQEPPDTPGEAEEDDEEGCASTDPAGADEGSGPDRPTEDMGQDAEDTSEEPPEKEELAGVQEAETATDCPEVLEEGCEEATGVTGGEQVDLSEPPDHEKKTNQEVAAATLEDHAQDESAEESCQIVPFENDCMEDFVTSLTGSPYEFFPTESTSFCSESCSPLSESAKGLESEQAPKLGLRAEENPMVGALCGQCGSLQGGAAEGPAAPDVVVVLEEEALDDALANPYVMGVGLPGQAAPGEGGQAASDALGGYGSKEELNCEAEGGLVPADRKNTSTRVRPHSGKVAGYVPETVPEETGPEAGSSAPGIGGAAEEVGKTLLSLEGKPLEASRALPAKPRAFTLYPRSFSVEGREIPVSVYQEPEGSGLDDHRIKRKEDNLSLSCVIGSSGSFSQRNHLPSSGTSTPSSMVDIPPPFDLACITKKPITKSSPSLLIESDSPDKYKKKKSSFKRFLALTFKKKTENKLHVDVNVSSSRSSSESSYHGPSRILEVDRRSLSNSPQLKSRTGKLRASESPSSLIFYRDGKRKGVPFSRTVSRVESFEDRSRPPFLPLPLTKPRSISFPSADTSDYENIPAMNSDYENIQIPPRRPARAGAFTKLFEDQSRALSTANENDGYVDMSSFNAFESKQQSADQDAESAYTEPYKVCPISSAAPKEDLTSDEEQRSSEEEDSASRDPSVTHKVEGQSRALVIAQELLSSEKAYVEMLQHLNLDFHGAVMRALDDMDHEGRDTLAREELRQGLSELPAIHDLHQGILEELEERLSNWESQQKVADVFLAREQGFDHHATHILQFDRYLGLLSENCLHSPRLAAAVREFEQSVQGGSQTAKHRLLRVVQRLFQYQVLLTDYLNNLCPDSAEYDNTQGALSLISKVTDRANDSMEQGENLQKLVHIEHSVRGQGDLLQPGREFLKEGTLMKVTGKNRRPRHLFLMNDVLLYTYPQKDGKYRLKNTLAVANMKVSRPVMEKVPYALKIETSESCLMLSASSCAERDEWYGCLSRALPEDYKAQALAAFHHSVEIRERLGVSLGERPPTLVPVTHVMMCMNCGCDFSLTLRRHHCHACGKIVCRNCSRNKYPLKYLKDRMAKVCDGCFGELKKRGRAVPGLMRERPVSMSFPLSSPRFSGSAFSSVFQSINPSTFKKQKKVPSALTEVAASGEGSAISGYLSRCKRGKRHWKKLWFVIKGKVLYTYMASEDKVALESMPLLGFTIAPEKEEGSSEVGPIFHLYHKKTLFYSFKAEDTNSAQRWIEAMEDASVL

SEQ ID NO: 33213 - protein, 252 aa, Homo sapiens
  Payload ID: 6521
  Gene Symbol: FGD5
  Gene Name: FYVE, RhoGEF and PH domain containing 5
  ENSP ID: ENSP00000394827
  MOD_RES (1)..(1): Any amino acid
XQIPPRRPARAGAFTKLFEDQSRALSTANENDGYVDMSSFNAFESKQQSADQDAESAYTEPYKVCPISSAAPKEDLTSDEEQRSSEEEDSASRDPSVTHKDFHGAVMRALDDMDHEGRDTLAREELRQGLSELPAIHDLHQGILEELEERLSNWESQQKVADVFLAREQGFDHHATHILQFDRYLGLLSENCLHSPRLAAAVREFEQSVQGGSQTAKHRLLRVVQRLFQYQVLLTDYLNNLCPDSAEYDNTQ

SEQ ID NO: 33214 - protein, 1178 aa, Homo sapiens
  Payload ID: 6521
  Gene Symbol: FGD5
  Gene Name: FYVE, RhoGEF and PH domain containing 5
  ENSP ID: ENSP00000445949
MGQDAEDTSEEPPEKEELAGVQEAETATDCPEVLEEGCEEATGVTGGEQVDLSEPPDHEKKTNQEVAAATLEDHAQDESAEESCQIVPFENDCMEDFVTSLTGSPYEFFPTESTSFCSESCSPLSESAKGLESEQAPKLGLRAEENPMVGALCGQCGSLQGGAAEGPAAPDVVVVLEEEALDDALANPYVMGVGLPGQAAPGEGGQAASDALGGYGSKEELNCEAEGGLVPADRKNTSTRVRPHSGKVAGYVPETVPEETGPEAGSSAPGIGGAAEEVGKTLLSLEGKPLEASRALPAKPRAFTLYPRSFSVEGREIPVSVYQEPEGSGLDDHRIKRKEDNLSLSCVIGSSGSFSQRNHLPSSGTSTPSSMVDIPPPFDLACITKKPITKSSPSLLIESDSPDKYKKKKSSFKRFLALTFKKKTENKLHVDVNVSSSRSSSESSYHGPSRILEVDRRSLSNSPQLKSRTGKLRASESPSSLIFYRDGKRKGVPFSRTVSRVESFEDRSRPPFLPLPLTKPRSISFPSADTSDYENIPAMNSDYENIQIPPRRPARAGAFTKLFEDQSRALSTANENDGYVDMSSFNAFESKQQSADQDAESAYTEPYKVCPISSAAPKEDLTSDEEQRSSEEEDSASRDPSVTHKVEGQSRALVIAQELLSSEKAYVEMLQHLNLDFHGAVMRALDDMDHEGRDTLAREELRQGLSELPAIHDLHQGILEELEERLSNWESQQKVADVFLAREQGFDHHATHILQFDRYLGLLSENCLHSPRLAAAVREFEQSVQGGSQTAKHRLLRVVQRLFQYQVLLTDYLNNLCPDSAEYDNTQGALSLISKVTDRANDSMEQGENLQKLVHIEHSVRGQGDLLQPGREFLKEGTLMKVTGKNRRPRHLFLMNDVLLYTYPQKDGKYRLKNTLAVANMKVSRPVMEKVPYALKIETSESCLMLSASSCAERDEWYGCLSRALPEDYKAQALAAFHHSVEIRERLGVSLGERPPTLVPVTHVMMCMNCGCDFSLTLRRHHCHACGKIVCRNCSRNKYPLKYLKDRMAKVCDGCFGELKKRGRAVPGLMRERPVSMSFPLSSPRFSGSAFSSVFQSINPSTFKKQKKVPSALTEDKVALESMPLLGFTIAPEKEEGSSEVGPIFHLYHKKTLFYSFKAEDTNSAQRWIEAMEDASVL

SEQ ID NO: 33215 - protein, 1430 aa, Homo sapiens
  Payload ID: 6522
  Gene Symbol: FGD6
  Gene Name: FYVE, RhoGEF and PH domain containing 6
  Uniprot ID: Q6ZV73
  ENSP ID: ENSP00000344446
MTSAAEIKKPPVAPKPKFVVANNKPAPPPIAPKPDIVISSVPQSTKKMKPAIAPKPKVLKTSPVREIGQSPSRKIMLNLEGHKQELAESTDNFNCKYEGNQSNDYISPMCSCSSECIHKLGHRENLCVKQLVLEPLEMNENLENSKIDETLTIKTRSKCDLYGEKAKNQGGVVLKASVLEEELKDALIHQMPPFISAQKHRPTDSPEMNGGCNSNGQFRIEFADLSPSPSSFEKVPDHHSCHLQLPSDECEHFETCQDDSEKSNNCFQSSELEALENGKRSTLISSDGVSKKSEVKDLGPLEIHLVPYTPKFPTPKPRKTRTARLLRQKCVDTPSESTEEPGNSDSSSSCLTENSLKINKISVLHQNVLCKQEQVDKMKLGNKSELNMESNSDAQDLVNSQKAMCNETTSFEKMAPSFDKDSNLSSDSTTVDGSSMSLAVDEGTGFIRCTVSMSLPKQLKLTCNEHLQSGRNLGVSAPQMQKESVIKEENSLRIVPKKPQRHSLPATGVLKKAASEELLEKSSYPSSEEKSSEKSLERNHLQHLCAQNRGVSSSFDMPKRASEKPVWKLPHPILPFSGNPEFLKSVTVSSNSEPSTALTKPRAKSLSAMDVEKCTKPCKDSTKKNSFKKLLSMKLSICFMKSDFQKFWSKSSQLGDTTTGHLSSGEQKGIESDWQGLLVGEEKRSKPIKAYSTENYSLESQKKRKKSRGQTSAANGLRAESLDDQMLSRESSSQAPYKSVTSLCAPEYENIRHYEEIPEYENLPFIMAIRKTQELEWQNSSSMEDADANVYEVEEPYEAPDGQLQLGPRHQHSSSGASQEEQNDLGLGDLPSDEEEIINSSDEDDVSSESSKGEPDPLEDKQDEDNGMKSKVHHIAKEIMSSEKVFVDVLKLLHIDFRDAVAHASRQLGKPVIEDRILNQILYYLPQLYELNRDLLKELEERMLHWTEQQRIADIFVKKGPYLKMYSTYIKEFDKNIALLDEQCKKNPGFAAVVREFEMSPRCANLALKHYLLKPVQRIPQYRLLLTDYLKNLIEDAGDYRDTQDALAVVIEVANHANDTMKQGDNFQKLMQIQYSLNGHHEIVQPGRVFLKEGILMKLSRKVMQPRMFFLFNDALLYTTPVQSGMYKLNNMLSLAGMKVRKPTQEAYQNELKIESVERSFILSASSATERDEWLEAISRAIEEYAKKRITFCPSRSLDEADSENKEEVSPLGSKAPIWIPDTRATMCMICTSEFTLTWRRHHCRACGKIVCQACSSNKYGLDYLKNQPARVCEHCFQELQKLDHQHSPRIGSPGNHKSPSSALSSVLHSIPSGRKQKKIPAALKEVSANTEDSSMSGYLYRSKGNKKPWKHFWFVIKNKVLYTYAASEDVAALESQPLLGFTVIQVKDENSESKVFQLLHKNMLFYVFKAEDAHSAQKWIEAFQEGTIL

SEQ ID NO: 33216 - protein, 59 aa, Homo sapiens
  Payload ID: 6522
  Gene Symbol: FGD6
  Gene Name: FYVE, RhoGEF and PH domain containing 6
  ENSP ID: ENSP00000408291
MTSAAVQEHPRRNRMILVLVTFPLMRRKSSTVLMKMMSALSQVKESLTHWKINRMKIME

SEQ ID NO: 33217 - protein, 133 aa, Homo sapiens
  Payload ID: 6522
  Gene Symbol: FGD6
  Gene Name: FYVE, RhoGEF and PH domain containing 6
  ENSP ID: ENSP00000448350
  MOD_RES (1)..(1): Any amino acid
XNKYGLDYLKNQPARVCEHCFQELQKLDHQHSPRIGSPGNHKSPSSALSSVLHSIPSGRKQKKIPAALKEVSANTEDSSMSGYLYRSKGNKKPWKHFWFVIKNKVLYTYAASEVDRSISGRHNIVAVLVSSLL

SEQ ID NO: 33218 - protein, 1206 aa, Homo sapiens
  Payload ID: 6522
  Gene Symbol: FGD6
  Gene Name: FYVE, RhoGEF and PH domain containing 6
  ENSP ID: ENSP00000449005
MTSAAEIKKPPVAPKPKFVVANNKPAPPPIAPKPDIVISSVPQSTKKMKPAIAPKPKVLKTSPVREIGQSPSRKIMLNLEGHKQELAESTDNFNCKYEGNQSNDYISPMCSCSSECIHKLGHRENLCVKQLVLEPLEMNENLENSKIDETLTIKTRSKCDLYGEKAKNQGGVVLKASVLEEELKDALIHQMPPFISAQKHRPTDSPEMNGGCNSNGQFRIEFADLSPSPSSFEKVPDHHSCHLQLPSDECEHFETCQDDSEKSNNCFQSSELEALENGKRSTLISSDGVSKKSEVKDLGPLEIHLVPYTPKFPTPKPRKTRTARLLRQKCVDTPSESTEEPGNSDSSSSCLTENSLKINKISVLHQNVLCKQEQVDKMKLGNKSELNMESNSDAQDLVNSQKAMCNETTSFEKMAPSFDKDSNLSSDSTTVDGSSMSLAVDEGTGFIRCTVSMSLPKQLKLTCNEHLQSGRNLGVSAPQMQKESVIKEENSLRIVPKKPQRHSLPATGVLKKAASEELLEKSSYPSSEEKSSEKSLERNHLQHLCAQNRGVSSSFDMPKRASEKPVWKLPHPILPFSGNPEFLKSVTVSSNSEPSTALTKPRAKSLSAMDVEKCTKPCKDSTKKNSFKKLLSMKLSICFMKSDFQKFWSKSSQLGDTTTGHLSSGEQKGIESDWQGLLVGEEKRSKPIKAYSTENYSLESQKKRKKSRGQTSAANGLRAESLDDQMLSRESSSQAPYKSVTSLCAPEYENIRHYEEIPEYENLPFIMAIRKTQELEWQNSSSMEDADANVYEVEEPYEAPDGQLQLGPRHQHSSSGASQEEQNDLGLGDLPSDEEEIINSSDEDDVSSESSKGEPDPLEDKQDEDNGMKSKVHHIAKEIMSSEKVFVDVLKLLHIDFRDAVAHASRQLGKPVIEDRILNQILYYLPQLYELNRDLLKELEERMLHWTEQQRIADIFVKKGPYLKMYSTYIKEFDKNIALLDEQCKKNPGFAAVVREFEMSPRCANLALKHYLLKPVQRIPQYRLLLTDYLKNLIEDAGDYRDTQDALAVVIEVANHANDTMKQGDNFQKLMQIQYSLNGHHEIVQPGRVFLKEGILMKLSRKVMQPRMFFLFNDALLYTTPVQSGMYKLNNMLSLAGMKVRKPTQEAYQNELKIESVERSFILSASSATERDEWLEAISRAIEEYAKKRITFCPSRSLDEADSENK

SEQ ID NO: 33219 - protein, 279 aa, Homo sapiens
  Payload ID: 6522
  Gene Symbol: FGD6
  Gene Name: FYVE, RhoGEF and PH domain containing 6
  ENSP ID: ENSP00000450240
MLQLRPQVILNCLRRSRPCSLCQDYLKNLIEDAGDYRDTQDALAVVIEVANHANDTMKQGDNFQKLMQIQYSLNGHHEIVQPGRVFLKEGILMKLSRKVMQPRMFFLFNDALLYTTPVQSGMYKLNNMLSLAGMKVRKPTQEAYQNELKIESVERSFILSASSATERDEWLEAISRAIEEYAKKRITFCPSRSLDEADSENKEEVSPLGSKAPIWIPDTRATMCMICTSEFTLTWRRHHCRACGKIVCQACSSNKYGLDYLKNQPARVCEHCFQELQKL

SEQ ID NO: 33220 - protein, 1374 aa, Homo sapiens
  Payload ID: 6522
  Gene Symbol: FGD6
  Gene Name: FYVE, RhoGEF and PH domain containing 6
  Uniprot ID: Q6ZV73
  ENSP ID: ENSP00000450342
MTSAAEIKKPPVAPKPKFVVANNKPAPPPIAPKPDIVISSVPQSTKKMKPAIAPKPKVLKTSPVREIGQSPSRKIMLNLEGHKQELAESTDNFNCKYEGNQSNDYISPMCSCSSECIHKLGHRENLCVKQLVLEPLEMNENLENSKIDETLTIKTRSKCDLYGEKAKNQGGVVLKASVLEEELKDALIHQMPPFISAQKHRPTDSPEMNGGCNSNGQFRIEFADLSPSPSSFEKVPDHHSCHLQLPSDECEHFETCQDDSEKSNNCFQSSELEALENGKRSTLISSDGVSKKSEVKDLGPLEIHLVPYTPKFPTPKPRKTRTARLLRQKCVDTPSESTEEPGNSDSSSSCLTENSLKINKISVLHQNVLCKQEQVDKMKLGNKSELNMESNSDAQDLVNSQKAMCNETTSFEKMAPSFDKDSNLSSDSTTVDGSSMSLAVDEGTGFIRCTVSMSLPKQLKLTCNEHLQSGRNLGVSAPQMQKESVIKEENSLRIVPKKPQRHSLPATGVLKKAASEELLEKSSYPSSEEKSSEKSLERNHLQHLCAQNRGVSSSFDMPKRASEKPVWKLPHPILPFSGNPEFLKSVTVSSNSEPSTALTKPRAKSLSAMDVEKCTKPCKDSTKKNSFKKLLSMKLSICFMKSDFQKFWSKSSQLGDTTTGHLSSGEQKGIESDWQGLLVGEEKRSKPIKAYSTENYSLESQKKRKKSRGQTSAANGLRAESLDDQMLSRESSSQAPYKSVTSLCAPEYENIRHYEEIPEYENLPFIMAIRKTQELEWQNSSSMEDADANVYEVEEPYEAPDGQLQLGPRHQHSSSGASQEEQNDLGLGDLPSDEEEIINSSDEDDVSSESSKGEPDPLEDKQDEDNGMKSKVHHIAKEIMSSEKVFVDVLKLLHIDFRDAVAHASRQLGKPVIEDRILNQILYYLPQLYELNRDLLKELEERMLHWTEQQRIADIFVKKGPYLKMYSTYIKEFDKNIALLDEQCKKNPGFAAVVREFEMSPRCANLALKHYLLKPVQRIPQYRLLLTDYLKNLIEDAGDYRDTQDALAVVIEVANHANDTMKQGDNFQKLMQIQYSLNGHHEIVQPGRVFLKEGILMKLSRKVMQPRMFFLFNDALLYTTPVQSGMYKLNNMLSLAGMKVRKPTQEAYQNELKIESVERSFILSASSATERDEWLEAISRAIEEYAKKRITFCPSRSLDEADSENKEEVSPLGSKAPIWIPDTRATMCMICTSEFTLTWRRHHCRACGKIVCQACSSNKYGLDYLKNQPARVCEHCFQELQKLDHQHSPRIGSPGNHKSPSSALSSVLHSIPSGRKQKKIPAALKEVSANTEDSSMSGYLYRSKGNKKPWKHFWFVIKNKVLYTYAASEVRSEI

SEQ ID NO: 33221 - protein, 117 aa, Homo sapiens
  Payload ID: 6523
  Gene Symbol: GAGE1
  Gene Name: G antigen 1
  Uniprot ID: Q13068
  ENSP ID: ENSP00000371119
MSWRGRSTYYWPRPRRYVQPPEMIGPMRPEQFSDEVEPATPEEGEPATQRQDPAAAQEGEDEGASAGQGPKPEADSQEQGHPQTGCECEDGPDGQEMDPPNPEEVKTPEEGEGQSQC

SEQ ID NO: 33222 - protein, 139 aa, Homo sapiens
  Payload ID: 6523
  Gene Symbol: GAGE1
  Gene Name: G antigen 1
  Uniprot ID: Q13065
  ENSP ID: ENSP00000371128
MSWRGRSTYYWPRPRRYVQPPEMIGPMRPEQFSDEVEPATPEEGEPATQRQDPAAAQEGEDEGASAGQGPKPEADSQEQGHPQTGCECEDGPDGQEMDPPNPEEVKTPEEEMRSHYVAQTGILWLLMNNCFLNLSPRKP

SEQ ID NO: 33223 - protein, 117 aa, Homo sapiens; identical to SEQ ID NO: 33221
  Payload ID: 6523
  Gene Symbol: GAGE1
  Gene Name: G antigen 1
  Uniprot ID: Q13068
  ENSP ID: ENSP00000482230

SEQ ID NO: 33224 - protein, 117 aa, Homo sapiens; identical to SEQ ID NO: 33221
  Payload ID: 6523
  Gene Symbol: GAGE1
  Gene Name: G antigen 1
  Uniprot ID: Q13068
  ENSP ID: ENSP00000484668

SEQ ID NO: 33225 - protein, 116 aa, Homo sapiens
  Payload ID: 6524
  Gene Symbol: GAGE10
  Gene Name: G antigen 10
  Uniprot ID: A6NGK3
  ENSP ID: ENSP00000385415
MSWRGRSTYRPRPRRYVEPPEMIGPMLPEQFSDEVEPATPEEGEPATQRQDPAAAQEGEDEGASAGQGPKPEADSQEQVHPKTGCECGDGPDGQEMGLPNPEEVKRPEEGEKQSQC

SEQ ID NO: 33226 - protein, 7 aa, Homo sapiens
  Payload ID: 6525
  Gene Symbol: GAGE12B
  Gene Name: G antigen 12B
  ENSP ID: ENSP00000354603
  MOD_RES (1)..(1): Any amino acid
XEKQSQC

SEQ ID NO: 33227 - protein, 117 aa, Homo sapiens
  Payload ID: 6526
  Gene Symbol: GAGE12C
  Gene Name: G antigen 12C
  Uniprot ID: A1L429
  ENSP ID: ENSP00000397103
MSWRGRSTYYWPRPRRYVQPPEMIGPMRPEQFSDEVEPATPEEGEPATQCQDPAAAQEGEDEGASAGQGPKPEAHSQEQGHPQTGCECEDGPDGQEMDPPNPEEVKTPEEGEKQSQC

SEQ ID NO: 33228 - protein, 117 aa, Homo sapiens; identical to SEQ ID NO: 33227
  Payload ID: 6527
  Gene Symbol: GAGE12D
  Gene Name: G antigen 12D
  Uniprot ID: A1L429
  ENSP ID: ENSP00000384214

SEQ ID NO: 33229 - protein, 117 aa, Homo sapiens; identical to SEQ ID NO: 33227
  Payload ID: 6528
  Gene Symbol: GAGE12E
  Gene Name: G antigen 12E
  Uniprot ID: A1L429
  ENSP ID: ENSP00000371117

SEQ ID NO: 33230 - protein, 117 aa, Homo sapiens
  Payload ID: 6529
  Gene Symbol: GAGE12F
  Gene Name: G antigen 12F
  Uniprot ID: P0CL80
  ENSP ID: ENSP00000404123
MSWRGRSTYYWPRPRRYVQPPEMIGPMRPEQFSDEVEPATPEEGEPATQRQDPAAAQEGEDEGASAGQGPKPEAHSQEQGHPQTGCECEDGPDGQEMDPPNPEEVKTPEEGEKQSQC

SEQ ID NO: 33231 - protein, 117 aa, Homo sapiens; identical to SEQ ID NO: 33230
  Payload ID: 6530
  Gene Symbol: GAGE12G
  Gene Name: G antigen 12G
  Uniprot ID: P0CL81
  ENSP ID: ENSP00000416249

SEQ ID NO: 33232 - protein, 117 aa, Homo sapiens
  Payload ID: 6531
  Gene Symbol: GAGE12H
  Gene Name: G antigen 12H
  Uniprot ID: A6NDE8
  ENSP ID: ENSP00000371141
MSWRGRSTYYWPRPRRYVQPPEMIGPMRPEQFSDEVEPATPEEGEPATQCQDPAAAQKGEDEGASAGQGPKPEAHSQEQGHPQTGCECEDGPDGQEMDPPNPEEVKTPEEGEKQSQC

SEQ ID NO: 33233 - protein, 117 aa, Homo sapiens
  Payload ID: 6532
  Gene Symbol: GAGE12J
  Gene Name: G antigen 12J
  Uniprot ID: A6NER3
  ENSP ID: ENSP00000409832
MSWRGRSTYYWPRPRPYVQPPEMIGPMRPEQFSDEVEPATPEEGEPATQRQDPAAAQEGEDEGASAGQGPKPEADSQEQGHPQTGCECEDGPDGQEMDPPNPEEVKTPEEGEKQSQC

SEQ ID NO: 33234 - protein, 117 aa, Homo sapiens
  Payload ID: 6533
  Gene Symbol: GAGE13
  Gene Name: G antigen 13
  ENSP ID: ENSP00000483811
MSWRGRSTYYWPRPRRYVEPPEMIGPMRPEQFSDEVEPATPEEGEPATQRQDPAAAQEGEDEGASAGQGPKPEADSQEQGHPQTGCECEDGPDGQEMDPPNPEEVKTPEEGEKQSQC

SEQ ID NO: 33235 - protein, 116 aa, Homo sapiens
  Payload ID: 6534
  Gene Symbol: GAGE2A
  Gene Name: G antigen 2A
  Uniprot ID: Q6NT46
  ENSP ID: ENSP00000355421
MSWRGRSTYRPRPRRYVEPPEMIGPMRPEQFSDEVEPATPEEGEPATQRQDPAAAQEGQDEGASAGQGPKPEAHSQEQGHPQTGCECEDGPDGQEMDPPNPEEVKTPEEGEKQSQC

SEQ ID NO: 33236 - protein, 110 aa, Homo sapiens
  Payload ID: 6535
  Gene Symbol: GAGE2E
  Gene Name: G antigen 2E
  ENSP ID: ENSP00000478568
MSWRGRSTYYWPRPRRYVQPPEMIGPMRPEQFSDEVEPATPEEGEPATQRQDPAAAQEGEDEGASAGQGPKPEAHSQEQGHPQTGCECEDGPDGQEMDPPNPEEVKTPEE

SEQ ID NO: 33237 - protein, 770 aa, Homo sapiens
  Payload ID: 6536
  Gene Symbol: GFM1
  Gene Name: G elongation factor, mitochondrial 1
  Uniprot ID: Q96RP9
  ENSP ID: ENSP00000264263
MRLLGAAAVAALGRGRAPASLGWQRKQVNWKACRWSSSGVIPNEKIRNIGISAHIDSGKTTLTERVLYYTGRIAKMHEVKGKDGVGAVMDSMELERQRGITIQSAATYTMWKDVNINIIDTPGHVDFTIEVERALRVLDGAVLVLCAVGGVQCQTMTVNRQMKRYNVPFLTFINKLDRMGSNPARALQQMRSKLNHNAAFMQIPMGLEGNFKGIVDLIEERAIYFDGDFGHFLRDFLPLLWNWDRRSGSQIVRYGEIPAELRAAATDHRQELIECVANSDEQLGEMFLEEKIPSISDLKLAIRRATLKRSFTPVFLGSALKNKGVQPLLDAVLEYLPNPSEVQNYAILNKEDDSKEKTKILMNSSRDNSHPFVGLAFKLEVGRFGQLTYVRSYQGELKKGDTIYNTRTRKKVRLQRLARMHADMMEDVEEVYAGDICALFGIDCASGDTFTDKANSGLSMESIHVPDPVISIAMKPSNKNDLEKFSKGIGRFTREDPTFKVYFDTENKETVISGMGELHLEIYAQRLEREYGCPCITGKPKVAFRETITAPVPFDFTHKKQSGGAGQYGKVIGVLEPLDPEDYTKLEFSDETFGSNIPKQFVPAVEKGFLDACEKGPLSGHKLSGLRFVLQDGAHHMVDSNEISFIRAGEGALKQALANATLCILEPIMAVEVVAPNEFQGQVIAGINRRHGVITGQDGVEDYFTLYADVPLNDMFGYSTELRSCTEGKGEYTMEYSRYQPCLPSTQEDVINKYLEATGQLPVKKGKAKN

SEQ ID NO: 33238 - protein, 453 aa, Homo sapiens
  Payload ID: 6536
  Gene Symbol: GFM1
  Gene Name: G elongation factor, mitochondrial 1
  ENSP ID: ENSP00000417225
MRLLGAAAVAALGRGRAPASLGWQRKQVNWKACRWSSSGVIPNEKIRNIGISAHIDSGKTTLTERVLYYTGRIAKMHEVKGKDGVGAVMDSMELERQRGITIQSAATYTMWKDVNINIIDTPGHVDFTIEVERALRVLDGAVLVLCAVGGVQCQTMTVNRQMKRYNVPFLTFINKLDRMGSNPARALQQMRSKLNHNAAFMQIPMGLEGNFKGIVDLIEERAIYFDGDFGQIVRYGEIPAELRAAATDHRQELIECVANSDEQLGEMFLEEKIPSISDLKATIRRATLKRSFTPVFLGSALKNKGVQPLLDAVLEYLPNPSEVQNYAILNKEDDSKEKTKILMNSSRDNSHPFVGLAFKLEVGRFGQLTYVRSYQGELKKGDTIYNTRTRKKVRLQRLARMHADMMEASTEKYMPETSVHCLALTVLVETHSQTKPTAAFLWSQFMFLILSFQ

SEQ ID NO: 33239 - protein, 60 aa, Homo sapiens
  Payload ID: 6536
  Gene Symbol: GFM1
  Gene Name: G elongation factor, mitochondrial 1
  ENSP ID: ENSP00000417532
MHEVKGKDGVGAVMDSMELERQRGITIQSAATYTMWKDVNINIIDTPGHVDFTIEVERAL

SEQ ID NO: 33240 - protein, 591 aa, Homo sapiens
  Payload ID: 6536
  Gene Symbol: GFM1
  Gene Name: G elongation factor, mitochondrial 1
  ENSP ID: ENSP00000418755
MRLLGAAAVAALGRGRAPASLGWQRKQVNWKACRWSSSGVIPNEKIRNIGISAHIDSGKTTLTERVLYYTGRIAKMHEVKGKDGVGAVMDSMELERQRGITIQSAATYTMWKDVNINIIDTPGHVDFTIEVERALRVLDGAVLVLCAVGGVQCQTMTVNRQMKRYNVPFLTFINKLDRMGSNPARALQQMRSKLNHNAAFMQIPMGLEGNFKGIVDLIEERAIYFDGDFGQIVRYGEIPAELRAAATDHRQELIECVANSDEQLGEMFLEEKIPSISDLKLAIRRATLKRSFTPVFLGSALKNKGVQPLLDAVLEYLPNPSEVQNYAILNKEDDSKEKTKILMNSSRDNSHPFVGLAFKLEVGRFGQLTYVRSYQGELKKGDTIYNTRTRKKVRLQRLARMHADMMEDVEEVYAGDICALFGIDCASGDTFTDKANSGLSMESIHVPDPVISIAMKPSNKNDLEKFSKGIGRFTREDPTFKVYFDTENKETVISGMGELHLEIYAQRLEREYGCPCITGKPKVAFRETITAPVPFDFTHKKQSGGAGQYGKVIGVLEPLDPEDYTKLEFSDETFGSNIPKQFVPAVEKVNF

SEQ ID NO: 33241 - protein, 751 aa, Homo sapiens
  Payload ID: 6536
  Gene Symbol: GFM1
  Gene Name: G elongation factor, mitochondrial 1
  Uniprot ID: Q96RP9
  ENSP ID: ENSP00000419038
MRLLGAAAVAALGRGRAPASLGWQRKQVNWKACRWSSSGVIPNEKIRNIGISAHIDSGKTTLTERVLYYTGRIAKMHEVKGKDGVGAVMDSMELERQRGITIQSAATYTMWKDVNINIIDTPGHVDFTIEVERALRVLDGAVLVLCAVGGVQCQTMTVNRQMKRYNVPFLTFINKLDRMGSNPARALQQMRSKLNHNAAFMQIPMGLEGNFKGIVDLIEERAIYFDGDFGQIVRYGEIPAELRAAATDHRQELIECVANSDEQLGEMFLEEKIPSISDLKLAIRRATLKRSFTPVFLGSALKNKGVQPLLDAVLEYLPNPSEVQNYAILNKEDDSKEKTKILMNSSRDNSHPFVGLAFKLEVGRFGQLTYVRSYQGELKKGDTIYNTRTRKKVRLQRLARMHADMMEDVEEVYAGDICALFGIDCASGDTFTDKANSGLSMESIHVPDPVISIAMKPSNKNDLEKFSKGIGRFTREDPTFKVYFDTENKETVISGMGELHLEIYAQRLEREYGCPCITGKPKVAFRETITAPVPFDFTHKKQSGGAGQYGKVIGVLEPLDPEDYTKLEFSDETFGSNIPKQFVPAVEKGFLDACEKGPLSGHKLSGLRFVLQDGAHHMVDSNEISFIRAGEGALKQALANATLCILEPIMAVEVVAPNEFQGQVIAGINRRHGVITGQDGVEDYFTLYADVPLNDMFGYSTELRSCTEGKGEYTMEYSRYQPCLPSTQEDVINKYLEATGQLPVKKGKAKN

SEQ ID NO: 33242 - protein, 17 aa, Homo sapiens
  Payload ID: 6536
  Gene Symbol: GFM1
  Gene Name: G elongation factor, mitochondrial 1
  ENSP ID: ENSP00000420272
  MOD_RES (1)..(1): Any amino acid
XSFIRAGEGALKQGPSK

SEQ ID NO: 33243 - protein, 732 aa, Homo sapiens
  Payload ID: 6537
  Gene Symbol: GFM2
  Gene Name: G elongation factor, mitochondrial 2
  Uniprot ID: Q969S9
  ENSP ID: ENSP00000296804
MLTNLRIFAMSHQTIPSVYINNICCYKIRASLKRLKPHVPLGRNCSSLPGLIGNDIKSLHSIINPPIAKIRNIGIMAHIDAGKTTTTERILYYSGYTRSLGDVDDGDTVTDFMAQERERGITIQSAAVTFDWKGYRVNLIDTPGHVDFTLEVERCLRVLDGAVAVFDASAGVEAQTLTVWRQADKHNIPRICFLNKMDKTGASFKYAVESIREKLKAKPLLLQLPIGEAKTFKGVVDVVMKEKLLWNCNSNDGKDFERKPLLEMNDPELLKETTEARNALIEQVADLDDEFADLVLEEFSENFDLLPAEKLQTAIHRVTLAQTAVPVLCGSALKNKGIQPLLDAVTMYLPSPEERNYEFLERISRLLLPFADQHVEIPSLTAGNIALTVGLKHTATGDTIVSSKSSALAAARRAEREGEKKHRQNNEAERLLLAGVEIPEPVFFCTIEPPSLSKQPDLEHALKCLQREDPSLKVRLDPDSGQTVLCGMGELHIEIIHDRIKREYGLETYLGPLQVAYRETILNSVRATDTLDRTLGDKRHLVTVEVEARPIETSSVMPVIEFEYAESINEGLLKVSQEAIENGIHSACLQGPLLGSPIQDVAITLHSLTIHPGTSTTMISACVSRCVQKALKKADKQVLEPLMNLEVTVARDYLSPVLADLAQRRGNIQEIQTRQDNKVVIGFVPLAEIMGYSTVLRTLTSGSATFALELSTYQAMNPQDQNTLLNRRSGLT

SEQ ID NO: 33244 - protein, 779 aa, Homo sapiens
  Payload ID: 6537
  Gene Symbol: GFM2
  Gene Name: G elongation factor, mitochondrial 2
  Uniprot ID: Q969S9
  ENSP ID: ENSP00000296805
MLTNLRIFAMSHQTIPSVYINNICCYKIRASLKRLKPHVPLGRNCSSLPGLIGNDIKSLHSIINPPIAKIRNIGIMAHIDAGKTTTTERILYYSGYTRSLGDVDDGDTVTDFMAQERERGITIQSAAVTFDWKGYRVNLIDTPGHVDFTLEVERCLRVLDGAVAVFDASAGVEAQTLTVWRQADKHNIPRICFLNKMDKTGASFKYAVESIREKLKAKPLLLQLPIGEAKTFKGVVDVVMKEKLLWNCNSNDGKDFERKPLLEMNDPELLKETTEARNALIEQVADLDDEFADLVLEEFSENFDLLPAEKLQTAIHRVTLAQTAVPVLCGSALKNKGIQPLLDAVTMYLPSPEERNYEFLQWYKDDLCALAFKVLHDKQRGPLVFMRIYSGTIKPQLAIHNINGNCTERISRLLLPFADQHVEIPSLTAGNIALTVGLKHTATGDTIVSSKSSALAAARRAEREGEKKHRQNNEAERLLLAGVEIPEPVFFCTIEPPSLSKQPDLEHALKCLQREDPSLKVRLDPDSGQTVLCGMGELHIEIIHDRIKREYGLETYLGPLQVAYRETILNSVRATDTLDRTLGDKRHLVTVEVEARPIETSSVMPVIEFEYAESINEGLLKVSQEAIENGIHSACLQGPLLGSPIQDVAITLHSLTIHPGTSTTMISACVSRCVQKALKKADKQVLEPLMNLEVTVARDYLSPVLADLAQRRGNIQEIQTRQDNKVVIGFVPLAEIMGYSTVLRTLTSGSATFALELSTYQAMNPQDQNTLLNRRSGLT

SEQ ID NO: 33245 - protein, 513 aa, Homo sapiens
  Payload ID: 6537
  Gene Symbol: GFM2
  Gene Name: G elongation factor, mitochondrial 2
  Uniprot ID: Q969S9
  ENSP ID: ENSP00000405808
MLTNLRIFAMSHQTIPSVYINNICCYKIRASLKRLKPHVPLGRNCSSLPGLIGNDIKSLHSIINPPIAKIRNIGIMAHIDAGKTTTTERILYYSGYTRSLGDVDDGDTVTDFMAQERERGITIQSAAVTFDWKGYRVNLIDTPGHVDFTLEVERCLRVLDGAVAVFDASAGVEAQTLTVWRQADKHNIPRICFLNKMDKTGASFKYAVESIREKLKAKPLLLQLPIGEAKTFKGVVDVVMKEKLLWNCNSNDGKDFERKPLLEMNDPELLKETTEARNALIEQVADLDDEFADLVLEEFSENFDLLPAEKLQTAIHRVTLAQTAVPVLCGSALKNKGIQPLLDAVTMYLPSPEERNYEFLQWYKDDLCALAFKVLHDKQRGPLVFMRIYSGTIKPQLAIHNINGNCTERISRLLLPFADQHVEIPSLTAGNIALTVGLKHTATGDTIVSSKSSALAAARRAEREGEKKHRQNNEAERLLLAGVEIPEPVFFCTIEPPSLSKQPGINGLSVSTN

SEQ ID NO: 33246 - protein, 285 aa, Homo sapiens
  Payload ID: 6537
  Gene Symbol: GFM2
  Gene Name: G elongation factor, mitochondrial 2
  ENSP ID: ENSP00000421717
MLTNLRIFAMSHQTIPSVYINNICCYKIRASLKRLKPHVPLGRNCSSLPGLIGNDIKSLHSIINPPIAKIRNIGIMAHIDAGKTTTTERILYYSGYTRSLGGHVDFTLEVERCLRVLDGAVAVFDASAGVEAQTLTVWRQADKHNIPRICFLNKMDKTGASFKYAVESIREKLKAKPLLLQLPIGEAKTFKGVVDVVMKEKLLWNCNSNDGKDFERKPLLEMNDPELLKETTEARNALIEQVADLDDEFADLVLEEFSENFDLLPAEKLQTAIHRVTLAQTAVPV

SEQ ID NO: 33247 - protein, 64 aa, Homo sapiens
  Payload ID: 6537
  Gene Symbol: GFM2
  Gene Name: G elongation factor, mitochondrial 2
  ENSP ID: ENSP00000424877
MAHIDAGKTTTTERILYYSGYTRSLGDVDDGDTVTDFMAQERERGITIQSAAVTFDWKGYRVNL

SEQ ID NO: 33248 - protein, 779 aa, Homo sapiens; identical to SEQ ID NO: 33244
  Payload ID: 6537
  Gene Symbol: GFM2
  Gene Name: G elongation factor, mitochondrial 2
  Uniprot ID: Q969S9
  ENSP ID: ENSP00000427004

SEQ ID NO: 33249 - protein, 315 aa, Homo sapiens
  Payload ID: 6538
  Gene Symbol: GKAP1
  Gene Name: G kinase anchoring protein 1
  Uniprot ID: Q5VSY0
  ENSP ID: ENSP00000365544
MASAVLSSVPTTASRFALLQVDSGSGSDSEPGKGKGRNTGKSQTLGSKSTTNEKKREKRRKKKEQQQSEANELRNLAFKKIPQKSSHAVCNAQHDLPLSNPVQKDSREENWQEWRQRDEQLTSEMFEADLEKALLLSKLEYEEHKKEYEDAENTSTQSKVMNKKDKRKNHQGKDRPLTVSLKDFHSEDHISKKTEEVVLKDGRIERLKLELERKDAEIQKLKNVITQWEAKYKEVKARNAQLLKMLQEGEMKDKAEILLQVDESQSIKNELTIQVTSLHAALEQERSKVKVLQAELAKYQGGRKGKRNSESDQCR

SEQ ID NO: 33250 - protein, 366 aa, Homo sapiens
  Payload ID: 6538
  Gene Symbol: GKAP1
  Gene Name: G kinase anchoring protein 1
  Uniprot ID: Q5VSY0
  ENSP ID: ENSP00000365550
MASAVLSSVPTTASRFALLQVDSGSGSDSEPGKGKGRNTGKSQTLGSKSTTNEKKREKRRKKKEQQQSEANELRNLAFKKIPQKSSHAVCNAQHDLPLSNPVQKDSREENWQEWRQRDEQLTSEMFEADLEKALLLSKLEYEEHKKEYEDAENTSTQSKVMNKKDKRKNHQGKDRPLTVSLKDFHSEDHISKKTEELSSSQTLSHDGGFFNRLEDDVHKILIREKRREQLTEYNGTDNCTAHEHNQEVVLKDGRIERLKLELERKDAEIQKLKNVITQWEAKYKEVKARNAQLLKMLQEGEMKDKAEILLQVDESQSIKNELTIQVTSLHAALEQERSKVKVLQAELAKYQGGRKGKRNSESDQCR

SEQ ID NO: 33251 - protein, 126 aa, Homo sapiens
  Payload ID: 6538
  Gene Symbol: GKAP1
  Gene Name: G kinase anchoring protein 1
  ENSP ID: ENSP00000373434
MASAVLSSVPTTASRFALLQVDSGSGSDSEPGKGKGRNTGKSQTLGSKSTTNEKKREKRRKKKEQQQSEANELRNLAFKKIPQKSSHAVCNAQHDLPLSNPVQKDSREENWQEWRQRDEQMGSRRQ

SEQ ID NO: 33252 - protein, 54 aa, Homo sapiens
  Payload ID: 6538
  Gene Symbol: GKAP1
  Gene Name: G kinase anchoring protein 1
  ENSP ID: ENSP00000417621
MASAVLSSVPTTASRFALLQVDSGSGSDSEPGKGKGRNTGKSQTLGSKSTTNEK

SEQ ID NO: 33253 - protein, 356 aa, Homo sapiens
  Payload ID: 6539
  Gene Symbol: GPANK1
  Gene Name: G patch domain and ankyrin repeats 1
  Uniprot ID: O95872
  ENSP ID: ENSP00000211377
MSRPLLITFTPATDPSDLWKDGQQQPQPEKPESTLDGAAALAFYEALIGDESSAPDSQRSQTEPARERKRKKRRIMKAPAAEAVAEGASGRHGQGRSLEAEDKMTHRILRAAQEGDLPELRRLLEPHEAGGAGGNINARDAFWWTPLMCAARAGQGAAVSYLLGRGAAWVGVCELSGRDAAQLAEEAGFPEVARMVRESHGETRSPENRSPTPSLQYCENCDTHFQDSNHRTSTAHLLSLSQGPQPPNLPLGVPISSPGFKLLLRGGWEPGMGLGPRGEGRANPIPTVLKRDQEGLGYRSAPQPRVTHFPAWDTRAVAGRERPPRVATLSWREERRREEKDRAWERDLRTYMNLEF

SEQ ID NO: 33254 - protein, 356 aa, Homo sapiens
  Payload ID: 6539
  Gene Symbol: GPANK1
  Gene Name: G patch domain and ankyrin repeats 1
  Uniprot ID: O95872
  ENSP ID: ENSP00000365057
MSRPLLITFTPATDPSDLWKDGQQQPQPEKPESTLDGAAARAFYEALIGDESSAPDSQRSQTEPARERKRKKRRIMKAPAAEAVAEGASGRHGQGRSLEAEDKMTHRILRAAQEGDLPELRRLLEPHEAGGAGGNINARDAFWWTPLMCAARAGQGAAVSYLLGRGAAWVGVCELSGRDAAQLAEEAGFPEVARMVRESHGETRSPENRSPTPSLQYCENCDTHFQDSNHRTSTAHLLSLSQGPQPPNLPLGVPISSPGFKLLLRGGWEPGMGLGPRGEGRANPIPTVLKRDQEGLGYRSAPQPRVTHFPAWDTRAVAGRERPPRVATLSWREERRREEKDRAWERDLRTYMNLEF

SEQ ID NO: 33255 - protein, 356 aa, Homo sapiens; identical to SEQ ID NO: 33254
  Payload ID: 6539
  Gene Symbol: GPANK1
  Gene Name: G patch domain and ankyrin repeats 1
  Uniprot ID: O95872
  ENSP ID: ENSP00000365059

SEQ ID NO: 33256 - protein, 356 aa, Homo sapiens; identical to SEQ ID NO: 33254
  Payload ID: 6539
  Gene Symbol: GPANK1
  Gene Name: G patch domain and ankyrin repeats 1
  Uniprot ID: O95872
  ENSP ID: ENSP00000365060

SEQ ID NO: 33257 - protein, 356 aa, Homo sapiens; identical to SEQ ID NO: 33254
  Payload ID: 6539
  Gene Symbol: GPANK1
  Gene Name: G patch domain and ankyrin repeats 1
  Uniprot ID: O95872
  ENSP ID: ENSP00000365065

SEQ ID NO: 33258 - protein, 356 aa, Homo sapiens; identical to SEQ ID NO: 33254
  Payload ID: 6539
  Gene Symbol: GPANK1
  Gene Name: G patch domain and ankyrin repeats 1
  Uniprot ID: O95872
  ENSP ID: ENSP00000365071

SEQ ID NO: 33259 - protein, 356 aa, Homo sapiens; identical to SEQ ID NO: 33253
  Payload ID: 6539
  Gene Symbol: GPANK1
  Gene Name: G patch domain and ankyrin repeats 1
  Uniprot ID: O95872
  ENSP ID: ENSP00000372926

SEQ ID NO: 33260 - protein, 356 aa, Homo sapiens; identical to SEQ ID NO: 33253
  Payload ID: 6539
  Gene Symbol: GPANK1
  Gene Name: G patch domain and ankyrin repeats 1
  Uniprot ID: O95872
  ENSP ID: ENSP00000372928

SEQ ID NO: 33261 - protein, 356 aa, Homo sapiens; identical to SEQ ID NO: 33253
  Payload ID: 6539
  Gene Symbol: GPANK1
  Gene Name: G patch domain and ankyrin repeats 1
  Uniprot ID: O95872
  ENSP ID: ENSP00000382994

SEQ ID NO: 33262 - protein, 356 aa, Homo sapiens; identical to SEQ ID NO: 33253
  Payload ID: 6539
  Gene Symbol: GPANK1
  Gene Name: G patch domain and ankyrin repeats 1
  Uniprot ID: O95872
  ENSP ID: ENSP00000382999

SEQ ID NO: 33263 - protein, 356 aa, Homo sapiens; identical to SEQ ID NO: 33253
  Payload ID: 6539
  Gene Symbol: GPANK1
  Gene Name: G patch domain and ankyrin repeats 1
  Uniprot ID: O95872
  ENSP ID: ENSP00000383005

SEQ ID NO: 33264 - protein, 198 aa, Homo sapiens
  Payload ID: 6539
  Gene Symbol: GPANK1
  Gene Name: G patch domain and ankyrin repeats 1
  ENSP ID: ENSP00000387492
MSRPLLITFTPATDPSDLWKDGQQQPQPEKPESTLDGAAARAFYEALIGDESSAPDSQRSQTEPARERKRKKRRIMKAPAAEAVAEGASGRHGQGRSLEAEDKMTHRILRAAQEGDLPELRRLLEPHEAGGAGGNINARDAFWWTPLMCAARAGQGAAVSYLLGRGAAWVGVCELSGRDAAQLAEEAGFPEVARMVRE

SEQ ID NO: 33265 - protein, 356 aa, Homo sapiens
  Payload ID: 6539
  Gene Symbol: GPANK1
  Gene Name: G patch domain and ankyrin repeats 1
  ENSP ID: ENSP00000388586
MSRPLLITFTPATDPSDLWKDGQQQPQPEKPESTLDGAAARAFYEALIGDESSAPDSQRSQTEPARERKRKKRRIMKAPAAEAVAEGASGRHGQGRSLEAEDKMTHRILRAAQEGDLPELRRLLEPHEAGGAGGNINARDAFWWTPLMCAARAGQGAAVSYLLGRGAAWVGVCELSGRDAAQLAEEAGFPEVARMVRESHGETRSPENRSPTPSLQYCENCDTHFQDSNHRTSTAHLLSLSQGPQPPNLPLGVPISSPGFKLLLRRGWEPGMGLGPRGEGRANPIPTVLKRDQEGLGYRSAPQPRVTHFPAWDTRAVAGRERPPRVATLSWREERRREEKDRAWERDLRTYMNLEF

SEQ ID NO: 33266 - protein, 356 aa, Homo sapiens; identical to SEQ ID NO: 33265
  Payload ID: 6539
  Gene Symbol: GPANK1
  Gene Name: G patch domain and ankyrin repeats 1
  ENSP ID: ENSP00000388687

SEQ ID NO: 33267 - protein, 356 aa, Homo sapiens; identical to SEQ ID NO: 33253
  Payload ID: 6539
  Gene Symbol: GPANK1
  Gene Name: G patch domain and ankyrin repeats 1
  Uniprot ID: O95872
  ENSP ID: ENSP00000389339

SEQ ID NO: 33268 - protein, 356 aa, Homo sapiens; identical to SEQ ID NO: 33265
  Payload ID: 6539
  Gene Symbol: GPANK1
  Gene Name: G patch domain and ankyrin repeats 1
  ENSP ID: ENSP00000390293

SEQ ID NO: 33269 - protein, 356 aa, Homo sapiens; identical to SEQ ID NO: 33254
  Payload ID: 6539
  Gene Symbol: GPANK1
  Gene Name: G patch domain and ankyrin repeats 1
  Uniprot ID: O95872
  ENSP ID: ENSP00000390746

SEQ ID NO: 33270 - protein, 152 aa, Homo sapiens
  Payload ID: 6539
  Gene Symbol: GPANK1
  Gene Name: G patch domain and ankyrin repeats 1
  ENSP ID: ENSP00000391161
MSRPLLITFTPATDPSDLWKDGQQQPQPEKPESTLDGAAARAFYEALIGDESSAPDSQRSQTEPARERKRKKRRIMKAPAAEAVAEGASGRHGQGRSLEAEDKMTHRILRAAQEGDLPELRRLLEPHEAGGAGGNINARDAFWWTPLMCAAR

SEQ ID NO: 33271 - protein, 356 aa, Homo sapiens; identical to SEQ ID NO: 33253
  Payload ID: 6539
  Gene Symbol: GPANK1
  Gene Name: G patch domain and ankyrin repeats 1
  Uniprot ID: O95872
  ENSP ID: ENSP00000391604

SEQ ID NO: 33272 - protein, 89 aa, Homo sapiens
  Payload ID: 6539
  Gene Symbol: GPANK1
  Gene Name: G patch domain and ankyrin repeats 1
  ENSP ID: ENSP00000391754
MSRPLLITFTPATDPSDLWKDGQQQPQPEKPESTLDGAAARAFYEALIGDESSAPDSQRSQTEPARERKRKKRRIMKAPAAEAVAEGAS

SEQ ID NO: 33273 - protein, 107 aa, Homo sapiens
  Payload ID: 6539
  Gene Symbol: GPANK1
  Gene Name: G patch domain and ankyrin repeats 1
  ENSP ID: ENSP00000392449
MSRPLLITFTPATDPSDLWKDGQQQPQPEKPESTLDGAAARAFYEALIGDESSAPDSQRSQTEPARERKRKKRRIMKAPAAEAVAEGASGRHGQGRSLEAEDKMTHR

SEQ ID NO: 33274 - protein, 107 aa, Homo sapiens
  Payload ID: 6539
  Gene Symbol: GPANK1
  Gene Name: G patch domain and ankyrin repeats 1
  ENSP ID: ENSP00000392933
MSRPLLITFTPATDPSDLWKDGQQQPQPEKPESTLDGAAALAFYEALIGDESSAPDSQRSQTEPARERKRKKRRIMKAPAAEAVAEGASGRHGQGRSLEAEDKMTHR

SEQ ID NO: 33275 - protein, 152 aa, Homo sapiens; identical to SEQ ID NO: 33270
  Payload ID: 6539
  Gene Symbol: GPANK1
  Gene Name: G patch domain and ankyrin repeats 1
  ENSP ID: ENSP00000393162

SEQ ID NO: 33276 - protein, 107 aa, Homo sapiens; identical to SEQ ID NO: 33273
  Payload ID: 6539
  Gene Symbol: GPANK1
  Gene Name: G patch domain and ankyrin repeats 1
  ENSP ID: ENSP00000393547

SEQ ID NO: 33277 - protein, 356 aa, Homo sapiens; identical to SEQ ID NO: 33254
  Payload ID: 6539
  Gene Symbol: GPANK1
  Gene Name: G patch domain and ankyrin repeats 1
  Uniprot ID: O95872
  ENSP ID: ENSP00000393567

SEQ ID NO: 33278 - protein, 164 aa, Homo sapiens
  Payload ID: 6539
  Gene Symbol: GPANK1
  Gene Name: G patch domain and ankyrin repeats 1
  ENSP ID: ENSP00000395307
MSRPLLITFTPATDPSDLWKDGQQQPQPEKPESTLDGAAARAFYEALIGDESSAPDSQRSQTEPARERKRKKRRIMKAPAAEAVAEGASGRHGQGRSLEAEDKMTHRILRAAQEGDLPELRRLLEPHEAGGAGGNINARDAFWWTPLMCAARAGQGAAVSYLLG

SEQ ID NO: 33279 - protein, 89 aa, Homo sapiens; identical to SEQ ID NO: 33272
  Payload ID: 6539
  Gene Symbol: GPANK1
  Gene Name: G patch domain and ankyrin repeats 1
  ENSP ID: ENSP00000395484

SEQ ID NO: 33280 - protein, 89 aa, Homo sapiens
  Payload ID: 6539
  Gene Symbol: GPANK1
  Gene Name: G patch domain and ankyrin repeats 1
  ENSP ID: ENSP00000398758
MSRPLLITFTPATDPSDLWKDGQQQPQPEKPESTLDGAAALAFYEALIGDESSAPDSQRSQTEPARERKRKKRRIMKAPAAEAVAEGAS

SEQ ID NO: 33281 - protein, 356 aa, Homo sapiens; identical to SEQ ID NO: 33253
  Payload ID: 6539
  Gene Symbol: GPANK1
  Gene Name: G patch domain and ankyrin repeats 1
  Uniprot ID: O95872
  ENSP ID: ENSP00000398927

SEQ ID NO: 33282 - protein, 356 aa, Homo sapiens; identical to SEQ ID NO: 33254
  Payload ID: 6539
  Gene Symbol: GPANK1
  Gene Name: G patch domain and ankyrin repeats 1
  Uniprot ID: O95872
  ENSP ID: ENSP00000399890

SEQ ID NO: 33283 - protein, 107 aa, Homo sapiens; identical to SEQ ID NO: 33273
  Payload ID: 6539
  Gene Symbol: GPANK1
  Gene Name: G patch domain and ankyrin repeats 1
  ENSP ID: ENSP00000400167

SEQ ID NO: 33284 - protein, 89 aa, Homo sapiens; identical to SEQ ID NO: 33280
  Payload ID: 6539
  Gene Symbol: GPANK1
  Gene Name: G patch domain and ankyrin repeats 1
  ENSP ID: ENSP00000400488

SEQ ID NO: 33285 - protein, 198 aa, Homo sapiens
  Payload ID: 6539
  Gene Symbol: GPANK1
  Gene Name: G patch domain and ankyrin repeats 1
  ENSP ID: ENSP00000400711
MSRPLLITFTPATDPSDLWKDGQQQPQPEKPESTLDGAAALAFYEALIGDESSAPDSQRSQTEPARERKRKKRRIMKAPAAEAVAEGASGRHGQGRSLEAEDKMTHRILRAAQEGDLPELRRLLEPHEAGGAGGNINARDAFWWTPLMCAARAGQGAAVSYLLGRGAAWVGVCELSGRDAAQLAEEAGFPEVARMVRE

SEQ ID NO: 33286 - protein, 356 aa, Homo sapiens; identical to SEQ ID NO: 33253
  Payload ID: 6539
  Gene Symbol: GPANK1
  Gene Name: G patch domain and ankyrin repeats 1
  Uniprot ID: O95872
  ENSP ID: ENSP00000401272

SEQ ID NO: 33287 - protein, 356 aa, Homo sapiens; identical to SEQ ID NO: 33253
  Payload ID: 6539
  Gene Symbol: GPANK1
  Gene Name: G patch domain and ankyrin repeats 1
  Uniprot ID: O95872
  ENSP ID: ENSP00000401276

SEQ ID NO: 33288 - protein, 164 aa, Homo sapiens; identical to SEQ ID NO: 33278
  Payload ID: 6539
  Gene Symbol: GPANK1
  Gene Name: G patch domain and ankyrin repeats 1
  ENSP ID: ENSP00000401352

SEQ ID NO: 33289 - protein, 356 aa, Homo sapiens; identical to SEQ ID NO: 33254
  Payload ID: 6539
  Gene Symbol: GPANK1
  Gene Name: G patch domain and ankyrin repeats 1
  Uniprot ID: O95872
  ENSP ID: ENSP00000401376

SEQ ID NO: 33290 - protein, 164 aa, Homo sapiens; identical to SEQ ID NO: 33278
  Payload ID: 6539
  Gene Symbol: GPANK1
  Gene Name: G patch domain and ankyrin repeats 1
  ENSP ID: ENSP00000402133

SEQ ID NO: 33291 - protein, 107 aa, Homo sapiens; identical to SEQ ID NO: 33274
  Payload ID: 6539
  Gene Symbol: GPANK1
  Gene Name: G patch domain and ankyrin repeats 1
  ENSP ID: ENSP00000403719

SEQ ID NO: 33292 - protein, 356 aa, Homo sapiens; identical to SEQ ID NO: 33253
  Payload ID: 6539
  Gene Symbol: GPANK1
  Gene Name: G patch domain and ankyrin repeats 1
  Uniprot ID: O95872
  ENSP ID: ENSP00000403829

SEQ ID NO: 33293 - protein, 152 aa, Homo sapiens
  Payload ID: 6539
  Gene Symbol: GPANK1
  Gene Name: G patch domain and ankyrin repeats 1
  ENSP ID: ENSP00000404544
MSRPLLITFTPATDPSDLWKDGQQQPQPEKPESTLDGAAALAFYEALIGDESSAPDSQRSQTEPARERKRKKRRIMKAPAAEAVAEGASGRHGQGRSLEAEDKMTHRILRAAQEGDLPELRRLLEPHEAGGAGGNINARDAFWWTPLMCAAR

SEQ ID NO: 33294 - protein, 89 aa, Homo sapiens; identical to SEQ ID NO: 33272
  Payload ID: 6539
  Gene Symbol: GPANK1
  Gene Name: G patch domain and ankyrin repeats 1
  ENSP ID: ENSP00000404929

SEQ ID NO: 33295 - protein, 164 aa, Homo sapiens
  Payload ID: 6539
  Gene Symbol: GPANK1
  Gene Name: G patch domain and ankyrin repeats 1
  ENSP ID: ENSP00000405625
MSRPLLITFTPATDPSDLWKDGQQQPQPEKPESTLDGAAALAFYEALIGDESSAPDSQRSQTEPARERKRKKRRIMKAPAAEAVAEGASGRHGQGRSLEAEDKMTHRILRAAQEGDLPELRRLLEPHEAGGAGGNINARDAFWWTPLMCAARAGQGAAVSYLLG

SEQ ID NO: 33296 - protein, 356 aa, Homo sapiens; identical to SEQ ID NO: 33253
  Payload ID: 6539
  Gene Symbol: GPANK1
  Gene Name: G patch domain and ankyrin repeats 1
  Uniprot ID: O95872
  ENSP ID: ENSP00000406507

SEQ ID NO: 33297 - protein, 107 aa, Homo sapiens; identical to SEQ ID NO: 33274
  Payload ID: 6539
  Gene Symbol: GPANK1
  Gene Name: G patch domain and ankyrin repeats 1
  ENSP ID: ENSP00000406761

SEQ ID NO: 33298 - protein, 356 aa, Homo sapiens; identical to SEQ ID NO: 33253
  Payload ID: 6539
  Gene Symbol: GPANK1
  Gene Name: G patch domain and ankyrin repeats 1
  Uniprot ID: O95872
  ENSP ID: ENSP00000406895

SEQ ID NO: 33299 - protein, 89 aa, Homo sapiens; identical to SEQ ID NO: 33280
  Payload ID: 6539
  Gene Symbol: GPANK1
  Gene Name: G patch domain and ankyrin repeats 1
  ENSP ID: ENSP00000407932

SEQ ID NO: 33300 - protein, 164 aa, Homo sapiens; identical to SEQ ID NO: 33278
  Payload ID: 6539
  Gene Symbol: GPANK1
  Gene Name: G patch domain and ankyrin repeats 1
  ENSP ID: ENSP00000408034

SEQ ID NO: 33301 - protein, 356 aa, Homo sapiens; identical to SEQ ID NO: 33254
  Payload ID: 6539
  Gene Symbol: GPANK1
  Gene Name: G patch domain and ankyrin repeats 1
  Uniprot ID: O95872
  ENSP ID: ENSP00000409206

SEQ ID NO: 33302 - protein, 164 aa, Homo sapiens; identical to SEQ ID NO: 33295
  Payload ID: 6539
  Gene Symbol: GPANK1
  Gene Name: G patch domain and ankyrin repeats 1
  ENSP ID: ENSP00000409320

SEQ ID NO: 33303 - protein, 152 aa, Homo sapiens; identical to SEQ ID NO: 33270
  Payload ID: 6539
  Gene Symbol: GPANK1
  Gene Name: G patch domain and ankyrin repeats 1
  ENSP ID: ENSP00000409349

SEQ ID NO: 33304 - protein, 356 aa, Homo sapiens; identical to SEQ ID NO: 33265
  Payload ID: 6539
  Gene Symbol: GPANK1
  Gene Name: G patch domain and ankyrin repeats 1
  ENSP ID: ENSP00000409855

SEQ ID NO: 33305 - protein, 356 aa, Homo sapiens; identical to SEQ ID NO: 33254
  Payload ID: 6539
  Gene Symbol: GPANK1
  Gene Name: G patch domain and ankyrin repeats 1
  Uniprot ID: O95872
  ENSP ID: ENSP00000410690

SEQ ID NO: 33306 - protein, 356 aa, Homo sapiens; identical to SEQ ID NO: 33254
  Payload ID: 6539
  Gene Symbol: GPANK1
  Gene Name: G patch domain and ankyrin repeats 1
  Uniprot ID: O95872
  ENSP ID: ENSP00000411691

SEQ ID NO: 33307 - protein, 356 aa, Homo sapiens; identical to SEQ ID NO: 33254
  Payload ID: 6539
  Gene Symbol: GPANK1
  Gene Name: G patch domain and ankyrin repeats 1
  Uniprot ID: O95872
  ENSP ID: ENSP00000412321

SEQ ID NO: 33308 - protein, 198 aa, Homo sapiens; identical to SEQ ID NO: 33264
  Payload ID: 6539
  Gene Symbol: GPANK1
  Gene Name: G patch domain and ankyrin repeats 1
  ENSP ID: ENSP00000412339

SEQ ID NO: 33309 - protein, 356 aa, Homo sapiens; identical to SEQ ID NO: 33254
  Payload ID: 6539
  Gene Symbol: GPANK1
  Gene Name: G patch domain and ankyrin repeats 1
  Uniprot ID: O95872
  ENSP ID: ENSP00000412884

SEQ ID NO: 33310 - protein, 198 aa, Homo sapiens; identical to SEQ ID NO: 33264
  Payload ID: 6539
  Gene Symbol: GPANK1
  Gene Name: G patch domain and ankyrin repeats 1
  ENSP ID: ENSP00000413534

SEQ ID NO: 33311 - protein, 152 aa, Homo sapiens; identical to SEQ ID NO: 33270
  Payload ID: 6539
  Gene Symbol: GPANK1
  Gene Name: G patch domain and ankyrin repeats 1
  ENSP ID: ENSP00000413618

SEQ ID NO: 33312 - protein, 356 aa, Homo sapiens; identical to SEQ ID NO: 33253
  Payload ID: 6539
  Gene Symbol: GPANK1
  Gene Name: G patch domain and ankyrin repeats 1
  Uniprot ID: O95872
  ENSP ID: ENSP00000413662

SEQ ID NO: 33313 - protein, 198 aa, Homo sapiens; identical to SEQ ID NO: 33285
  Payload ID: 6539
  Gene Symbol: GPANK1
  Gene Name: G patch domain and ankyrin repeats 1
  ENSP ID: ENSP00000413683

SEQ ID NO: 33314 - protein, 89 aa, Homo sapiens; identical to SEQ ID NO: 33272
  Payload ID: 6539
  Gene Symbol: GPANK1
  Gene Name: G patch domain and ankyrin repeats 1
  ENSP ID: ENSP00000413733

SEQ ID NO: 33315 - protein, 152 aa, Homo sapiens; identical to SEQ ID NO: 33293
  Payload ID: 6539
  Gene Symbol: GPANK1
  Gene Name: G patch domain and ankyrin repeats 1
  ENSP ID: ENSP00000413983

SEQ ID NO: 33316 - protein, 356 aa, Homo sapiens; identical to SEQ ID NO: 33265
  Payload ID: 6539
  Gene Symbol: GPANK1
  Gene Name: G patch domain and ankyrin repeats 1
  ENSP ID: ENSP00000414105

SEQ ID NO: 33317 - protein, 356 aa, Homo sapiens; identical to SEQ ID NO: 33254
  Payload ID: 6539
  Gene Symbol: GPANK1
  Gene Name: G patch domain and ankyrin repeats 1
  Uniprot ID: O95872
  ENSP ID: ENSP00000415855

SEQ ID NO: 33318 - protein, 164 aa, Homo sapiens; identical to SEQ ID NO: 33295
  Payload ID: 6539
  Gene Symbol: GPANK1
  Gene Name: G patch domain and ankyrin repeats 1
  ENSP ID: ENSP00000415884

SEQ ID NO: 33319 - protein, 152 aa, Homo sapiens; identical to SEQ ID NO: 33293
  Payload ID: 6539
  Gene Symbol: GPANK1
  Gene Name: G patch domain and ankyrin repeats 1
  ENSP ID: ENSP00000416056

SEQ ID NO: 33320 - protein, 198 aa, Homo sapiens; identical to SEQ ID NO: 33285
  Payload ID: 6539
  Gene Symbol: GPANK1
  Gene Name: G patch domain and ankyrin repeats 1
  ENSP ID: ENSP00000416184

SEQ ID NO: 33321 - protein, 476 aa, Homo sapiens
  Payload ID: 6540
  Gene Symbol: GPKOW
  Gene Name: G patch domain and KOW motifs
  Uniprot ID: Q92917
  ENSP ID: ENSP00000156109
MADSKEGVLPLTAASTAPISFGFTRTSARRRLADSGDGAGPSPEEKDFLKTVEGRELQSVKPQEAPKELVIPLIQNGHRRQPPARPPGPSTDTGALADGVVSQAVKELIAESKKSLEERENAGVDPTLAIPMIQKGCTPSGEGADSEPRAETVPEEANYEAVPVEAYGLAMLRGMGWKPGEGIGRTFNQVVKPRVNSLRPKGLGLGANLTEAQALTPTGPSRMPRPDEEQEKDKEDQPQGLVPGGAVVVLSGPHRGLYGKVEGLDPDNVRAMVRLAVGSRVVTVSEYYLRPVSQQEFDKNTLDLRQQNGTASSRKTLWNQELYIQQDNSERKRKHLPDRQDGPAAKSEKAAPRSQHWLHRDLRVRFVDNMYKGGQYYNTKMIIEDVLSPDTCVCRTDEGRVLEGLREDMLETLVPKAEGDRVMVVLGPQTGRVGHLLSRDRARSRALVQLPRENQVVELHYDAICQYMGPSDTDDD

SEQ ID NO: 33322 - protein, 931 aa, Homo sapiens
  Payload ID: 6541
  Gene Symbol: GPATCH1
  Gene Name: G patch domain containing 1
  Uniprot ID: Q9BRR8
  ENSP ID: ENSP00000170564
MAARDSDSEEDLVSYGTGLEPLEEGERPKKPIPLQDQTVRDEKGRYKRFHGAFSGGFSAGYFNTVGSKEGWTPSTFVSSRQNRADKSVLGPEDFMDEEDLSEFGIAPKAIVTTDDFASKTKDRIREKARQLAAATAPIPGATLLDDLITPAKLSVGFELLRKMGWKEGQGVGPRVKRRPRRQKPDPGVKIYGCALPPGSSEGSEGEDDDYLPDNVTFAPKDVTPVDFTPKDNVHGLAYKGLDPHQALFGTSGEHFNLFSGGSERAGDLGEIGLNKGRKLGISGQAFGVGALEEEDDDIYATETLSKYDTVLKDEEPGDGLYGWTAPRQYKNQKESEKDLRYVGKILDGFSLASKPLSSKKIYPPPELPRDYRPVHYFRPMVAATSENSHLLQVLSESAGKATPDPGTHSKHQLNASKRAELLGETPIQGSATSVLEFLSQKDKERIKEMKQATDLKAAQLKARSLAQNAQSSRAQLSPAAAAGHCSWNMALGGGTATLKASNFKPFAKDPEKQKRYDEFLVHMKQGQKDALERCLDPSMTEWERGRERDEFARAALLYASSHSTLSSRFTHAKEEDDSDQVEVPRDQENDVGDKQSAVKMKMFGKLTRDTFEWHPDKLLCKRFNVPDPYPDSTLVGLPRVKRDKYSVFNFLTLPETASLPTTQASSEKVSQHRGPDKSRKPSRWDTSKHEKKEDSISEFLSLARSKAEPPKQQSSPLVNKEEEHAPELSANQTVNKDVDAQAEGEGSRPSMDLFRAIFASSSDEKSSSSEDEQGDSEDDQAGSGEANFQSSQDTDLGETSSVAHALVPAPQEPPPSFPIQKMQIDEREEFGPRLPPVFCPNARQTLEVPQKEKHKKNKDKHKAKKEHRRKKEKKKKHRKHKHKGKQKNKKPEKSSSSESSDSSDSQSDEETADVSPQELLRRLKSLPLRRQ

SEQ ID NO: 33323 - protein, 128 aa, Homo sapiens
  Payload ID: 6541
  Gene Symbol: GPATCH1
  Gene Name: G patch domain containing 1
  ENSP ID: ENSP00000467632
MAARDSDSEEDLVSYGTGLEPLEEGERPKKPIPLQDQTVRDEKGRYKRFHGAFSGGFSAGYFNTVGSKEGWTPSTFVSSRQNRADKSVLGPEDFMDEEILESKSMAVHYPLEARKDLRVKMMTTCLIM

SEQ ID NO: 33324 - protein, 156 aa, Homo sapiens
  Payload ID: 6542
  Gene Symbol: GPATCH11
  Gene Name: G patch domain containing 11
  Uniprot ID: Q8N954
  ENSP ID: ENSP00000281932
MSRKSGIGHEASLKRKAEEKLESYRKKIHMKNQAEEKAAEQFRMRLKNKQDEMKLEGDLRRSQRACQQLDVQKNIQVPREAWYWLRLEEETEEDEEEKEQDEDEYKSEDLSVLEKLQILTSYLREEHLYCIWCGTAYEDKEDLSSNCPGPTSADHD

SEQ ID NO: 33325 - protein, 285 aa, Homo sapiens
  Payload ID: 6542
  Gene Symbol: GPATCH11
  Gene Name: G patch domain containing 11
  ENSP ID: ENSP00000386772
MRSARSTALNRGEQRAVRYYSHMKLNMAEEEDYMSDSFINVQEDIRPGLPMLRQIREARRKEEKQQEANLKNRQKSLKEEEQERRDIGLKNALGCENKGFALLQKMGYKSGQALGKSGGGIVEPIPLNIKTGKSGIGHEASLKRKAEEKLESYRKKIHMKNQAEEKAAEQFRMRLKNKQDEMKLEGDLRRSQRACQQLDVQKNIQVPREAWYWLRLEEETEEDEEEKEQDEDEYKSEDLSVLEKLQILTSYLREEHLYCIWCGTAYEDKEDLSSNCPGPTSADHD

SEQ ID NO: 33326 - protein, 376 aa, Homo sapiens
  Payload ID: 6543
  Gene Symbol: GPATCH2
  Gene Name: G patch domain containing 2
  Uniprot ID: Q9NW75
  ENSP ID: ENSP00000355901
MFGAAGRQPIGAPAAGNSWHFSRTMEELVHDLVSALEESSEQARGGFAETGDHSRSISCPLKRQARKRRGRKRRSYNVHHPWETGHCLSEGSDSSLEEPSKDYRENHNNNKKDHSDSDDQMLVAKRRPSSNLNNNVRGKRPLWHESDFAVDNVGNRTLRRRRKVKRMAVDLPQDISNKRTMTQPPEGCRDQDMDSDRAYQYQEFTKNKVKKRKLKIIRQGPKIQDEGVVLESEETNQTNKDKMECEEQKVSDELMSESDSSSLSSTDAGLFTNDEGRQGDDEQSDWFYEKESGGACGITGVVPWWEKEDPTELDKNVPDPVFESILTGSFPLMSHPSRRGFQARLSRLHGMSSKNIKKSGGTPTSMATNWTSEIPL

SEQ ID NO: 33327 - protein, 528 aa, Homo sapiens
  Payload ID: 6543
  Gene Symbol: GPATCH2
  Gene Name: G patch domain containing 2
  Uniprot ID: Q9NW75
  ENSP ID: ENSP00000355902
MFGAAGRQPIGAPAAGNSWHFSRTMEELVHDLVSALEESSEQARGGFAETGDHSRSISCPLKRQARKRRGRKRRSYNVHHPWETGHCLSEGSDSSLEEPSKDYRENHNNNKKDHSDSDDQMLVAKRRPSSNLNNNVRGKRPLWHESDFAVDNVGNRTLRRRRKVKRMAVDLPQDISNKRTMTQPPEGCRDQDMDSDRAYQYQEFTKNKVKKRKLKIIRQGPKIQDEGVVLESEETNQTNKDKMECEEQKVSDELMSESDSSSLSSTDAGLFTNDEGRQGDDEQSDWFYEKESGGACGITGVVPWWEKEDPTELDKNVPDPVFESILTGSFPLMSHPSRRGFQARLSRLHGMSSKNIKKSGGTPTSMVPIPGPVGNKRMVHFSPDSHHHDHWFSPGARTEHDQHQLLRDNRAERGHKKNCSVRTASRQTSMHLGSLCTGDIKRRRKAAPLPGPTTAGFVGENAQPILENNIGNRMLQNMGWTPGSGLGRDGKGISEPIQAMQRPKGLGLGFPLPKSTSATTTPNAGKSA

SEQ ID NO: 33328 - protein, 482 aa, Homo sapiens
  Payload ID: 6544
  Gene Symbol: GPATCH2L
  Gene Name: G patch domain containing 2-like
  Uniprot ID: Q9NWQ4
  ENSP ID: ENSP00000261530
MDELVHDLASALEQTSEQNKLGELWEEMALSPRQQRRQLRKRRGRKRRSDFTHLAEHTCCYSEASESSLDEATKDCREVAPVTNFSDSDDTMVAKRHPALNAIVKSKQHSWHESDSFTENAPCRPLRRRRKVKRVTSEVAASLQQKLKVSDWSYERGCRFKSAKKQRLSRWKENTPWTSSGHGLCESAENRTFLSKTGRKERMECETDEQKQGSDENMSECETSSVCSSSDTGLFTNDEGRQGDDEQSDWFYEGECVPGFTVPNLLPKWAPDHCSEVERMDSGLDKFSDSTFLLPSRPAQRGYHTRLNRLPGAAARCLRKGRRRLVGKETSINTLGTERISHIISDPRQKEKNKALASDFPHISACAHEFNPLSPLYSLDVLADASHRRCSPAHCSARQANVHWGPPCSRDIKRKRKPVATASLSSPSAVHMDAVEPTTPASQAPKSPSSEWLVRTSAAEKATDATTATFFKMPQEKSPGYS

SEQ ID NO: 33329 - protein, 477 aa, Homo sapiens
  Payload ID: 6544
  Gene Symbol: GPATCH2L
  Gene Name: G patch domain containing 2-like
  Uniprot ID: Q9NWQ4
  ENSP ID: ENSP00000323775
MDELVHDLASALEQTSEQNKLGELWEEMALSPRQQRRQLRKRRGRKRRSDFTHLAEHTCCYSEASESSLDEATKDCREVAPVTNFSDSDDTMVAKRHPALNAIVKSKQHSWHESDSFTENAPCRPLRRRRKVKRVTSEVAASLQQKLKVSDWSYERGCRFKSAKKQRLSRWKENTPWTSSGHGLCESAENRTFLSKTGRKERMECETDEQKQGSDENMSECETSSVCSSSDTGLFTNDEGRQGDDEQSDWFYEGECVPGFTVPNLLPKWAPDHCSEVERMDSGLDKFSDSTFLLPSRPAQRGYHTRLNRLPGAAARCLRKGRRRLVGKETSINTLGTERISHIISDPRQKDFWLPSAGKRERNQFNPLSPLYSLDVLADASHRRCSPAHCSARQANVHWGPPCSRDIKRKRKPVATASLSSPSAVHMDAVEPTTPASQAPKSPSSEWLVRTSAAEKATDATTATFFKMPQEKSPGYS

SEQ ID NO: 33330 - protein, 61 aa, Homo sapiens
  Payload ID: 6544
  Gene Symbol: GPATCH2L
  Gene Name: G patch domain containing 2-like
  ENSP ID: ENSP00000450499
MGSSRVLLSLLLELQALRQERILHRHSTASCLMTSFHVQVCAVLPEVFICSFVFVFCIFVA

SEQ ID NO: 33331 - protein, 164 aa, Homo sapiens
  Payload ID: 6544
  Gene Symbol: GPATCH2L
  Gene Name: G patch domain containing 2-like
  ENSP ID: ENSP00000450521
MDELVHDLASALEQTSEQNKLGELWEEMALSPRQQRRQLRKRRGRKRRSDFTHLAEHTCCYSEASESSLDEATKDCREVAPVTNFSDSDDTMVAKRHPALNAIVKSKQHSWHESDSFTENAPCRPLRRRRKENTPWTSSGHGLCESAENRTFLSKTGRKERMEC

SEQ ID NO: 33332 - protein, 351 aa, Homo sapiens
  Payload ID: 6544
  Gene Symbol: GPATCH2L
  Gene Name: G patch domain containing 2-like
  Uniprot ID: Q9NWQ4
  ENSP ID: ENSP00000450657
MDELVHDLASALEQTSEQNKLGELWEEMALSPRQQRRQLRKRRGRKRRSDFTHLAEHTCCYSEASESSLDEATKDCREVAPVTNFSDSDDTMVAKRHPALNAIVKSKQHSWHESDSFTENAPCRPLRRRRKVKRVTSEVAASLQQKLKVSDWSYERGCRFKSAKKQRLSRWKENTPWTSSGHGLCESAENRTFLSKTGRKERMECETDEQKQGSDENMSECETSSVCSSSDTGLFTNDEGRQGDDEQSDWFYEGECVPGFTVPNLLPKWAPDHCSEVERMDSGLDKFSDSTFLLPSRPAQRGYHTRLNRLPGAAARCLRKGRRRLVGKVIPLTVSLAQWGDNIPYGSCVSY

SEQ ID NO: 33333 - protein, 55 aa, Homo sapiens
  Payload ID: 6544
  Gene Symbol: GPATCH2L
  Gene Name: G patch domain containing 2-like
  ENSP ID: ENSP00000451325
MFLPMLLTEGVHQHTALPDRQMYTGDHHVHVTSRGSGNQWPQHLCLAPVQVITCS

SEQ ID NO: 33334 - protein, 351 aa, Homo sapiens; identical to SEQ ID NO: 33332
  Payload ID: 6544
  Gene Symbol: GPATCH2L
  Gene Name: G patch domain containing 2-like
  Uniprot ID: Q9NWQ4
  ENSP ID: ENSP00000451587

SEQ ID NO: 33335 - protein, 31 aa, Homo sapiens
  Payload ID: 6544
  Gene Symbol: GPATCH2L
  Gene Name: G patch domain containing 2-like
  ENSP ID: ENSP00000451827
  MOD_RES (1)..(1): Any amino acid
XSRDIKRKRKPVATASLSSPSAGGRRTAPLP

SEQ ID NO: 33336 - protein, 100 aa, Homo sapiens
  Payload ID: 6544
  Gene Symbol: GPATCH2L
  Gene Name: G patch domain containing 2-like
  ENSP ID: ENSP00000451868
MFLPMLLTEGVHQHTALPDRQMYTGDHHVHVTSRGSGNQWPQHLCLAPVQVITCSYHLLSMYRVPGTKLCVLYTFSCNVCDSVGHFIPTLHGKTETTRNN

SEQ ID NO: 33337 - protein, 365 aa, Homo sapiens
  Payload ID: 6544
  Gene Symbol: GPATCH2L
  Gene Name: G patch domain containing 2-like
  ENSP ID: ENSP00000452180
MDELVHDLASALEQTSEQNKLGELWEEMALSPRQQRRQLRKRRGRKRRSDFTHLAEHTCCYSEASESSLDEATKDCREVAPVTNFSDSDDTMVAKRHPALNAIVKSKQHSWHESDSFTENAPCRPLRRRRKVKRVTSEVAASLQQKLKVSDWSYERGCRFKSAKKQRLSRWKENTPWTSSGHGLCESAENRTFLSKTGRKERMECETDEQKQGSDENMSECETSSVCSSSDTGLFTNDEGRQGDDEQSDWFYEGECVPGFTVPNLLPKWAPDHCSEVERMDSGLDKFSDSTFLLPSRPAQRGYHTRLNRLPGAAARCLRKGRRRLVGKETSINTLGTERISHIISDPRQKDFWLPSAGKRERNQF

SEQ ID NO: 33338 - protein, 106 aa, Homo sapiens
  Payload ID: 6544
  Gene Symbol: GPATCH2L
  Gene Name: G patch domain containing 2-like
  ENSP ID: ENSP00000452294
MDELVHDLASALEQTSEQNKLGELWEEMALSPRQQRRQLRKRRGRKRRSDFTHLAEHTCCYSEASESSLDEATKDCREVAPVTNFSDSDDTMVAKRHPALNAIVKS

SEQ ID NO: 33339 - protein, 477 aa, Homo sapiens; identical to SEQ ID NO: 33329
  Payload ID: 6544
  Gene Symbol: GPATCH2L
  Gene Name: G patch domain containing 2-like
  Uniprot ID: Q9NWQ4
  ENSP ID: ENSP00000480608

SEQ ID NO: 33340 - protein, 525 aa, Homo sapiens
  Payload ID: 6545
  Gene Symbol: GPATCH3
  Gene Name: G patch domain containing 3
  Uniprot ID: Q96I76
  ENSP ID: ENSP00000354645
MAVPGEAEEEATVYLVVSGIPSVLRSAHLRSYFSQFREERGGGFLCFHYRHRPERAPPQAAPNSALIPTDPAAEGQLLSQTSATDVRPLSTRDSTPIQTRTCCCVISVRGLAQAQRLIRMYSGRRWLDSHGTWLPGRCLIRRLRLPTEASGLGSFPFKTRKELQSWKAENEAFTLADLKQLPELNPPVLMPRGNVGTPLRVFLELIRACRLPPRIITQLQLQFPKTGSSRRYGNVPFEYEDSETVEQEELVYTAEGEEIPQGTYLADIPASPCGEPEEEVGKEEEEESHSDEDDDRGEEWERHEALHEDVTGQERTTEQLFEEEIELKWEKGGSGLVFYTDAQFWQEEEGDFDEQTADDWDVDMSVYYDRDGGDKDARDSVQMRLEQRLRDGQEDGSVIERQVGTFERHTKGIGRKVMERQGWAEGQGLGCRCSGVPEALDSDGQHPRCKRGLGYHGEKLQPFGQLKRPRRNGLGLISTIYDEPLPQDQTESLLRRQPPTSMKFRTDMAFVRGSSCASDSPSLPD

SEQ ID NO: 33341 - protein, 76 aa, Homo sapiens
  Payload ID: 6545
  Gene Symbol: GPATCH3
  Gene Name: G patch domain containing 3
  ENSP ID: ENSP00000398563
  MOD_RES (1)..(1): Any amino acid
XFDEQTADDWDVDMSVYYDRDGGDKDARDSVQMRLEQRLRDGQEDGSVIERQVGTFERHTKGIFTKSPLPSPPLGY

SEQ ID NO: 33342 - protein, 128 aa, Homo sapiens
  Payload ID: 6545
  Gene Symbol: GPATCH3
  Gene Name: G patch domain containing 3
  ENSP ID: ENSP00000399036
MRLEQRLRDGQEDGSVIERQVGTFERHTKGIGRKVMERQGWAEGQGLGCRCSGVPEALDSDGQHPRCKRGLGYHGEKLQPFGQLKRPRRNGLGLISTIYDEPLPQDQTESLLRRQPPTSMKFRTDMAF

SEQ ID NO: 33343 - protein, 370 aa, Homo sapiens
  Payload ID: 6546
  Gene Symbol: GPATCH4
  Gene Name: G patch domain containing 4
  ENSP ID: ENSP00000357215
MNVTPEVKSRGMKFAEEQLLKHGWTQGKGLGRKENGITQALRVTLKQDTHGVGHDPAKEFTNHWWNELFNKTAANLVVETGQDGVQIRSLSKETTRYNHPKPNLLYQKFVKMATLTSGGEKPNKDLESCSDDDNQGSKSPKILTDEMLLQACEGRTAHKAARLGITMKAKLARLEAQEQAFLARLKGQDPGAPQLQSESKPPKKKKKKRRQKEEEEATASERNDADEKHPEHAEQNIRKSKKKKRRHQEGKVSDEREGTTKGNEKEDAAGTSGLGELNSREQTNQSLRKGKKKKRWHHEEEKMGVLEEGGKGKEAAGSVRTEEVESRAYADPCSRRKKRQQQEEEDLNLEDRGEETFRWWNQGSREQSMQ

SEQ ID NO: 33344 - protein, 375 aa, Homo sapiens
  Payload ID: 6546
  Gene Symbol: GPATCH4
  Gene Name: G patch domain containing 4
  ENSP ID: ENSP00000396441
MFPRSGPSNDEVKSRGMKFAEEQLLKHGWTQGKGLGRKENGITQALRVTLKQDTHGVGHDPAKEFTNHWWNELFNKTAANLVVETGQDGVQIRSLSKETTRYNHPKPNLLYQKFVKMATLTSGGEKPNKDLESCSDDDNQGSKSPKILTDEMLLQACEGRTAHKAARLGITMKAKLARLEAQEQAFLARLKGQDPGAPQLQSESKPPKKKKKKRRQKEEEEATASERNDADEKHPEHAEQNIRKSKKKKRRHQEGKVSDEREGTTKGNEKEDAAGTSGLGELNSREQTNQSLRKGKKKKRWHHEEEKMGVLEEGGKGKEAAGSVRTEEVESRAYADPCSRRKKRQQQEEEDLNLEDRGEETFRWWNQGSREQSMQ

SEQ ID NO: 33345 - protein, 264 aa, Homo sapiens
  Payload ID: 6546
  Gene Symbol: GPATCH4
  Gene Name: G patch domain containing 4
  ENSP ID: ENSP00000412620
MNVTPEVKSRGMKFAEEQLLKHGWTQGKGLGRKENGITQALRVTLKQDTHGVGHDPAKEFTNHWWNELFNKTAANLVVETGQMATLTSGGEKPNKDLESCSDDDNQGSKSPKILTDEMLLQACEGRTAHKAARLGITMKAKLARLEAQEQAFLARLKGQDPGAPQLQSESKPPKKKKKKRRQKEEEEATASERNDADEKHPEHAEQNIRKSKKKKRRHQEGKVSDEREGTTKGNEKEDAAGTSGLGELNSREQTNQSLRKGKKK

SEQ ID NO: 33346 - protein, 119 aa, Homo sapiens
  Payload ID: 6546
  Gene Symbol: GPATCH4
  Gene Name: G patch domain containing 4
  ENSP ID: ENSP00000436243
MNVTPEVKSRGMKFAEEQLLKHGWTQGKGLGRKENGITQALRVTLKQDTHGVGHDPAKEFTNHWWNELFNKTAANLVVETGQDGVQIRSLSKETTRYNHPKPNLLYQKFVKTAQTLSRN

SEQ ID NO: 33347 - protein, 143 aa, Homo sapiens
  Payload ID: 6546
  Gene Symbol: GPATCH4
  Gene Name: G patch domain containing 4
  ENSP ID: ENSP00000436907
MNVTPEVKSRGMKFAEEQLLKHGWTQGKGLGRKENGITQALRVTLKQDTHGVGHDPAKEFTNHWWNELFNKTAANLVVETGQDGVQIRSLSKETTRYNHPKPNLLYQKFVKWDPVTSLAVAYLDCPDPQQELRSSGSVDPAIC

SEQ ID NO: 33348 - protein, 46 aa, Homo sapiens
  Payload ID: 6547
  Gene Symbol: GPATCH8
  Gene Name: G patch domain containing 8
  ENSP ID: ENSP00000464815
MADRFSRFNEDRDFQGNHFDQYEEGHLEIEQASLDKPIESQLAHIS

SEQ ID NO: 33349 - protein, 221 aa, Homo sapiens
  Payload ID: 6547
  Gene Symbol: GPATCH8
  Gene Name: G patch domain containing 8
  ENSP ID: ENSP00000465781
MADRFSRFNEDRDFQDNIGHRLLQKHGWKLGQGLGKSLQGRTDPIPIVVKYDVMGMGRMEMELDYAEDATERRRVLEVEKEDTEELRQKYKDYVDKEKAIAKALEDLRANFYCELCDKQYQKHQEFDNHINSYDHAHKQRLKDLKQREFARNVSSRSRKDEKKQEKALRRLHELAEQRKQAECAPGSGPMFKPTTVAVDEEGGEDDKDESATNSGTGATAS

SEQ ID NO: 33350 - protein, 46 aa, Homo sapiens; identical to SEQ ID NO: 33348
  Payload ID: 6547
  Gene Symbol: GPATCH8
  Gene Name: G patch domain containing 8
  ENSP ID: ENSP00000467233

SEQ ID NO: 33351 - protein, 1502 aa, Homo sapiens
  Payload ID: 6547
  Gene Symbol: GPATCH8
  Gene Name: G patch domain containing 8
  Uniprot ID: Q9UKJ3
  ENSP ID: ENSP00000467556
MADRFSRFNEDRDFQGNHFDQYEEGHLEIEQASLDKPIESDNIGHRLLQKHGWKLGQGLGKSLQGRTDPIPIVVKYDVMGMGRMEMELDYAEDATERRRVLEVEKEDTEELRQKYKDYVDKEKAIAKALEDLRANFYCELCDKQYQKHQEFDNHINSYDHAHKQRLKDLKQREFARNVSSRSRKDEKKQEKALRRLHELAEQRKQAECAPGSGPMFKPTTVAVDEEGGEDDKDESATNSGTGATASCGLGSEFSTDKGGPFTAVQITNTTGLAQAPGLASQGISFGIKNNLGTPLQKLGVSFSFAKKAPVKLESIASVFKDHAEEGTSEDGTKPDEKSSDQGLQKVGDSDGSSNLDGKKEDEDPQDGGSLASTLSKLKRMKREEGAGATEPEYYHYIPPAHCKVKPNFPFLLFMRASEQMDGDNTTHPKNAPESKKGSSPKPKSCIKAAASQGAEKTVSEVSEQPKETSMTEPSEPGSKAEAKKALGGDVSDQSLESHSQKVSETQMCESNSSKETSLATPAGKESQEGPKHPTGPFFPVLSKDESTALQWPSELLIFTKAEPSISYSCNPLYFDFKLSRNKDARTKGTEKPKDIGSSSKDHLQGLDPGEPNKSKEVGGEKIVRSSGGRMDAPASGSACSGLNKQEPGGSHGSETEDTGRSLPSKKERSGKSHRHKKKKKHKKSSKHKRKHKADTEEKSSKAESGEKSKKRKKRKRKKNKSSAPADSERGPKPEPPGSGSPAPPRRRRRAQDDSQRRSLPAEEGSSGKKDEGGGGSSSQDHGGRKHKGELPPSSCQRRAGTKRSSRSSHRSQPSSGDEDSDDASSHRLHQKSPSQYSEEEEEEDSGSEHSRSRSRSGRRHSSHRSSRRSYSSSSDASSDQSCYSRQRSYSDDSYSDYSDRSRRHSKRSHDSDDSDYASSKHRSKRHKYSSSDDDYSLSCSQSRSRSRSHTRERSRSRGRSRSSSCSRSRSKRRSRSTTAHSWQRSRSYSRDRSRSTRSPSQRSGSRKRSWGHESPEERHSGRRDFIRSKIYRSQSPHYFRSGRGEGPGKKDDGRGDDSKATGPPSQNSNIGTGRGSEGDCSPEDKNSVTAKLLLEKIQSRKVERKPSVSEEVQATPNKAGPKLKDPPQGYFGPKLPPSLGNKPVLPLIGKLPATRKPNKKCEESGLERGEEQEQSETEEGPPGSSDALFGHQFPSEETTGPLLDPPPEESKSGEATADHPVAPLGTPAHSDCYPGDPTISHNYLPDPSDGDTLESLDSSSQPGPVESSLLPIAPDLEHFPSYAPPSGDPSIESTDGAEDASLAPLESQPITFTPEEMEKYSKLQQAAQQHIQQQLLAKQVKAFPASAALAPATPALQPIHIQQPATASATSITTVQHAILQHHAAAAAAAIGIHPHPHPQPLAQVHHIPQPHLTPISLSHLTHSIIPGHPATFLASHPIHIIPASAIHPGPFTFHPVPHAALYPTLLAPRPAAAAATALHLHPLLHPIFSGQDLQHPPSHGT

SEQ ID NO: 33352 - protein, 43 aa, Homo sapiens
  Payload ID: 6547
  Gene Symbol: GPATCH8
  Gene Name: G patch domain containing 8
  Uniprot ID: Q9UKJ3
  ENSP ID: ENSP00000468719
MADRFSRFNEDRDFQGNHFDQYEEGHLEIEQASLDKPIESPSF

SEQ ID NO: 33353 - protein, 46 aa, Homo sapiens; identical to SEQ ID NO: 33348
  Payload ID: 6547
  Gene Symbol: GPATCH8
  Gene Name: G patch domain containing 8
  ENSP ID: ENSP00000468821

SEQ ID NO: 33354 - protein, 491 aa, Homo sapiens
  Payload ID: 6548
  Gene Symbol: GPS1
  Gene Name: G protein pathway suppressor 1
  Uniprot ID: Q13098
  ENSP ID: ENSP00000302873
MPLPVQVFNLQGAVEPMQIDVDPQEDPQNAPDVNYVVENPSLDLEQYAASYSGLMRIERLQFIADHCPTLRVEALKMALSFVQRTFNVDMYEEIHRKLSEATRSSLRELQNAPDAIPESGVEPPALDTAWVEATRKKALLKLEKLDTDLKNYKGNSIKESIRRGHDDLGDHYLDCGDLSNALKCYSRARDYCTSAKHVINMCLNVIKVSVYLQNWSHVLSYVSKAESTPEIAEQRGERDSQTQAILTKLKCAAGLAELAARKYKQAAKCLLLASFDHCDFPELLSPSNVAIYGGLCALATFDRQELQRNVISSSSFKLFLELEPQVRDIIFKFYESKYASCLKMLDEMKDNLLLDMYLAPHVRTLYTQIRNRALIQYFSPYVSADMHRMAAAFNTTVAALEDELTQLILEGLISARVDSHSKILYARDVDQRSTTFEKSLLMGKEFQRRAKAMMLRAAVLRNQIHVKSPPREGSQGELTPANSQSRMSTNM

SEQ ID NO: 33355 - protein, 471 aa, Homo sapiens
  Payload ID: 6548
  Gene Symbol: GPS1
  Gene Name: G protein pathway suppressor 1
  ENSP ID: ENSP00000313569
MQIDVDPQEDPQNAPDVNYVVENPSLDLEQYAASYSGLMRIERLQFIADHCPTLRVEALKMALSFVQRTFNVDMYEEIHRKLSEATRELQNAPDAIPESGVEPPALDTAWVEATRKKALLKLEKLDTDLKNYKGNSIKESIRRGHDDLGDHYLDCGDLSNALKCYSRARDYCTSAKHVINMCLNVIKVSVYLQNWSHVLSYVSKAESTPEIAEQRGERDSQTQAILTKLKCAAGLAELAARKYKQAAKCLLLASFDHCDFPELLSPSNVAIYGGLCALATFDRQELQRNVISSSSFKLFLELEPQVRDIIFKFYESKYASCLKMLDEMKDNLLLDMYLAPHVRTLYTQIRNRALIQYFSPYVSADMHRMAAAFNTTVAALEDELTQLILEGLISARVDSHSKILYARDVDQRSTTFEKSLLMGKEFQRRAKAMMLRAAVLRNQIHVKSPPREGSQGELTPANSQSRMSTNM

SEQ ID NO: 33356 - protein, 527 aa, Homo sapiens
  Payload ID: 6548
  Gene Symbol: GPS1
  Gene Name: G protein pathway suppressor 1
  Uniprot ID: Q13098
  ENSP ID: ENSP00000376167
MRDSSAPSSASSSVTDLYCTPHSSRSDLVLPGTAGDFSLSASLSACTLLYEGAVEPMQIDVDPQEDPQNAPDVNYVVENPSLDLEQYAASYSGLMRIERLQFIADHCPTLRVEALKMALSFVQRTFNVDMYEEIHRKLSEATRELQNAPDAIPESGVEPPALDTAWVEATRKKALLKLEKLDTDLKNYKGNSIKESIRRGHDDLGDHYLDCGDLSNALKCYSRARDYCTSAKHVINMCLNVIKVSVYLQNWSHVLSYVSKAESTPEIAEQRGERDSQTQAILTKLKCAAGLAELAARKYKQAAKCLLLASFDHCDFPELLSPSNVAIYGGLCALATFDRQELQRNVISSSSFKLFLELEPQVRDIIFKFYESKYASCLKMLDEMKDNLLLDMYLAPHVRTLYTQIRNRALIQYFSPYVSADMHRMAAAFNTTVAALEDELTQLILEGLISARVDSHSKILYARDVDQRSTTFEKSLLMGKEFQRRAKAMMLRAAVLRNQIHVKSPPREGSQGELTPANSQSRMSTNM

SEQ ID NO: 33357 - protein, 186 aa, Homo sapiens
  Payload ID: 6548
  Gene Symbol: GPS1
  Gene Name: G protein pathway suppressor 1
  ENSP ID: ENSP00000461965
MPLPVQVFNLQPASSVSGSGGAESQDRMRDSSAPSSASSSVTDLYCTPHSSRSDLVLPGTAGDFSLSASLSACTLLYEGAVEPMQIDVDPQEDPQNAPDVNYVVENPSLDLEQYAASYSGLMRIERLQFIADHCPTLRVEALKMALSFVQRTFNVDMYEEIHRKLSEATRELQNAPDAIPESGVEP

SEQ ID NO: 33358 - protein, 253 aa, Homo sapiens
  Payload ID: 6548
  Gene Symbol: GPS1
  Gene Name: G protein pathway suppressor 1
  ENSP ID: ENSP00000462029
MPLPVQVFNLQQPASSVSGSGGAESQDRMRDSSAPSSASSSVTDLYCTPHSSRSDLVLPGTAGDFSLSASLSACTLLYEGAVEPMQIDVDPQEDPQNAPDVNYVVENPSLDLEQYAASYSGLMRIERLQFIADHCPTLRVEALKMALSFVQRTFNVDMYEEIHRKLSEATRELQNAPDAIPESGVEPPALDTAWVEATRKKALLKLEKLDTDLKNYKGNSIKESIRRGHDDLGDHYLDCGDLSNALKCYSRAR

SEQ ID NO: 33359 - protein, 44 aa, Homo sapiens
  Payload ID: 6548
  Gene Symbol: GPS1
  Gene Name: G protein pathway suppressor 1
  ENSP ID: ENSP00000462213
MPLPVQVFNLQSPGRGARCLAHVAGGRGAHADRRGPPGRPAECT

SEQ ID NO: 33360 - protein, 487 aa, Homo sapiens
  Payload ID: 6548
  Gene Symbol: GPS1
  Gene Name: G protein pathway suppressor 1
  Uniprot ID: Q13098
  ENSP ID: ENSP00000462265
MPLPVQVFNLQGAVEPMQIDVDPQEDPQNAPDVNYVVENPSLDLEQYAASYSGLMRIERLQFIADHCPTLRVEALKMALSFVQRTFNVDMYEEIHRKLSEATRELQNAPDAIPESGVEPPALDTAWVEATRKKALLKLEKLDTDLKNYKGNSIKESIRRGHDDLGDHYLDCGDLSNALKCYSRARDYCTSAKHVINMCLNVIKVSVYLQNWSHVLSYVSKAESTPEIAEQRGERDSQTQAILTKLKCAAGLAELAARKYKQAAKCLLLASFDHCDFPELLSPSNVAIYGGLCALATFDRQELQRNVISSSSFKLFLELEPQVRDIIFKFYESKYASCLKMLDEMKDNLLLDMYLAPHVRTLYTQIRNRALIQYFSPYVSADMHRMAAAFNTTVAALEDELTQLILEGLISARVDSHSKILYARDVDQRSTTFEKSLLMGKEFQRRAKAMMLRAAVLRNQIHVKSPPREGSQGELTPANSQSRMSTNM

SEQ ID NO: 33361 - protein, 44 aa, Homo sapiens; identical to SEQ ID NO: 33359
  Payload ID: 6548
  Gene Symbol: GPS1
  Gene Name: G protein pathway suppressor 1
  ENSP ID: ENSP00000462297

SEQ ID NO: 33362 - protein, 210 aa, Homo sapiens
  Payload ID: 6548
  Gene Symbol: GPS1
  Gene Name: G protein pathway suppressor 1
  ENSP ID: ENSP00000462391
MQIDVDPQEDPQNAPDVNYVVENPSLDLEQYAASYSGLMRIERLQFIADHCPTLRVEALKMALSFVQRTFNVDMYEEIHRKLSEATRELQNAPDAIPESGVEPPALDTAWVEATRKKALLKLEKLDTDLKNYKGNSIKESIRRGHDDLGDHYLDCGDLSNALKCYSRARDYCTSAKHVINMCLNVIKVSVYLQNWSHVLSYVSKAESTPE

SEQ ID NO: 33363 - protein, 93 aa, Homo sapiens
  Payload ID: 6548
  Gene Symbol: GPS1
  Gene Name: G protein pathway suppressor 1
  ENSP ID: ENSP00000462705
MPLPVQVFNLQQPASSVSGSGGAESQDRMRDSSAPSSASSSVTDLYCTPHSSRSDLVLPGTAGDFSLSASLSAWGRGAHADRRGPPGRPAECT

SEQ ID NO: 33364 - protein, 139 aa, Homo sapiens
  Payload ID: 6548
  Gene Symbol: GPS1
  Gene Name: G protein pathway suppressor 1
  ENSP ID: ENSP00000462896
MQIDVDPQEDPQNAPDVNYVVENPSLDLEQYAASYSGLMRIERLQFIADHCPTLRVEALKMALSFVQRTFNVDMYEEIHRKLSEATRELQNAPDAIPESGVEPPALDTAWVEATRKKALLKLEKLDTDLKNYKGNSIKE

SEQ ID NO: 33365 - protein, 168 aa, Homo sapiens
  Payload ID: 6548
  Gene Symbol: GPS1
  Gene Name: G protein pathway suppressor 1
  ENSP ID: ENSP00000463381
MRDSSAPSSASSSVTDLYCTPHSSRSDLVLPGTAGDFSLSASLSACTLLYEGAVEPMQIDVDPQEDPQNAPDVNYVVENPSLDLEQYAASYSGLMRIERLQFIADHCPTLRVEALKMALSFVQRTFNVDMYEEIHRKLSEATRELQNAPDAIPESGVEPPALDTAWVE

SEQ ID NO: 33366 - protein, 166 aa, Homo sapiens
  Payload ID: 6548
  Gene Symbol: GPS1
  Gene Name: G protein pathway suppressor 1
  ENSP ID: ENSP00000463514
MRDSSAPSSASSSVTDLYCTPHSSRSDLVLPGTAGDFSLSASLSACTLLYEGAVEPMQIDVDPQEDPQNAPDVNYVVENPSLDLEQYAASYSGLMRIERLQFIADHCPTLRVEALKMALSFVQRTFNVDMYEEIHRKLSEATRSSLRELQNAPDAIPESGVEPPAL

SEQ ID NO: 33367 - protein, 168 aa, Homo sapiens
  Payload ID: 6548
  Gene Symbol: GPS1
  Gene Name: G protein pathway suppressor 1
  ENSP ID: ENSP00000463690
MQIDVDPQEDPQNAPDVNYVVENPSLDLEQYAASYSGLMRIERLQFIADHCPTLRVEALKMALSFVQRTFNVDMYEEIHRKLSEATRSSLRELQNAPDAIPESGVEPPALDTAWVEATRKKALLKLEKLDTDLKNYKGNSIKESIRRGHDDLGDHYLDCGDLSNALKC

SEQ ID NO: 33368 - protein, 60 aa, Homo sapiens
  Payload ID: 6548
  Gene Symbol: GPS1
  Gene Name: G protein pathway suppressor 1
  ENSP ID: ENSP00000463823
MPLPVQVFNLQVPGPCCRGPWSPCRSTWTPRKTRRMHLTSTTWWRTPAWIWNSTRPATAA

SEQ ID NO: 33369 - protein, 79 aa, Homo sapiens
  Payload ID: 6548
  Gene Symbol: GPS1
  Gene Name: G protein pathway suppressor 1
  ENSP ID: ENSP00000463937
QIRNRALIQYFSPYVSADMHRMAAAFNTTVAALEDELTQLILEGLISARVDSHSKSPPREGSQGELTPANSQSRMSTNM

SEQ ID NO: 33370 - protein, 44 aa, Homo sapiens; identical to SEQ ID NO: 33359
  Payload ID: 6548
  Gene Symbol: GPS1
  Gene Name: G protein pathway suppressor 1
  ENSP ID: ENSP00000464530

SEQ ID NO: 33371 - protein, 101 aa, Homo sapiens
  Payload ID: 6548
  Gene Symbol: GPS1
  Gene Name: G protein pathway suppressor 1
  ENSP ID: ENSP00000464571
MQIDVDPQEDPQNAPDVNYVVENPSLDLEQYAASYSGLMRIERLQFIADHCPTLRVEALKMALSFVQRTFNVDMYEEIHRKLSEATRSSLRELQNAPDAIP

SEQ ID NO: 33372 - protein, 134 aa, Homo sapiens
  Payload ID: 6548
  Gene Symbol: GPS1
  Gene Name: G protein pathway suppressor 1
  ENSP ID: ENSP00000464575
MQIDVDPQEDPQNAPDVNYVVENPSLDLEQYAASYSGLMRIERLQFIADHCPTLRVEALKMALSFVQRTFNVDMYEEIHRKLSEATRELQNAPDAIPESGVEPPALDTAWVEATRKKALLKLEKLDTDLKNYKG

SEQ ID NO: 33373 - protein, 526 aa, Homo sapiens
  Payload ID: 6548
  Gene Symbol: GPS1
  Gene Name: G protein pathway suppressor 1
  ENSP ID: ENSP00000485035
MRDSSAPSSASSSVTDLYCTPHSSRSDLVLPGTAGDFSLSASLSACTLLYEGAVEPMQIDVDPQEDPQNAPDVNYVVENPSLDLEQYAASYSGLMRIERLQFIADHCPTLRVEALKMALSFVQRTFNVDMYEEIHRKLSEATRELQNAPDAIPESGVEPPALDTAWVEATRKKALLKLEKLDTDLKNYKGNSIKESIRRGHDDLGDHYLDCGDLSNALKCYSRARDYCTSAKHVINMCLNVIKVSVYLQNWSHVLSYVSKAESTPEIAERGERDSQTQAILTKLKCAAGLAELAARKYKQAAKCLLLASFDHCDFPELLSPSNVAIYGGLCALATFDRQELQRNVISSSSFKLFLELEPQVRDIIFKFYESKYASCLKMLDEMKDNLLLDMYLAPHVRTLYTQIRNRALIQYFSPYVSADMHRMAAAFNTTVAALEDELTQLILEGLISARVDSHSKILYARDVDQRSTTFEKSLLMGKEFQRRAKAMMLRAAVLRNQIHVKSPPREGSQGELTPANSQSRMSTNM

SEQ ID NO: 33374 - protein, 486 aa, Homo sapiens
  Payload ID: 6548
  Gene Symbol: GPS1
  Gene Name: G protein pathway suppressor 1
  ENSP ID: ENSP00000485330
MPLPVQVFNLQGAVEPMQIDVDPQEDPQNAPDVNYVVENPSLDLEQYAASYSGLMRIERLQFIADHCPTLRVEALKMALSFVQRTFNVDMYEEIHRKLSEATRELQNAPDAIPESGVEPPALDTAWVEATRKKALLKLEKLDTDLKNYKGNSIKESIRRGHDDLGDHYLDCGDLSNALKCYSRARDYCTSAKHVINMCLNVIKVSVYLQNWSHVLSYVSKAESTPEIAERGERDSQTQAILTKLKCAAGLAELAARKYKQAAKCLLLASFDHCDFPELLSPSNVAIYGGLCALATFDRQELQRNVISSSSFKLFLELEPQVRDIIFKFYESKYASCLKMLDEMKDNLLLDMYLAPHVRTLYTQIRNRALIQYFSPYVSADMHRMAAAFNTTVAALEDELTQLILEGLISARVDSHSKILYARDVDQRSTTFEKSLLMGKEFQRRAKAMMLRAAVLRNQIHVKSPPREGSQGELTPANSQSRMSTNM

SEQ ID NO: 33375 - protein, 490 aa, Homo sapiens
  Payload ID: 6548
  Gene Symbol: GPS1
  Gene Name: G protein pathway suppressor 1
  ENSP ID: ENSP00000485641
MPLPVQVFNLQGAVEPMQIDVDPQEDPQNAPDVNYVVENPSLDLEQYAASYSGLMRIERLQFIADHCPTLRVEALKMALSFVQRTFNVDMYEEIHRKLSEATRSSLRELQNAPDAIPESGVEPPALDTAWVEATRKKALLKLEKLDTDLKNYKGNSIKESIRRGHDDLGDHYLDCGDLSNALKCYSRARDYCTSAKHVINMCLNVIKVSVYLQNWSHVLSYVSKAESTPEIAERGERDSQTQAILTKLKCAAGLAELAARKYKQAAKCLLLASFDHCDFPELLSPSNVAIYGGLCALATFDRQELQRNVISSSSFKLFLELEPQVRDIIFKFYESKYASCLKMLDEMKDNLLLDMYLAPHVRTLYTQIRNRALIQYFSPYVSADMHRMAAAFNTTVAALEDELTQLILEGLISARVDSHSKILYARDVDQRSTTFEKSLLMGKEFQRRAKAMMLRAAVLRNQIHVKSPPREGSQGELTPANSQSRMSTNM

SEQ ID NO: 33376 - protein, 327 aa, Homo sapiens
  Payload ID: 6549
  Gene Symbol: GPS2
  Gene Name: G protein pathway suppressor 2
  Uniprot ID: Q13227
  ENSP ID: ENSP00000370104
MPALLERPKLSNAMARALHRHIMMERERKRQEEEEVDKMMEQKMKEEQERRKKKEMEERMSLEETKEQILKLEEKLLALQEEKHQLFLQLKKVLHEEEKRRRKEQSDLTTLTSAAYQQSLTVHTGTHLLSMQGSPGGHNRPGTLMAADRAKQMFGPQVLTTRHYVGSAAAFAGTPEHGQFQGSPGGAYGTAQPPPHYGPTQPAYSPSQQLRAPSAFPAVQYLSQPQPQPYAVHGHFQPTQTGFLQPGGALSLQKQMEHANQQTGFSDSSSLRPMHPQALHPAPGLLASPQLPVQMQPAGKSGFAATSQPGPRLPFIQHSQNPRFYHK

SEQ ID NO: 33377 - protein, 327 aa, Homo sapiens; identical to SEQ ID NO: 33376
  Payload ID: 6549
  Gene Symbol: GPS2
  Gene Name: G protein pathway suppressor 2
  Uniprot ID: Q13227
  ENSP ID: ENSP00000379841

SEQ ID NO: 33378 - protein, 158 aa, Homo sapiens
  Payload ID: 6549
  Gene Symbol: GPS2
  Gene Name: G protein pathway suppressor 2
  ENSP ID: ENSP00000458837
TRHYVGSAAAFAGTPEHGQFQGSPGGAYGTAQPPPHYGPTQPAYSPSQQLRAPSAFPAVQYLSQPQPQPYAVHGHFQPTQTGFLQPGGALSLQKQMEHANQQTGFSDSALHPAPGLLASPQLPVQMQPAGKSGFAATSQPGPRLPFIQHSQNPRFYHK

SEQ ID NO: 33379 - protein, 73 aa, Homo sapiens
  Payload ID: 6549
  Gene Symbol: GPS2
  Gene Name: G protein pathway suppressor 2
  ENSP ID: ENSP00000459357
  MOD_RES (1)..(1): Any amino acid
XLSLQKQMEHANQQTGFSDSSSLRPMHPQALHPAPGLLASPQLPVQMQPAGKVRMVIEFTCQNPYTRDPEKQD

SEQ ID NO: 33380 - protein, 327 aa, Homo sapiens
  Payload ID: 6549
  Gene Symbol: GPS2
  Gene Name: G protein pathway suppressor 2
  ENSP ID: ENSP00000460836
  MOD_RES (1)..(1): Any amino acid
XRPRLRSGSQRQPGAHGPSAHGSTMPALLERPKLSNAMARALHRHIMMERERKRQEEEEVDKMMEQKMKEEQERRKKKEMEERMSLEETKEQILKLEEKLLALQEEKHQLFLQLKKVLHEEEKRRRKEQSDLTTLTSAAYQQSLTVHTGTHLLSMQGSPGGHNRPGTLMAADRAKQMFGPQVLTTRHYVGSAAAFAGTPEHGQFQGSPGGAYGTAQPPPHYGPTQPAYSPSQQLRAPSAFPAVQYLSQPQPQPYAVHGHFQPTQTGFLQPGGALSLQKQMEHANQQTGFSDSSSLRPMHPQALHPAPGLLASPQLPVQMQPAGKTAP

SEQ ID NO: 33381 - protein, 259 aa, Homo sapiens
  Payload ID: 6549
  Gene Symbol: GPS2
  Gene Name: G protein pathway suppressor 2
  ENSP ID: ENSP00000461624
MPALLERPKLSNAMARALHRHIMMERERKRQEEEEVDKMMEQKMKEEQERRKKKEMEERMSLEETKEQILKLEEKLLALQEEKHQLFLQLKKVLHEEEKRRRKEQSDLTTLTSAAYQQSLTVHTGTHLLSMQGSPGGHNRPGTLMAADRAKQMFGPQVLTTRHYVGSAAAFAGTPEHGQFQGSPGGAYGTAQPPPHYGPTQPAYSPSQQLRAPSAFPAVQYLSQPQPQPYAVHGHFQPTQTGFLQPGGALSLQKQMEHA

SEQ ID NO: 33382 - protein, 1008 aa, Homo sapiens
  Payload ID: 6550
  Gene Symbol: GPRIN1
  Gene Name: G protein regulated inducer of neurite outgrowth 1
  Uniprot ID: Q7Z2K8
  ENSP ID: ENSP00000305839
MDTAEDPAWLQLLQKDSSPPGPRPTAFFCPQDGSLGAGSSAMRDYCPSQQKASPAPPRHTPDQSPGMESRHRSPSGAGEGASCSDGPRGSLACPSPTCFSPQESPSKETLEAHGASISGTPEATTSGKPEPVSSVKTEPKSSDDRNPMFLEKMDFKSSKQADSTSIGKEDPGSSRKADPMFTGKAEPEILGKGDPVAPGRMDPMTVRKEDLGSLGKVDPLCSSKTYTVSPRKEDPGSLRKVDPVSSDKVDPVFPRKEEPRYSGKEHPVSSEKVAPTSAEKVDLVLSGKRDPGPSGKADPMPLESMDSASTGKTEPGLLGKLIPGSSGKNGPVSSGTGAPGSLGRLDPTCLGMADPASVGNVETVPATKEDSRFLGKMDPASSGEGRPVSGHTDTTASAKTDLTSLKNVDPMSSGKVDPVSLGKMDPMCSGKPELLSPGQAERVSVGKAGTVSPGKEDPVSSRREDPISAGSRKTSSEKVNPESSGKTNPVSSGPGDPRSLGTAGPPSAVKAEPATGGKGDPLSSEKAGLVASGKAAPTASGKAEPLAVGKEDPVSKGKADAGPSGQGDSVSIGKVVSTPGKTVPVPSGKVDPVSLGKAEAIPEGKVGSLPLEKGSPVTTTKADPRASGKAQPQSGGKAETKLPGQEGAAAPGEAGAVCLKKETPQASEKVDPGSCRKAEPLASGKGEPVSLGKADSAPSRKTESPSLGKVVPLSLEKTKPSSSSRQLDRKALGSARSPEGARGSEGRVEPKAEPVSSTEASSLGQKDLEAAGAERSPCPEAAAPPPGPRTRDNFTKAPSWEASAPPPPREDAGTQAGAQACVSVAVSPMSPQDGAGGSAFSFQAAPRAPSPPSRRDAGLQVSLGAAETRSVATGPMTPQAAAPPAFPEVRVRPGSALAAAVAPPEPAEPVRDVSWDEKGMTWEVYGAAMEVEVLGMAIQKHLERQIEEHGRQGAPAPPPAARAGPGRSGSVRTAPPDGAAKRPPGLFRALLQSVRRPRCCSRAGPTAE

SEQ ID NO: 33383 - protein, 458 aa, Homo sapiens
  Payload ID: 6551
  Gene Symbol: GPRIN2
  Gene Name: G protein regulated inducer of neurite outgrowth 2
  Uniprot ID: O60269
  ENSP ID: ENSP00000363433
MSSSRPEPGPWAPLSPRLQPLSQSSSSLLGEGREQRPELRKTASSTVWQAQLGEASTRPQAPEEEGNPPESMKPARASGPKARPSAGGHWWSSTVGNVSTMGGSDLCRLRAPSAAAMQRSHSDLVRSTQMRGHSGARKASLSCSALGSSPVHRAQLQPGGTSGQGGQAPAGLERDLAPEDETSNSAWMLGASQLSVPPLDLGDTTAHSSSAQAEPKAAEQLATTTCHALPPAALLCGMREVRAGGCCHALPATGILAFPKLVASVSESGLQAQHGVKIHCRLSGGLPGHSHCCAHLWGPAGLVPEPGSRTKDVWTMTSANDLAPAEASPLSAQDAGVQAAPVAACKAVATSPSLEAPAALHVFPEVTLGSSLEEVPSPVRDVRWDAEGMTWEVYGAAVDLEVLGVAIQKHLEMQFEQLQRAPASEDSLSVEGRRGPLRAVMQSLRRPSCCGCSGAAPE

SEQ ID NO: 33384 - protein, 458 aa, Homo sapiens; identical to SEQ ID NO: 33383
  Payload ID: 6551
  Gene Symbol: GPRIN2
  Gene Name: G protein regulated inducer of neurite outgrowth 2
  Uniprot ID: O60269
  ENSP ID: ENSP00000363436

SEQ ID NO: 33385 - protein, 330 aa, Homo sapiens
  Payload ID: 6552
  Gene Symbol: GPBAR1
  Gene Name: G protein-coupled bile acid receptor 1
  Uniprot ID: Q8TDU6
  ENSP ID: ENSP00000428824
MTPNSTGEVPSPIPKGALGLSLALASLIITANLLLALGIAWDRRLRSPPAGCFFLSLLLAGLLTGLALPTLPGLWNQSRRGYWSCLLVYLAPNFSFLSLLANLLLVHGERYMAVLRPLQPPGSIRLALLLTWAGPLLFASLPALGWNHWTPGANCSSQAIFPAPYLYLEVYGLLLPAVGAAAFLSVRVLATAHRQLQDICRLERAVCRDEPSALARALTWRQARAQAGAMLLFGLCWGPYVATLLLSVLAYEQRPPLGPGTLLSLLSLGSASAAAVPVAMGLGDQRYTAPWRAAAQRCLQGLWGRASRDSPGPSIAYHPSSQSSVDLDLN

SEQ ID NO: 33386 - protein, 330 aa, Homo sapiens; identical to SEQ ID NO: 33385
  Payload ID: 6552
  Gene Symbol: GPBAR1
  Gene Name: G protein-coupled bile acid receptor 1
  Uniprot ID: Q8TDU6
  ENSP ID: ENSP00000430202

SEQ ID NO: 33387 - protein, 330 aa, Homo sapiens; identical to SEQ ID NO: 33385
  Payload ID: 6552
  Gene Symbol: GPBAR1
  Gene Name: G protein-coupled bile acid receptor 1
  Uniprot ID: Q8TDU6
  ENSP ID: ENSP00000430698

SEQ ID NO: 33388 - protein, 330 aa, Homo sapiens; identical to SEQ ID NO: 33385
  Payload ID: 6552
  Gene Symbol: GPBAR1
  Gene Name: G protein-coupled bile acid receptor 1
  Uniprot ID: Q8TDU6
  ENSP ID: ENSP00000430886

SEQ ID NO: 33389 - protein, 375 aa, Homo sapiens
  Payload ID: 6553
  Gene Symbol: GPER1
  Gene Name: G protein-coupled estrogen receptor 1
  Uniprot ID: Q99527
  ENSP ID: ENSP00000297469
MDVTSQARGVGLEMYPGTAQPAAPNTTSPELNLSHPLLGTALANGTGELSEHQQYVIGLFLSCLYTIFLFPIGFVGNILILVVNISFREKMTIPDLYFINLAVADLILVADSLIEVFNLHERYYDIAVLCTFMSLFLQVNMYSSVFFLTWMSFDRYIALARAMRCSLFRTKHHARLSCGLIWMASVSATLVPFTAVHLQHTDEACFCFADVREVQWLEVTLGFIVPFAIIGLCYSLIVRVLVRAHRHRGLRPRRQKALRMILAVVLVFFVCWLPENVFISVHLLQRTQPGAAPCKQSFRHAHPLTGHIVNLAAFSNSCLNPLIYSFLGETFRDKLRLYIEQKTNLPALNRFCHAALKAVIPDSTEQSDVRFSSAV

SEQ ID NO: 33390 - protein, 375 aa, Homo sapiens; identical to SEQ ID NO: 33389
  Payload ID: 6553
  Gene Symbol: GPER1
  Gene Name: G protein-coupled estrogen receptor 1
  Uniprot ID: Q99527
  ENSP ID: ENSP00000380277

SEQ ID NO: 33391 - protein, 375 aa, Homo sapiens; identical to SEQ ID NO: 33389
  Payload ID: 6553
  Gene Symbol: GPER1
  Gene Name: G protein-coupled estrogen receptor 1
  Uniprot ID: Q99527
  ENSP ID: ENSP00000380281

SEQ ID NO: 33392 - protein, 375 aa, Homo sapiens; identical to SEQ ID NO: 33389
  Payload ID: 6553
  Gene Symbol: GPER1
  Gene Name: G protein-coupled estrogen receptor 1
  Uniprot ID: Q99527
  ENSP ID: ENSP00000385151

SEQ ID NO: 33393 - protein, 73 aa, Homo sapiens
  Payload ID: 6553
  Gene Symbol: GPER1
  Gene Name: G protein-coupled estrogen receptor 1
  ENSP ID: ENSP00000410487
MDVTSQARGVGLEMYPGTAQPAAPNTTSPELNLSHPLLGTALANGTGELSEHQQYVIGLFLSCLYTIFLFPIG

SEQ ID NO: 33394 - protein, 408 aa, Homo sapiens
  Payload ID: 6553
  Gene Symbol: GPER1
  Gene Name: G protein-coupled estrogen receptor 1
  ENSP ID: ENSP00000479553
MDVTSQARGVGLEMYPGTAQPAAPNTTSPELNLSHPLLGTALANGTGELSEHQQYVIGLFLSCLYTIFLFPIGFVGNILILVVNISFREKMTIPDLYFINLAVADLILVADSLIEVFNLHERYYDIAVLCTFMSLFLQVNMYSSVFFLTWMSFDRYIALARAMRCSLFRTKHHARLSCGLIWMASVSATLVPFTAVHLQHTDEACFCFADVREVQWLEVTLGFIVPFAIIGLCYSLIVRVLVRAHRHRGLRPRRQKALRMILAVVLVFFVCWLPENVFISVHLLQRTQPGAAPCKQSFRHAHPLTHGHVMSLNCGQMWLLAPRGLARVTLAWSPWGCLGNLTTGHLALLTQNCYNPKALAPQGPKASGDQPVTQLLPANPACRCTCLPLQETFLTPSTRKATRRGHCG

SEQ ID NO: 33395 - protein, 176 aa, Homo sapiens
  Payload ID: 6553
  Gene Symbol: GPER1
  Gene Name: G protein-coupled estrogen receptor 1
  ENSP ID: ENSP00000483756
MSLNCGQMWLLAPRGLARVTLAWSPWGCLGNLTTGHLALLTQNCYNPKALAPQGPKASGDQPVTQLLPANPACRCTCLPLQETFLSVLHLPGWQQWRCAASPGPRGAAALGPEQQEGPSVERPPSAPGWFSHCLLTSTWQLHSCGLGPCELPCGLVGCQDNEILQHLWLTNLFLQK

SEQ ID NO: 33396 - protein, 355 aa, Homo sapiens
  Payload ID: 6554
  Gene Symbol: GPR1
  Gene Name: G protein-coupled receptor 1
  Uniprot ID: P46091
  ENSP ID: ENSP00000384345
MEDLEETLFEEFENYSYDLDYYSLESDLEEKVQLGVVHWVSLVLYCLAFVLGIPGNAIVIWFTGFKWKKTVTTLWFLNLAIADFIFLLFLPLYISYVAMNFHWPFGIWLCKANSFTAQLNMFASVFFLTVISLDHYIHLIHPVLSHRHRTLKNSLIVIIFIWLLASLIGGPALYFRDTVEFNNHTLCYNNFQKHDPDLTLIRHHVLTWVKFIIGYLFPLLTMSICYLCLIFKVKKRSILISSRHFWTILVVVVAFVVCWTPYHLFSIWELTIHHNSYSHHVMQAGIPLSTGLAFLNSCLNPILYVLISKKFQARFRSSVAEILKYTLWEVSCSGTVSEQLRNSETKNLCLLETAQ

SEQ ID NO: 33397 - protein, 178 aa, Homo sapiens
  Payload ID: 6554
  Gene Symbol: GPR1
  Gene Name: G protein-coupled receptor 1
  ENSP ID: ENSP00000391146
MEDLEETLFEEFENYSYDLDYYSLESDLEEKVQLGVVHWVSLVLYCLAFVLGIPGNAIVIWFTGFKWKKTVTTLWFLNLAIADFIFLLFLPLYISYVAMNFHWPFGIWLCKANSFTAQLNMFASVFFLTVISLDHYIHLIHPVLSHRHRTLKNSLIVIIFIWLLASLIGGPALYFRDT

SEQ ID NO: 33398 - protein, 355 aa, Homo sapiens; identical to SEQ ID NO: 33396
  Payload ID: 6554
  Gene Symbol: GPR1
  Gene Name: G protein-coupled receptor 1
  Uniprot ID: P46091
  ENSP ID: ENSP00000397535

SEQ ID NO: 33399 - protein, 73 aa, Homo sapiens
  Payload ID: 6554
  Gene Symbol: GPR1
  Gene Name: G protein-coupled receptor 1
  ENSP ID: ENSP00000404861
MEDLEETLFEEFENYSYDLDYYSLESDLEEKVQLGVVHWVSLVLYCLAFVLGIPGNAIVIWFTGFKWKKTVTT

SEQ ID NO: 33400 - protein, 82 aa, Homo sapiens
  Payload ID: 6554
  Gene Symbol: GPR1
  Gene Name: G protein-coupled receptor 1
  ENSP ID: ENSP00000409577
MEDLEETLFEEFENYSYDLDYYSLESDLEEKVQLGVVHWVSLVLYCLAFVLGIPGNAIVIWFTGFKWKKTVTTLWFLNLAIA

SEQ ID NO: 33401 - protein, 137 aa, Homo sapiens
  Payload ID: 6554
  Gene Symbol: GPR1
  Gene Name: G protein-coupled receptor 1
  ENSP ID: ENSP00000414524
MEDLEETLFEEFENYSYDLDYYSLESDLEEKVQLGVVHWVSLVLYCLAFVLGIPGNAIVIWFTGFKWKKTVTTLWFLNLAIADFIFLLFLPLYISYVAMNFHWPFGIWLCKANSFTAQLNMFASVFFLTVISLDHYI

SEQ ID NO: 33402 - protein, 227 aa, Homo sapiens
  Payload ID: 6554
  Gene Symbol: GPR1
  Gene Name: G protein-coupled receptor 1
  ENSP ID: ENSP00000414836
MEDLEETLFEEFENYSYDLDYYSLESDLEEKVQLGVVHWVSLVLYCLAFVLGIPGNAIVIWFTGFKWKKTVTTLWFLNLAIADFIFLLFLPLYISYVAMNFHWPFGIWLCKANSFTAQLNMFASVFFLTVISLDHYIHLIHPVLSHRHRTLKNSLIVIIFIWLLASLIGGPALYFRDTVEFNNHTLCYNNFQKHDPDLTLIRHHVLTWVKFIIGYLFPLLTMSICYL

SEQ ID NO: 33403 - protein, 19 aa, Homo sapiens
  Payload ID: 6554
  Gene Symbol: GPR1
  Gene Name: G protein-coupled receptor 1
  ENSP ID: ENSP00000416474
MEDLEETLFEEFENYSYDL

SEQ ID NO: 33404 - protein, 355 aa, Homo sapiens; identical to SEQ ID NO: 33396
  Payload ID: 6554
  Gene Symbol: GPR1
  Gene Name: G protein-coupled receptor 1
  Uniprot ID: P46091
  ENSP ID: ENSP00000480405

SEQ ID NO: 33405 - protein, 355 aa, Homo sapiens; identical to SEQ ID NO: 33396
  Payload ID: 6554
  Gene Symbol: GPR1
  Gene Name: G protein-coupled receptor 1
  Uniprot ID: P46091
  ENSP ID: ENSP00000483003

SEQ ID NO: 33406 - protein, 508 aa, Homo sapiens
  Payload ID: 6555
  Gene Symbol: GPR101
  Gene Name: G protein-coupled receptor 101
  Uniprot ID: Q96P66
  ENSP ID: ENSP00000298110
MTSTCTNSTRESNSSHTCMPLSKMPISLAHGIIRSTVLVIFLAASFVGNIVLALVLQRKPQLLQVTNRFIFNLLVTDLLQISLVAPWVVATSVPLFWPLNSHFCTALVSLTHLFAFASVNTIVVVSVDRYLSIIHPLSYPSKMTQRRGYLLLYGTWIVAILQSTPPLYGWGQAAFDERNALCSMIWGASPSYTILSVVSFIVIPLIVMIACYSVVFCAARRQHALLYNVKRHSLEVRVKDCVENEDEEGAEKKEEFQDESEFRRQHEGEVKAKEGRMEAKDGSLKAKEGSTGTSESSVEARGSEEVRESSTVASDGSMEGKEGSTKVEENSMKADKGRTEVNQCSIDLGEDDMEFGEDDINFSEDDVEAVNIPESLPPSRRNSNSNPPLPRCYQCKAAKVIFIIIFSYVLSLGPYCFLAVLAVWVDVETQVPQWVITIIIWLFFLQCCIHPYVYGYMHKTIKKEIQDMLKKFFCKEKPPKEDSHPDLPGTEGGTEGKIVPSYDSATFP

SEQ ID NO: 33407 - protein, 552 aa, Homo sapiens
  Payload ID: 6556
  Gene Symbol: GPR107
  Gene Name: G protein-coupled receptor 107
  Uniprot ID: Q5VW38
  ENSP ID: ENSP00000336988
MAALAPVGSPASRGPRLAAGLRLLPMLGLLQLLAEPGLGRVHHLALKDDVRHKVHLNTFGFFKDGYMVVNVSSLSLNEPEDKDVTIGFSLDRTKNDGFSSYLDEDVNYCILKKQSVSVTLLILDISRSEVRVKSPPEAGTQLPKIIFSRDEKVLGQSQEPNVNPASAGNQTQKTQDGGKSKRSTVDSKAMGEKSFSVHNNGGAVSFQFFFNISTDDQEGLYSLYFHKCLGKELPSDKFTFSLDIEITEKNPDSYLSAGEIPLPKLYISMAFFFFLSGTIWIHILRKRRNDVFKIHWLMAALPFTKSLSLVFHAIDYHYISSQGFPIEGWAVVYYITHLLKGALLFITIALIGTGWAFIKHILSDKDKKIFMIVIPLQVLANVAYIIIESTEEGTTEYGLWKDSLFLVDLLCCGAILFPVVWSIRHLQEASATDGKAAINLAKLKLFRHYYVLIVCYIYFTRIIAFLLKLAVPFQWKWLYQLLDETATLVFFVLTGYKFRPASDNPYLQLSQEEEDLEMESVVTTSGVMESMKKVKKVTNGSVEPQGEWEGAV

SEQ ID NO: 33408 - protein, 600 aa, Homo sapiens
  Payload ID: 6556
  Gene Symbol: GPR107
  Gene Name: G protein-coupled receptor 107
  Uniprot ID: Q5VW38
  ENSP ID: ENSP00000361483
MAALAPVGSPASRGPRLAAGLRLLPMLGLLQLLAEPGLGRVHHLALKDDVRHKVHLNTFGFFKDGYMVVNVSSLSLNEPEDKDVTIGFSLDRTKNDGFSSYLDEDVNYCILKKQSVSVTLLILDISRSEVRVKSPPEAGTQLPKIIFSRDEKVLGQSQEPNVNPASAGNQTQKTQDGGKSKRSTVDSKAMGEKSFSVHNNGGAVSFQFFFNISTDDQEGLYSLYFHKCLGKELPSDKFTFSLDIEITEKNPDSYLSAGEIPLPKLYISMAFFFFLSGTIWIHILRKRRNDVFKIHWLMAALPFTKSLSLVFHAIDYHYISSQGFPIEGWAVVYYITHLLKGALLFITIALIGTGWAFIKHILSDKDKKIFMIVIPLQVLANVAYIIIESTEEGTTEYGLWKDSLFLVDLLCCGAILFPVVWSIRHLQEASATDGKGDSMGPLQQRANLRAGSRIESHHFAQADLELLASSCPPASVSQRAGITAAINLAKLKLFRHYYVLIVCYIYFTRIIAFLLKLAVPFQWKWLYQLLDETATLVFFVLTGYKFRPASDNPYLQLSQEEEDLEMESVVTTSGVMESMKKVKKVTNGSVEPQGEWEGAV

SEQ ID NO: 33409 - protein, 571 aa, Homo sapiens
  Payload ID: 6556
  Gene Symbol: GPR107
  Gene Name: G protein-coupled receptor 107
  ENSP ID: ENSP00000361487
MAALAPVGSPASRGPRLAAGLRLLPMLGLLQLLAEPGLGRVHHLALKDDVRHKVHLNTFGFFKDGYMVVNVSSLSLNEPEDKDVTIGFSLDRTKNDGFSSYLDEDVNYCILKKQSVSVTLLILDISRSEVRVKSPPEAGTQLPKIIFSRDEKVLGQSQEPNVNPASAGNQTQKTQDGGKSKRSTVDSKAMGEKSFSVHNNGGAVSFQFFFNISTDDQEGLYSLYFHKCLGKELPSDKFTFSLDIEITEKNPDSYLSAGEIPLPKLYISMAFFFFLSGTIWIHILRKRRNDVFKIHWLMAALPFTKSLSLVFHAIDYHYISSQGFPIEGWAVVYYITHLLKGALLFITIALIGTGWAFIKHILSDKDKKIFMIVIPLQVLANVAYIIIESTEEGTTEYGLWKDSLFLVDLLCCGAILFPVVWSIRHLQEASATDGKGDSMGPLQQRANLRAGSRIAAINLAKLKLFRHYYVLIVCYIYFTRIIAFLLKLAVPFQWKWLYQLLDETATLVFFVLTGYKFRPASDNPYLQLSQEEEDLEMESVVTTSGVMESMKKVKKVTNGSVEPQGEWEGAV

SEQ ID NO: 33410 - protein, 128 aa, Homo sapiens
  Payload ID: 6556
  Gene Symbol: GPR107
  Gene Name: G protein-coupled receptor 107
  ENSP ID: ENSP00000475772
MAALAPVGSPASRGPRLAAGLRLLPMLGLLQLLAEPGLGRVHHLALKDDVRHKVHLNTFGFFKDGYMVVNVSSLSLNEPEDKDVTIGFSLDRTKNDGFSSYLDEDVNYCILKKQSVSVTLLILDISRR

SEQ ID NO: 33411 - protein, 600 aa, Homo sapiens; identical to SEQ ID NO: 33408
  Payload ID: 6556
  Gene Symbol: GPR107
  Gene Name: G protein-coupled receptor 107
  Uniprot ID: Q5VW38
  ENSP ID: ENSP00000483750

SEQ ID NO: 33412 - protein, 543 aa, Homo sapiens
  Payload ID: 6557
  Gene Symbol: GPR108
  Gene Name: G protein-coupled receptor 108
  Uniprot ID: Q9NPR9
  ENSP ID: ENSP00000264080
MAVSERRGLGRGSPAEWGQRLLLVLLLGGCSGRIHQLALTGEKRADIQLNSFGFYTNGSLEVELSVLRLGLREAEEKSLLVGFSLSRVRSGRVRSYSTRDFQDCPLQKNSSSFLVLFLINTKDLQVQVRKYGEQKTLFIFPGLLPEAPSKPGLPKPQATVPRKVDGGGTSAASKPKSTPAVIQGPSGKDKDLVLGLSHLNNSYNFSFHVVIGSQAEEGQYSLNFHNCNNSVPGKEHPFDITVMIREKNPDGFLSAAEMPLFKLYMVMSACFLAAGIFWVSILCRNTYSVFKIHWLMAALAFTKSISLLFHSINYYFINSQGHPIEGLAVMYYIAHLLKGALLFITIALIGSGWAFIKYVLSDKEKKVFGIVIPMQVLANVAYIIIESREEGASDYVLWKEILFLVDLICCGAILFPVVWSIRHLQDASGTDGKVAVNLAKLKLFRHYYVMVICYVYFTRIIAILLQVAVPFQWQWLYQLLVEGSTLAFFVLTGYKFQPTGNNPYLQLPQEDEEDVQMEQVMTDSGFREGLSKVNKTASGRELL

SEQ ID NO: 33413 - protein, 301 aa, Homo sapiens
  Payload ID: 6557
  Gene Symbol: GPR108
  Gene Name: G protein-coupled receptor 108
  ENSP ID: ENSP00000401284
MIREKNPDGFLSAAEMPLFKLYMVMSACFLAAGIFWVSILCRNTYSVFKIHWLMAALAFTKSISLLFHSINYYFINSQGHPIEGLAVMYYIAHLLKGALLFITIALIGSGWAFIKYVLSDKEKKVFGIVIPMQVLANVAYIIIESREEGASDYVLWKEILFLVDLICCGAILFPVVWSIRHLQDASGTDGKVAVNLAKLKLFRHYYVMVICYVYFTRIIAILLQVAVPFQWQWLYQLLVEGSTLAFFVLTGYKFQPTGNNPYLQLPQEDEEDVQMEQVMTDSGFREGLSKVNKTASGRELL

SEQ ID NO: 33414 - protein, 224 aa, Homo sapiens
  Payload ID: 6557
  Gene Symbol: GPR108
  Gene Name: G protein-coupled receptor 108
  ENSP ID: ENSP00000469797
  MOD_RES (1)..(1): Any amino acid
XAVSERRGLGRGSPAEWGQRLLLVLLLGGCSGRIHQLALTGEKRADIQLNSFGFYTNGSLEVELSVLRLGLREAEEKSLLTRDFQDCPLQKNSSSFLVLFLINTKDLQVQVRKYGEQKTLFIFPGLLPEAPSKPGLPKPQATVPRKVDGGGTSAASKPKSTPAVIQGPSGKDKDLVLGLSHLNNSYNFSFHVVIGSQAEEGQYSLNFHNCNNSVPGKEHPFDIT

SEQ ID NO: 33415 - protein, 36 aa, Homo sapiens
  Payload ID: 6557
  Gene Symbol: GPR108
  Gene Name: G protein-coupled receptor 108
  ENSP ID: ENSP00000470197
MIREKNPDGFLSAAEMPLFKLYMVMSACFLAAGIFW

SEQ ID NO: 33416 - protein, 177 aa, Homo sapiens
  Payload ID: 6557
  Gene Symbol: GPR108
  Gene Name: G protein-coupled receptor 108
  ENSP ID: ENSP00000470823
SGWAFIKYVLSDKEKKVFGIVIPMQVLANVAYIIIESREEGASDYVLWKEILFLVDLICCGAILFPVVWSIRHLQDASGTDGKVAVNLAKLKLFRHYYVMVAVPFQWQWLYQLLVEGSTLAFFVLTGYKFQPTGNNPYLQLPQEDEEDVQMEQVMTDSGFREGLSKVNKTASGRELL

SEQ ID NO: 33417 - protein, 103 aa, Homo sapiens
  Payload ID: 6557
  Gene Symbol: GPR108
  Gene Name: G protein-coupled receptor 108
  ENSP ID: ENSP00000470844
  MOD_RES (1)..(1): Any amino acid
XVLLLGGCSGRIHQLALTGEKRADIQLNSFGFYTNGSLEVELSVLRLGLREAEEKSLLVGFSLSRVRSGRVRSYSTRDFQDCPLQKNSSSFLVLFLINTKDLQ

SEQ ID NO: 33418 - protein, 331 aa, Homo sapiens
  Payload ID: 6557
  Gene Symbol: GPR108
  Gene Name: G protein-coupled receptor 108
  ENSP ID: ENSP00000471846
  MOD_RES (1)..(1): Any amino acid
XRGLGRGSPAEWGQRLLLVLLLGGCSGRIHQLALTGEKRADIQLNSFGFYTNGSLEVELSVLRLGLREAEEKSLLVGFSLSRVRSGRVRSYSTRDFQDCPLQKNSSSFLVLFLINTKDLQVQVRKYGEQKTLFIFPGLLPEAPSKPGLPKPQATVPRKVDGGGTSAASKPKSTPAVIQGPSGKDKDLVLGLSHLNNSYNFSFHVVIGSQAEEGQYSLNFHNCNNSVPGKEHPFDITVMIREKNPDGFLSAAEMPLFKLYMVMSACFLAAGIFWVSILCRNTYSVFKIHWLMAALAFTKSISLLFHSINYYFINSQGHPIEGLAVMYYIAHL

SEQ ID NO: 33419 - protein, 145 aa, Homo sapiens
  Payload ID: 6557
  Gene Symbol: GPR108
  Gene Name: G protein-coupled receptor 108
  ENSP ID: ENSP00000472048
  MOD_RES (1)..(1): Any amino acid
XPAEWGQRLLLVLLLGGCSGRIHQLALTGEKRADIQLNSFGFYTNGSLEVELSVLRLGLREAEEKSLLVGFSLSRVRSGRVRSYSGPGAEVWRAEDVVYLSRAPPGSTLQTRAPEATGHSPPQGGWRRDLCSQQAQVNTRSDSGS

SEQ ID NO: 33420 - protein, 167 aa, Homo sapiens
  Payload ID: 6557
  Gene Symbol: GPR108
  Gene Name: G protein-coupled receptor 108
  ENSP ID: ENSP00000472496
CCGAILFPVVWSIRHLQDASGTDGKVAVNLAKLKLFRHYYVMVICYVYFTRIIAILLQVAVPFQWQWLYQLLVEGSTLAFFVLTGYKFQPTGNNPYLQLPQEDEEDVQMEQVVCGEVEGVHVDQAPSSPGPRFPDKPIWKKSPFLPPNIGQPCPYPGTTPPFQLCVQ

SEQ ID NO: 33421 - protein, 194 aa, Homo sapiens
  Payload ID: 6557
  Gene Symbol: GPR108
  Gene Name: G protein-coupled receptor 108
  ENSP ID: ENSP00000473228
  MOD_RES (1)..(1): Any amino acid
XDDPGEEPRWLPVGSGDAPFQALHGHVRLLPGRWHLLGVHPLQEHINYYFINSQGHPIEGLAVMYYIAHLLKGALLFITIALIGSGWAFIKYVLSDKEKKVFGIVIPMQVLANVAYIIIESREEGASDYVLWKEILFLVDLICCGAILFPVVWSIRHLQDASGTDGKVAVNLAKLKLFRHYYVMVICYVYFTRI

SEQ ID NO: 33422 - protein, 335 aa, Homo sapiens
  Payload ID: 6558
  Gene Symbol: GPR119
  Gene Name: G protein-coupled receptor 119
  Uniprot ID: Q8TDV5
  ENSP ID: ENSP00000276218
MESSFSFGVILAVLASLIIATNTLVAVAVLLLIHKNDGVSLCFTLNLAVADTLIGVAISGLLTDQLSSPSRPTQKTLCSLRMAFVTSSAAASVLTVMLITFDRYLAIKQPFRYLKIMSGFVAGACIAGLWLVSYLIGFLPLGIPMFQQTAYKGQCSFFAVFHPHFVLTLSCVGFFPAMLLFVFFYCDMLKIASMHSQQIRKMEHAGAMAGGYRSPRTPSDFKALRTVSVLIGSFALSWTPFLITGIVQVACQECHLYLVLERYLWLLGVGNSLLNPLIYAYWQKEVRLQLYHMALGVKKVLTSFLLFLSARNCGPERPRESSCHIVTISSSEFDG
